United States Patent Application Publication US 2019/0348154 A1 - sequence listing, part 98

SEQ ID NO: 365620 - DNA, 1059 bp, Pseudomonas aeruginosa
gtgcttgctgaaatattagatgacgaaaacctgatcgatcaaatggtcgaaggtcaatgggccttgatgaccacggaagagggaggtgacatcttgattaagtccgatgagtctagcgtgatttatgacgtatgctccgtgattcaggttgttatggggctgctatctaaaagagagacggttacggtaaatagaagcggaaggaggagcttaacgccgcttgggcgaaagactcttgagtgcctgcgaattgattttacttgccttgcagtgaaattctcagctgaagcttttaatccgtatgtctctgcatttgcaagggccatagaacgcttgcggagcgatgatgctttttggggggtgtctgcatatcccaacaatttggtaatggacgacgcaatgaagacctttcagattctaaaagatgagattttgggggctgatgacggcgctgcattaaaaaacaccctgagaaattccgagcgtaatgcgagaaagaatttagcaggactgaacttatatgtggatgccttgcttgacaggtattcgagattagtagtcgtgagggttgatttaagatacaagatcgggagttttaatcggaagaaaggttctggtgatattgcaaggagtgattttaataacttcttgaggtttgtgaagggtaaacgctttggtaaagacgtttgtggatatgtctggaagttggagtatgggccgctccagggctggcattatcatttcttactgttcttgaatggggcaaggcatagagaagatgtctcgatagctaaggagcttggagacgcgtgggtggaaattactcaaagcaaaggatgctattttaactgcaatgctaggaaagaaaaatataataagcccgctttgggggtggttagttggcgcgattttgacaaggttcagaatcttaagatggcggcgggctatcttgcaaaatctgacctgcttatacgccctaatctggctggctgcgaaagggcgttaggaaagggccggatgcctaaaagtcattctgggaaaggtcggcctagactgtga

SEQ ID NO: 365621 - DNA, 183 bp, Pseudomonas aeruginosa
atgcacctgcacctgcacctgcacctgcacctgcacctgcacctgcacctgcacctgcacctgcacctgcacctgcacctgcacctgcacctgcacctgcacctgcacctgcacctgaccataaggagacagaatgaaagtctcaagtcctattgtgagatgcgttgcaaaaagctctattga

SEQ ID NO: 365622 - DNA, 774 bp, Pseudomonas aeruginosa
atgaaagtctcaagtcctattgtgagatgcgttgcaaaaagctctattgactttgacgcgattcaagaattcttagattctgaaaaaatggtgtggcaaagaacaactgactctaaaagcagcgatgacttagtcgaattttcagggcgaatttgctatatgtcttttggtcaacgtcaatcgcctagaagcaatcaggaatacatactcaacctcattgatagcgggcatggcagtgtgctcgaacatgcaagttggactttcatcgtatcaggtgtatcacggggttttacccatcaacttgtgcgacatcgtgctggcttttcatatagtcagctttcacagcagtattacgacgagtctgacgcggactttgttgcgcctccatctctaaaaaaagattctcctttatataaaaaatggcttgatgcaatgcattcttcagtcgagctatatagagaactcatcgcgagcgcaaagaaattatctataagcaacagcttttccaacaaagaaaagttacgagaactcagaacaactgcaagatcaattctcccaaatgccattgaaacaaaattagtattcacggcaaacgccagagcactgaggcacttcctaattacgagaggggcaatcgagggtgactgggagatgcgggatgtgtcaactcagatcctaaaaatcgtcaaacaagacgcaccttcgcttttccaagactttgaaacaataaaattaagcgacggaagcagttctgtcataaaaaagactacatag

SEQ ID NO: 365623 - DNA, 1059 bp, Pseudomonas aeruginosa
atgattttggtcgctaaagcgggattcgtctctaagcttgatatcgacagcctcgtgcccctgtctcattctattgttgataacatgagcttcttgtcggagccattaactcatgagccgcttagtaactggttcagtgataaatccgcacgattgcttagagaaatcgaaacgagaataaatcaaacattggtttcgcactcgacctatctatcattagacaatgctgagtcgttagaaaaactaacacccctagcatcgtttttctaccttgctcttttcagggttacccgacgcctaacacaggaatttgttgcctctaatccaacctggattaaggttcctaaagatgactctagcaagaagcaattaacaggcacacaagtcatcagtcttttcctaaaagaggttgagaccctgcgtgaccagcatcacttcataagctcaagtgactttgacacaaagcgtataaagctgaagctttccaacgcagagaaccttccccttgagaaggctagcgtagatgcggttattacatcaccgccttattgcacgcgaatagattatgcagttgccacttatgtcgagcttgcagtcctgcgtattggcggagaaagatttttacaactgcgccgctcactgacaggaagctctacagttggaaagaccagcggggaaattaagcatgaatggggtaatgaatgttctgcctttctgaatgcattgatgaatcatccatccaaagcttcaagcacttattatcttaaaaaccatgtacagtattttgagtcgctttacaagtcgctcagcgagactagcagagttttgaaaccttctgccccgtgcgttcttgtcgtacagaattcttattataaagaaatcaggaatgacatagcaaaaatcatttgccaaatgtccgagagcttatcactcaaacctacgcaccgagcggattttaacgcaacccgctcaatggtagacttgaataaaaattcaaagaaatatattggaaagcgctccaccatcgagagcgttcttttttttgaaaaggcactttga

SEQ ID NO: 365624 - DNA, 699 bp, Pseudomonas aeruginosa
atgacgatatgtagctttgttcgggacggctttaaccaaagacttggagaagcacgcgagctgtttgctaggataaagctagaagagccgcaagaaggcctgccaagcccgccaacagctttgtcgctaactttgcgaggcatggtatacgtttcgttgtacggtacgcttgaatacactatcacccaaggagtgcaatgctttattaaccatttatccggactgagtgttagtacaaaacatctagagcactcgctaaattccattgccatgaattctcaattaacatcagtgcgtgatagcggggagaagaagaagtgggaagcgaggagggctcttttcagtgcaatggagtctcaggatgcatgtgtgatctcggatactgtatttggtacttttctgcacaacgtttatcccaagacagtattggaaatatttttatgcttgggtattgaaaagcctgcaaccgcaaatgaaagtgaggttggatatttcaaggagataacagaaaagcgcaatgctgtagcgcacgggcgtgagtctgcaagcgaagccggaagtggcctcactattcaggatgtagaattgagaatgaacgtcgtatacagcgtatgttcttattttttggatgtgattgaggagcatgcgttggaactaaaatttgtgaagcctcgatatagatctaactatcgaaattga

SEQ ID NO: 365625 - DNA, 1047 bp, Pseudomonas aeruginosa
gtgccgcttacgtcaaagcaaattagtcaaattcagagtcagttagagagcaagcgcaaaaccgtatcttttgatagttatgatttgtcggtaagacaaatcctcgatatggttgaatcggatgccatttttgtaccgccggagtatcagcgtcaattcatctgggagcctgaacgacaatctgttctcatcgagtcggtattcctcggtatacctgttcctagtctttttatggccactaatccggattccacttgggaggtggttgatggagtacagcggctgggctcgttaagccacttcgttggtacggcagcactgttggaaagaataaaacgagatagtccgctggtcattaagggtgtagataaacttaatcatctagatggggtgaaatttgacgacctgccgaaatcaatacagcttcacttcttgacaaggccagtgcgggtaacggttctaaatgatcgaagtgatctagcggtaaggtttgacctgtttgagcgtcttaacacaggaggtgtttcgctaacggctcaagaaattcgaaactgtgtttatcgggggccattcaacgaagatattaaagctcttgcttctctggatacgttccgcagtgtagtcagggtcaaagacagtaaaggggcgaatggcacgtatgaagagctggttttgcgattcttcgcctatctggatggctatgataagttcaaccatctcgttaaagacttccttaacgattacatgaacaagcgtcgaaatgtgaaggtaactgctgctgagaaggcagttttcgagcaaactatggatttacttcacgcagcgttccctaacggaatatctcgaggaagaacggttactccagtgaacctctatgaggcttttgctgttggtgtggctttagccttgcgtcaaggaacggcagttgactcgaataagctaccgcctttgattgatgacaaaacgttaaaaacgtatacgggcgctggatctaatcagcggaagtatgttgtgggtcgaattgaatttgtgcgtgacgcgctatga

SEQ ID NO: 365626 - DNA, 153 bp, Pseudomonas aeruginosa
atgcgccgatttggttttctgctggccgtcttgacgctggccattttcctgagtgccctgcttgcccccaggccgtccctcgtcaaccgagcggcggcgcagcacatggggcatccgatcaccagcatcggcgaggtcttcagggggtactaa

SEQ ID NO: 365627 - DNA, 912 bp, Pseudomonas aeruginosa
gtgcgcgaacaaaataatgatgaaagcttcgagttcgatgtgtccgtggtcgggctcggtgccatgggaacgatcatggcgcacgcgttgctcaagcaaggcaaacgcgtggcggtctggaaccgctcacccgccaaggccgcggcgctcgtcgccgccggcgctcacctgtgcgacagcgccgaagccgcgctggttgcaagccctgccacgatcttcgtgctcctggacgaccacgcgacccacgaggtgctcgggatgccaggtgtgatgcatgcactggccaatcgcacgatcgtcgactacaccaccaacgcccaggacgagggcctggcgcttcagggcctcgtcaaccgggcaggcggccattacgtcaaagggatgatcgtggcctaccctcgcaacgtcggccatcgcgagagccacagcattcataccggtgatcgtgaagccttcgagcagcacagggcgctgcttgaaaggctcgccgggcatacggtgttccttccctgggacgaagcactggcctttgcgaccgtgcttcacgcccatgcgttcgccgcgatagttgcgttcttcgaggccgtgggcgcgggcgagcggtttggcctgccggtttcgaagacggccaggctcctgctcgacacctcacgctttttcgtcgccgacgccctggaggaagcgacacgccgactcgaaacacaggacttcgcaggcgatcaggcgaggctcgatgtgcatgcgcacgccttcgcgcacattgcccagtccctgcaggtacaaggggcctggacgccggtcttcgacgcggtgtgccaggtcgtgcagcgcgcggaatcgatgggttatggcgaccaggacatcgtggccgccacccaggtgttcgcctgcgagaaggacgcaagggaatag

SEQ ID NO: 365628 - DNA, 1380 bp, Pseudomonas aeruginosa
atgagcaacgtcacttcaaccgcccagaatgacctggcttcattcatccaccccaacaccaacctggcgcagcaccaggaagtcgggcccttcgtgatcgccggcggcgatggcgtgcgggtcttcgatgagcaaggcaacgcctacatcgaggcgatgtcggggctgtggagcgttgccttgggcttcagtgaacagcgcctggtcgacgccgccgtcgaacagttcaggcaactgccctactaccacagcttcagccacaagaccaatgccccggcggcagcgctcgccgccaagctggccgagctggcgccgggcgacctgaaccacgtgttcttcaccaactcaggctccgaagccaacgactcgatggtgaagatggtctggtacgtgaacaacgcgctgggcaaaccgcacaagaagacgttcatctctcgccagcaggcctaccacggcgccaccgtcgccgccgggagcctgaccggcatcccctcgattcatcgcgacttcgacctgccggccatcccggttcatcacctgacgtgcccgaacttctaccggtttgcccggcctggagaaacgcaggaagccttttcggcccgcctggcgaacgaactggagcgctacatcctcgcgcaagggccggaaaccattgccgccttcatcggagaaccggtgatcgcagcgggcggcgtgatccctcctcccaccggctactgggcggcgatccaggccgtgtgcaagcgctacgacatcctcgtggtgatcgatgagatcgtcaccggtttcggcaggctgggcacgatgttcggggctcagctgtacgacatccagcccgacatcatggtgctctccaagcaactcacctcgtcctaccagccgctggcggccgtggtggtgtccgatgccatcaacgatgtgctggtgagccagagccagcgcctgggcgcattcgcccacggcctgacctgcacgggccaccctgtcgccaccgcggttgcgctggaaaacatccgcatcatcgaagagcgcgacctggttggccatgtgcagcacctggcccctgtgttccagcgccacctgcgcgcgttcgaagaccacccgctggtgggcaacgtccgaggcgtcgggctgatgggcgggatcgaactggtcgcggacaaggccaccggccaaccgttcgcccaaccaggtgcactgggtggctacgtgttcaaacaggcccacaagcacggcctgatcattcgcgccatctacgacacgatcgcgttctgcccgccgttgatcaccacgcaggacgataccgaagcgatcttcagcgccttcgagcgcacgttggctgacgcgacgggctgggcgcgatcgcagaacctgctgtga

SEQ ID NO: 365629 - DNA, 1920 bp, Pseudomonas aeruginosa
atgacagcagttctcgttgaattacaggatttggaccatctggcgcagctcgtccccgacctgagttttgacgacaaggagcgacaagatgcgctgcttgagaacggctccaaggacttcaatgcagtccctggaagcgggaagacttccctgcttgcggctaagctcctgctgcttgcgaagaagtggccccattctcataagggcatctgcattctgagccatacgaatgtagctcgcgaggaaattacgcgccggttagctaagtcggtagaaggttctaggttgttggcctatccacacttcattggcactattcacggcttcgtaaaccagtttttggcgatggctgtactgcgctgccaggggctcaaagtcgacctaatcgacgacgatgttttcgcgaagaaagcgtggtcgcttgctatgactaggcgctatgggacattgcgcgcttggctcgacaggcagtccaacgcggaggagttggttagtacgctctattaccggggctctacgttcgacgtcgtttcagaaaaggggaaactaccgagcgcaggcaccgccacataccaacaggcggttgctctgaaaaaagcgctcgcggatgaaggtgtctttcgacatcgcgacatgttcgcctatgcggagcttgcgatcactgaccacccacaccttttggacgttgtgcatcggcgcttcccgatggtcttcattgatgagatgcaggatacctcatgggagcaagaagacatcctgaatcgtcttttcgatgatcgctcggtagtgcagcgcttcggtgatgtcgatcagaaaatcatttccggagacccggattccaacaaagcgacttttccacgcaatggtcatggcacggtcagtaccagtaaacgcttcggaaaacgtatagcagaggcggtagcgagcgttcgcatcagccaactgcctgtcgtaggagaggcagcggatgtttgcagcccggctctgctgctctacaaaacttcaaacaccaaccaggtcgtctaccgctttggcgagctcgttctcgaccgcttcgctgacgctgagctgacgaatttcgccgtccgagcgatgtgcgctcgtcgaagtggacaaggaaatgtggatcctggccgccatttgggagactactggccagcttttgaacgagcgcagcagttgtcctccccagagaacctgcacgtactcttccaaggccagcctacctggcgccaacggcccacattggttgagcgcgttaccgaagtgcgacgaggggtgttgctggcactgcgagccgcaaaggcgccggtggcggagggagttcgcgatgcccgtgcactacttcgtgcagtgaaggagcaattcggcgatgcagtgccgttgcaggcgctaatccgcgagttgtcattgagctactcctccccagtctcatttggtgatcaagcagcgctcgcctcaaagatgtatgcgtatttggctcatcttctcccaccccaaatgacattggaggcgtttactggactccaactcttcagccaacctgcgatggacgacgaacatgctgatggtgagcttccgacggtttgtaccgttgcgcattctggtcgtgagctggtgtatagactgggtactgtcgccggcatgaaaggggaaacacatattgcttcgctagtgctggagtcatacggtggcactagtcgccgcttcgacctgcagatggcgcttccgtttatcgcaggcatcggcaagaagttcgacaagctcacagtcacccagcaggcacagatgcgaaatctctacgtagcaatgtccagaccaactcaatttctgtgtctggctactaacgagtctcgtgtggatgctcaaacacttgctgcgttggtggccaagggctgggatattgattacgtgacttaa

SEQ ID NO: 365630 - DNA, 1971 bp, Pseudomonas aeruginosa
atgtatttgaagcgcatccgagcacataactttcgtgcgtttggcgacggcactacagcgcccgaactggactgggagctgaatcccggcctgaacatcttggttggtgagaacgatgctgggaagacagggatagtagaggctatccgccaggtcctgctcactactagttacgagagcgtccggctctatgagcaggatttccatatccatggggctgaaagggctgaaagcctcttcatcgaggccacgctgagcggtctttccaaggagcaggaaggggctgtgctggagtggttgacgcttgaggcggatgatacctgctcactcattgttcacctccacggtaagttcttccccgcgcagtcttcgaagcgggctcgtgtggaaatcattgtgcgtgcaggtaaggacggcatcggaccagaaattggctatgcagttcgagagctcattcgcgcaacctacctgcgtccgttgcgtgatgcggaggcggagcttcggccagggcgccagtcccgtctctcgcaaatccttgctgctcacaacgatatttctgggcaagaggtcaacgatttctccaagactgcccctgacgcggtgccaagtaacttggtcgggcttatggccttcgctcagcaccatcttggcgagcataaggttatcaagggagtacaagaggacatcaacaaaaactaccttggccagttctcattcacgggtgatcagttggagtcgagaattcgaatcgcccctgatctgtccctgacaccaattctggaaaagtttgagttggcgctcctgcctggcggttcggtgcatccggacgagcgttgtgctcggggcctgggttacaacaatgccctttttatggctaccgagctggttctacttcgtgacggcgatgaactcgctttgcttctggtagaggagcctgaggcgcatttgcacccacagctccaagatcgggtcatggagctactgaagcagcactccaaagagccagccagcggggagcggcgtgtgcaagtagtgatgactacacacagcccgtccttggtctcgggcgcagacattgagacgatgacgatggtgcacaaaagccagacgtatccgctagcgtccgggcacacgaagctgaagaagaccgactattcgtttttgcagcgctttattgatgctacgaaggccaacctgttttttgctcgtggcgtgatgatggtcgaagggccggctgaggcgattcttattcctacgctcgcggaagcgtgcggccggtcgttttcgaggcacggcgtttccattgtgaatgttggaaacgtcggtctgtaccactacgcacgtatcctgcagcgccagatccctaatcctgagtacccagtcccggttgtctgtctcaccgaccgtgacatcgttcctgatgtcgccgattacgtgaaaaagccaggcaaaggtaagcgattcgatgccgactacgatgctgctgaggtggccgacgtcgttcagcggaagaaaaaccgagcccagggagggaataccatcgtctgcgtatcggatcgatggaccctggagtacgaccttgcgctgagcggctgtgcggaggtgatgcacattgcaatctccttggccgagattgctaagagcaaagacgagagcctcagtgatgaggatgagacgcttgccaaggccgcggccatcgagtcatgggggaaacttcaggcagccaatcatacagcggagaagctggcatccatcgtctatcagcccctttatgagaaaaaggcttccaaggccattgctgcgcaatacgccgcccagttgctggcatctggagactatgggaagggtgaggagcttttccagaagctgcctccgtacctccagaacgcactctctcatttgactacgccatcggtcgcaaaaacggccgcggcggctgaagccggagcaaatgaaggaacactcgcatga

SEQ ID NO: 365631 - DNA, 1515 bp, Pseudomonas aeruginosa
atgtttaatagtcgtttcaaaattactacaggtgagctttggcgtatgagtccagaggtctttaacgagtggagggcgaaaaacgacattcctgagctgtttggatatttgcagttgacgctaccaagatttaaggaatggttggattgcatcaaggttgatgtgcaagttttgtataggactttaaatatcggtcagatctttcatggtggggaaaagatcttggttcggcgggtggagacacatcgtaaagataaaatttggtgtgtagaggctgcagagtttggccgtcacccatggatagatagagatatacatataccaggtgcggagcacataataagaaatatttctgaaagcagattcatcccatattttccgtggataaaaagtgttacaggcgaagagcggccaattgtatatgatcagttaaaccatcagcgagctgatgatttttgcatcgggcattggcgaggaaggcctccggagtcccaggcaatactgtactttgggttcccattactaaaaatgggaaattattccttgccctcaggaaccgttctggccgatagaaatttggatttcttagatctggatgacttagtgtttggcgaggatgtgtattctcagtcgcagagcgatataagctattcatctataaagcgactggtgttcaaaggagcatcccagcatgcttatgccttctacaagtgctggtttgaagatactcggatttctgataaatcatacctgcaagattttcaatttgagaattgtgaggtcggtgcatggtatgcagaatcctctacaattatgaacgttagttttgatcgctgtagagtgttgccgtttattagtgactgtgatctcaaatcgaaaataacgttcagccccggtgctgagcaattcgataatggtgagcaggcgtatcgtctattgaggattgcttaccaagcaaggggtatgcaaaaagaagcttctgaatattattatcaagagcagatcagtcacagaaaaaactcttacgcgccatacggtgaaaaagaggtagtagaggttcttgaacgtcggccaagtcgatggggactgcccaaaactttcaagggtgcggcgaaatattgtcgactactgatgatgtggtatatagctgtattttctagttggggaaagctatccttctatattggactgaaatttcgttgggtggtttcttggatcgataatgtcttgtgggggtatggtgaaaggcctggaaggatctttacctgctcgttggtcacagtgctgttctactcagtcctatattattctctgagtggtgatattgctggtcagggagtgaagggttactttgattgtttgtatttttccctggtaacatttacaacgctcggatatggcgatatatatccaggctctccgttggcaaagattttatgtggtagtgaggcgctgttgggcgcttttatgatagggctcgtcgtagcggggttctctaacagatcaaggtattga

SEQ ID NO: 365632 - DNA, 549 bp, Pseudomonas aeruginosa
atgagtaagcaagcggttgtcgtagtcgatctgcagaacgagtacctgcccaccggcaagctggcgttggtaggtgtagagcaggcggtagccaatgcggcccggatcatcggcgccgctcgaaatcatggcgacctcgtcgtccacatccgtcatgaattcgttacgccgggcgttcctttcttcgtgccaggcacggaaggcgtcgagatcatcgaagcagttgctcccaaggacggggagccggtgatcctgaaaaactatccgaactcgttcctgaagaccgatctccaaaaagttctggctgacaatggcatacagaaactgactgtcattggcgcaatgagtcacatgtgcatcgatgctaccactcgagctgcatccgatctgggttatgaggtgaccgtcgttgacgatgcctgtgctactcgagatttagaattccgtgatcaggtcgtaccggcagctcaagtacatgcgacactgatgtccgctctgggcttcgcttatgcgacgattctgactacccaggaatatctcaggaagtag

SEQ ID NO: 365633 - DNA, 978 bp, Pseudomonas aeruginosa
atgagtgacttcgagaccattgagatagggattgtcgcttaccagaattcgcaggaatcagcagtcctggggctgactgatctgctgagggtggccgggcgaatcgccgcatctcacacgaattcaggtatcgctccctttcgcctcactcactggaaaatgagttcaccgttctcgctaccagggcgagtattcgatacagctccgtcgtcagatgtagcgctagctgcagtcatccttcctccaacgttggaacctccaattgaatcgagcgcggcacagccatggtctcattggctacgtgagtgccatgccgacggcgcgatcttgggctctgtctgtgcaggtgcgtttcttcttgctgagtcaggactgctctctaaacgcaaagcgactactcactgggcttatgcagagcaattccagcaacgattccctgatgtttatctcgatacggatcagctggtaatagacgatggagatatcatcactgccggtggtgccatggcgtggactgacatggggttacgtctgattgatcgtttccttggcccgtcagtgatgatcgaaacagcccaaatgcttttgatcgatccgcctggccgtgagcagcggtattacagcgtattctctccaaggctgactcacggagacggagcgatacttagggttcagcattggcttcaggcaaccgctgccaaagacatttccttgtcagatctagctgcccgagcacgcctgggtgagagaacatttctgcgccggtttcagaaggcgacgggaatgaccacgatggaatattgccagcgcttgcgaattggcaacgctcgacggctactacagttcagcgtcatgcctatagaacgtgtggcatgggatgtcgggtacagcgaccccaaagcatttcgaaaggtgtttcaacgaattgttggattgtctccaggagactatcgaagcaggttcagtccgcttcgataa

SEQ ID NO: 365634 - DNA, 417 bp, Pseudomonas aeruginosa
atgagcactatcgctgaaacagctatggcattttttgaggtttgcgagtcaggtaagggctggagtgaatgtcggcactattgccatgacgatgccgcattcaacgtgcaggctgagtcgcttgaggccttgaaaacagtcgaagcctatagtgactcgatgccgcacctgatcgaaattctgccggacgctcgttacgagctgatcagtgtggcgaccgatgagaagcgtcaaaccgtcatcgcatttgcccggttctgcggcacccataccggacttaatgaacctgtatcagccacaggtaaacctgtggtatcggactacgcgttcgtcatgcgtatgaaggaaggcaaagtggccgaagtgacaaaggtctggaacgacagccacgctgccaaacagctgggctgggcttaa

SEQ ID NO: 365635 - DNA, 1428 bp, Pseudomonas aeruginosa
atgggagaggttgagaaacaaaaactaaaagggtcgcttggcgtaacccccatcgtaatgatggtcgtagccactgctgcccccctgacagtgatggttgccaacacaccactgatggtatcgatgggcaacggtatcgccgcgcctgtggatgcattcatcgcaaccgtgatcatgtttctcttcacggtaggcttcgtagcgatgtccaagtacatcaccaacgcaggagctttctacgccttcatacaaaaagggctgggacggtcggtcggcttggggtctgcaacactcgcagtagtctcgtatgcgctgatcctagtcgcgcttcaaggctacatcggctacacggctgccgctgtgatgaacgacttcctggaattgacagtgccttggtgggtttactcactcgctgcggtagccgtaatcgcgtacctgggttaccgagatattgagttgagctcaaaatttctcggtatcgctctggtattagaaattgccgtcgtcatcttggtcgacatggcggtgatcctcgataaaggcccaatgggtttggagagtgcttctttccatctcgacaacatcatttccggctccccagggctgggcatccttttcgccattttcagttttattggctttgaatccaccgtgatctaccgcgaggaagcgaaggatccggatcggactattccccgagccacctacacagctgttctgctcgtgggtgcgttctatgtgatttccatgtggtgcgcagtcagctcaatcggtagcagcaatattgctgcattttccgaagcccatggcgccgatatgtaccttgccgtcaccgaacactatttcggcgtggtcttcatggatgtgatgcatgtgctgctaatcactagcctgttcgcctgcgctctctcactgcataacatcgtggtgcgctacaagtatacgctaggacggtttggtgtcctgagtgatcgcttttctagcgtccatcccgaacacggctcccctcacgtttcctcattcgtgctctcgctgttcagcctcattgcgtttgcacttttgatcgccattggtgccgaccctgcgagtcagatttacgcctggggcgctatggctggaacactgggttacatggccatcctctcccttacctgcgctgcagtggtggtgttcttccgccgtgagaagtctgccggccaggtctggaaaaccttaatcgcgccctctgccggcttgctaggaattctgggatgcctttgggtcgccatatccaatctgcctgacctgattggtggcgacagcgccaaaacagtttcgatcttcgttgtctcgtttctcctggccacctttgcctttggcttctgggtcgcagaacggttccgtacccgccatcccgttcgctacgaggcactacgccagttggcgtaa

SEQ ID NO: 365636 - DNA, 1050 bp, Pseudomonas aeruginosa
atgctccgaagctcatccccccacgatgcttcacaaccttcaactgtgatgggagcagtggtatcgggcctcgcctccttcctacgtcagcagggcgcagagccagaggacattctcgaacgctccgcgatcaacccggatgtgctaggtgaccccaatcagcacatttcattgcctgcaatcctgaaggccatcgatacggcggcattgttgacggagaatgacaatttcgggctttggttgggcaaccagtatcgccccgagaacttgggcctatggggctacatcgggctttcgtctgcgaccctcggcgaggctttgctgaacatgagccgttttttcccggaattccaaagtcgtagctcgctccaactcagtcaccatcaaggtaaggttcgtcttgagtacggattactagatggcagcatcgtcaatcgtcgccatgatgcggagatgactttgggaaatgtcttcaatgtgatgcgtcgggcattaggtgagcggtgggcgccactggaggttcacttcactcatggccgacctgattgctggcaagatcaccaaagagcctttcgaactgacatccgttttgagcagcagtcgaatgcaatagtcttaaacccagcggatctcgcacggcctatgccgggtgctgatccgcaactgcttctgattgccaaacagaccttcagtgtccttcgtctaaccagctctgttcggctcacagtagcggagcgtgtgcgttcggaaatcgtcgaatctatccacgtagaggtgccgcgaattgagcaagtggcggatcgcctaggattgccggtctggactctgacacgtcagctcaaggatgaaggacatacgttttcaagcctatttgactcggtgaggaaagagctcgcgtactactacctggaaaagaccgcgatgagtatttccaagctagccgagctactcggctatacggagacttcgagctttactcatgccttcaatcgctggtctggcgcgtcaccaaagcgatggcgagaccaagcgcgccaggccaaagcgtga

SEQ ID NO: 365637 - DNA, 1773 bp, Pseudomonas aeruginosa
atgaaggcgatcctaattcactacctgcagcccaatctacgtagtgtcctttttgcagccaaagggttgtcagctgttgccctggcactcgcagtgtcgatgagcttggatctcgataaaccattttgggccatggttgcttcgatgatgttgcaggctcgtcctgaaaggggattggtgatcgaaaaggctctgtgcttggtgatcggctcgaccctgggcgcctgtgttgccgtgctcatcttgaactacctcatgccataccccctcttggcaatcggcgccttggctgtctgtgttgcaaccacatccgcgattgcctcaacggaacggcatgtcaacttcatttttggcacagccctgatctcagtgacagccatccttatcgtgatgtttgcgatggcggatcctacaaccacgaccagtgaatcgatcttcatgcttgtacgtgcccggctgaccgaagtgatggttggggcaagctgcgcgactttggcaagcgttttcctgtttcccttcaaggtagaaacactactggctggccacactcgcagccttcactccgcatgcctcgcatacgtccaggcgttagccaactccccacaagacagaatgctgctacaccagaagcgtctggagattgtcggcttggtatcgctgataaatgatgactcaaatgctgggcgatacgagctggcgaagaacgtttcccggtcactccggatgggccacaacgcactcacactagctgcgagcggtcataccgttgagcgtttgttcaacgaacgagaaagcgctaccagccaaccgctcgcaggcatcgcacagccatttttaagagcggtcaaccaaatcttggagcttgattccaagtctcaaatgcgggggctccgagcacttccagatgaagtgcaagcggctgaaggaagcagcccagcagccgatctagccaacgcatcaaaggcatttacacatgcgttactggccataatcgaaggagctgagtcctcgccccaaggggagccttaccagcaaataagtatgcgcttgaagcgtcaccgtgattggcctgcagcagcaagatctgccacccgaaacgctctcgttttcgttgcggcggcgacactgtgggtagcgtcagatggggctgccacactgattatgatgatggtactgccgacgcttttctcacaaatgttcgcagcagcaccgtcgccgacgttgatcgttcggagactcatcaccggggtggtaatagcggtgcccgttgtagttttttgggtgctccctttgattgcacagggcccgaaccattttctggcacttatgctggctctggctgggcctctattcctaggtcttatggccatgacctcgcctgcgtttacaccctatgggcttgggttctgcctcaccgtcgccgtgacggtgcaacccagtaactacatggcctttgctctagatcaatctgtgtcgataggacttggcatcattgcggggcttgggcttctctttatcggctttgcgctagcaggcccgcccaaaggcctgtggcttcagcgccgagtggtgaaatcattggagagagatctcagagtgatgcagagggacggaaaatctacctcgtggttaaatcaacgagctggcgagcggctctcgtacctcagtgcatatgagccaggatcgtgtgagggtaaggagctcacggctctaggattttcactattggaaacaggccactgtcgctcacgggataaggctcaagcgacgtga

SEQ ID NO: 365638 - DNA, 882 bp, Pseudomonas aeruginosa
atgagaggtgctttgcggatcaccatgaccctccttattgctgcagcaaccgttttgtcgggctcatgggtgtggaatcactatcggcagtcaccttggacacgagacggcagagtgagggctgatgtggtgatcgtggcaccagatgtcgctggctgggtgaccaagctcttggtgcgcgataaccaatcagtgaagaaaggggatgtgcttttcgagattgatagggctcgatatcaagcaatcctggatgaagcgaaggcgacgatggaacacgccaagcattcttgggagcttgccaagactcaagaaaagcgccgcgtaccactcgcgaagatcaatgcgatcagcgccgaggatctggacaatgcacggtcgcaggttttgcttgcgaagtccgagttcgaaataagcagagcgcagtgggaaacagcccagatcaacctcacacgcacgcaggtcatagcacctgctgacggaacgatcaccaacgtcaaactgcaggagggcaactacgtaactcagggtggcccagcattttcactgatcaaagatgactcgttctacgtcacagcctattttgaagaaacgaaattgccaggtatccgtgaaggggatgctgctgatgtcacgcttatgagcgaaggtgagcctcttcagggacatgttgtaagcattgcaaaaggggttgccaacaccaacacgcaagctgacacgatgctgttgccccaggtacagcaagctttcaattgggtgaggcttgcgcaacggattcctgtagatatcaagctcgactctattcccgaaggcactcgcctaagcgctggcatgaacgcttcagtcaagctttcaccctcgctctcgcgagttgcgaatctatga

SEQ ID NO: 365639 - DNA, 774 bp, Pseudomonas aeruginosa
gtggacgaacgcaatcagcaggcaggaaacgatgagaggagcggtggaatccaggtcatcgctcgagcagccaggatcatgtatttgctcggaaaaaagcccgatggcttgagtctgggtgatatcgcgcaggaggtaggtctacctcgttcaaccgttcagcgaattgttggcgcgcttgaagatcagggtatggtgcggagtgaaggaattgggggaattagcctcggagccggtctgctgaggcttgttacctacgctcatgctgaccggatcacagtgcttgggccctggctgcagagactcagtgagaccatcaatgagaccgtcgttctatccaggccaagtggattgcaattggtggttgaacaccggatcgtagctgaccgtgaactgctggtgatgcctcgactgggtcaattggacaagccgctttacggcacatcggcggggcgagcaatccttgctttagacagcgacgaagaggttcggggattgctccaaacggaaggattcactccacctgatacggtatcggctgagaaaattttcaagcaactggacgtgataaggcagaccaaggtctcttgcgaccatggagagctcatggaagggatcaccactaccgccattgcgctggacacagttttggggcggttcgctatctcgatgcctgtcccgacattccgcttcgagaaggagaaggaaaattacatcctggagttgcttcgctgcaaggctggtgtggacaaggaaataggcttaatcagttga

SEQ ID NO: 365640 - DNA, 618 bp, Pseudomonas aeruginosa
atgaagaacgtcaggttgatacgccacggcgagagcgccgccaacgctggcgagcccaccagggatcacgcaagcattcctttgacggcaaaaggcttggagcaagcccaaatcgtcgctcattcccatgcgaacgctcctgacctaatcattgcctcaccgttcttgcgcgcccaagcgaccgcgcaggccacctcggccctctatccaggcgccactttcgaaacttggcctattcacgagttcacctacctggcgccggcacgctgtgtggatacgacgctcgcacagcggcgagactgggtcgatgcttactggcagaggtcagatcctgccttttcggatggtgtaggagcagagtcctttcatgatctcgtggccagggttctgcatttccttgaccgaatcgcagaacactcgggcaatgagatcgtggtgttttcgcatggtcagtacctcaacaccgtgcgttggctcctcgagaaaaagccgcaggagatcgacggtgatgcaatgctggactggcgtaagtacgagatagcgaaccatatcccgaattgtcaggggttctccctcagcaggcatacggacggatggaattgggctctcgttcgttga

SEQ ID NO: 365641 - DNA, 228 bp, Pseudomonas aeruginosa
atgaccgttctcaacgggggcgccgagggcgtgcaactgatagtcggtgaccgcctgaaaacgatgctcagccatcaaccgcagacgctccagctccatccccacgactccatcagcctgggcctgatggtaaaccttcagcgcttccacagcctcggtgtacagagggtggtcgggcatgagcaccttgctcagatctcttttcacgatctctccctttcgccatag

SEQ ID NO: 365642 - DNA, 1488 bp, Pseudomonas aeruginosa
atgccacctatgcggccctcacagtacgccatgcagcagcgcaccgacggcggcccatttctgcggtttgacaatggtgaagccagagggctgagcgaggaagagctcgaagcaatcgagtcgggcgagtacaacgagaatgacttccggagtcctacacacgtttactacagcgatgtccctcttccgaagaatgcgcctggatggcatcttattctgatggtcacctcggactatgtgactatttacccaatcattgctcgctcggaaaactctgaatacggcaagcccaagtacgacaatatcaagtcgatagtagtcaccgcaccactgtacggtgactatacatatcctaccgatcaagatgagcttgatgctttgctagagcttcttcctgccgggcttaccaaagactggcgctatggtcttggcttccactatgagtaccgatacatcattcaggctctgaatgacttggaggatgtggacacacttatcctgcatggtggctctggaaacactgatgcgaagatcaaaggcaacgagttctacttaggcgtcgaacggcttgaacgactgaggagaagcctggacagactaacccagcggcaccagcgagaaactgctgcggacaagaagctcgtttgctacacagggctactgcacaaagcagatccgaagctccatcctccccgtggacgaaagctgccgccagatcttctcgccaacctggtagcgctgggagctggtgagcctcgcctatcctccaaagaccaaaatcaggtcgtaaagcttgcccaacaaagcgttcctgcgttggcgaaatcggccccgaaaaccctgtatcagctcaagtccgaaattgagctcatcacgctcggagaacttattgaggtctaccgacggttgctggatagcaaggcctctgagggcaagtggcagagtttcttgggtgagcatcccttcgtgctcgacatggcgttcggctacccagtgaaaatgatctcagaacagccctacgtcggaggtaagaatctcagaggccagggaggtcaatattcggattttcttatggcggcaaaggccactggaaacctcgccctgatcgagatcaagcaccctgggcaagatttactcgggaagccctaccgcaagacctacgtgccttcctacgaactcagtggatccgtggcccaggtcattagccagagaagcgttctacaaaagagcatttcaaaccttatcgataccgatgatcaagatgaacgagtctacgcacatgcggtggcggccattgtcatcattggccgtaccccaacaagggttggtgaacagcgtgctttcgagcagtatcggaacagcttgaaagatgtgctcgtgattacgttcgacgaaatgctggggcggctcgaaggcattcaccaagccttgtcaccgaagccgccggcagcacacctgccccttgatgatcaagatctcccttgctga

SEQ ID NO: 365643 - DNA, 831 bp, Pseudomonas aeruginosa
atgtccgatttttcccctctcagcatcatcaaatcgcaagccaagcagcatgctcgtgaacacgacgtgaagctttctgctgcccaagaagcgcttgcacgtcaggcagagttcgaggagtaccacgagctcgttgtcgtcgcccggcgaaaccccacggatcctcggctgatgcgcgccgcctttggcgtgcgagatttcaaggacgcgctacaccagaacgatgtgttctccgagttggatcaagagctggaagatctgctttccggccccatggccgagaccaacgccagcgagttcgctatcgacgaatacgaggtagagtctgccgcctatgacgatgcgactggtgtactcaggttggacatgtcaatcacctggaaaggtaagcaggatcctgatcgggtctactacggtacggctttctttctccaggcggagattgatctgattcggcgggatggcaagtggtcgctcggggaagacggtgtttccatcaccggcagcgaaacggatgcagaccgtgatcgcagggatgaatgggagtacatggcgcagcagcaggccgctgaagccgaggagaatcgtccccgcagtagcatggcgcaagcgctggccaatgagctgaagatatcgctggaggatgcggagcttctggcagacgccgaagtaaccgcgaacacctcggatggcgggatgatctacagctactgggtggacgttgagccttatgccgagggagccctgcgagcagatctattggcccggttcggcaccttggagttcgagctggacgtcaacttcttcgacgatatccatcccgacatgtaa

SEQ ID NO: 365644 - DNA, 939 bp, Pseudomonas aeruginosa
atgttggttaaggtttcagcgttcgacatagatatcaactcggcgatatttgactatcaggcagttgcggatcttgcagctggggtaactgggatcgtctttgaagaaaatcgtacattctacttcgacacagccgcatttccaggcttctgcgttggcgtgataatcacggttaaagaccaaaagagcttctgcaccctggatgtcggcggtgcagctggggctgtaatcaaggtgaataaccttgatgaacataaccagatcatggacttcaatttctttgcattgaatatagaaaatggaattggggtttatcaacactatcaccagtccgctccgctatcggtgctggagcgactgctgaaggtgcaagttcgaacagagaaagaacggagaatcgccgcagccgtcgctgccgaagaagcgaggctcggcaagcagttgagtgctagtcaagctagcaaaatccagcgcgcacataaaagctacctcaaggttggagtagtagtcagacctgaaacgctcaaagctcagttggaggaatatgcgaaaatcaaaggcatggagtatacctatacagtcctgacgcctgaagtattagaggcaacccctctgagcaaccgtataaaaaagaaaaaagagacgctcgttttcacaaatccaaatatcgtagacagcttagcacgtgagatctctgccgcagtcaggcaatttggcattaaccgaggcaacgttattgtcgaagatgatgaaggtgtcacccgccacatcaagatcatggatatgcctgaggtattgtgggagcaagaatacgaaaccgtagtagctttgatagacgacatcaacccaaacgacttcgccaacaatgactacctgaaatctctcgtagatctatttgaccacgccgactacacccacctcctgcgagcaaacgtgtga

SEQ ID NO: 365645 - DNA, 4488 bp, Pseudomonas aeruginosa
atggactatgcacgcatcagaggcaaggattcaggtaagcacctggccttcgaggaactcgtttgccagttagctcgacgtgagcctcaggtcgctggcgctgagttcaggcgagtgaacggttcaggtggggatggtggtatagaggcctactgggtgctcccaggcggcgctgagattggctaccaagccaaatactatctgaagtctagtgagatcaactgggcaaacttggatgactctgtgcggcaggcgctcaagactcatcccaacctcactgcgtatatcgtggcattaccctgcgacttgactgatagaacgggcaagcaagtcaacggtaaaactggttgggataactggacagctagaaaggccaaatgggaggcactcgtaccggagggccgatatgtgaaattcgtgccctggacggcatttgagttgaatgatcggctgattcaaccttctgctgaagggctaagaagatattggttcggggatgttgagttttccgcccaatggttcgctgataacttagagatcgcggtcacatctctggaagaaaggtatcattccgatgatcatgttgaagtttcatcggagcggctattcaaggtaaaacttcggagtgccgaaataattcaagagatcagcgatatttttggtgcgatctcggctgcaggtggcattcgtgacgtgcaagccaaggtgggtgagaccgataaagggtctattgattttattgaaagcggtatagggagattacttcagcttcagtcgcgctttgatgatgatccatggcgcgtatggcctgttagatatacgttagaggtaacagatcaagtcctcgatgcagtaaatcaactcaatattcgtttgtggcgcaccagtcgagatggctcacaaagtgaatcgaagcttgaggccttagcaagcgccatcagagcattgcgaggttttctcaggaggcgagatgtcgcgtccgagacaagaaaaagcatactcttgtacgggaaagccggaagtggcaagtcgcatttattaggccgtattgctgaggaagcaatcaacactggtacttctgcaattttgatcctagggcaacagctcactaaagatgatatatggaatcaaataatgcggcgggttggtgttgcagacgcgactcctgatacgttccttcaagcgctcagtgcgtccgctgaagcttcgaaacgtcgcggcttgatcttgatcgacgctataaatgaagggccaggatataaactgtggcggcatgagctagccgggttcatcgcaagggtggaaaaatttccaaacttggtcgttgtcttcagctgcaggacggaatacaagacctatgttgtacctgaggcggtcgagcaatgggttgcagcagtcgaggtacgcgggtttgtaacatcttacgaacaggctagagcagcaaggatgtacctcggtaaacgagggatttcacagccagatactccatggctagcagtagaattcgtcaatccattatttctgaggagtgcatgtatagcgctcaagaaagcaaatcaaaagtggttcccgaaaggtctagtcggaactaggaaggtattttccttctatatcgagaatatcgcaaagaatctgggaactggtcgcgatggtagcgatgatctcgttaagcccacttttgcaacgttgacggctgtcgcttcattgatggcagcaaaccgttcggattttatcgagaggggcttggcgacaaaaattgcggctgataaattttcagcttttcctgctccaaatgaagttagctggttcgatattcttatcagaaacggactatttaggttggatcctcatcctgacttccctgatcccgacgattttgacaatcctgacgaggttgtccgctttagctttcaaaggttgcaggactacttgatggcagctgctttgctggctgcgattgaagaccctgtgcatgctttagccgagggagtcctggagttcgttcatgatggcgaaggactggactgggagtggaatgggctgacccaagcactgtcggtgcagttacccgaacggtttggaattgagctcatcgatgctttgcctggtgagctggacatttggatcaatgacgagcctgcaagagatgcattcattgaaagcctgcgctggcgaagcaatgaagctttcactgaacgcacacgggagatctatgaaatcttcctggatttcgatgaggattactttgagatcctgatccaagtgagcgcgagcgcaggccatccttggaatgcattggctctgcatcagaccctgtccagcctcgccatgccagagcgcgatgcattctggacgcgcaaggtgaactcgctcgccacagatgatgacagtgttactcagcgacttatcgaatggtgtgctcttgagcagagtgaacacacttcctctgatattcaatacctttgtgctctcacgatggcttggttaaccacaagtacctaccgtgaaatcagagacaaagcaacgaaagcgctatcctctttgatgcggcataacattggcctctacgagaagctctgtggggattttgcccaagtcgatgatttatacgtccatgagcgaattcactctgcagcgtatggggcatgttgcgtagatcctgaccggcatcgtgttcgtattttttccagggttgcgtaccaaacagtgtttgatcgtgatcgcgtacctgcatccatcctgttacgagactctgccttgggcattgtccttctagcgcaatatcaggatgctctagatgatctaatagatctttcaaaggtaatgccgccttataaatcagatcccatcctattagcggtcactgaagaggagctcaaggccgtagctaaacaagctggcggctctgaaattcgttcttcatgtggagagtggggcggggatttcggtgactatgaagttcgaccgcgtgttacttcttttgttgatgttctattgtctgcttcagaaccacttactaatgatgagcgatatgatttgtttgtagaggaggtgataagctgctcggaggatcgagccaggtgcttcaagctattgcaagataataagccaaatcgattcagagatcttagagcacgtcgtagccaacaggaaatagaggaagaagctgcgacctttaagcaggttgaacgcctacttttatttaatctaaacgaggaagaaaagcgtagatacttcgaggagtttagggtgagttttgacgccagccaggacgagccagaaagggtgcctcacatcgatgttccctccgcccagcgctggattgccaagcgagcttatgattatggctggacgaaaaagctgttccctgatgatcgcagttatcatcataaccatggtcgtgaacggccagccggtgagcgaatcggcaaaaagtaccaatggctcgcgcttgatgagttactatgcagtcttgcggacaactattggatggctgagaagaagagtcacggctcccgtcggtacactggccctctcgatataggctttcatagagacgttgatcctaccattctgctatccgaagagtctgaatccaatttgggtgaccaaattgaacaccataagattcatctgcagccagttgctgagcccgaagtgggtaagtggcccttctgggaagacccctcgacatgcatgcccaactacatcacccggtcggatcttgcggggaagagctgggtcgtcctgcatgaacatcgttcggtgtcagatcgttatgatgacgacagtaggcggcagcatggcttaagaacccaggagtggcgcttcctgcttccggttatcgtcaaaaagcaggactcggatgcactaaggggtttcataaggaagcaggaaaacattcgggtggatgagtggtcgactcgaaacgccacagatgatggctacctgctagaggccccatggcgatcaacctgggatcagtgtcagtgggaaacgcagcatttcagcgagtcagccgagattgacgtggcatttccatgcttccgttatcactgggagtcccacttggatgcctctatgcctgaaggtgcccatgcgctattgcccgcaccctggctcgcgcatcgtctcggcctgaggcccatgagcgacaacagcaatgcttacgtggatagcgctggggtagttcgttttgtgtgtggtaggagccccggggatggctcctatgcattcattgatgaggagctgttccaggctttcctcgttgaagatgaactcgattgcatctgggtatttgttgctgaacgtgctgcgtggccaggcggtgaaaatgagaacgcatcacgacgtcgctcagatggtgtgatctggagagagctggggcggacgcacatggatcatcggactgatgactgggcgcgtggggagtcggaaaaatatctcacaacacttccaacaccaaagcgcaggaaacctcgtatttga

SEQ ID NO: 365646 - DNA, 192 bp, Pseudomonas aeruginosa; identical to SEQ ID NO: 336870

SEQ ID NO: 365647 - DNA, 2082 bp, Pseudomonas aeruginosa
atgttcccgcagggctcggcgcgcatcgccgaggccatgtacagccagggcctgcatgcccaggcgctgcacgaggcgatggccgaggccatcgccgccatcgtcgagcgccagccgcaacggcgctggcgcctgctggagcttggcgccggcaccgccgccgccagccgcgcggtgatcgcccggttggcgccgctggtgcagcgaggggcggaggtggactacctgttcaccgacgtttccagctacttcctcgccgccgcccgcgagcgcttcgccgaccagccgtgggtacgcttcggccgcttcgacatgaacggcgatcttctcgaccagggcgtggcgccgcactcggtggatatcctgctcagctccggggccttgaacaacgcgctggacaccccggcgctgctggccggcctgcgcgagctgctgagcgccgacgcctggctggtgatccaggaactgacgcgcgagcacaacgagatcagcgtcagccagagcctgatgatggaaaacccgcgcgacctccgcgacgagcgccgccaactgttcgtccacaccgggcaatggctggagtggctggcggcacagggtggcgacctggcttgcggggtggtgccgccgggcagcgctctcgacctgcttggctacgatgtcctgctggctcgctgcaagaccgaccgcgcccgcctggagccggccgagctgctggccttcgtcgaagcgcgggtgccgcgctacatgctcccggcgcagttgcgcgtgctcgaacgcctgccggtcaccggcaacggcaagatcgaccgcaaggccctgaccggctttgcccgccagccccaggcggaccttcggcatggcgtcgcgcaggcaccggccgacgaactggagaatgcgctgctggcactctggagggaggtgctggacaacccgtcgctgggcgtcgagcaagacttcttcggggctggcggcgactcgctgttgatcgcccagttgatcgcccgtttgcgcgaacgcctggaaagcgcccgccggcatccgttcgatcgcctgctacgctgggcgctcagccagccgacgccgcgcggcctggccgaacgcctgcgcagcgcgccggaagagggccgtgggccagccctggccgcggcgcgcggcgtcgccccggcgcagaccggcatgtcgcgcgcaccgctcgccgagggcgcggtggcgctcgacccgctggtgcgcctggtgcccggcgagggcgtgccgagggtgctggtccacgaaggcctcggcacgctgctgccgtaccgcccgctgcttcgcgccctgggtgaggggcggccgttgctgggcctggccgtgcatgacagcgacgcctacctggcgatccccgccgagcatctcaacgcctgcctcggccgccgctacgctgaggcgctccatggcgccgggctgcgtgaggttgacctgctcggctactgctccggtgggctggtcgccctggagaccgccaagtccctggtccagcgcggggtgcgcgtgcgccagctggatatcgtctccagctaccggattccctaccgggtggacgacgagcgcctactgttgttcagcttcgccgcgaccctcggactggataccgcggcgctcggcttccccgcgccggaacgtctcggccaggcggtgcaggcggcgctcgcgcagacaccggagcgcctgggcgccgaggcgctggcggagctaccgggcctggccgatctcgtcgccctgcgcggccgcgtgctacaggcggccagcggtagcgccgacgccgccagcgtcgaacgcgacaccctctaccgactgttctgccactcggtgcgtgccagccaggccgcggcgccggagccctacgtcggcgcgctgcggctgttcgtgccggacgccggcaacccattggtgccgtgctacgccgaggccctggagacccaatggcgggccgccgcgctcggcgcgtgcggcatccacgaggtgcccggcgggcacttcgactgcctgggcgaagccctggcgcaatccctgtcgaaacccatgccagaggaggcgagccgatga

SEQ ID NO: 365648 - DNA, 555 bp, Pseudomonas aeruginosa
atgggtagtgagaagaagtcaccgattcttagtgtcaggctagggcctgaccttaaagagcgctgggaaacctattgcgaaggcttagggcgtgcccccagctcggccatcaaagaggccattgagcaacagctaaaagccgctgaagccctctcgactcccaaaacctaccgtcaaacggagaccgctaaggaaccgaaagagcgcttcgaaattcttctaaccgcttccgaaaaagccggcgtcaaagagcgggcgcatgttgagcgctgttcaatgcgtcgctggattgtcgatgccatccgtaccggtctgacccatgaaccgcaattcgggacgtccgaaatcgacgccctgggcgagtccaactatcagttactcgccctaggccgaaaccttaaccagattgcccgacgtttgaatgagggtcattacgagccgatcactgtcaaacgtatcgaagcactgagctaccttatagacaaacacactactgttgttagcaatgcgattagagcaagcttagagcgctggagcattacccgacaaaattaa

SEQ ID NO: 365649 - DNA, 867 bp, Pseudomonas aeruginosa
atgaaaccacttatagacttaaagcaggacacactagaaataaagaacatcaacaaagagctaaatcaggcgataaagcaacacaaagaagatctattaaattccgtacaagatgctccgcagcgagtaattattcggcgctacttaagtatcttacacgagctatgccggcaagcttgtgcttgtttggatgctaaagcgtactcgacactagaggcattaagccgtgtaataatggagcaagcggccaacatgctatacatatctatggatggcggaagtaatgcgcgtgctttactccgcagcagtaagcagctcacagaaagcaacggaaaagcttgggcgaattatctagcttcgcaaagcgccgccaatcccgccgcccaggcgaggcaagtttctggggctgcgatgctagagagaatagacaagcgatggcccgatataaagcgttatccaggtggcaaaggcttgttttctgcgctaggctgggaaagtcattattacgcattttattcaccgctttgcgactcagttcatagcttttccgacgaaatgtctgcacttgtagattttagcgatctgtattcgatatcagaagccgaggcagaaaaatcgctagcctactggaacaaagagaggttacgtttggcagtttatcattatgcagttgctatcggactgcgcaccgaagcattctcaagatgttgttctaccttagccccagacttacatgaaatgtcatcagaagagcttttaaaaaaaatcaatatactaataatgcgtcatgatttttttgatcattctcggctaaaagaaatggaatcaggcagtgcgaaacctgatgagtttgtgataaatatttag

SEQ ID NO: 365650 - DNA, 918 bp, Pseudomonas aeruginosa
atgatcgaggctagactaaaagctttaaaacatcttctttcggacgatggaagtatttggatctccatagatgatggagaggtacattacctgaaagtggctgccgacaggatttttggtcgggagaattttgtaacaactgtcatatggcagcagaggactacgcgtgagaatcggaaggcattttccaataatcatgaatatatcctcgtgtatgcgaaaaatgtcaaggcgttttcggctgtggccaacaagttgcccggcacgcaagagattttagatcgttataaaaatcctgacaatgacccccgggggccgtggcaatcggtgtcggcaaatgtccaagcgggtcacgcagtgcctagccagttttatccaataatctctccaagcggtcgagttcactcgcctcctaatggtcggtgttgggcgtataataaaatcaggatggaaaaagaaatcgctgaaaataacgtttggttcgggaaggacggtaatggagtgcctaggatcaaaaaatttcttaaggataagattgtaaaggtcacgccggagacaatctggctggcggaagagtgtggaactagcaaaagtgccaagaaacatttgctaaaaatgtttcctgatgagactgtttttgataccccgaagccagaagaattggtcaggaaggtgctttcgattgccactaaccctggagatctagtcctagatgcttttttagggtcggggaccactgcggcagttgcgcacaagatggggcgtcgatatataggaattgaagcaggtgatcacatcgtagatatagtggctcgaaggcttcgatatgtaattgagggcgaagctggtggtatttctaagcttgaagggtggggtggcggaggcgggtttgagttttaccgttatgtatcaggatga

SEQ ID NO: 365651 - DNA, 1278 bp, Pseudomonas aeruginosa
atgctcgacaccatcggggaagttattgatgagctatcatccccaaatgatgtggtagcagatctattcgctggttcaggctccgtatctcgatacttatcccaatcgagaacagtgatttcagccgacattcaagagtactctcgtgtcatatgctcagccatattaactccaagtaattctatccaacctgaacagattgttgagaggtgccgttcttcaagcatgcatgccgcccttacagcgtcctgcgcagaagttattcagtatgaagaggaagctatctcaagagcgtttcagggactacctttgcaactgtgtgaatttttagaggaagggtctttcatcaagtccgctgacgaaaactaccgcaactgcactggactcctggaacgtgcactcaaagcttcgtatcaaaaactcctggaacttgaaggtagacgcgaaggttcgtgcactgcaaccctgtactatggcggcatctatttttctttcaagcaaacagccgctatcgacgctattctttatgagatagagaattctgacgtccaagatagagatacgttacttgcagccttgctgagcgcggtcagcagcgcagtaaacacaatcggcaagcagtttgctcagccaatacagccccgcatggctaacggacaacccaaaaaaggaattgcagtaaaagtcaaaaaggatcgagaaatcgatattttcgaggtgttttttgagaacctacagagatacgtagagttgaactgcagtgggcttccgcaccaagccctgtgcatggactattcggaagcgctggatcagttgccgaaagatactcgggttgtgtatgccgaccccccctacacacgtgatcattatagccggttctatcacgttcttgagacactttgccttagagactcaccaaccgtttctcgaaccaaaatcggcggaagttggcgtctcagtcgaggtctttatagggaacagcgtcatcagtccccattctgcatccggtcacaagctcctcaagccttcacaacactattcgataaagtttcgaaattgggcgcaagcttggtgctatcgtattcaccccacgttgttcgtgaaggcgagcacccgagggttatgaccatagaagatttgacagcgcttgcccgaaaccatttccaagagatttatacagtgtgccctggagaattcaagcacaacaagttaaatagccgggaaaatagtttcgagcaaaagcctcacggtgagattctcatagtttgcaggaattag

SEQ ID NO: 365652 - DNA, 1140 bp, Pseudomonas aeruginosa
atgaccacccaaatttgcatccaagaccctgattaccaagcctccgtatcactacatgaagcgctgaatgcagcaggcgagggcgcgacgtcggccgctggtgcctacgcattcgtttcaaagggtggtgttgatctgttgatgggcgcgccctcattcagccaaatgcttgggagaaatcccgttcagctaatcgtaggaatggacgccatcacaaatgaggcggctataggtgcactacaggctctccaagggcgtcaccaagggctacagatcactgcttttgttcatgacaagaaaggaacagttttccacccgaaagtatgctggtttagaaacgaccaaggtggcgttgtggtcgcagggtccggaaatcttacggtgggtggactcaggaaaaatcgcgaggtgttctctgtatcaaaagtaaatgcggatgagatcaacttaattgaacagaattggcaagcgtggattgagtccaatagggagaatctacacccccttgatagcgatgtcgtgctggagcgggctaaactaaataacattcgaaaagctgtgtttcttgatgatctcgagaatccagatgttgtcggagaaaagcagctccaagagggtcaggtgtttgacgctgttgacgcagtggcagcagaggacctcgaagattggagtttcgattctgatgcctactttttagttgcagaaatccctaaaagtggcaagcggtggaaacaggcaaattttagccttcaaaccttcgttgatttttttggcggtattcgcggtgataactcgaagcgcttagtgctgcgagctatttacgattcgggtgactatggaggtcttgaggatcgcccttgcgtcacagtagcaagtgacaattttagggttgagcttgaagcggcatctggattagattacccagcagaagggcgtcctataggagtgtttgtgcgaatatctgtcaggatgtttgcatactatctgagtatgcctggtgctccgtcatatgaaattctgcaggactggctggaccagaatgcagctgcaggtcggaatgtgcggcgagtggtttcttccgttggccactcgcctgaagtgattgaggcgactccacttgcaagatttttgaagaactaa

SEQ ID NO: 365653 - DNA, 849 bp, Pseudomonas aeruginosa
atggcaatccatcttaccgacaaactttcacgacttttcaatgaaaccaaatacaacaggcgttacgacacttggctttggtattcacttatctggagccatcctgaatttcatccatactcaagccagaatactggcatgagagaggcaatggccaacttccttgctgaaagaagctggttaataaattggatgaaagaaaaaagaagccaacaactgcttcctgacaacagctttgactggattggtgaagaactcagacagacagaatggataacagcaagagccctacagattaccggccacaatttatctgcccgaccaattgatcttacaggaaaggatttaatagttacactcattgacctatggcaaacagatatcacagaaaagtatcataaactccaatatctagcgcaatcatggagaaaccaaaaagccagagacaaagaatatgagtggtttaaggatgatgaccaaaaaagcgttctagcctgggagtggctaaataaaaatgcctatctctctgtactcgccaaaaggccattcgaaagatatgtggacactttaaccttctttgacagcgccaacttaacgccagaccaaaaaagtctatatttagataagataaagaagagatggagccagaaaaaatacagagaaaacctaaaagggaaagcccaatacaatttcatcctttcagacaaggcaatagcaaacctcgataagctagcaaacctacatgagatcagccgagcgaaggttctagaaatcctgctagagatggaagcagagaagaacgatcacataccggaaaggatcagagtcttaaagctactaaacaagtag

SEQ ID NO: 365654 - DNA, 648 bp, Pseudomonas aeruginosa
atgagctactgtacaattgactgggtgtacaaccagaatctgcctgcgcaggaaaagctgatattggtatacatcgcaaagtgcgaaaacccgaccgagccttgctttgcaagtgtaaagcacctggccaataaatgcggggtatccacgcgcaccattcagagaattcttaaaaaattgtgcagtgccggatacgtcacttccactccgcgcttcaggagcgacggctcacaaacgagcaatttctacacagtcaacgtgatagagaacgacacaactgtgtcacccccccatgacatcaatgtggcaggggggagtggcagcatagggtcaccacccactgtcgataaggtgacggaccaagaactaccaaagaaaacaaaatcaaagacaccactacgggaagcgctaggaaacgtctcgcagttggcctatcccggtgggttgtctatgcactcgaaaagctcggttgatcggatactccagggcatttcgcttgatgatgcgcaaatgctcctcgatgaactggcaggagctatggccaacggcctcatcaggaaagctcccgagtattggctttcaggagtcgcgatgaagtaccgtgcggggcagtttgtagtgatcaacccatcccggacagtgggttga

SEQ ID NO: 365655 - DNA, 867 bp, Pseudomonas aeruginosa
atgcacccgtttcaggccgccgagggtcttgagatagagggtggcgtcgcgcaccgtcaggtcgtgcccctcgaccagcgggaaaccgagctggcgcgccaggtagagatgctcgaagtaggtttcgttgaaacgtccgggagtcagcagcaccaccagcggcgtctcgccgtcgccggcggcctggctggcgagggtctcctgcagggtgcggaaatacccggcgagatgctgcacacgcaggtcgcgatagagttccggcaaggcccgcgagacgatctgccggttctccagcgcatagcccgcgccggacggcgcctgggtgcggtcggcaaggacctgccagcgtccgtcggcatcgcgcgccaggtcgacggcatagctgtgcaggaaaatcccgccgggcggccggatgccgagcgccggccagaggaagttcggatggccgaagaccagttcgctgggcagcagcccttcggcgagcagacgctgctcgccgtacaggtcggccagcagcgcgttgagcagccgagcacgctgtgccacgccggcggcaatcggctgccactcggcggcggacagcaggttcggcagaaggtccagcgcccaggggcggtcggtgcccttgggatcggcgtagacgttgtaggtgacgccgttctcctggatctgccgttccaccagggcctggcgctggcgcagttgctcagggctgctgcgctccagttggcggaacagccgctgccaatggggacgcacgccaccctggcgatcgagcagctcatggtaggccgtatcggtgaacggatagtgggcaagcagctcgggcatcgaaggctcgcggggctggggttgcggtcactgtag

SEQ ID NO: 365656 - DNA, 822 bp, Pseudomonas aeruginosa
atggccaacagcaaaccatttgtctgcgctaatgaaaaagaccatctgccgccgttggatccgcaagccgatgcttggtaccgcgaagcagcagccttggccaagcccgatactctgcggccctggggccgtatcgtcgagctttacagcaaggcagtggagcgcggtcattggaaggccatgcataatttggcgaatctttatcgtacagggtggcccggaggagtagaaaaagatccgcagaaggcattggatctctatcaaaagatgatagatctggatgtgcctcaggggttctatgatatgggggcaatgattggtaatcgtgccggtgttaagaaccctgctaccgatggtctgaccttcttggataaagccgctagtttggggaacccgccagcactgaccgagttgggtaaactctatatttatgtggccaaggaaaaggaattggggctggcgtataccagttgtgcttccagtcaaggttatgctccggcgagctatgagcttggaagctactatgagttggttgagcataattatccaaaggcacttagatactatcaagtctccgtctctcaaggcggcaggagtgccgccttttttctctcgcgcgtcttcggaaagaggacgcctccttcaagtgcaatgtggtatacgccggatgaaaagcttgagaaattctactactccctctatctgcaaattgatgccgaccccgatcttcgttttcccaatttggtaaaagataaccccttgccaccccaccccgtccagggctacgacgcagctcgacccgactggaagccgggtcagtga

SEQ ID NO: 365657 - DNA, 672 bp, Pseudomonas aeruginosa; identical to SEQ ID NO: 327602

SEQ ID NO: 365658 - DNA, 1050 bp, Pseudomonas aeruginosa
gtggcgagaagtatcccttcccgccggtggcgatttccggcgagaggggctgaacatggcgacgacactcaaaccggtggacgcggtggtggtcggcttcggctggaccggagcgatcctggccaaggagctgaccgaggccgggctcaacgtggtggcgctggagcgcggcgagaaccgcgatacctatcccgacggcgcctacccgaacaccctcgacgagctgacctacaacacacgcggcaagctgttccagaatctctccaagagcaccgtgagcatccgccacgggatcaacgacaccgcgctgccctaccgtcagctctccgccttccttcccggcgacggcgtcggtggcgccggcctgcactggtccggcgtgcatttccggatcatgcccgaggaactgcgcctgcgcagtcactacgaggaacgctacggcaagaaattcatccccgaaggcatgaccatccaggactacggggtcagctacgaagagctggagccgcacttcgatttcgccgagaaggtcttcggcacctccggcaccgcgcatacggtcaagggccaggtggtcggcaagggcaatccgttcgccgccgaccgctcggacgacttcccgctgccggcgctgcgccaggtgtactccgcgcaactgttccgcaaggccgccgaggaactcggcctgcacccctacgacctgccggcggccaacgcttcggggccctggaccaacccctacggggtgcagatggggccgtgcaacttctgcggcttctgcagcggctacgcttgctacatgtattccaaggcctcgccgaacctgaacatcctgccggcgctgcgccagaccccgctgttcgaactgcgcgccaactgcaacgtgctcaaggtcaacctcgacagcgacggcaggcaggccaccggcgtgacctacgtcgacgcccaggggcgcgagatcgtgcagccggcgaagctggtgatcatcagtgccttccagttccacaacgtgcgcctgctgctgctctccggcatcggcaagccctatga

SEQ ID NO: 365659 - DNA, 1026 bp, Pseudomonas aeruginosa
atgctggcgcagcagcaacagccgcgaggccatcagcaccagcaggttgcccagcaactgcaccaggccatcggcgcggcgcaggttcggcgcgtcgaaatagaggtgccggcgcaggccgtccagcgcggtgatgctggcgaccagttgcatctgccgctggttgaacgactcgtcgccctcgtcgccgcggatcaccgccgcggcgtgccgcgcggtactgcggatcaggccgtcgacctgggcgaagtagcccttcgccaccgcctgcggacgcgcgctgagcaggctgaccagggccacgcaggcgacgcccagcagggtctcggtgacccgcaccacggcgagcatgaaggtgttttccggatcgggaatcgacagcacggcgacgatcaccgcggtgaagccgctgagcacgaaggcgtgcgaatcggtgtagcgcagcaaggtgccgccggcggtgcagagcgccagccagagtcccagggcgacgaagaacggcaacggttgctgggcgaacagcgccatgatcagcaccgccaccacggcgccggcgaaggtaccgacgacctgggcgaagctgcgcttgagagccatcccggccagcggctggctgacgatgaccacggtcatcagcgcccacttcggctgctccaggtcgaagaggaaggccaggtagagggtcagcagcccggcggcgacggtgcgcagggcgaacagcagggtttcccgcggctgccgccagagcaagcgggcgtagagtttcagcccttccatgcccggccccgcacctccaggcaacggttggccgcggaccaggcggcgatgaagcgactcgacatgctggtttctcgttcggggttgatgcggcgggttggcttccagtctagaaggcgcaaggaaatccgtggccgcctacgggggcgggcaggtgcggtcggccacggagcgacgagtcgcgactacagggtaaaagccccggcggccttcccggtagcgcgtccaggcgaaaaccgttttcgctga

SEQ ID NO: 365660 - DNA, 366 bp, Pseudomonas aeruginosa
atggcgatcccggcgctcagcgggctgctcaggccgaccgcgaccacgtacagcagcaacgccatccacagcgccagccactcgaagtcggcggatgccggcaacagcacgaacagcagcgccgccgagatcaggatcgccagcagcagcccgcgcaggaagttctgcgccgccagcagcggacgcgggaaggtcgccatcagcgagcacatcacgccgaccagcagcaggctgctgagggcgccgttccaggcgctggtgatccacagccaggcggcgcaggacaaggcgacgaaagcgcgcacggcattcatcgaggccagcgcccagtccaggtgcagcgcctgcgcctggccacggcggtag

SEQ ID NO: 365661 - DNA, 1329 bp, Pseudomonas aeruginosa; identical to SEQ ID NO: 325866

SEQ ID NO: 365662 - DNA, 618 bp, Pseudomonas aeruginosa
atgagcatgcaaagtctcgtaatcaagtatttggctcctccaacttcccttgcgtcgaatatatgggttgtttggattgaggtctcttttgtttcgatgaggattagtccgggtagtttcttaaagctcatttgctcaagaaaaaggactaaggctggaagtatagagtgctttgggtttccagtaaaaacgacggggccattctcggtatattcaaggtctaaacaatatagcgcttccagtaccccctggtgtgtatcgttgcggccacggatcacccagaatggagcgcttctattcatgccaatgtgctgctccagtttatcgacatcagcgagtgagcggaagccgcgagaaactgctaccgcattttggcaaaccttgagtggatattctgttccaaacacaagaaaggagttcttctgcaagcgtttggcatcgcgtttcaacgccgagatgtttcgtgaggcggacgcagtgagactacgaataagagataatgccatgttttcccctggtttcatgcgccgcaccagcgcggccaagactgtaccccatttattagatgacgcacaaatcttgatttttttatcctgcacttcagtgcctatgtggtga

SEQ ID NO: 365663 - DNA, 297 bp, Pseudomonas aeruginosa
atggcaaccgatctctacgcgctggccgaacaggtcgaggacgaagcgggctacctgcgcttcctcgccgcgctggcggcggactgggaggaagaccgccgcctcgccgccgccaacccgccgaagccgttcggccccagcccgctgggttgggagaacggcagcatcggtggcttcctcgatgccgccgcgacctggggcgaggactcccgcgacggcctgccgggctattccaggccggagaatgcctggcggcgcgcggcgcaactgatgctggcgggcaagttctatgaatga

SEQ ID NO: 365664 - DNA, 267 bp, Pseudomonas aeruginosa
ttgaagtgctttcccgattgggagtggtacaacataaatatattcggaaccgacgaccccaatcatttctgggtcgaatgcgacggtcacggcaagattcttttccccggatatcccgaaggttattacgaaaaccacttcctgcattccttcgaacttgaagacggcaagatcaagcgcaaccgcgaattcatgaacgtcttccagcaattgcgcgccttgagcattccggtcccggaaataaaacgcgaaggcattcccacctga

SEQ ID NO: 365665 - DNA, 267 bp, Pseudomonas aeruginosa
  misc_feature (178)..(186): n is a, c, g, or t
atgcctgacacgacaaatccaatcggtttcaccgatgccaacgaacttcgcgaaaagaatcgcgccaccgtcgagaagtacatgaataccaaaggccaggaccgcctgcgccgccatgaacttttcgtcgaggatggctgtggcggtttatggaccaccgataccggctcgcccatcnnnnnnnnngtttatggaccaccgataccggctcgcccatcgtcattcgtggcaaagacaaacttgcggaacatgccgtctggtcattga

SEQ ID NO: 365666 - DNA, 1977 bp, Pseudomonas aeruginosa
gtgaacacggaaaaccattcccagacggccgctttcctctggtcgattgccgacctgctgcgcggtgatttcaagcagtcccagtacggtcgcatcatcctgccgttcaccctgctgcggcggatggagtgtgtgctggagccgaccaaggaagcggtgatccgtgagtcctatgcgcaggaaggccggcctgatctggtgcgtgagcgtctgttgctacgcgccgccggccagcagttcttcaatgcctccaagctgaccctcggtaccctgtccgacacccagaccgccgccgacttgatgagctacgtgcagtccttcagcaaggacgcccgcgagatcttcgagcacttccactttgaagacttcgtgcagcagctctctgcggccaacctgctgtaccaggtggtgcagcgctttgccgcgactgacctgagcccggagcgcatcagcaacttcggcatgggcatcatcttcgaagagctgatccgcaagttcgcggaaagctccaacgaaaccgccggggagcacttcaccccgcgcgatatcgtgcacctgaccacctccctggtgatcaccgggcaggacgacaagctcaagcccaacagcatcgtcaccatctacgacccgactgccggcaccggcggcttcctctccgagggcgacgagtacatccagtccatcagccagcaagtcaccgtgtcgctgcacggccaggagctcaaccccgagtcctatgccatctgcaaggcggacatgctgatcaagggtcaggacgtcaccagcatcaagctgggcaacaccctgtctgacgaccagctggccgacagccgcttcgacttcatgctcagcaacccgccgtttggcgtggagtggaagaaagtccagaagcagatcaccgacgagcacagcgaaaagggcttcaacggccgcttcggcccgggcctgccgcgcgtgtccgatggctcgctgctgttccttctgcacctggtcagcaagatgcgtgacccgcgtgaaggcggctcgcgcatcggcatcatcctcaacggctcgccactgtttaccggcggcgccggttcgggcgagtcggagattcgccgctacctgctgcagaacgatctggtcgaagccatcatcgccctgcccaccgacatgttctacaacaccggcatcgccacctatgtgtgggtgctgagcaaccacaaggccgctgtgcgccagggcaaggtgcagttgattgatggcagccagcactttgccaagatgcgcaagtccctcggcagcaagcgccagtacctcaccgaggagcagatcgacgagctggtgcgcctgtatggccgcttcgagcaaaccgcgcagagcaagatcttccccgtcgaagcctttggctaccggcgcatcactgtcgagcgcccgctgcgcctgaacttccagaccagcgccgagcgcatcgaaaaagtgcaggaagaaaaagccatcgagaagatggacgccccggcacgccagcgcctgatcgaagccctgcaggcgatggacgaaagccagctgcaccgcaaccgcgagcagttcagcaagctgctgaaaaaggcgctcagcgctcacgatgtatcgcccagcacgcccgaactgaaggccatcctcaacggcttaagcgagcgcgaccccgaggcggatatctgcctggtcagaggccagccggaagccgatgccggcctgcgcgacaacgaaaacgtgccgctgggcgagtcggtgtacgactacttcgagcgcgaagtaaaaccccatgtgccggatgcctggatcgacgagagcaagcgtgatgaacaggacggcgaagtcggcgtggtcggttttgagattcccttcaaccgccacttctatgtgttccagccaccgcgtccgctggcagagatcgaccgcgacctgaaagcctgcaccgaccgcatcaagcagatgatcgaggggctgtcggcatga

SEQ ID NO: 365667 - DNA, 651 bp, Pseudomonas aeruginosa
atggcggctttggagagaacggcatatccacgactagcaactaccctcagtgcgaaggacttacaccgcaactattcgctttcctcaggagagcttgactggatttccaggacagctcgtagcccagccctttcccttgggctggcagtccagctcaaggtattccaagagctccattactttcctcccctagacgagatacctccagaaatcactgaccacatcaggaatacactcggttttggccctcgtatcacttcccgctataccaactcgcgtactttttataggcatcaggcggccattcgtgagtacctccagatcaaggctttctatggtagtgaagcgctcaccatagctctccaccttgcgcacgaatctgccgaggtactcgaccagcgggcggatatcatcaatgtgctgatcggcgagttgctgcagcgcagctacgaactcccagcctattccaccctcaatgacgctgctgaggatgccttagttgcaatgcaggagcggctattcaatctcgttgtgaccagggcgccaattgaggtggtctacaaactgaaagaactgctcgaaacggatttcgggcgacgccaaagtgacttcaacgccccgccgcgtcaggatagttgtcgtgtgagttga

SEQ ID NO: 365668 - DNA, 255 bp, Pseudomonas aeruginosa; identical to SEQ ID NO: 325395

SEQ ID NO: 365669 - DNA, 231 bp, Pseudomonas aeruginosa; identical to SEQ ID NO: 325745

SEQ ID NO: 365670 - DNA, 165 bp, Pseudomonas aeruginosa
atgtggctgggggatgtcgatagcgattgcccgctggcgttcgccaagtgggcgccgcttgaggtggtcgtctccctgctctcggtcatcgaaggcatcgtcaactcgatgctcgatcaagagccgacgttcatgttcaaggttggccggaggatcgaccagtga

SEQ ID NO: 365671 - DNA, 165 bp, Pseudomonas aeruginosa
atgtggctgggggatgtcgatagctattgcccgctggcgttcgccaagtgggcgccgcttgaacttgtcgtctccctgttctcggtcatcgagggcatcgtcaactcgatgctcgatcaagagccgacgttcaagttcaaggttggtcggaggatcgaccagtga

SEQ ID NO: 365672 - DNA, 201 bp, Pseudomonas aeruginosa
atgctcgacctgaaggaccttgtcgccctcgcgcaggatcggatgctgcctgacgattcgccgagtcgtttgcgaggcgcggtcgagcaccgccaccaactgcacggaaaccccatggtgcgacgcaaattcacgcatgcgttgaaaacccagcaggctccaatgcgccagcacgtcttccgcatggaaattcatgattaa

SEQ ID NO: 365673 - DNA, 1062 bp, Pseudomonas aeruginosa
atgagccgatcagagaccgtctggatcgtcgacgacgaccgctccatccgctgggtattggaaaaggccctgcaacaggaaggcatgaccacggtgagcttcgacagcgccgacagcgtgatcggccgcctcggccggcagcagccggacgtgatcatctccgatatccgcatgcccggcgccagcggcctcgacctgctggcgcagatccgcgaactgcatccgcgcctgccggtgatcatcatgaccgcgcattccgacctcgacagcgcggtggcctcctaccagggcggcgccttcgaatacctgcccaagccgttcgacgtcgacgaggcggtctccctggtcaagcgcgccaaccagcacgcccaggagcagcagggcctggagctgccggcgaaccaggcgcgcacgccggagatcatcggcgaggcgccggcgatgcaggaggtattccgcgccatcggccgcctcagccattccaacatcaccgtgctgatcaacggcgaatcgggtaccggcaaggagctggtcgcccatgccctgcatcgccacagcccgcgcgcagcctcgccattcatcgcgctgaacatggcggcgatccccaaggacctgatggaatccgagctgttcggccatgagaagggcgccttcaccggggccgccgcccagcgccgcggacgcttcgagcaagccgatggcggcaccctgttcctcgacgagatcggcgacatgccggccgacacccagacccgcctgctgcgcgtcctggccgacggcgagttctaccgggtcggcgggcacacgccggtgaaggtcgacgtgcggatcatcgccgccacccaccagaacctggaaagcctggtgcgcgacggcaagttccgcgaggacctgttccatcgcctgaacgtgatccgtatccacatcccgcggctggccgaccgccgcgaggacatcccggcgctggcccggcacttcctcagccgcgccgcccaggagctggcggtggaacccaagctgctgaaggcggaaaccgaggagtacctgaagaacctcggctag

SEQ ID NO: 365674 - DNA, 321 bp, Pseudomonas aeruginosa
atggcctccggccgcgaggtgcacatcgacgacctgccgccggagctgctgacccagccgcaggacagcgcgccggcggcgaactgggaacaggcccttcgccagtgggccgaccaggcgctgggccgcggccagtcgaacctgctggacagcgccgtgccggccttcgaacggatcatgatagaaaccgccctcaagcacaccgccggccgccgccgcgatgccgccgtgctgctcggctggggccgcaataccctgacccgcaagatcaaggagctggggatgaacgtcgatggagccgacgacgaaggcgacgactga

SEQ ID NO: 365675 - DNA, 402 bp, Pseudomonas aeruginosa
  misc_feature (257)..(266): n is a, c, g, or t
atgggatggcgtaccgactggcgtaatcccatactcatgcatggcatcttcggcgctcacccaaggatcaaaaacatcaacctgtatgttgtattccgccaactcacggacaatatcgacgactttggtattgcggaggtctggacaattttccttgaatgtaagccccataagcagaacgcgagcaccgtccacgtggatacgacgcttgagcatagccttgaccagttgcgaaacgacgtaggcacccataccgnnnnnnnnnngttgcgaaacgacataggcacccataccgtcattcaaacggcggccagccaggatgatctctggatgatagccaatactctgggctttatgagtcagataatatggatcgactccgatgcaatgaccgccgactag

SEQ ID NO: 365676 - DNA, 909 bp, Pseudomonas aeruginosa
atgacctttccaagtgacatcaaactagccatgcgtgagtgtattctcaagctgctctggcccaaggccgacattgtcggtttcttcgaaaacaacagttgtacaaagagcgatatcaaggccattggtgatcacaagaccatgcctcggtacgcaatcgtagatgcaatgttcaaacatctaagcgccaaacccgatgaggggctcggccagtatcgggcgatgctacaggcgctcatcacttggaagcatttcgactcttactacttcgactcgctcaagaagctgagtcgtaccgaggcagagagcgcaatcacacatctaaagcagttgcaggagatccgcgactacaagattcaggagcagcgaaaagaacgagaacgtaaggagtctgctgctcgagccccaaatacaacgctacctgagctcaagaccaagttcattgctcttcttcagggacaggaagttggagcaaaacgaggttatgcgctagaaaggattctgcagtcgctctcccagctggcctcactcgaggtgactgaaccttttcgggtgaacggtgagcaaatcgacggtgcagtcaagtacgatggagagcactatatcatcgaagcaaaatggcaagacaaagcagccgctaatgaagccatatatcagttcgccggtaagatcgagggcaaaatgtatgggcgcggccttttcttctcaatccacggattcagcgagcaagtaataggctcgcttgtagcgggtaaggctatcaagaccgttttcgtggatggcggcgatctcattgttgtgcttgagggactacttggtttcaccgagatgttggagcgcaagattaaagccgcacaaacgaaaggcttgatctacgttgatgccataaccggcaaaaccaagcagtag

SEQ ID NO: 365677 - DNA, 759 bp, Pseudomonas aeruginosa
atggccaactcacgcaagcatctgatctacctggtctacgggcgacagacctaccaccaggaagccctgttcagcatcgccagcgccttcgcccacctccgcgacggggcggcgcatggcctgacggtcagggtctataccgacgaccccagtccctacgccggcctgccggtgcaggtccgcgaagtgacggccgaggagttggtcgcctggtgccaaccgcacggctatcacttccgcgccaagcacgtggccctgcgcgacgccctggaagacgccgaccaggcattgctgatcgacaccgataccttcttccacagttcgcccctgcgcctgttcgaccgcatccagcccggcagcctgctgtgcaacgcgatcggcgcgcgctatggcgaacaccgtaacttcccgctctaccgcgacctctcgccctacctgttcgagcgcggctgggccgacgacgagatgcaccagctcaactccggcgtcatcggcctgcctcgggaagaggcgaaaatactcgaccgttcgttggaattaatggatgaactctatccaattgccaacggtgcctatactcttgaggaattcgtcctggccgtcgccgcccacaagcggctggagctggtgggttgtaccgacctgatccaccatactggagccggaaacagctgttccgcgcgaagatccaggcctggttgtgcaagcacggttcctcccttctcagcgctgcagccctcgacgacaccctcaaggtga

SEQ ID NO: 365678 - DNA, 837 bp, Pseudomonas aeruginosa
atgaattcgatagacccgccaaacctcgatgctggtgatacctacacaacctgtatcagcaaggtcaaggatactgcactgaaagcacgcttggccgccattaccaatgatgtatgcgtagcgtcggctgattacgtcgataaagctgggggaaatcgactacatgaggttccgcgaatcgcaaatatcggaggggtaacgaccgcagaactggaaaaggtatatacccagcgaatggcggggaaaactgctccaggccgggtagcctatgatgaaattttcaattcgtctgctaaatgcttgctttgtacccagcgaaaagtggacaccttggatcaccatctccccaaggctcattaccctgtactggcagtgactccggtcaacctggtaccagcttgctcagcgtgtaataaagcgaagcttgcaagcactccggcgagtgcagatgaatctgcccttcatccatactttgaccgtattcaagatgaccgttggctgcatggactcgtcgttgagggggggccggcggttgtgaagtttcgagtccaggctccagcacactgggccgctcagttgacaaaccgcgttcaattgcacttcgacggactggatcttggaaatctctactcagcagaggcagctgaggaactttcttccattcgatttcagttgactaatatccaccgtacagaaggcatgcaagctgttagggaggaactcttagctcgcggtgagagtgccactgcctctcagttgaatggttggcgcgcagtcacctatgaaagctttgcgatgagtgactggttttgcgatggcgggttcgctttagtctaa

SEQ ID NO: 365679 - DNA, 1542 bp, Pseudomonas aeruginosa
atgctcaaaattttcaaggtagtgggaagtgattcacccttacctaaaaccggcaaaaatgaggtgctgctctggacagataactgggacgactggtttacctacagcactcaatacgtggttttcgtatttgacgatggcgggaaccgtcatcgaatcggaaacgtcaagattggccagtttggcatgaagccaggacagcgacgcccggatttaaaagaagagtttgaatccataggggatcaatttttctcactcggacaggatgacgaatactacgaaaacctgaccaatctaggtacggatattcgtgatcgggtgcttctgggccttggcgatatcgcactcgattccgatcgtggcctgagagccatgaatgaaaaagtcacaggcgtttccttactgagatctgtaaccaagtcgaccgtagaggggcagtttcgccgccttgcaacaggtggggccagactcaacgaatttcgcttcgtctacactaccccccccattcccaggaaggtcactgagcgagccgtattgtcctttgaggtcaaaccaagctcgatgcctccatccaacatccatgtgttgatcgggcgtaacggggttggcaaaactcacatgctcaacaacatgtctaaagcgataatcgagaacgagccggacgaagccacgtttggcaccttcgaatgcaccacagatgaaaaatcctcgttcgccaacctggtatcggtcaccttcagcgccttcgatcctttcgaacctctccctaatcgcaaagaccgcctggacggtttgccgtgtgcttacgttggtttgaagcgacctggtaaaaatacgaaaggcgacccactgccccccaagacaccagaaaaactctccgaggagttcggtgcgagtgttctggtttgcagtcaaggcgctcgcctgtcccgatggcgccgggcactggaaatgctggagaccgatccgatcttcaaagccaatgacgtcgcatcattggcagaccctgcgatggaggagaaggagatccgatttgctgcccgaaaactcttcgggaaaatgagctctggccacaagattgtattgttgaccatcacaaggctggtcgagacggtcgaggagcgaacacttgtcctgttggatgagcctgaagcacatcttcaccccccattactttctgccttcgtcagatcgctgtcggatcttctggttaaccgaaatggggtggcgatcatcgcgacccattcacccgtagtcgtgcaggaggttccgaaaagctgtgtctggaagatcaggcgtagcggacgttcggtcgtcgtcgagcgacccgaaatcgagacattcggagagaacgtcggaatcctcacccgtgaaatttttggtcttgaagtaaccgatgctggtttccacaggctgctacgagaatcagtccagagtaccgacacgttagcccaagcatttgccaagttcgagggcgaactcggtggtgaagcaagagcgttgatccgcgcgctggtagtaaatcgggaggattcacaatga

SEQ ID NO: 365680 - DNA, 822 bp, Pseudomonas aeruginosa
gtggtctgttcagctttcgatgtggcgcggtcttgctactacgtccaccgtcttcgacggcggcgtgtcgatgctcgccgcgtggcgctacgcagccaagtcaaccagttgttcagccagagtcggggctcggccggcagccgcagcattctgggcatgctgcgcgaagagggcgtgaccatcggccgtttccgagtgcgtcggttgatgcgtgagctaggcctggttagcaagcaaccgggctcgcacgcctacaaacaggccacggttgagcggccggatatcccgaatcggctgaaccgcgaattcgcgaccgagcatcccaatcaggtgtggtgtggcgacatcacctacgtctgggcgcaaggccgttggcactacctggccgcggtgctggatctgcatacccggcgggtgatcggctgggcgttctcggccaagccggatgccgaactggtgatcaaggccctggacatggcctacgaacagcgcggcaagccacagcaggtgctgttccattcagaccagggcagccagtacgccagccgcctgtttcggcaacggctctggcgctatcggatgcagcagagcatgagtcgccgagggaattgctgggataactcgccgatggagcgcctgttccgcagtctgaagtcggagtgggtcccgtcaacgggttacctgacggcgcaggaggcccaacgggacatcagtcattacctgatgcatcgctacaactggatcaggccgcatcaattcaacgacgggttaccacctgcggtggccgaagaaaaactcaacccactgtccgggatgggttga

SEQ ID NO: 365681 - DNA, 228 bp, Pseudomonas aeruginosa
atgatcgaaatgacactggccggcttgctttgcgtaatctgcggcgtagtcggaatgattcggggaaagaaggtcgtcgatacgaaaggcggcacagttgcgcggtttctttcgatgccacgtggttgggcaaaatatttgaaatggcccatggggttggggctcgtcatgatggggctgctcttgattgggctgggcatcactaactgggggcgagtcggcagctag

SEQ ID NO: 365682 - DNA, 993 bp, Pseudomonas aeruginosa
atgaaaatcaagacctcgctcctctttgcgctcttcagtgcaataaccttcagcgccccatccttggcagagaccgcacatctgccttatgccaaggggtactttggagagccgctttcaaacctttcaatttcaaatcttgctgcatttgagaggggagcattgctttttataaagagttggagtgtagcagagagcaaccctaagaatgccagtagctgcgtatcatgtcatagctcccccatgcctggaggcggcggaatgagcagccaagcacttgtggaggtatctttaactaaccaaataatacaaaagaccaaaaaggtagaagccctctcccatgccgacacggaaacaagaagaaccccccccctattcggaattgggttgttagagttttcaatccaaagggaggcgaatggcaaggcaaggcctatttttggtgctctcgcaaatgaggatagcttaagaggatttgttataaaggccttttcagaagagctgggggtttactcctcagctgaatgtgcaaagaagaataaaatagcaaatgccaattattgcatcccgcaaatcagtgagggcgaaattaatgatgtgacattatacctgagatttacagcagcaccacctcaatctaagttagctaaaaatcatgcgggaagatctattttcgttaatgtcggatgtgcaagctgtcataccccttccatcagcacgaccaatgatgcaccgcctccattaagaggagtccgcattgaagcgtatacagaccttaaaactcacaatatcgggggaatggcaaaaatacgaacaactccgctgtgggcattgaaatcttatgggcctccgtacttgcatgatgcaagtgcgaatagcatcaaggatgccatattgaagcacaacggtgaggccgtcgaatcaaaatctagattcctctcgctaagtgagcaagcttcatcaagcctgcttatatttctagagggcttgtga

SEQ ID NO: 365683 - DNA, 1035 bp, Pseudomonas aeruginosa
atgaaaaatctaaatttctttgtaattcttttgcttgccgtcgatgcatgggcaggcggggcgcctggacatggaaaccagtttatcctcgctacatactggggagatgatgcaattgctttaattgacataaatggagcgcctggcaaagaggaagtttggcggatagacactctaaaagctgcaggctgcccgaagccttatgatattcgatccagccctaaaggagacgaagcatatgtaagctgcagcggtgccgatctggtggcagtggtagatataccggcgcagcaagtaaagtacacaataaagaccggaagttccccgagggacttggtggtgtttgacgaaggacgaaagctcatagtcgcaaactccggaaatgatacggtctcggtaattgatcttgtttcaaagaaaaaatcttacgacttccctatctcaaaccaaccctatggcgttgccgtagcacctaatggagtggatgccaccatcactggatgggcaagtggcgacttgcattttgtaaagcttggaaaagacagcgccaagtacatcggaaaagttgacgtcggcctattgccttacacagtagtaaccccaggggatggaagtatcgcatatgtcgccaccaatgccagtcacgctgtcgtggcggtggacaccaaatcagaaaagatacttcaaactattaaggtcggacgaaatccatggagtttagcagcaagccctgacggaaatagcctgcttgtaactaacaacagatcgaacaacctctcactgctaaaaacaggcatggccatttcagcggcgggggccaatcaaattaccatttcagcaggggcgcaacttcatgaagatggagaagaaacgaagagagcgccaaagaatgcgtctatttctgccaactcaaaaattggcgcctttacagacttggcgaacaatcaaatagttgtcgtggatctccctgacaataaaattacaaaagtaatcaacacagggaaagccccatatggaattgagttcattagataa

SEQ ID NO: 365684 - DNA, 1566 bp, Pseudomonas aeruginosa
atgacaacccaattcccgcgcgtcacttacgccactcagggcgaagacctctcagcactgcatgattttctggacaaggaaatccctgcgtttcgcgctaaatggctgggccgtcactggcccaatctgatcgatggccaagcaagcgaacaaggcaccaagtactcagccttcagcccgatcgacaacgagacactgctgggtacctttgtgtccgccgacaccattgccgttgaccgcgctgtccaggccgctcgcaagcagttcaagacctggggccatacaccctggcaggagcgagtaaaagccctccaaggctgggtagaagtgctgcgtcgtcgcaaatacgacatcgccatcgcttgcctgctggagatcggtaagtcgcgtatcgaagcactgggcgaagccgatgaagtcctcgacatggtcgagtattactgtggcgagtacgagcgtaacaacggctacctgcagcccctgcgccgcgaattccccaccgaggaaaccagcacccgcctgcgcccgatcagtgtgttcggggtcatcgcgccgttcaacttcccgctggtgctgtctgtgaacctggtcaccggcgccctgctaggcggcaacacagtggtgttcaaaccctcgcccaactgcggcatcaccgccaacctgctggtcgacactctgcgtgaagcgggcctggggcatctgatccatctgctcgccggccacgacgaatgcggcaaggcactggtcgcccatcccgagatcgatggcatcgccttcaccggctcctacgccaccggcatggcgattcatcgtgagctagccaaggcaccctattccaagccgctgatcgccgagatgggtggcaagaaccccgcctacgtctgtgccagcgccaacctgcaccacgcggcccgaggcgtcgcgcgctcggcgttcggcctgcagggccagaaatgcagcgcttgctcggtggtctacgtcgacagcaaggtgaaggatgacttcatccaggcactgatcgccgaagcccgccaggtcgccatcggcgacccacaaacccgcgacgcctggatgggcccgctctacgattcggcagccatcgagcgcttcctcgacgcagtgcaaacggcgcggcgcgacggttccgtgctgtacggcggtacccgtgtcgagaacgcgccttacgcccagggtcattacgtggtgccggcagtggttgaactaccgaaagaccatcccctggttcgtgtcgagctgttcgccccgttcgtggcgatccgttcggtggatggcctagaagcagcgttggttgaaggcaacgcggttaactatggtctcgcggcaggcgtctacaccaccgacgaagctgagctgcagtacttcctggaacatgcagaagccggcgccctctacgccaaccgtcccagcggtgcgaccaccggcgcctggccgggcgtgcaaagcttttgtggctggaaggggtcgggcatgagccacaaaggcggcctgggcccaaactacctgccgcagtacatgcgcgagcagagccacacgattcttcgctaa

SEQ ID NO: 365685 - DNA, 1302 bp, Pseudomonas aeruginosa
atgaatcaacccatcaacagcagcccgtactggtgggaggcagcaccactcgccagggacgctggcgagcagttgccgaattacagcgacgtggtgatcgtgggcgccggcatcacggccatgtgcgcagccatccctctcctccgagcaggacgcagcgtgaccatcgtcgacgccggagagatcggcagcggtgccagcactcgtaatgccggatacgtatcgcgctccttcaagcacagcttcggcgaccttgaacgcaagcacggccaggactacgccatccagttgcaccgggagctacagcagtccgtggactccgtacgtcacatggtgcagagcgaatcgatcgactgtgatctgcagatgatcggacgcttcatgccagccccaactgcagcagcctatgaagccctggcgaatgacctggatacccagcgtcggcacctgggcttcgagttcgagatgattccccgtgagcgagtccgaaacgagctcgccacggacatctatcaaggtggagccctgctacccgacctgggtggactgcacccaggcaagtaccacgcagggcttctggccagcgcactgaaatcaggcgcgacggtgatccccaatacccacgtcagcaaccttcaaccgcaaggcgatggccaggtacgagtggagacatcgcgtggcgaaatcatggccagggacgtggtcgtggccaccaatggctacaccgacacgctgctcccctggctgcgtcgtcgcatcattccattcgacgcacacatgatctccaccgaggccctgtccccgcagttggtgaagcgaatcatccccaatggtcgggtatgcatcgacaccaaccacaacccgttcttcgtgcgccaatcgccggatggcacccgcctgctgttcggcgccctcacgggcgagcagcccgatacccctgagcagaagggcgagcgcttgcgcgcgttgctgtgccgcctgctacctgacctggggcaagtagccatcgagcattcctggactggccgctgcagcggaacctttgacctgtacccgcacctgggcactcatcagggcatccactactcgctgggctactgcttcgtaggtgtaccgatgggcacctacctgggcggcaagatcgccgccggcattctcggtcgcgcggacgccttcacggtcttccgcgatcgcagcttccccagccttcccctttacagcgagaagccgtggttcctgccggcagtgttcggctactaccgcttcctcgatcgacgcacacctgccggcgctcttgcgtga

SEQ ID NO: 365686 - DNA, 1338 bp, Pseudomonas aeruginosa
atgaactaccccgatgacgcccccgcctctcaacagatctatgcgcgtgcccgtcatgtgcttcccgggggcaacacccgtacgacggtctatatgaaaccgttcccgctctatgcagttcgtggtgaaggttgcagggtctgggatgccgatggcgccgagcggatcgactgcatcaataacttcaccgcgatgatccatggctattgccacccgaaagtggacgaggctgtacgcgagcaacttgctctgggaacttgcttcggcatgcccacagagagtgagatcgagctggccgaaatcctctgtgaacgcctcgccggcgtagaccaggtacgcttcaccaactccggtaccgaagccgtgatgatggcgctcaaggcggcacgagccttcaccggcagagagaagatcgccaaggtcgaaggtgcctatcacggctcttacgactacgcagaggtgagcctggattccgcgcccgcgaactggggcgactcggcaccgacctccacgccctatgccaaaggcactcccaccggcgtgctcgatgacgtggtggtgttgccgttcaacaacatcgaactcaccgagcgtcttctgcgcgagcaagccggccaactggccgccgtgctcgttgacccgatgcccaaccgtgccggcctcgtaccggctactgccgagtacatggcatgcctggctcgcgtagctaaggaaacgggcactctgctgatcttcgacgaggtgatcagcctgcgtctgggctaccacggcgcccagggtatctggggcgtgaaacccgacctcaccaccatgggcaagatcatcgggggcggttaccccatcggtgccgtgggtggtcgtgaagaagtaatggccgtgttcgatcccacctcgggcaagccagcgctccctcacggcggcaccttctccgccaaccccatcagcatgcgagcgggcatcgccagcctgcgtctgctcgacaagcctgccttcgagcgccttgaagctatcggcaatcgagttcgccagggtatcgatgccgctttcgagcgcctgggcattccaggacgcaccaccggtcgcggttcattattgaaggttcacttcaccaacaacgcggttgtggattaccgcagcgcctaccagaacgcagataccgccaagctgctggccaccttcaatcttggcttgctcaaccgaggcgtcctggcagccagctatggtctgatggcgctctcgaccagcatgtcggacgctgacatcgatcaggtgattgccgcggccgaaggtgccttgcacgacgtcgtacagagcctggaaacggcccaagcagtttga

SEQ ID NO: 365687 - DNA, 1419 bp, Pseudomonas aeruginosa
atgagtgattccaccccctctgtagcccataagggcgaggccaagctgagtcgtgcgctcaagcaacgccacgtaaccatgatctcgctgggcgggatcatcggcgccggcctgttcgtcggcagcagcgccgtcatcaccaccattggcccagccgcggtactgagctacgcgctcgccggcctggttgtcctgctggtcatgcgcatgctgggcgagatggccattgcgattcccggcatcggtgccttcaccgaatacaaccgcgtcggtctgggcgactgggcaggtttcacctccggctggctgtactggtacttctgggtgatcgtggttgccgtagaagtagtcgtaggcgccggcatgctccatcgctggatacccgtgcccgaatggatcatcggcatagtgctgctaagcaccatgaccgtagtgaacctgctttcggtgcgttcctatggtgagttcgaatactggttcgcctcgctcaaggtcgccgcgatcatcgtcttcatcgtcgtcgctgcctcctacgcgctgggcatcacgtcccctgccccaaccttcggcaatatcgtcgaccacggtggcttcatgccctttggattccaggcagtcatcgccggcgtgcccatggtgatcttcgccatctgcggtgccgagatcgccaccattgcagcggcagagtcggacgagccggctcgcggcgtcgccagcatgacccgctcggtcatcgtgcgcgtactgaccttctatgtcggttcgatcctgctgattgtctgtgtcgtgccctgggacaccttgaaagcaggccactccccattcgtggcggccatggatctgatgaacattccgtacgccggcgacatgatgaatgccgtggtgctgattgctgtcctcagttgcctgaactcggggctgtatgtcgcctcccgcgtgctgttcagtctcgggcagcgtggtgaagcgcctgccggcatgctcaagctgtcgaagaatcgcgtaccgcaacgcgccatccttttcagcagcgtcatcggcttcgtggcagtgctcagctccatcgtttcttccgagggagtgttcctctggctggtgaacgcctcgggcgcaatcatgctgttcatctacctactcatcgccgctgcacaactgcgcatccgcacgcgcttcgagcgggaagcaccccaggcgctcagcctgcgcatgtggctgttcccctggctcacctacgccgtgatcgcagcgatctccgcgatgctcatcgcgatggcgctgcgccctgagttccagacccagttcgccgcctccgtcgtgctgcttgctgtcgtgctggccatctacaagctgcgcaagagcgccagctccggctcggccgcgcacctcgaccagatccttcgcgcccgtcgcgccaactga

SEQ ID NO: 365688 - DNA, 873 bp, Pseudomonas aeruginosa
atggacaagcaacagatcgagaagctgatcgaagcggagttcgactcgctgccgcgagtgctacagcaagccgccagattcgtcatcgccaaccccacggaagtggcgctcgactccatgcgtggggtggcgcgcaaagcgggcgttcagcctgctgccatgctgcgactggcgcggcatctgaagttcgaaaactacgaagtgttccgcgagcatttccgcagctggctggccgatcgcgattcgccactgaccgaccgcgccaaggccttgcgccaggggccgcacggtgacgccaatgcagagttggtgagcctgtggctcgacgccgagtcgcacaacctcgtccagaccctgggagccgagcggcacccgtccatcgccgaggcgctgctgctcctgcaacaggcgcggcgcatctatgtcatgggcctgcgcagcctgttctcggcggcgttctacttcaattacacctgcagcatgttcatggacaacgtcgccatggtgacgagcatcggcggcaccttcgccgatgaactgcggcgcatcgacgaccaggacgtactgctggtattcagctaccacccctatacccaggactcgctgaaggcgatcaccttcgccaccgagcgcgcggcgaagatcatcaccgtcaccgatagccccttggcgccgacggcacccgcggcaagctgcgtactgctggcccccaacaccactccttccctgctcccttccgtgttgccggccctggcagtgtcgcagactctggccgccctactgattgccaacagcgccgacacgagcatgcaggaagttgctaatagcgaggcccagctccgccatttcaacgtctacgtgaaagagcgctaa

SEQ ID NO: 365689 - DNA, 441 bp, Pseudomonas aeruginosa
atgagcaaaggtcgcatccttaacgcatcgaccatttcgggtatggataagtttatggcgctggctcgcatcgccgtcggcatctgcgacgaagcggacagaatcggggcaagcgaatacacagatgctgagttaatcgctcgtgcgcgtgagctcttcccctccaagccgtactgcctggtacgcgattgggtcttggtagatttgagtgatacggagggcctggaggtgccagaaggggcgctgcttcgtgttatctacgccggcaaggttgttgatgatcaggcagatcgtttcgatcgcccccggtggatactaagtaccttcgagctgagtttggtagaagatcatctgttcgagtcgatgaacacgatctacgtgctctctggtcggggcgcgcgtgctacctgtgattggcgtgtccttgcgagtctcttctag

SEQ ID NO: 365690 - DNA, 459 bp, Pseudomonas aeruginosa
gtgcagtatgaatccctcgtacgtggcctgtgggtgctctacgttgcctctgacaaagaggccgagttactgatcaccgagctcactcacgaaaccgccaaacgcgcgagcaagatcccgatgctcagcaagatgctggatgaaatcgaagccaaggcgcctcatgccccagtagcccaccttcgcgagttcaagcactactcttggaagcctctgagctcgtttgttcacggcggaatccacgcagtgaatcgccacggaagaggcttcccgcccgaactcgtgttcaccctggtgcagcactcaaacggattgttgggaatggcaggtaacctcctactgatcctaagaggcgtcccgcccgagaccggcaccatggcgcgcatctaccgcgactacgcggactgctttcctcccgctgacccaccatatcaacgcacagtagatccggcccactga

SEQ ID NO: 365691 - DNA, 762 bp, Pseudomonas aeruginosa
atgcgccatcaactatttggcgcacttatgaagatccatctgctatcagacttacataatgaatttgacgtctatgagcccgcacagctagatgctgatgtagtagttcttgcaggagacatcgatgtgaagcaaagggccatggtctgggccaagcagaggtttaagtgccccgttctgtacgttgctggcaatcacgagttctaccgggggcagctcggcaatacattgcagaaactacgtgcactgcaggacggccaagtacatgtgctcgattgcgacgaaatagtactcggtggtgtgcgcttccttggggctacgggatgggctgattacaaagctctcggcgccccagccacagcagcacgagtggctcaaagctcaatgacagacttcaagcaaattcgcacgtcgagctacaagcgagtgaggcccggtgacttcgcagatctcgcccttagggcatacgcttggcttgaagaaaaactaacaactccctttgcagggccgactgtggtgatcacccaccatgccccatctttacgctccctagaaggcaaccctcacgcgggaggccctctggacgcggcttatgctaataactgggaatcccttctgcgacctccagtcactctttggctgcacggccacatccacactgctgtggactacgagataaacaacgttcgagtagtggcaaaccccaggggttatcccgtggaagatacgggcttcgatcctctacagctaatcgaggtttaa

SEQ ID NO: 365692 - DNA, 369 bp, Pseudomonas aeruginosa
atgtccagactcgccgagtttcgtgccgctgaaaaagcccttgctgaccaacttgctcaccttgagtcgctgaaaaacgacgcaggtctgaagaaagagattgagttcgagcaaaagctgaccgcgttgatgggcgagtacagcaagagcctgagagacgtcgttgccatcctggatccggaagctggacaggacagccgcagagcggttcgctccgtagctccccagcgtcgcgcacgcgccatcaaggtctacaagaatccgcacaccggtgaggttgttgagaccaaagggggcaaccacaaggtgctcaaagcctggaaggccgagcatggtaacgatgtggtcgagtcttggctgcagagctaa

SEQ ID NO: 365693 - DNA, 1044 bp, Pseudomonas aeruginosa
atggctataaaaaatcggcacggagttgctagggctgcatatgcctttacatctgccttgtcgcttcttctgaagcgtttgggtaagcacaatgtcatggaggagccggatatacttggtgtagagccggatatcacatttggtcagaatgactcgctgaccatgattgagacaaagttttatcgtcgcagttctccgccgcccctttctacttttaaacgcgctttagagcatactcatgaaaagggtagtaggataggcgctgccaaaatcgtgctggcgatttcctgtcccatggatgaacgtttttctaatgtgacccaggcattccccactgttgaggtttgggatgaaacgaagctattcgagatggcagctccgttctctgagatcttgaccctttttgaaaatatattcgaagctgacctacctaggagtgcagagactcttagctttaattcgcaaatgcacgcgatgccaggtgctgatgaaccggcatcggagcctaagaaaggcaaggtgttggccgaggccttagcagcaatagaacgcggccgggatatggctacagatttcgaaaatgcttgcattaactcccttaaatatctcttcgaaaaagatctacacggttggcacgagcagtctcgaaccgtagatagtttgcaccgtagggatctggtatgccggatcttggcaaaggcagccgaggtgtggcgcctgatgctcgacgacctaggaagcagatatgtggtctttgaatttaagaactacagcaagcccattacccaaaacgagatcatcaccacagagcgctatttgtacccctcagctctcagaaaggttgcgattgtgatttcacatgaggagtgcgcggactctgctaaagccgtaattgctggggcgatgcgagagcatgggaagttgataatccccctgtctgtgccggagataatcgatttgctaaacaccaaagatgaaggcgcagatccgaatacctacctgttcgaacgcgtcgatcagtttcttttagggcttggaaggtaa

SEQ ID NO: 365694 - DNA, 1098 bp, Pseudomonas aeruginosa
atgcttcatgagcgtcgcttgcctgatgaaatagctcaagatctgaatcgcatctttatcattaagttgcagttgctagattggctacttcgtagcccgccacaattcctggaagacaacaagttgttgacccagcgattcgggcaaccgcttggtgattggctttggcaaaggatttattggcatcaggcacgcactgcttttggagatgctgttactgcgttatcaaccaaagcccgggaaaacccagctgaagcgctcttagtggcggccgcaattgcccacgacgcgcagtttcacagccagtgggacgctgcgggaaatgaacttcagttcccacgtctgtatcccgattggttagacaccgtcgggaaggtagcagagcctttctatggctggcttgcaggaatgggcttcgagtccgaaccgttcagcttgactgggggaaagattgaccgcgcaacagtgatgaaagcgtttcgtccacaatcgcacggtgtgtgcgggtattgcgacgggccattgggtgagttgggtactaacactgaagccaatgactgcgaccacttctttccaaaatcgcagtggcctcatctcgcaattcacccggcgaatcttttttctgcatgccaagggtgcaattcgcgttggaaacttgccaatactcctatgggtaatgctgacgcagcgggattacatgaaacataccacccaatgctaaggcctggcgtctcatcggttgtggtgactgcaggcatatcgcctaccaatgcgcgtcaggttgaaatcaaaatcacagatcctactgtacctcgtcgagcctcaacacttgttgagacacttgacttggaaagtcgatggactaattcagttaatgaggttctggatagaggcgtctctgtgcttgttgcaaagtcagtgcgcgataaaagctgtggacggcagccagattctgactttattagatcgctgattgaggctgacatcgaatggaagcgagagcagctaggcaaagaagaacgctgcatacgtcatattgctgtttttgagtgcatgcgtgacgatcttcttcacgagataatcgctgatctagcctaa

SEQ ID NO: 365695 - DNA, 2004 bp, Pseudomonas aeruginosa
atgcgtctgcgctacctacgcctgaaaaattatcctcctatctcggacattaaggtttgcttcgccagcgaatcgccactggcacgggaatgctcgatccgctttgtggtgggggtgaatggcagcggcaaatccaacctgctgcgcgcagtagctgaggtttttttagccttggcagatggtcagaaaacccttttccctgtgcaacttgtttatgagttaggtagtcgcggctcgtcaaatgctcgaactctggtgcttgactggtttgagggtcgacaatcggcgagcttgtggattgccgacaaattcgcctttccgaatagctttactgaggttcagttccaacacgttttatcaagtttttcaactgagtccaccgatatcccgtcggaatttcgcccgcttgttcgaaagggggaatggcccgcaggctcagtgacaccgcacgctattgcgttgccttctgctgtgttggcttacaccaccggcgatctgcgcccatggcgatctgtgtggagccgcaatcagaactcggttggtttattggaaagtaacgatgaagatcaaagcattgagcgccccgcaggctggaccatcagtcaggagctcgccctccaagctgtgcgtcgggctgggagcgatatccccaagcagcccgaagatgcaaagagtgtcgaaactgatctgtatcgaaggccagttttgctcgatgcgacgctgctgaaatgcgcgttgctggcagtggccctgccgcaggcatttattgaaaccactgacaactcgctgccggcagagatagacgctcggatagctaggcagcgtcagcaggacaacattactccgcttcaagagctattggagcgagggggctggcatcatttggtttctgtagcgttccgctcgcgcctgcaaacagcactttgggatcagaaactgtgtgaaaccgcacacgattggtggctgtgtgctagcgaggtgatcgcggaacctcatcccaccgaacaccgccgcacgctttggtttgatctgaaaagcccctttaatgcacaagggttatctttgttgtctgccgatcacgaagagctaagcacctgttcgacccaaggcgaagccttatgggcgttgttgggtggcgccaaggatgtcagcagttttgatctgtttactcgtcttctggagctgaaccaacaggggctattcgatgacgtgcagctgaggctgcgtcggcacgctatgtctgatgcaaagcccgatactatcaagcacgatattggcgtaatgcgttatgaagaactatccgatggagagcagatgtttatgggaagaatggccctgctgcatctgctaagcggacgtcaggactccctgttgcttttggatgaacctgaaactcactttaatgatctgtggaagcgcgacattgtttctgtagttgatgatgcattggcaagtacctcggtagatgtactaattgccacccatgccgccttgatgctcacggacgcactgaaagacgaattggtggtgttggagcgaaaatcgctcgtagacgctacagggcctagcctatctggtgtccgaatcctggatgctcaaacccatactttcggagcgacaggcgaccatccattacgggatatttttggggctccggatacagtcggaagacgagcaagtcgtttactagaggtccttgtcgcggcaacgcagtttgcggaggaagtcgaggagtgctggagactaggaacaccgttgagtaaggatcttgttgatcagatattgaaagctgctgctttaacagagagcgggctaactgagtatcaggtagtcgatagtctcctcagcgctgagcgctttgcagtgcactttggcgtttctaaacctttaaccatgaaggcggttgttgaggcttttattcgccaaaccggccctggttattttcaggtcgatctaaagcgagcttggcgaggtttggtagggagtacggtcaatgcttcatga

SEQ ID NO: 365696 - DNA, 1938 bp, Pseudomonas aeruginosa
atgagcttgcctgaatcttgggtacaagcacgcctcaccgatgtttgcgagctcaacccacggttacctgcagtgggccgaccggctgacgatgcgaccgtaacttttgtgccaatgtccgctgtcgatgaacatggtggcgtcataaacaaagccgaaacacgtacgttcgctgaggttgcgaaaggctacacaagttttcgcgagcaagatgtgctattcgcaaaagtcacgccttgcatggagaacggaaaggctgccatagcacggaacctggaaaacggttttggctttggctccacagaattccatgtgttgcgtccgaccaaggttgttcttccggaatacgtattcagttttattcggcagaaagcctttcgggatcgggcagcgtctgcatttgtgggcacgggaggtctgcaacgggtaccgcctgattttctttcacgggtaaagatcccactccctactcttcctgaacaacagcgtatcgtcgatgtgctgcggcaggtggaggcggtgactaaagccaagaagtcaattagcgatcaagttgaccacctgatacgtacggcgtactgggaatactttggcgcttggtataccacagatggtttgattgatcccgttcgaattagcgactacgtggcggactctcagtacggggtatccgaagctatgggggaaaccggaacgcatgctgtattgcgaatgaacagcatgacaactagcggctggttggatttgacagatctgaaatacgctcacttgtcaaaaaaagacatcgaatctactgagttgcgcgatggcgacctgctgtttaaccggacgaattcaaaggagttagttggtaagtgcgcgatctggcgtcccgttgagggcgcatttagctttgcgtcttatctagtgcgccttcgcttaaagcccgagatgttgcctgagtttctctgggccacattgaacagtgcttatggaaaatatcgtctccttaattcagcaaagcaggccgttagtatggcgaatgtcagcccgacggatctggggcgaatcaccgttccactgccatctctatcattgcaacataagttcgcacgattggtgcgtgaaatcgagacgttgcgggcgcagatgctcggtaaaatcgagatgtattccgacttgcaggagattatttgccagcaggctctggtcggggagttgactacgcaatggcgcgagtcgcatgcggatgcaatcatagatgcggcaaaagcccgtgatgcgttgctacttaaaaatggagcaaaaatttctctggcgggggcagccaaagtcagcttcaaggtgcaggctgatctctctgtgcgtcctgctcgtcgttggttgtctggtgagctcagtgagttccagcgccaggtgctagaagttttcaaggagtattgccagcaaagtggccaacccttgttggtagaggacccagaactattttcccgcttctgcgacgattcaaccgtgacggatcgtctgcaatcatttggcctgctcaacgggaatcgtatccgccgtgctttgagccaattatcggcattgggtctgattgcaaaaatcactttacccaagcaagatctggtgagcggcgagtttgactatctaaaagccttccgtcctctacgcactgaagagttctcgcgcatggctgatgtggaagctttgcggaaagccttttcgtcaaatgctactctgcagtattacttcaccgtgcatttggattacgaaacttccgagcacagtggcgctgacggcatgttccaggtgatttcagttcaagatgacgacggcaaggatttaacccatctggtggatcggagtcgtcattacgcctcgctcgacgatgtcaaagaagacatcgcccgtgctctcaatgtagaagcgggtcaagtcgatctggaggccgtgtaa

SEQ ID NO: 365697 - DNA, 2454 bp, Pseudomonas aeruginosa
atgcttgctcctcatatcaagaaaaaagtcgacgaactttggaaccgcttttgggctgccggcctcaccaaccccttggtggcggttgagcaaatcacctatctgcttttcctcaagcgtttggaagatatcgacctcaagcgccagcaacgcggcttcccatcgatctacgcgggctacgaatcttgtaagtggagctacatccgccgagagaagaccaatcctgctcatttaattgacgtggtttttccctggctacgtgagcttgacaaacatttcagcagcgccagcgctgatggcacagaattggccagcctcaataaccgcatggccgacgcctactttcagcttgaccctaacaagggcaaggtgttgtcggatgccatcgacgccatcgaccagctctttgctcgcgccggcgaaggctctgctgcccaagacataatgggcgacacctttgaatatctgctcagtgaagtggccacggcaggtaagaatggccagttccgcaccccgcgccatttgatccgcttcatggttgagctactcgaccctgagcccggccagcgcgtgattgaccctgccgctggcacgggcggttttttgtttagcacccagcagcatctgatgcgcaaatactcggcgcaagaaaacctcgtgctggaatgggatggtaccccgcaccgcaccgatggtgctgccgctacaccggagcaatatgaggccatccacaacggtgcaaattttgtcggtctcgataacgaccgcaccatggcgcgcatcggctggatgaacctggtgctgcacgatgtgaccgatccgcatttgttacagggcgactcgctcagcaagcgcgaaggaaaagccaagcttaaagaactactggagccaggcagctatcagttcgtactggccaatccgccctttaccggaacggtcgacagcggcgatctggatcccgacaccttgcttttcccgcgcgtcgggggtggaggcaagaaaaagcacgaatcgatcaccaacaagagcgagctgctcttcctctggctgatgctcgatttgctcgatattggcggtcgttgtgcggtgatcattcccgagggtgtcttgttcggcaataccgaagcccacgtgcgcttgcgccgtgaactacttgtcgagcacgtagtggaaggggtgatatcccttcctggcggtgtctttcaaccctacacaggcgtcaagacctccatcctgatcttcagaaaggtcacccgccgcgacagcaagcaaagcctgcccagcaacgccgcgccactcagtgaatacgtttggttctatgaggtggaggaagatggctactcaaaggatgccaaacgcaatgcacgtcctggtcaacaaaacgacttatgggatgcgctcatcaagttcaaggagtgggtcgagcacgggcgcaacgctgctcagctcaatgaaaaaaccttgctgcaacccagcttttacacagagcgctggcgccaggcattgctgcgtgacactgccgacgaactcacgcctgctggtgtggcgttttccagtctgcccgataccagcatgtgggatgggcacgtgtggggcattcatgagcttttcccggagcttccttctaacccgaaagaggctgaagaaaacatccgctctatcgccgcgaatgtgttgaccgagttggccgttcaggcgctacaaccagcggcaaaaaaagcctgggatgcaacgctgatggcacggctcgccgaggaggccaccgatatcgagctcatagatgcttggaaaaaggctgccaagccagccgaagcggagttcaaaaaaatggcccgagaaaaagaggccttcttcgaaaaagatgattctccggcgctgcccatatggaaagacctggtgaaaacagcgctgtcagacgcccaggccgataactacgtgcttggtctattgcgaggcaatcagccgcccaaggccatgacggcgcacgatatcggacagaaactggcagaggtagcccgtgaagtcgccaaacttgatggtttcgacgtcacactgcgcagcttggcgattgatcagtgcacgccgctaaaggcggccaagcactggatagtgccggtgcgcgactgggcgcgtaacgatgaatggcaaagtgtggatggcgagcttagcggctctcacgacgccgatggtttagtgcggtcggcttatgtcgaggcgatgctggccgatgggttgtatgacgacaagggcgcacttaaggatggtctgctcgacccggattgcatcgaagcgcgtgaatggaacctgtccgccggacagtacaagccattcgatttcacccagctcaaaagtgacaagagcgtggctgagttgatcggtgttcttaagagcaccgagcaggacattatcaaaggcttggacacgttgctggcgatggtggaggggcgcgaatga

SEQ ID NO: 365698 - DNA, 2343 bp, Pseudomonas aeruginosa
ttggaacggctgcggcaccagcatcagttcgccgagccgcttggcaaggtaaccatcaacgccgacatagctggccgcgactatcaaaacgaagccattcgccgcgtcactgaaggcgtagatgcagccaagcgcaagtttctattggtgatggctaccggcacgggcaagacgcgaaccaccatcgcccttgttgacactttgctgcgttccaagcgcgtacagcgagtgctgttcctggcagatcgacgtgaattggtgcgccaggcgatgtcggagttcaaatcccatctacccaatgaaagcctggcccgcatcgaatctggggaaacctcaggggcgcgtatccagttttccacttaccccagcatgatgcaggtgtattcgcgcttgtcagtcggctactacgatctgatcgtggccgatgaaagccatcgctccatctatcagcgctacaaagccatttttgatcattttgatgccattcagctcggactgaccgcaaccccaactgactacatcgaccacaacacgtttgaactattcgactgtggcgacggcgtccccagttattactacagctatgagcaggccatcgctgatcagaacctagtgaattaccgcgtgctcgatgcacaaaccaactttcagcttcaaggcattcagggggaagctttgcccgaacctttgaggcagatggcgcgtgatcaaggcgtagatcttgatgagctcaattttgatggcagtgacatcgaaaaaggcatcatcaaccaaggtactaacgatgccatggtgcgagagttcatggacaaaagtcgcaaagatgttcgcggcctgccacacaagtccatcatcttcgccgtcagtcatgctcacgctaagcgactctacgaaagcttcaaccgcttgtacccggagctacagcgccaaggtatggccgaaatcatcgacagccacatggagcgtgctgacaccacgctggatgatttcaaataccgcaccatgccacgtgtggccatctccgtggatatgcttgacaccggcgtggatgtccccgccattcagaacctggttttcgccaagcctgtgttcagcaaggtcaagttctggcagatgatcgggcgcggcactcggctacacaccgacaaggcaaccggcgagatcaagaaggactttctgatcattgatcactggaagaatttcgcttacttcaagcttaaacccgacggcgaagtggatcaccccagcgagccactgccggtgcgcctgttccgcctgcggttggaaaaatggcagctactacacgcccagcagcaggacacgaagacggctattgccgatttgctagccatgttgagcgccttgccccggcatagcatcaacgtgcggccgcactgggatgtgctcgacgcgctggcgcggcaatggccggcgcccagccaaagcgcgctggaccatctatctacgagcatcgcgcctttgatgcgctttgcgccgttggcgggcttggatgagatgcagttccagatctggtgtgaacgcctcgcggtggcctggcttaagggcgataccaccgaacaagccaaggtgcgcgaacgcgttcaggaggctgttgcgagtttggctgacaacatccccgaggtgcagcgcgtggcggagcaacgggcctgggtgcagtcctcaggcttttggcagcaccttgatgcgactcgtctgagcacgctgcaatctgtgttcgcccccttgatgcgctatcgcacctccacacccagtcgtacggtcgaaatcaatctaccggacagcattgcccagcgcagttggataatctacggccccaccggcgaaggcgcttttgctgaaagctatcgcgagcaggtagaggcgctcgtgcgccggctggctgaccagcttcctgagctggcgaagctcaagcaaggcgagcatctaggagacgacgaattagaacggatcagtgacacattgaaccaggctgatctgttcgttaccgaagacaccttgcgcaaagcctttgaagctcccgcagcgtcgttggctgactttttgcgccacatactttgcgagggcgcgcacctgcctaaccgcgagcaacgcatcaatgccgcattcgatgcattcattgccgctcacggatatttgcgcgccaaccaactcaattttctgcgagccgtaaaggcggccgtgctgcgccacgggcgcattacacgtgcggcactcagcgagccaccgctttcgcgcgtagggcgagtggaaacgctatttccaccgcaggacatcgatgaacttatcaacctcgccaaccaattgttggacgaggccgcctga

SEQ ID NO: 365699 - DNA, 1359 bp, Pseudomonas aeruginosa
atgaagaattttaagttgatagagaaaaagggagtgggctatcccgtattttctcttatttctctacctgaatataatcctttgttttgtatggaggcatattgtttctacttggcatcacatggacgtagccgtgaaactattaaggcgtatgctaatgcggttgcaagattcttggatttcgtggtggaaattgcaactttgtgcttcgacgggaggtttgttaagccagaaagctatcaccaactaattcatatgtactttcaggttattaatggttgtgactttagggggaatgctcttctttctgaggtaaaagatagtttgaaaatgcgctacgtttcaagtagcacagataagcagtgtcaggcggcaattagatcatttatgcaagcctcatcaagttttgattcttctcgaactatgcttattgctgggcatgaggcaagcagctcagaggttgctcggctttcaaatgacttctatgcgattggaagtcgtgcaagtgtttatgagcatagaaatattagtgtgaactcgtatttgtctggatgtatttctggaggagttcaagttcccaaggggaaatcttttataccaaattatagcggccctgggcgaaagcaaggtttgaaatctcacgtaattaatttagaagactttttaaaaattgttgctgccgctaggaacgctcgagataggtttctttttattctcttggccgccactgggattcgcctttctgaagcgcttcaaattctaatgattgatattgacttcaagaatagaagaattctaattgtggatcctaagacgaggccgtatgaatatgtgagacgtgggctttgtaccgatgaaatcaaatgcttgaagttcaaggggcgtacaacacccaaagtgttttatgtgtgtgagcttgaagaaagtctatggcaggaatttaagtgccttctctcagatatagtgtgtatgccagtcgtcgactcgcaggggaagtatgttgtgcatgattttattttccgaaatgcggttggtgataatttggggaagcctatttgtttaaatacgcgctatagctccatagaacgtacctttaatcgatgtgctgaagaagcaggcgttgactgtgcggggctgcatggactacgtcacttttgggtcagtcacttgtataacgtgtacggcttcccaatagaaaagatcagtaagttggccggtcactcaagcgttgaggttacagaaaggtattgccacgttgatatgagtgcccaacgaattcgagcggaaaaccaggctcaaagagggatgggttttataagtgttgatctgatgttggatagtaatgatgaatcttggtga

SEQ ID NO: 365700 - DNA, 1047 bp, Pseudomonas aeruginosa
atgactccacatcatacacgagccagcgttgttaagacttggcgcaagctggtttcagataaggatatttcattacttaaaacggggcagtcggttagtacaattaactattatgatgccttgatcgacgaggagcgggaagagctcaggggggcggcggaaagcgttgtggagaggatttggaggggagaaccaatcaagccgcacttgccaaattcaaattttaggaaggcagtcgaaagagacgctgctggggctatgagcgcttttggttgtgtatcaatgtgcattgcgggactagagtcttgcattgacggggttgagaggattaggaggaataactacgcagggctctcttatcatgcgactcacatatgtgtaatgaataatgtgtgtcctcctgagattgttgctgcaggctgtgcgaatcgctgtggtttttgtccttacggcgtaaggggcgtcgatcatcttgaggcaattgaagttaagatatatgtcttgggacaggaaatcatagagttacatgaacatgctgattctttggaatccagcggtgaggcacaggctgagttggaaaagcttgacgagcacttgagtctcaccgttcaagaagctttgagttggagccattctagagatgtgctcgtggggtttatggagggagagttgagtgataaagataactatctgagttactctccagaaattgctaggaaagctctaagggaaataaaatttaaaactgattcgtctgagtatttgatttcaaggctggctcaggttaatagctttccagggctgcaaagtgactctgtaaaggcaacctttaaaaggcttcatgcaaagctgatatcgggcagtgcgcgaagtcatttacttggtggacgtaatcccgatgatccaagttcgttgggtgtctcacaggtttattcgttgattaatagtatcgcaaaaactacagggaagaccattggtgacctcgcgcaagaaattactcttgcgtctcgaaatgatattgatgttaagatggtggcttgggattga

SEQ ID NO: 365701 - DNA, 648 bp, Pseudomonas aeruginosa
atggggtcaagaaaactttccgctaggcaggctggtctaatagaaagaagagtcaactttgtttcaactgaaattctgttgctaaggaaatcaaatgttaaatttgagagtatcacggggttagcaaaatacctggcaggaaaagtctccgcctcagagcgtacggatggtaattctgtatcttttagctactccaccttgctaagggtcaaaggttgttattattcaattctgaaagagtattttgaagcgtcgaattgtcgatcggatactagggggagtactgtggtggatccatttgccgcgagagtaatcgcggcgaaggatttagaggttgcgagtcttcagaataggatttctaagttggaggctaagctcgttgagaaagcaagtcgagaaatacctgtaatttacccgcaccaagagtcagtcttgggacgggaaatggtgaaatatagtaagcctcttgattgttatcggatgggggtgattgcaaatatgttttttgagaagcttcttgaaacagagcagtttaaatttgacgaaaattctggggatattttgaatgtcggtcgcgcgcgagtcgtagcgataagtcgtttggatatttcagatttcttgagatggaagtcggattatagtaagtag

SEQ ID NO: 365702 - DNA, 288 bp, Pseudomonas aeruginosa
atggcgcagctgacgttacaaggcctggttggggccactgatgaagtaaccacttcctttgtcagtgaggtcttccccaacctggccagcatggtagagccgctggtatggactctggcggtgggctactgggtcgctttgggtctgcagatgtacaacggccatgtttcagtcaaaggctgggatatcgtcaagcgggccatgtggctctgttgcaaagattggcggcagtcagaggtaggctgtcgctctgcgccgatcaggcggctgctgcgaaatggtggttga

SEQ ID NO: 365703 - DNA, 324 bp, Pseudomonas aeruginosa
atgcgatccagacgatttgacgatgcgcgtattgcctacttgcggcaggtgccagtggtggccaccctcgatgcgctggggatctactggaagcgcgacgcgacctttgagccgttgaaagacaaggcgaccgtccgcgtgcatgtgtcgcttggcggtgcggttgtcgagctgctggccaccggcccgaagtggtacgacacgcagaccgaacagggtggcggtggtgcaattgacttggccatgtacctgctgcggctcgacttcgtgtcggcggtgaagcggttgcaggtaatcccggcccagcctccggcaattgcctaa

SEQ ID NO: 365704 - DNA, 873 bp, Pseudomonas aeruginosa
atggttcgccgctggggtatttccgctggcagtgcgggttcatcatcatcccgcttgcggctcatggaggttggcctccttcagctcttggccgcctcaggggcgttgtccatcgctacgtcgacgcaacttttgagcttgccgagcagctcgctcagttcctgcagctccgtaaagccgatgtcctgttggactgttgccagtggcaacacccagttcactggcggcgccgtggttgatccctgctggagtgttgccagtggcatcacccagctcgccggcggcaccgaggtcggctcctgctggactgttgccagtggcaacacccagttcactggcggcgccgtggttgatccctgctggagtgttgccagtggcatcacccagctcgccggcggcaccaaggccggttccttgctgagtgattccagtggaatcacccagctcgccggcggcaccgaggtcggctcctgctggagtgttgccagtggcaacacccagttcgctggcggtgccgtggttgatccctggtggagtgattccagtggaatcacccagctcgccggcggcaccgaggtcggctcctgctggactgttgccagtggcaacacccagttcgctggcggtgccgtggttgatccctggtggagtgattccagtggaatcacccagctcgccggcggcaccgaggtcggctcctgctggagtgttgccagtggcaacacccagttcgctggcggtgccgtggttgatccctggtggagtgattccagtggaatcacccagctcgccggcggcaccgaggtcggctcctgctggactgttgccagtggcaacacccagttcgctggcggcgccatggttgattcttag

SEQ ID NO: 365705 - DNA, 387 bp, Pseudomonas aeruginosa
gtgaacgccgcgcgttgcccgcaccaggtctaccaccgcgacggcggcatgcgggtggacggtaataatgcattattacgtgtcacctacgagcctaacagctacaaccagtggcaggagcacccggatatctccgagccgccgctgagcctggagggcgtggcggaccactggagccaccgggtggacgacgactactacagccagccggctgcgctgttccatctgttcaccgacgagcagaagcagcggttgttcgccaacatcgccgaagacattcgcgatgtcccggaacagatccagcggcgccagatcggcctgttccttaaggtcgattcagagtacgggaaaggtgttgccgatgcgcttagtgttaaaaggaagtag

SEQ ID NO: 365706 - DNA, 474 bp, Pseudomonas aeruginosa
atggaacgctttttcgaaaacgccatgtacgcctcgcgctggctgctggctcccatctacatgggcctgtctctggcgctgctggcgttgaccatcaagttcttccaggaaatattccacgtcatcccgaacatcttcgcgatggccgaggccgacctgatcctggtcctgctctcactgatcgacatggctctggttggcggcctgttggtcatggtgatgatctccggctacgagaacttcgtttcgcaactggacatcgacgaaggcaaggaaaagctcagctggctgggcaagatggattccggctcgctgaagaaccaaggtggccgcctccatcgtggcgatctcttcgatccacctgttgcgcatcttcatggacgcgaagaatgtgccggacaacaagctgatgtggtacgtgatcatccacatgaccttcgtgctctcggcgttcgccatgggctacctggataa

SEQ ID NO: 365707 - DNA, 1623 bp, Pseudomonas aeruginosa
ttgagtggcccgctgcgtgagatgtaccgagatgatcttgacccggatcgttggcaaggcttggtcgagcgatctgtgtggttgcatctctccaaactgaacgcgtcagggcttgcgctaagcgctgccgcaacggtgagattggagggcctatctcgtgcttatccgcagtggcaactggcggccaacgagcgtgacgagttctcacattggatgagtggcaccggcgacccggactatgaggacagccgtgaagtcgatattgcgccacacaagcggcacgagctagtgcagtggctcaagcagccactctctgaccagcaccccttctacgaggatacctggcgcgaggtctgtcgaaagcatctattgaacagcctgttcgcgttgagcgacttggcgcaagaaggtgtttggcctgtagaacgatggcgtaaggcgctgcaagtctggagcgaaaagggtcgggtgttgcgatcttggcgctacgccacaccgctgatacagaacatgccggacgctgtactgttggatgttgtgcatagtgtgacgcactggttggaggaagtttccaagtcggtcgaccatcaacatgaggacatcctactgggcctatgccgtcgtgtattgagcctaccgcttgatgctgcctctggcatgacgcgaaatggcgagccactcaacgagcctgttacggaggcgattaatcacccaataggtcacgtcgcacaggttttgctgaacctttggttaaagcgtgagccgagcgacaacgatcagcttccagcaggaatcgaacctttcttcactgagctttgcaatgttcgggtagatcgatttcgccacggcagggtactgcttgggtcgaggctaattgcactcttccgcgtggaccgttcatggaccgagcagcatttgttgccacttttcaattgggcggtcgatgtggcagaggccaaggctgtatgggagggtttcttgtggtcgcctcgtttgtatcggccattgctcatcgcattcaaatcacagttcctcgaaacagcgcgtcactacgccaatttgggtgagcatgcccagcagttcgcggcttttctgacctatgcagcgttaggaccgactgatggctacacgatggaagagttccgagacgcgattgcagcgctgccccaagagggacttcaggaatctgcacaagcgctctcgcaggcccttgaaggggctgctgatcaacgagaggagtactggaggaaccgcattcagccattctggcagcacgtctggccgaaatcgcgagaccttgccaccccccgcattgctgaatctctcgctcgtttgagcattgctgcgggtgctgaattccctgctgccttgagggcagtccaagattggttgcgtccaatcgagcatccgcactacgtcgtgcacagactgcaagagtctggactatgcggccggtatccagtggaagttttgcgattgctgaatgtaatcatcgatgaccagccgtggacaactcgtgaggtggagcaatgcctggaggcaatcgtgcaggcaactccggggcttgcccaggatgcccaatatcgacgactccttgaatattcccgtcggcgaggatggtga

SEQ ID NO: 365708 - DNA, 1170 bp, Pseudomonas aeruginosa
atgaatacagccgtcaacgtcaacgtcgtgcacgaatccgaagcccagcgccagttcgcccgggtcaagctgccggcgcgcatccgctacatcggcgccaaccgcgaaggcgtcgacgcacgcctgctggatctctccgccggcggcttcgccttcaccgcgagcggcgcgccgatccagcccggcgacctgtacaagggcaagctgctgttccaggtcgacagcatcagcttttccctcgaagtggagttccaggtgcgctcggtggaccccgccagccgccgcgtcggctgcgagttccagaacctcaagccgcgcgaggtggcggccctgcgctacctgatcacctcctacctggccggcgaggtgatcggcgtcggcgacatgctcaataccctccagcgcgagaacttcaccaaggcccgcaagcagggcggcggcaacggcgggatgggcttcttcggccgggtccgggcggtgaccctgagcaccgcgatcttcgtcgtcggagtcggcgccttcgccttcatcctcaaccagatgtacaacctgtacttcgtcacccatgccgattccggcgtggtcagcgtccccaaccagcagatcaccatgccccgcgagggcaccgtgcagagccttctcgggcccaacgcggaagtcgccaaaggcgcgccgatcgctaccttctcggccaacctgctggacatgctcaagggcaacctgaccgaggagcagctcaacccgggcaacatcgagaagctcttcggccaccagatgaaagggaccctgaccagcccctgcgactgccgcgtggtccagcaactggtagccgacgggcaatacgccaacaagggccaggtgatcttcaccctcgcgccgcgcgacagcgtggccagcatcgaggcgcgcttcccctaccgcaacgccgccgagctggcgccgggcacccgggtgaacttccaggtcgccggcgacggcgtcaaccgcagcggccgcatcgtcaacaccgcgccggtggacggcgacctgtcctcggaaatccgcgtgcagattcagcccgaccagccgctcgacgcccagtacgccggccgcccggccgaggtcagcatcggcggcctgcccggccgcaccctgctgaacaaggccgtgaccctggccaccgctcgctga

SEQ ID NO: 365709 - DNA, 798 bp, Pseudomonas aeruginosa
atgggcaggtctatctgcgcctgggccaggctcttgatcgcgccggcgttgtgcatggactggagatcaagctcgacgccggcggtacgctgctacttgtcgagcaaatccccagcgacttccgaccgtggcgttggccaccttagccctctccggaacgagccgaacaagtgctcctgtataaacgaacaacaactgatatgtttcagtggtatgcagttgataaatctgttagtaataccaacaatcaggaagcacgctgtatcgcgaaaagtcctagtcctagaccaagaaactaagccaatgaaaactacaattgattatctaaaagaacgctacgccgaagaaaagtctaggtttgaccactttgaaaacaaaagctcaaaattactttcattcatcactgtattgatagccgctttaactacactagccgggataaactctggaaaactattgaacccaagcggacctatcgcttggttggcgctaacgactttctttctaggggggctttcaattatctgtgcttggggccatgcccttctctcgttgcgtgttggtgacattcccactatgccaaaaagccgaagtacagctgagtacctgtccgcggtagatgaagacgcaaagcagcagcacatttacaactgttacatagacactcttgaggagctagcaattagccttgatgagaaatccatcaaccttgagcttgcctataacgaattagttataagcgcatggatgcttggaatagcagccgcactgttcattgcaacggagataacaatatga

SEQ ID NO: 365710 - DNA, 831 bp, Pseudomonas aeruginosa
atgggtgaacaactgctcggcgcccttcttgtcctccatgcggatctcgttgaagttggccggcgtgccgcccttgctcgaacggctcttcatcccgctctgggtggcgttcgccggcagctcgtagggcaccgtctgctcggcgttgtagacccgcccggtgatgatcggccggtccgggtcgccttcgaggaagctgacgatcacttcctggccgatccgcgggatctggatcgagccccagttcttccccgcccaggcctgggagacgcgcatccagcaggagctgttctcgttggactggtcgtggcggtcccagtggaaatgcaccttgacccggccgtactggtcggtccagatctcctcgcccttgggcccgaccaccaccgcagtctgcgggccacggacgatcggcagcggagtggtcggcaaggggcggtaggcctggccggcatcgatgcagtccagctcgctctcgaactgcgcgccgaccccgccgccgccggtctcgtagagttcctggaccacccggtactcggcgccgaccaccaggtactcgcggttctggtcctcgcgcgggtagccgctgagcttgaacaggtggcccgaacccaggccgcgggcgcggccgcgcaggcgcacccgttcgtagcgcgcctgcaaggcttcgatgcgggtccgcgcgtactgctcgccgtcctggctctgcacgtattcgccggggtagtcgtacagcgggtagtcggccgccgcgtgcgagcgggcgatgttcgaacgcacctccaggcgcgcgccgggacgctggaagtcgtagtcgttgaggctcagtga

SEQ ID NO: 365711 - DNA, 825 bp, Pseudomonas aeruginosa
atgctgcgagacccaaacaataatttttcaaactggcggaaatttgtatcgcagcaggacgcaaatatagtgccggttgttcagataacagaagactcaaagttatcgagtattattagacaggcccgggccttcgagtcggtaggtaagttggcattcaagattagacgttttggccaagatacaaaagagattattgcggcattgtcagctctagatgatgcagaaaatgcacttgtaataattgacgccggatatataagggaaaccttgtccgcatccttggctgggtgtgtaactgcaatcaatgagattcgtgatgaagtttctgacgcagtaatcactgtgatttcgacaagcttccctgcgtcagtagttcccttcctagatgcgaatagtaagggcgagcgaggcgtaatcagcatgctagaaaccaaactacatgctgcgataggtagcgatgctgcaatttatggcgaccacggctcaattcattcacgggtgtacatcgcgaagggaggtcgctatacacctcgaatagactaccccctaaatgatgcttgggtctttgagcgaagacctgacacggactcaacaggatatatagatgcagcaagtacgctaatcgaggcttactcagaaataaacgacgatgattcttggggcgcgagaatgattagaaatgctgctaacggagagatcgatggaatgaaaaccccagcatcttggatcgcggcacgcgtcaatatgcacatcagcaagcagatatatcttaataatgacgcagcaccaacagatgaagaggatctagatgatataatctaa

SEQ ID NO: 365712 - DNA, 129 bp, Pseudomonas aeruginosa
atgagcctgaagagcttcgtgccgcatttgcaagatgtaaaaatgaactgcgacgtggaaaaatcgacgaccgaaaattacaccgaaccttgctgcaagtcatggatgtttcagatgttggtggcgtaa

SEQ ID NO: 365713 - DNA, 243 bp, Pseudomonas aeruginosa
atggatacgttgagcttgtgcccggaaccttgccaaagcgtttcgagcctctacctcgacgccagcgacatgagcagcaagctcgacggtcacctgttctgccatcagaacaatcagatcggagccggcctcggctgccgcaagcaaggcaagtccggcgttggcatcgtgtgctaccgctgtttcgcgcgtgatgtctcggatgacgtcaaggacggtgcatgtatccacgcacaacactga

SEQ ID NO: 365714 - DNA, 669 bp, Pseudomonas aeruginosa
atgcgactggtcatactgttcaagcagtccgagtgcgaattcatagtcgatggccaagtcctgcgcccgccctacggaccaggcctccacctcgacaagccaccgtgccaactggtcactatccagtcgtttcgatgcacggtgcgcggcaatcaggaacgcgtaccagcgctccttgtccatgggatgggccgcacctgtggacttattggcaagccgcgaaaagcgccgcaaggctgctgccggttcggcatccagccaatcctcaagagtctgactgggagaggtcagttcgacgccgaaaccgccggcccgggacgccggttccgcgacttgggcgacgaagtcgcgaagaatcgcgttgtacttgtcaataccaagctcaccgacgtttcgcggcacgatattggaaaccttgtagccatcaggctcttgccacagcaccagagccgattcatcgacgtcgtcgaatgcagatcgcacaagcacgatcacatcgtcgtcgcccatgtgttgcttgagatcttcttcccgctcagcgtcgtgacgccaagagccacccacctgcgcgaggatgccacttcgcattgcggttgctgtcttgcccctgaggtgaagatgctggaagaccgtgatcggcttttctgtcatttcggttgcccgcaatag

SEQ ID NO: 365715 - DNA, 789 bp, Pseudomonas aeruginosa
atgccgcgttcttcgcggggctgtgacatggaaagactgctcgaagccgtcacaggtgtggtctgtctcgtgtcgccggagaaggtacgggcgctggcgagcacgattcggaaaatcggggatgggaaggcgaacgtcgcgttgtcggatgtcgtcggcacggccgcggccaaagccgtcgtcgagcagctcgtcgacgcatggcgggccacatcggtcggctcgggtgagctggccttgatgctgctcgccgccagccatacgttcgagaaggtgtcgaagcatcagtccaccgaactcgtgtggacgggtccgacgacgcccttcgtttccgcacgtcgcaccgagcaggcgctgttgcaagtcatcggcgcggccaagcagaccttgttcgtcaccagcttcgtggcctacgacgtctcgaccatcgtgaagtcgctgaacgacgcgaacacgcgcggcgttagcatctcgatgctgctcgaatcgtcgcgggatcacggcggcagcatctcgttcgacgtgatcgagaagatgcggacattggtcccgaatgcgaagctctacgcctggcgcgaacgggcagctcagttcgccgacgggcgagttcacgccaaagttgcagtcgcagacggtaacgtgtgcttcatcaccagcgccaacttgacgggtcatgccatggacaagaacatggaagcgggccttttactctctggaggcaatattccgcgactgctggaagagcatttgaattcacttgtctatatgagagtggtgtcccctgtgtaa

SEQ ID NO: 365716 - DNA, 1635 bp, Pseudomonas aeruginosa
atgaagagctggaaagatcaactgcgggatctcaagaacgcactgcgtgggccgggacgcggcaaggaacaggaacgaggtgatgcgccgcccaagatcgacttcgacccaccaccagcgtggctggctggtggtcagccgactccgaagaagccgcctgcacggaatcccgttccgaaacctgccgctccggtcgccgcagtcgtggcgctcgccaccaagccgccgcgacccccagcggttccaacaccaccgccattcaaaccccgcatcgacgacggatgtgtgctgaacatgccggcgtggagcgatgtcggcagattgttgcagcatcccgaacatcgaggtgaacgctcggcaccgatggctgtcagagtcggggtggatttcgggaccgctttcacgaaagtggcgattcgcgcaggtgtcgatctggtaccggtcgaatggtctgccgtcacgggagacgattcggaaacggggcgctacgtggttcccggtttcgtcgttcgtgcgccagatggcgaattctgctggcggcgtctcaccgaagctgatattcgagggaacctcaagctcccgatcattgagatggccgggacgtatgaatgcccgatagccaccgtggcatatctggcgttggtcatccgctacgcgagggcgttcttgtaccggaacgcggaaattggacgcaaactcgtggggcgttcgctgcgctgggagctgaacatcggctgccccaccgaaccacacgagaacccgaaggtcgtcgatgtattccggcgcatcgcccgaactgcgtggctattggcggcggaagatcggctcgcagagcaagacgtcttggctgcatggtctttggccgattctgcaatagacctcgaagcagaaccgggtgtcgtgccggagttcgtcgcccaaatcgcgggatatctggggtcgccgcaggtaaaggaaggtctgcacgcgctgatcgacgtcggtgcggccaccctcgacgtggcgacgttcaacgtcgtcttgcgaaatgatcgggcatctccgccacgcatacccatcttcttttctgcggttcgtccccttggaacacactatctacgtcacaaccgtcattccagactcggcctcgatctttcgtggaacgatgcagcacccgtcgaatcgtccgatgacttcggacaacgaaatggaaagtctttggacgcggtcgtggcagtcgatgaggaattcgtgggacaagtcgtccgctgcatcgtcggcgtcatcgatggaacccgcaccaacgcacggggagacccgcgaagtgcggcttggcgagagggcttgccgatattcgtcaccggcggtggagcgaattgcatcttgtatcgccaagccatcggggtggtgcaacgggaagtgagtttgagcgtggggcggcggccggattcttcgacgcatttccgactcatcgaattgaacccaacttccggcaatgcacgacaaatcgaggcgggcgacaggctgaccgtggcgctcgggctgacggaggatgccgaaaacatcgctcgcgtcgtcccacaccgggacatcgagccgatcacatatggcatgccggaacgtgtcgatcacacggatctgtatggagaccgatga

SEQ ID NO: 365717 - DNA, 2013 bp, Pseudomonas aeruginosa
atggtgatggtgcattcgatgaatgaaggtgactccatgatcaacaaagaagaaggtgaggtcacgccgccgttcgagatgaccgtcgatctcaacgtcctcgaacacctcggcatcaacctctatagcaacatcgccgctgtccttaccgaagcggtggccaacgcatgggacgcggatgcgtccagcgtgcagattcgcgtcgatccgaacaacgaatggatcgagatcgaggacgacggtatcggcatgtctgtcgatgacctgaatggcaagtacctgcgcgttggctatcgccgccgcgacgaggatgcggagcatggttgcaagacggccaaaggccgccctgtcatgggccgcaagggcttgggcaagctgtcgctgttctccatagccgatgtcatcgaagtgcagtccgccaaagacggcggcaagcacggcttccgcatgacggtgtcggacatcaagaaggccgtccaagacaaacagaaatatcaccccaagccactggcggacgatgcgctcacggtgacgcaaggcacgaagctggtgctgcgtgaaatcaagcggcagcgtcttggcaagggcgtggccgcgctgcgcaagcgtttggctcggcgcttctcgatcattggtcaggccaacggcttcgagatcaagatcgacggcctgcccatatcggcgacggatcgcggcgacctgcccaaagtccagttcctctggacgttcgagggctacgagccggaggccagcaccatcgcgcacgtcgtggaacgcgaatcgctgcccgcgcggttcgaggcatgggaaacggcgtggcgcgtgagcggctggctcggcaccgcgcgcaaacccaaagacctcgacgacgacgaggcaggcaatctgaacggcatcgtggttttcgcccgtggccgcttgttccatgaaaacgtccttgatcgcctgaacgacgggcggctctacaccaagtacctcaccgggcagatcgaggcggacttcctcgatgccgacgatcagccggacattgccaccagtgatcgccagcgcgtgcaggaagacgacccgcgatacatccagttgattgcctttctcggctcgcaactcaacaagctcgaaaaacgctggaacgaatggcgcaggaagcacgaggtcgagaaggccaaggaaacgtctccagcccttgcggaatggttggacacgctgcgtgaaggccacaggaagaacgcggaaacgctgatcgccaaactcagcgcgctgccggtggacgatgaggaggatcggaagaccctctacaagcacggcatcctcgcctttgagcgcatgaagctgcgcggctccacggacgagttcgtgagtggcgtagaaagcgccgacaagttgctggctgtgctcgccgaccgcgatgcgctggaagattccctctatcgagacatcgtgcgatcacggcttgatgccatccgctcgtttcaaaaactcatcgatgacgatgagaaagaaaaggtgctgcagaagtacctgttcgatcatctttggctgctcgatccgtcgtgggagcgggcgactggaaccgaagtcatggaaacgcgcctgctggaatcaggcatcgttgtcgaggatttgaccaagaaggaagaactcggccgcgtggacatcaagtaccgcacgacggcgggcaagcacatcgtggtcgagctgaagaaggttcagcgtgcgatgaagctcctcgaacttcaggagcagggccagacctacgtggacaagctcaagaagattctgcttgcgcagaacgagccgacaccgaacatcgaggtcatattcgtgatcgggaagccagtcgctgaggaagcgacgaatccagaccgcctcaagtcgtcaatggctgccgtgtcgccgggcagtcgcatcgtccactacgacacgctgatccgtggcgcgcaggaagcctattcggcctacatcgacaagagcaaggaactcgacaagctcgaaaacatagtgaataggatttga

SEQ ID NO: 365718 - DNA, 2142 bp, Pseudomonas aeruginosa
atgacatcactctctgctgatcgcccaagcactgaccctaaggaggatttgttcgggcatgcgccgtttgcaaagagcttggctgacagcatctgtcgctatccgggcaacgacgggttggtgctggctctttacggcccgtggggttccgggaagtccacggttcttggctatgtaaatcactaccttgagcagcaacctgaagacaatcggcccgtcgtcgttacgttcaacccttggtggttctcagggcaagaaaatctcgccagagccttccttggccagcttcaggctgtgctccccaccaagaacgagaaattcaaaaaactgggtgatctgctaggtgactttgccgaaggtgtgggcggtttgatcgacctgtctggcatgacgggtggtgcggctggcaagctcgggaagctcatcggcatggtgaccaagcgcaagccgaaagatgtgcccgcgctcaaatccgagatcagcaagattctgaaggaagcaaagaagcgtgttttgatcgtcatcgacgatattgatcgcctcaccccagacgaaactcgacagttatttaccgtcatcaaagcgttggcagattttccaaacgttgtttatctgttggccttcgatcgcgaagttgccgcgcaagccattgagcaacagagtggcatgccgggcgagcgctatctggagaagatcatccaggtgccgttcgagttgccgccgattgatcgtgtggccttacgggctgcgctgttcaaacgcctcaatcaggcgctgggagacacgccggacggcctattcaatcagtcgtattggacgaatgttttccacgacgggatcgacccattgatccaagtgccgcgagatgtcgtccgtttcacgaatacgctgtctgtcacctacccggcagtgtgcggtgaagtcaatcctgtggacttcattgcgcttgaggcgatccgagtttttctgccgcctttgtatgacttggttcgtacgaatcaagaccgattcgctggtcatagccgtgatggcggatatcaagaggatcggaatgccaagcaggcatttcatcagcaatgggtggctgagcttccagagcggctgcgggatagcacgcaggcattgctggagcgagtgttcccaaagatcgggcagatggggtatggcgcagactggctggctgagtggcgtagggaactgcgtgcctgccacccggacttgttccctgtttacttccgtctggccgttccacagggcgccattctgcgaagcgaaatgatggcgttgttggcactagctggctcggccgctgattttggagccgcacttgttcgtgccaagactgaacgaagaccagatggtttgtcgaaagcacgcgccttgcttgagcgtctgatggatcacgtcgagcaagaaatcgcagacgaacatatcccgacagttattcaggccctattcgatgttggtgacttgctgattgatcccgcagatgagcggggaatgttcgatttcggcaatatttcgcgggcatctcgccccgtttatcaccttctgaagcgagtgcccgccgatcagcgaaccgatattcttgatgaggcaatcaaggcaggcaacgcgctcgctgttcagtcatggctcctgcaagcagtggatgaggagatcaccaaggcaacagtttcaggtgaacgcacacaactgacggctgatgaggttacgagattgaaagccacctggatatccagagtgcgaatgctttcagcaaacgccgattttatggatcacccagaattgtcaagactgctttccatgtggcgacactggggtgatggggcggagacgcgtgcgtggtgcgaccgcgttaccgcgtccgacgatgggctactggcgttgctgccgaaattcgttcagtacaccagatcccacaccttgggggattgggcaatgcgccttcaaccgcgcctaaatccgaattggctagaaaactatatcgataccgcatgctgtgcagagcgattgaatgagctgtcaaggaagaacgcgattcccgatgcggcccaagaggctgtcacccagtttctgagggaattcgagatgctgaaggttggaaagaacccggatggtgatggtgcattcgatgaatga

SEQ ID NO: 365719 - DNA, 4362 bp, Pseudomonas aeruginosa
atgagcatgcaccacgaatggctcgcgctcatcgaaatttccggcccgttcctcgccgtccctgtcctggaggaagccttcccgcaggggctggaggaactcgatgcgggcaagcgcaagcggctgcggcaggcctacgacgaatggcatgaggcgcaggaaaccgacgatccccggctcgaagacctgcacacggcgtggatcgacgaagtgctgtcgcgcggactggaactcgacgaggacggtcgtggcgacgtgctcaaacacaaagactggtgcgccaatcacctgatcgtcgcgctgccggaacatggcgtgagcctatcgcccgacttcgccgtcgtcggcaatggcgatgcgccgctgatgctcgtccaagcctacgcgccggacgtcgatctcgacgccacccggaaactcgacggctgggccagcacaccggcggaacgcatggtcacgctctgccgcgccacaggctgccgtctcggtctggtcaccaacggcgaacgctggatgctggtcgatgcgccggtgggtgcggtcaccaccttcgccagttggtatgcacgcatctggtcgcaggaacctgtcaccctgcaagccttcgtccacctcttgggcatccggcgcttcttcgtggacgagtccgaacgactgcctgcgctgttcgaccgttcgctgaagttccaggacgaagtgaccgatgccctgggcgaacaagtgcggcgcgcggtcgaagtgctgatccagtcgctcgacaaggccgaccaagaccgcgaccgcgaactgctgcgcggcgtgaaggaagccgaactctacgaagccgcactgacggtgatgatgcggctggtcttcctgctgtccgccgaggagcgcggcctgctgctcttgggcgacgaacgctacgaggcgaactacgcgctctcgaccctgcgcatgcagttgcgtgccgaatcggatgagattctggagcgccgctgggatgcgtggtcgcgcctgctggccgtcttccgcgccgtgtatggcggcatcgagcacgagaacctgcgcctgcccgcgctgggcggttcgctgttcgacccggatcgcttccccttcctcgaaggccgagcgaaaggctccgactggcgcaccgacgtcgccaaaccgctgcccatcgacaaccgcaccgtcctgttgttgctcgaagccatccagcaattccaagggcgcacgctgtcctaccgggcgctggacgtggagcagatcggctacgtctatgagggtctgctggagcgcaccgtcaagcgcaccgccgaagtcacgctggaactcgacgccaccaagagcgcgcagtcgccgtgggtcacgctggccgaactcgaatccgcgcggctggatggtgccgcgcgtttggccgaactgctccagcagcgttccggcagttccgccagccgcgtgcgcaacgatctggcccgcaccgtggacgacgcgctcgccgaccgcttgctgacggcctgccacggcgacacggcactgcgcgaccgcatcaaacccttcggccatctggtgcgcaccgatccgtggggctatccgttggtgtatcccgccggagccttcatcgtcaccaccggctccgaccggcgcgagaccggcacccactacacgccgaagtcgctcaccgaggccatcgtcgccgagacgctcacgcccatcgcctacgtcggccccgcgcagggcacgccgcgcacggattgggtgctgaaatcgcccgccgaactgctcgatctgaagatctgcgacccggcgatgggttcgggcgcgttcctcgtgcaagcctgccgctggttggccgaccggttggtggaagcgtgggcacaggccgaggctcaggggcacacggtcggcatcgacgggcgtgtggtagccgccgatgccaacattgagccgctgccgcgtgacaccgaggcacgcaccatcgtcgcccgccgcctcatcgccgaacgctgcctctacggcgtcgatctgaatccgctggcggttgagctggctaagctctccatctggctggtgacgctggccaagggccgccccttcggcttcctcgaccacaacctgcgctgtggtgacagcctgctcggcatccacaggctggatcagctcactcagctttcgatgaatccctcaggccagggccagctacgcctgttcggccagaacatcgagcaggcagtgcacgaagccatcgaactgcgacaacggctgcgcgaaatccccatacgtgacatcagcgacgtggaggcgatggcgcatctggacggcgacgcgcgccgcaggctggcagtgccggaaggcattgccgatgcattcgtcggcgaagttttcgcatcgggcggaagtggcacggcactggagaatgcgctggtatcgctgaccgtccaagccgggcaggtcatcgacggcgaccgcgacgtgctcgcctcgatgcgccggagatcgatcgctgcgctctcgaccgacctgcctatcgacaagactgcccgtcggcctttccattggccattggagtttcccgaggtgttctcgcgtgaacgcggtggcttcgatggcatggtaggtaacccgccattccttggaggaaaacgcatttctggtgtggcaggagacgccttccgaaactggctcgtgacccaccttgccgatgggcgacgcggctccgcagacctcgtcgcgtacttttttttacgagcatggagcctgctgcgagacggcggcagctttggacttctcgcagtcaataccatagctgaaggcgatacaaggcaggtcggcctggaagcgatggtgggtgcgggcgctgtcattcatgcggcctacccgaacgagccttggcccggaaaggcggcggtcgtcaccagtcgtgtgcatgttcacaagggcgagtggtcgggcaagcctttactgctcgggagaccggtgctcttcatctcggccttcctgtctgatcgtgaggaatggagtcccaagcaactcaaagccaacgggggtaaggctttcgtcggctcctacgtacttggtatggggttcgtgcttacctctgacgaggcacggcggatgttggatgctgacccaagaaacgccgaggtgctctttccctatatcaacggggacgacctcaactcagatcctgagcaacaaccgagtcgctgggttgtcaatttctgggactggtcggaggagcgtgcacaagaatacgaattgccgtggcggaggatcgaagaacgggttaagccggagcgtcagcgcgtcaacgaacgtggtgagttcgtccttagacagccactgcctgtgcgttggtggcaatacgctgacaagcgtcccgcgttgtatcacaccgtcggtcgcggtcaaagttttgagcgtcacccgaaggagtgggatctccgcacgaagccaatgcctcacgtattggtcgcggtgcaaacgacgaaatacctgtctgtaagccgccaaccaaatagcgcggtcttctcacacatgacgatagtttttgccgaagcatcgcaagcgttatacgcattgctaaattctgtcgtgcatggtgaatgggtaaggaagcattcctcttcgctggaaacgcgacttcggtatatcccaaccgattgttttgagacgtttccactgccattgcttcaaggtgatctggaatctctcgggcaccggcacaacgatagtcgtcagcaagccatgcttgatctgggtatcggtatcacaaaactctacaaccgtttccacgccgctaccgagcgtgattcccgcatcgaagggctgcgcgccctgcagcgcgaaatggataacgccgtcgcgcgcgcctacggctgggacgacctcgacctcgaacacggttttcacgaagtgccgtacctgccggagaacgaccgcgtccgcttcaccatctcggaatctgcgcgcgtcgaagtgctgcgccgcctgtcggagttgaatcgccagcgatacgaagaagaagtcgcgcaaggactacacgacaacgccacgccacgcacctcggcacccaaacgccgtcgcaccagcgccgacgttccgcaaccctcgctcgacttcgacgcccttcccgccaacgaaggccaatacctcaaagtcgccgaaccccgccccgattaccgcgctggccccacccacgccatcgtcgaacacctgaaagcccaccccggctggcacgccaagtccgacatcctcgccgccaccggtatcaccgacggccagtggaacaccgccatcaacgagctgctcgcaagcggcaaagtcgaacgccaaggcgagcggcgtggtgcgcgctatcgcgttctgggggatgagtcatga

SEQ ID NO: 365720 - DNA, 456 bp, Pseudomonas aeruginosa
atgtcgcgcgttccgccctcgtcccccgagaccagtcgccgcatggcaaaggttcggcagaagggaaccggcgccgagatcgcactgcgacgagagctttaccgaagaggtctgcgttaccggatcgactacgaggtcatgaagaaaccccgccgcgtggcggacgtggcatttccggggttgaggatcgccatcttcgtcgatgggtgcttctggcacggttgccccgagcatgccacctggccgaagcagaacgccgagttctggcggcagaagatcgaggcgaatcgccacagagacaccgacacgagttcgaggctacttgatgccggttgggcggtgctgcgattctgggagcacgagtctccgatacgagctgcagagaccgtcgcacagacggtcgccatggcgaaagcgaagcgctgcacatcgcctgtcgtaaacgagaagaactga

SEQ ID NO: 365721 - DNA, 360 bp, Pseudomonas aeruginosa
atgggaccgagcaaccgccacgtatccgcatggcctcggctggccatgctgctggccgtgtcgctttcggccccgcaacccgccagtgccgacgacaccccggagcgtgagctactcgccgtaattgcgcgccagctcgacctgattgaccgccaggccgagcacgtcgcccataccgctccgcagcagcgcgcccgctaccacttcgaccatgcccgcctgcgcgaggacctccagcgcgttcggacgggcattcaggactacctgacgccgccgcgtgcccagccgcgtgatccggtcgagctgtccggtgactaccgccagtccagcccgccctccgacgaggaggcaccccgatga

SEQ ID NO: 365722 - DNA, 234 bp, Pseudomonas aeruginosa
atgagctggatattcccgagagatgccctgcactaccgctacatagatttcatcattatgatcgacactacccaggcgctcgcgccagcgtgcaaagatttttctggcagctcccgcgtctgtgaacatcagcgccaaagctggcggggcattaggagccaagtcagcaacgacaacacctcgccagccagcctgattccaaagatggacatcaatgaccgaccgcacacctag

SEQ ID NO: 365723 - DNA, 222 bp, Pseudomonas aeruginosa
atgcaaaccatccagaacttcggctatgacggagcgatgctcctcgcgctgctcatctgcgcggctgtctttctgggggtcgcttggcatacctacggcacctatcacgccatccatgacgggaagaagaagtggtcggatctcggagcgggcgtagccgtaggtgtcggcctgctgatcttgatcatttatctcgtcaccaaagccaccaccatcatgtaa

SEQ ID NO: 365724 - DNA, 852 bp, Pseudomonas aeruginosa
atggctgatcgattttttactcctcttcgttacccaggagggaagtctaagctgtgcggcttcatccgagacctggttcgagtaaatagttttgaaggtggcgtgtatgttgagccatatgctggcggtgctggtgtggcactcgagctcctgctgagtaatgtagtctcaaagatacacattaatgatcttaatattggtgtgtttaacttttggacgaatgtcctgttgcatactgagaggttcattgaaaggatatattcctgcaatttgaatatggatgagtggcatgctcagcgaggagtcttcgataatccaagtaatcatagcggctttgatattggttttgctttcttttatctgaataggactaataggtctgggattataaatggcggtgtgattggtggctatgatcaaaccggaaattataaaattgatgccaggtttaataaagatgcgcttgtggagaggattatcaggattgcccgccgctctgatgatatttttctttacaatatggatgcggagttgtttttgcagactatagatgcaatgcctttgcgtaatgctttaatttatattgaccctccttattatgttaatgggcgaaggctttacgataatttttacgagcatgatgatcatagtcgtataagcaagttggtgacttctctaaaaacgccgtgggttctctcctatgatgatacagagcagattcgccgcttctactcaaatagtcgagtagctgagattgatctgatttatagtgcgcagcgtaagatgaaagggcaagaagtgatcttctttgctgaaaacctgactgttcctaccagccttcaggtcgcttga

SEQ ID NO: 365725 - DNA, 792 bp, Pseudomonas aeruginosa
  misc_feature (744)..(753): n is a, c, g, or t
atggatgaagagaatcctcgtcatgacaaaataaatgggcagcgggaaattctcaattggcacgtggaacatctcggctcaaagctaatacttctgatgagaagtttggcggagaatggtcagagcgagattgataaggtgctcgtaacccctgtgcgggggatgactgacaaatatgtcgtcaaagaggggaaccgccgagttgctgccctgaagctactcaacgacccatccctttgtgatgatgagttgttcaggcgcagaatccaaagtgtcaatataactgatcagctatcttttgatattgaatgcgttaatatcacagatcaacgacgagttgcttggttgatggggcttcgtcacttgggtgagcagggtggagttggcacgtcgaagtggggagctgttgaaaaagacagacacactcaagatgttttgggcggaaacaggtattggcgctctctgtattttatcgactatgcgaagcttcatggactgatcactgatcaacaggctgctcgacttaatgaaaggattacaacgctagatcgacttatttcgaataaagactttaaaacgactctaggggttgcctataaagatagaagtgttttgcttacgattcctgaggaaattcatcgtctgttgctgagtggtgttttagaacgaatttctttgcctgactttaaggtgaaggagttgtatgattcagataataagtttgactttctaactcgggttgtnnnnnnnnnngggttgttgagcaggccaaggtcacgcaagaaaaaatag

SEQ ID NO: 365726 - DNA, 774 bp, Pseudomonas aeruginosa
gtgctcggccttgatgccggtgccgatatggcagcagatcaccacgttgttgtcggcgcaggccttccacagcggatcccagtagtcgctatggatcgacgggaaaccgtgcagcgccgggttatcggagaaggacagggcatgtacgccgagtttcgccaggcgggtgacctcggcggcggcggcctgcatgtcccaccagggcaccagcatcagcgggatgaaacggcctggcgcggcattgcaccagtcgtgcaggtgccagtcgttgtaggcctggatcgccgccagggatacgtcacggttcgggtggttctggaagcgctggccggcaaagccggggaaggtggggaagcagatcgagccgaggataccgttggcgctcatgtcgtcgacgcgtgccttgatgtcccaggtgccacggcgcatgtgctcgtagcccagcggctccatgccgtactcctccttgggccggcccaccaccgcgttgaggcccatgtagccggtggcctggccttcgaatacccagacgtcgcgaccgccgtgctgctcgacgcgcggctgaaggcccttgaagcgctccggcatgtggcggtcgaaagccccggccggttcgatggcgtggtcgtccacgctgacgaggatcatgtcttcgagtttcatctgttgttgttctccatggttggccgcagtcactgcggccattgtccaagtgggtcgatcaaaggaagatgccgaggttcggtgtgccgatcactacctgatccagcatga

SEQ ID NO: 365727 - DNA, 939 bp, Pseudomonas aeruginosa
gtgttcccactggcaacactctgccaaggatcgacctcggcgccggcggcgagttgggtgttgccactggcaacactccaccagggaccgaccccagcgccggcggcgagttgggtgttgccactggcaacactccgccaggacctggcctcggcgccggcggcgagttgggtgttgccactggcaacactccaccagggaccgaccccagcgccggcggcgagttgggtgttgccactggcaacacttcgccaggacctggcctcggcgccgagggcaagctgggtgttgccactggcaacactccaccagggaccgaccccagcgccggcggcgagttgggtgttgccactggcaacacttcgccaggacctggcctcggcgccgagggcaagctgggtgttgccactggcaacactccaccagggaccgaccccagcgccggcggcgagttgggtgttgccactggcaacacttcgccaggacctggcctcggcgccgagggcaagctgggtgttgccactggcaacactccaccagggaccgaccccagcgccggcggcgagttgggtgttgccactggcaacactccgccaggacctggcctcggcgccggcggcgagttgggtgttgccactggcaacactccaccagggaccgaccccagcgccggcggcgagttgggtgttgccactggcaacactccgccaggacctggcctcggcgccggcggcgaactgggtggttccactggaaccacttcaccaggaaccaacctcggcaccgccggtgcgtttggtgtttcggcccgaaacactctgccaaggatcgacctcggcgccgagggctatcaacttctcccactcaagaggaaccgaaagatgtgtgactcgatcttgtatgcccccatggacgagctcgaattcgagcggctgctag

SEQ ID NO: 365728 - DNA, 501 bp, Pseudomonas aeruginosa
atgagcgttcgcgttctagacccatgctgcggtggacgcatgatgtggttcgacaagcagaaccagctcgcactcttcggagatcagcggaatgagacgatcaccgtcaccgaccgctctcattcagatgacggcaccagggtgctctcgatccacccgcaagcaattatcgacttccggcgcttaccttttgccgatgagtctttccccttggtcgttttcgacccgccgcatcttgttcgtgcaggtcgaaaaagctggctggcagctaagtacgggaagctgggcgccgactggcgtgatgaccttcgcgctggattctccgagtgcttccgcgtgctgcgaaccgatggcgtgctgatcttcaaatggtccgaagtccaggtgaccaccagtgatgtgctggcccttacgcccgagaaaccgctgttcggacacccttcgggaaagcgctcaggcacgcactggatcacgttcatgaaaacaggaggtaggtcatga

SEQ ID NO: 365729 - DNA, 276 bp, Pseudomonas aeruginosa
atgcctgacatgagagaagagtttgaagcgtgggcaaccaagcacaggatgccgattcatcgtgacggtgttgtcaccgactatgccgccagatgcacagatgagtgctggcaagcctggaaagccagccgagcggctctgagggtggagcttccggagaagatcggcccgcacaacatggtcggttgtcacgtgctaccagaagccgcgggctacgacgatgccatcgacgactgccgggaagccatccagaaagccggaatcgaggtgaagtga

SEQ ID NO: 365730 - DNA, 513 bp, Pseudomonas aeruginosa
atgccgatcaaaaccgcacgcgtaatcctggatcgctactgggaccgctccattcctgtagaccccttcaagattgctaagatggccggggctaaggttctgcccgaccccagcatgacctaccatgatctgagcggtagctttacccttgaaaacgacgtgccaacaatcaggttcaaccctgatgatgcacgcgtgcggcaacgcttcaccgtcgctcatgagattgcgcactgggccttacagcatggtccagcgatgcgggacaacgctcgaaactatagctccagcaccgcttactaccgtgaacgggatgctaacacgtttgccgccgagctattgatgcctcaagaggtagttgagtggatggtgtacagtaagaacatgaccgacgtgcaagaaatggcgagcttgcttgatgtctcaggggcggctatgcactatcggttgcagaatctcggattgctgaggggctcgcaagattcccccctgactcatcaccgctattactga

SEQ ID NO: 365731 - DNA, 384 bp, Pseudomonas aeruginosa
atgaagcttacgaagaagcagcgcgctgagcttcgggataagtttggagggcggtgcgcatattgcggtgtcgaccttccagagcgctggcatgctgatcactacgaggcggtgaagcgtggggtgagcagctatgtcacaggaagagacgcgctgcacccagagaaccattgcatggaaaacatgatgccttcttgtccgccgtgcaacatcagcaaagggagcatgacgcttgaggtatggcgtgaatggctggctgggcacgtcaacagcctgaacgcatatcatccgatctaccgactggccaagtcctacggactcatccgcgagaccggggcgcctgtcgtcttctacttcgagaagatcgggcaccagcaggcatag

SEQ ID NO: 365732 - DNA, 129 bp, Pseudomonas aeruginosa
atgttcaacatcgagatagaggcagtgttgcgtcaggcagacgagtatgcccgtaccggccaggtgctcgagcgcgagcaactgcgcgaaatgctcatgcacctggtttcgaaggccgcgggcgactga

SEQ ID NO: 365733 - DNA, 243 bp, Pseudomonas aeruginosa
atgagcacgaccaagaagctgcggctcgggccgctgcccaagaccgagaacgtcaagctgacatttgcctgcccggccagcctgaaagccgagctcgaccgctacgccgcgatgcacgcgcagacgtatggcgaggcggtcgatgcagagaagttgatcccgcacatgctggaggcgttcatggcgggtgatcgtggcttcaagaggggagggcaggcagcgccgaagccatcggcgaagtga

SEQ ID NO: 365734 - DNA, 600 bp, Pseudomonas aeruginosa
atgacgacccgctccaacaccacatgcacgcacgaagccgcgccgcgtcctcgctcgcgcctgcgcaatcgcatcgtcgtggcgacactggccgccgtcggcctcgctgcgctggcctgggcggctttcgtgtcgccgctgccgcgtctgacctacagcccgtccgacagcgtggcggtcggctggtatcgcatcgaaccgctcgacccgcgcaccgcctcgctgccccgtccgctgtccgtggacagcatcgtgctggtgccgctgcccgccaaggccgccatgctggctgcgcagcgcggctacctgccggcgcgcgtgccgctgctcaagcgtgtgggcgccgtcgcgccgcaggaggtgtgcattactggccgcgttgtccgcatcgacagcgtgccttcggccgccgtgctgcccgctgaccgctggcgccggccgctgccatcctggcagcaatgccgccgccttgaacccggcgaactgttcctcttgagtgtgaccaacccggcgtcgttcgacagccggtatttcgggccggtcagcgcatccgccgtgatcggcgtggcgcatccggtctggctggagtcacgcccatga

SEQ ID NO: 365735 - DNA, 768 bp, Pseudomonas aeruginosa
atggccgaagcgagcgccgagcattggtatcccaccgccgcctatctctacacactgcacctcgacggccccgcgctggcgtgggaattcctgcgccgcaatcccgactaccgccgcgactggctgcgccgccgccggccacaggccgccgaacgctggggtttgcgcctgctggaagatcccgacctggacgcgcgggacgcccatccggtctggttccccgaccatgacggcgtgatccagctctacccggacgccgacccgccaccggatgccgacgctttcgcgttctggtgcgtccctggcgacaagcatttgatccacgacggtacgcgcttggtgctgatgtcgcgctggcccggctgctgcgtgcggctcgcgcttgggccgggcctggaagacggcatggcctacctctacgccactcgcgcttgcgccacgccctgcgcgcgctatcgcacgttggcggccgagctggatgcgctgtccgccgcgaccgtggccgcgcctgcggcgtcggcccgctcccggcctacgctcgccgcagtgcaggagttgcacaccttgcaggcgctcgacgcgaccctcgcgggcgcgtccttgcgcgaggtggccgaaggactgttcggtgcggatgccgtcgcggccgactggcacaaggacagcgccttgcgtgcccgcgtgcggcggctggtgcggcgtggcgaggcgttcatgcgcagtggctatcgcagcctagcgcagctaccgccagttgcatcgcagtaa

SEQ ID NO: 365736 - DNA, 351 bp, Pseudomonas aeruginosa
atgaacccgccgctcattaccgccgaacagcgcgtgcagctactcgccgtaggcgaggtacgcactgccggccagcgcatcgacccgttgccggcgatgcgcctgttcacccccgacgcgcacgccatctggctgctagccgcgcttgacccggacgacggcgatacggcctggggactgatcgaccagggtatcggcctgccgacgttgggaacggtgaagctgtccgatctggcatccatcgtcgggccgcgccagcagccggtgatgcgtgatctctactttctggcagagcgtccgctgtcggagtacgcccgacgggcgcaggagaacggctcgatcacggattga

SEQ ID NO: 365737 - DNA, 291 bp, Pseudomonas aeruginosa
atggcggcgaaacactcattggcgacggcgatacgaacggtcaggaaatcgcgcggcttgagccaggaagcgttctccgacgtgtccagccgtacctacatgagttcgctggagcgcgacctgaaaagcccgaccctgcacaagctgaccgagctgtgcgaggtcatggacgtgcatccgttgacgttgctgacgctggcctttgccggcagcgatccaatcaagaccgagcaactgttagccttggttcgcaaggaacttgaactgctggccaaaacttccgatcaatga

SEQ ID NO: 365738 - DNA, 1788 bp, Pseudomonas aeruginosa
atgacacttctccagaacgatccaaccacccaacttgccttttccgtccacgagaacaaaggggtctttgccatccttctggggtcgggattgtcacgctccgcggaaatcccaaccggctgggaaatcaccttggatctggtacgtcgcgttgcaacggcacagggcgtcgaagagcaacccgattgggcgacatggtatcgggagaaaaccggtcaggagccaaactattcgacgttgcttgcggaaatcgcaagttcgcccgatgagcggcgggcaattctgcatcgctacatcgaaccggacgagcatgaccgagaagaaggccggaagattccaaccaaggcccatcatgcgatagcgcagttagttcgctcagggcacatccgggtcatcatcacgaccaacttcgatcgactgatggaaaacgccctgcgcgagcaaggcatcgaacccaccgtcgtatcttccgccgatgcacttgccggtgccgaacctctgacgcacagccgttgctatttgctcaagctgcatggcgactacaaagatgcgcgcatcctgaatacagaccaagagttgagtgcctatcccgaaagctacaacaagctgctggatcggatattcgacgagcacgggctgatcatctgtggttggtcgggcgaatgggatcacgcacttcgcgccgcgctcctgcgcgcacctaaccggcgctatccggtgtattgggccgcgcgtggttcgctcggttcgggagccagcgaattggcccagcatcgacaagccaaaacgcttccgatcactggagcggacgagttcttccaaacgcttcaacaacgcgtcgagacgctcgaacagagccagcgccagaacccgttgagcatcgaacttctggttaacagcgccaagcggtatctcgcaaaacctgaataccgtatccaactggatgaactgttcgcgcaggaaacagaacgactgttgacacagctcgatggcgatgcattcaccctacaggggaattggagccaagaagcgtttcggtcaagggtaggactctatgaatccgtgaccgagccgttggcacgtatggctggggtccttggacggtggggcgacgacaaggagttcagcctagtcatggatgttcttcgctctctgcaccaccacggagggaaaatcgttggcggattaacggcattcgtgaatcttcgctcttatcctgcggtgctcatcttgaccgcctatggcatcggtttgaccaaagcccggcgatggagaacgctgcatcaacttttctctgcgacactagcgttggagcatcgtgaacctcagcgcgtagtctcgacgctgttcctttggtcatggatcggtagcgagcagcagctctggcaaaacctagaagggctggaacggcataagaccccgttgagcgatcatcttcttgaagtcatgaccgagtggaagaagagctttgttggcgtagacggggactttgaactgctcttcgagcgattcgagatgattggcgcattggtttcctttgaagaaaacgatgaagtgcagcttgaagaagcggctaagtcagcctcggcacgcaacgatgtgcttgcttggatgccgataggccgtgctggctggcatagctcctccgcaagagtgctactacaagagcttcaagatgaagcgttctccctcgaacttcttgcggccggatatgcaaaaaacagccgccgcttcatcgaattgtttattcagaacttcacgatctacacaagcagaatgcgctggtaa

SEQ ID NO: 365739 - DNA, 2211 bp, Pseudomonas aeruginosa
gtgaccagttcaggaaggacagaatccaacgaaaaccaagaagaacaattggttcttcgcttttcgcacaacgtcatcgagcacctcggcttgaagctgtatcaaaacaagccgacgaacgtcttggcggaattggtttccaactcttgggacgcggaggccaataaagtctggattcacctcagaaccaatggcattggtgagccgagcagcataatcgttgccgacaatggcgttggcatggatgaggctgttctcaaaaacagctatcttctggtaggcaagaagaagcggtcgtcgaaatctccggacgaaaagagcatcaatggtcttcgcttcttgatgggacgcaaaggcatcgggaagttggctcctttcggcgtggctaagcaggtagacctgattactgtcgccaacaagagggcgacctggctgcgtttcaactacgacgagatgctcgcgtcggaggaaaacccgaccgccttttccgaatacaagcctcaagcgatagttcggaacgtaccgttcgacgggctcccgctagatgaagtcgggacggatgaccaatgcttgcgagagttcatccgtgaaattgaacagaaaggtagtggaacgttcgttagagcctccctgctgacgatcaggaagagcattacgcctgaagcacttatggagtcgctgggacggcggttcactgtcacactggctcgcccggattttgaagtgttcgtcaacgggaagaagctagaggaagagcacgcattccccaaatgggaggtcagatatcccgagtcaggcaaggaaaccatttccttcgacaccgcgaaagggaccagaactgtaacgtgctgggttggattcgtcgaagaggctagctggagtcaagagcaagcgggcataggggtttatgcacacggaaagatcgcgcaggatcgccccttcttcttcggcaatcgcggcaacgaaatttatctgcggtacatgtatgcagtcgttgaagcggattgggtcgatgagcttgagcgagacacgatttccaccgatcgcacctcgattgactgggaagatcccgactgcgtggagttctacaagtggggagagcggcgcgtaaaggactggctgaatctctatcaggctcaccgcaagaaagaggcagagaaggagaacgagaagatcgtttctcaagtgctgacagagaacgagtcgttgcggctgagagactcagaaaaagcgcacctagtcgacttgctttctgaggttaccccgcgtcttggaaaagaggtagaaaacagggctcggctggtggaagcgaccgccaaggcgtggacgcacgaaccggcacgaaggttgatcaagaagctgtgggacgaggcgaccttgttcgacgcggatagattcagcctgattctctcccagttgtcggatcagctcgtgccggaaagcttgtctctggcggtggttttctctcagcgggtctacgcactttctcagttggaacagcacatcatgctcggaaaggagacgcagctccagatgctgattgaggagttcccctggatactcgacagcgattacgagaaatttctgccgagaaaatctcttaagaaaatctgcgacgaggcagagcaatccgggttattcgtcgtgcgctcagttcatctgcccacccaagcagagtacaccaagcctgatttcgtttttctcggcgccacggtgacgggcggctccgatcacatcgtcgtggttgaattgaagggaccggacgacacggcgggatggccggaatacgagcaactgaattcgtacgtttcctacctgaagtctagatttggcagcagcaaggtggaaggcgtattggtcgctcgaagccacgacgaaggcgtaaaggagattgcaggaaaaacaatcgtcttcaaagagtggaaagacttgttgctacgctccagaaaagaacacatggaactgatcgcagcactgttggcgggcaatgaagccgatgcccaagactcccgagtgcaacagatctgcgaactcggcggagaggcagtcaccggattcctcacccagatgagcgcacgtgaccctgcgctgcgcgaactggtcgggaagcttagcgtaaagaaggcgcttcctgccgccgcacctaccatggagccttccatttacgaggaggcagaccccgacatggaagagtctgccggagcaaagtga

SEQ ID NO: 365740 - DNA, 234 bp, Pseudomonas aeruginosa
atgctcgccatcgtcgctagagccaaaatgaatttccttgggttcgtgaccgtcgcggttgtattcacaatcaacgtcccaatcgggaaaggcattctggacatagatggccaagctatgtgcgatggtgcgctcattgacgtcgacgcggagaagataagtatcggactgaagcaattgccgcacgcacgcaatgacgcgatccgcagtttctacatcgcccgcacaggttga

SEQ ID NO: 365741 - DNA, 1467 bp, Pseudomonas aeruginosa
atgagcaagttgcgagccgtcagtctgttctcgaactgcggtgccggcgacgtcggttaccgtgacgccggattctgcttcgacgtgatggcggagttggatcccagaagattggaggtctgcctgctgaaccacccgggcgccgaaggcgtcgcaggcgacctgcggagcacctggcaaacggtagtcaagaaataccgagcacgagcgggtcaagctcgtccggcgcttctatgtgcctgccctccgtgccaaggtatgagctctgcacgctcgggtaagggaactcacgacgacgcagaggctggatcgaaagacgaacgcaacttattggtcaccatcgttgctaaagttgcgttgaagctcatgccctcgttggtcgtcgtggaaaacgtgcctgcgttcctgactcgcaaggtccatcatccgaaagacaagaaacccgtttccgctgcgaattacttgatttcttccttggcgaagcactacgtcgccttcccgatggtgacggatctttgcgattttggcgttccgcaatcccgaaatcgtgctttcttgacgttcgttcgcaaagacgtgcctggcttgaaagaactactacgactcggtcgagctcccttcccgcgagcgacccatgcggccgacgtcggcacaggtcgtccaattaccctagccgaagcgctcgagagctttgggctgccagagttggatgccgcgacgaaagagcgggccgcagctgaagagtacggcggattccattctgtgcccgtgtgggacgagcgtacctatgccatggtctctgcaataccaagtgcctcgggccgtagcgcatgggaaaacgaaacgtgtccccagtgtggcccggtagcggtttcgtcagaaagcgtactttgccctgattgcaactctccacttctgaggcctatcgtgaaagactccgatggcagctatcgtttggtcaaggggttcaaaagcagctatcggcgcatgcgaatggataagccggcagcaaccgtaaccaccgccagcggccacctaggtagcgataatacgattcaccccacgcaaacgcgccttttgagtttgatcgaatgctcgctcttgcagacctttccgtcagacttcaaatggggggatgccctagctaagttcgggcacacgaacgtgcgcgagatgattggcgaggccgtgccgccggcattcaccagaatgcacggtcaagtgctctacggcatcgtgaagcgcgaatgggagcgagcgccgatggccttgagcgacgagcgctgtgtaaaagcgtggacgaagctggcaactgcggccaagaaggatggtcgagttgacccaaggagctacttcgagcacgccatgcctaacggacgggaggcaacatcaacgaagccaattcgctcgtcgagggcggccaagaagtcatcgccgggacatgaagcttcgcagcaaacggtctag

SEQ ID NO: 365742 - DNA, 2106 bp, Pseudomonas aeruginosa
atggctacatctcctcgtcgcgcagcttcagtcagcagtagccaacctcgtcgccgaatcgaagcagacgtgactgaaaaggcaacggcggcagaatctccttatcacctacgcatttccaggctcaccgtcgacaaactcggcgtcaagctgtacgacaaggccagtgcagtggttgccgagttgatcgccaacagctacgacgcggacgcggagacggtcacggtacgtctgcccttgggcatacagttggcctcccaagccggaggccaactcaaggatttgggctatgtgatcgacgtcgaggacgacgggcatggaatggccccggaagaggccaccgacttctatctccgcgtcggtgcagaccgccggactcgcaagggtcaagacggcagcaggtcgcgcaacaagaaacgcccagtgatgggacgcaaagggattggcaagctcgcgccgttcggcatctgccgtcgcatcgaagtttggtcagccggtggcccaaagaccaagcacggctatgcggtgacccattttttcatggatttcgacaaaatcgtcaccgacgatgacgaagccgtgccgttggaggtcggtgacgacgaccggacctggagcaagaagtctggcacacgagttcgccttacggcctttcttgcaaaacgagtgcccgaccttgaaacgttcctccggcaattggccgtccggttcacctttgccaagccggatttcaagatcctcatcctcgatgcaacgaacgatggggcaaaggccgtcaaggtcaaccctttagacatacctttgctccctggctccaagatagaactgtcgagtcggccagtaattgctgacgacggttcgattcttccggtatccggatggctgggaatggccaaggaggcatacaagaacgaagaaatgatgggggttcgcatttatgccagaggcaaaattgctggcgtgactcgtgacttcaatcagcctgccggctttacgggcgagttcgccatgcgctcgtacttagttggacaagtcgaagcggaatggctcgatctcgaccaaggcgaagacctcgtcagaacagaccgtcaagacatcctgtgggactcagattacgggcaattgcttaggcggtggggtgctgaactcatcaaagagatagcacgcatatcgcgtgagccgcgccggattcgtgtgcgggacgagttcttgcggaagtcgaagatcgaggagcgggcgcgggaacgcttcggcgacaaggaagtgtcgcgtgtcgccatcgacctagccaaaaaattcggtggttttgcagccgaagacgaattgaatgacgaagtctacgttgaggatttatcccagatcatcctttccgtcgcccctcaccaggctttgatggaggcgtttcacgagttctccaatcaagtgactaaaggtgaggcatccatcgagcagatgctcaagatcttcaacaaagcccagcttgccgagcttgcatcctacgcgcagattgccgcgcagcgggttcgcgtcatcaaagaactcgaacagatcatcgacgtttcaatggacgagaaccagtttcaatcactcatcgccagtgcaccctggctgatcgaaccgtcgtggaccgtcatcacgaagaaccaaagcctgaaaaacttcaagaatgcgttcgagaagttctggaaaaaggaacacggcaccgccgtcatcttggccatcgaccatgaggtaaagcgtccagacttcacgctggtaagtatcgacggcttgctgcacatcgttgagatcaaaaaggctggccatgccttcgatgatgcggacttctctcggctcataaattacgtcgacgcattcgacaaattttttaaagagaacgaggaaacggtgtctgagttttacagggggtggcggatttgtctcgtcgccgatggggaaaaactaaaacagagcagcaacctgcatgcttataagagtttcgtgaaggaagaccgtgtcaagcgcatgtcgtggcgcgattttctgaccagagcgaagaaagtccatgaacagtttctagacgtccacgacctcggcgtcgatcgacgcaaaggtaggtcgtcatga

SEQ ID NO: 365743 - DNA, 405 bp, Pseudomonas aeruginosa
atgtctccatgcaacgagctcatggagtccaaggtggaacaactatcgcaagcatccagcgcagccaacatcgatgccggccagtccctccccttgccagggacagaggcctatgaggagctgccgcagtttccgaagcatagcccccttcccttccgacgcaccatccgccgccaggaactgcggttgatcgtccccttggctgaaacgacgatctacgaaatggagcgccgcggtgagttcccgcgccgcttcaacctgacgccgcgctgtgtcgtgtgggacttggtcgaagtggaagcgtggattgagcagcgcaagcaagctcctcgcagcggcgtctcgaagcccgatgtccatcaacggaaaacccgccctgttcgggcgggttcgagtgaggaatga

SEQ ID NO: 365744 - DNA, 162 bp, Pseudomonas aeruginosa
atgctcggaaagccgcataaaaccagctttcccgaggagacttttaccgtcaaagaccggataggtctcaatagtgaacaggaaggtcttgatccggcctccggctcttaccgccacttttaccgccgacttgttctgctggccggcgatagccaccgatag

SEQ ID NO: 365745 - DNA, 684 bp, Pseudomonas aeruginosa; identical to SEQ ID NO: 365230

SEQ ID NO: 365746 - DNA, 1368 bp, Pseudomonas aeruginosa
atgaaaaccccagctcgccgccgcgtcggcctgctcctagccagcctttgtctcccgcttttcgcccaggcggcggaaacccagcccacccacgagttcagcctcgacaacggcctgaaggtcatagtgcgtgaagaccaccgcgccccggtggtggtttcccagctctggtacaggatcggctccagctacgagacacccgggctcaccggcctgtcccacgccctcgaacacatgatgttcaagggcagccgcaagctcggcccgggcgaagcctcgcgggtgctgcgcgacctgggtgcggaagagaacgccttcaccaccgacgactacaccgcctattaccaggtcctggcccgcgaccgcctgccggtggcgctggagatggaagccgaccgcatggcccacctgagcctgccggccgaccagttcaagagcgagatcgaggtgatcaaggaggagcgccgcctgcgcaccgacgacaatcccaacgccctcgccttcgagcgcttcaaggccgccgcctacccggccagcggctaccacaccccgaccatcggctggatggccgacctgcagcgcatgaccatcgacgacctgcgccactggtacgaatcctggtacgcgccgaacaacgccaccctggtagtggtcggcgacgtcaccgccgacgaggtcaagaccctcgccaagcgctacttcggcgagatcccctggcgccagctaccgccggcgcgcaagccgctggaactggccgagcccggcgagcgccggctcaagctgtacgtacgcacccagctgccgaacctgatcatgggcttcaatgtgcccagcctgggcagcagcgagaaccctcgcgaagtcaacgccctacgcctgatcggcgcgctgctcgatggcggctacagcgcccgcctggcctcgcgcctggagcgcggcgaggagctggtcgccggcgcctccacctactatgacgcgttcaaccgcggcgacagcctgttcgtcctctcggccacgccgaacgtgcagaagggcaagaccctcgagcaggtcgaggccggtctgtggaagcagctcgacgacctcaagcagaacccgcccagcgccgcggagatcgagcgcgtgcgcgcgcagatgatcgccgggatggtctacgagaaggactccatcgccgcccaggccagcagcatcggccagctggaaagcgtcggcctgtcctggaagctgatcgaccaggacctggagggccctcaaggcagtgactccggacgatatccagaaagccgcccgcacctatttcaccccgtcgcgcctgaccctggcgcaagtgctgcctgtgaaggccgaggaaaaggaggcccgtcatga

SEQ ID NO: 365747 - DNA, 273 bp, Pseudomonas aeruginosa; identical to SEQ ID NO: 348098

SEQ ID NO: 365748 - DNA, 270 bp, Pseudomonas aeruginosa
atgcagtgtttgtggacgtattcttacaataaatccaattacgtaacaattttactgtgtagaacaacaagttttgaagatgcatcgggattcagagcgcaggcggtgttttctgtggtcgttttgccacaacattacgaccgcgaggccttcttctggcttcgcctcgatgccccttcgtttccggctccggtctatgcccgcctgatcgaaggcgagaacggcacgcacgacctgatctggtcgcgcagcaagccgcaggcggcgtaa

SEQ ID NO: 365749 - DNA, 348 bp, Pseudomonas aeruginosa
atgacgatgctcatcaccgacgacgaccgcatccgcttgctggccaatggccaagcccgcgctgacgggcaagaaaccgatccactgccggttgttcgcttgttcacgccagatgcgcacctgacctggctgctggccgcgcttgaccccgcagacggtgacaccgctcatggcctgatcgacctgggcttgggcatgcctgccctgggcacagtgaagctgtcagatttggcatctatcgtcggtccacgcaagcagcccgtgatgcgtgatcgctacttccagccgtcgcggcgattgttggaatatctgcggctggccgaagaaaacggtgccattcctgattga

SEQ ID NO: 365750 - DNA, 1800 bp, Pseudomonas aeruginosa
atgcagacgccgacagaacaccccggaaacaagcagggggattacgaagatttggccgccgaatacgtttctatggagcgcgtgttcgcgttgttcataccataccggctacgaatcttgtcggtcgtggcgctgctcatcgttggagccatgatcggcatggcgtcgccgttcctgctgcgcgccatcatcgacgatgcgctgccgggcgccaattttgccctgctgctctggctggttggtggcctggtcgcggtggccatgctgggcgcagcgatcagtacggtgcagaccatcctgtcggcccgtatcggccaggcgatcctgcacgacctgcgggtgcgtgtgtatgcgcacctgcagtcgctttcgctgcgcttcttcgccggcagccgcactggcgagatccagtcgcgtatcgccaatgacatcggcggcctgcaatcgttggtgaccgatgcaggcaacgaactggcacgcagcctcagcacagtgctgatgacggcgctcgccatgtgtctgctcgattggcggctcgcgttgttttcgctgctggtggtgccgctgacggtgatgatcagccagtgggtcgccaagctgcgtgaggccatcacctatgagcagcaggccaagcaggccgatctgtccgcggcggttcaggaatcgctgtcgctttccggcatcattctcgcgcgcaccatgggtcgtagtggctttctggtgcgccggttctcgcgcacttcccaggaggtcgcggcactggaggtgcgatcgcgtaccgccggtgaatggcagtgggcgctgatcggcttggcgctgtcgatcctgcctgcattgaccctgctgctgggcggctggttgatgggcggcagcgcgccgctgaccatcggcacactggtggccatgatcgccttgcaggagcagttgctctggcctttcgaacagttgctccagttggggcgcgacatgcgcaccacgcgcgccctgttcgcgcgcatcttcgagtacctggacgcaccggtggaaatcaccgagcggcccgatgcggtgacgctggagcgtgcgcagatgcgcggccaggtgacggtcgacggcgtcagctttcgctatgatccgaacaacgcgccggtgctggaaaacatcagtatcgacattccgccaggcacccacgtcgccatcgtcggcgccaccggatcgggcaagaccacgctcggccacttgttggcccgactgtatgacgtggagagcggctcgatccgctacgacggcgtcgatgtgcgcgatctcagctttcagtcattgaccgacatgctcggcgtggtttcccaagagccgtacctgttgcatgcctcggtggccgacaacctgcgcttcgccaaaccggatgccacggatgccgaattgttggccgctgccaaggctgcacaactggatgccgttatcgatgcgctccccgagggttatgaaacgcaggtcggtgaacgcggccagcgtttctccggcggtgagaaacagcgcctggcgctggctcgcaccatcctgcgcgatccgccggtgctgttgctcgatgaagccaccagcgcgctcgatacgcagaccgaacaggctctgaccgaggcgttggccgtgctctcgaagaaccgcacgaccatcaccattgcgcatcggctatccaccatccgccgtgccgatctgatcgtcgtgctgcaacgggggcggattgtcgagcatggcacccatgagcaactgctggcacagggtggacgctacgccgggcttgtgcagtctttctcgcagtag

SEQ ID NO: 365751 - DNA, 1371 bp, Pseudomonas aeruginosa
atgcgccccctgatttcctgcatcacactgggcagcgtactgctgaccggctgcgcctcgctcacccgcaccccatatcaggcgccggaggtgcccctgccgacgcactaccagcatgcccagtcggtggctgccggcgttcgcgccgacacttggtggcgcgcttacggcgatccgcagctcgacgcctgggtggatctggccctggcgcgcaaccctgatctggccgccgccgccattcgcgtgcgccgcgcgacgctggaagccaggctggcaggcaatgccctgctacccaccttgaacggcagtgtcggcagcggcctgagtcgcccgctgtcgggcagcccgcgcgtcaccaccgagagcgccagcgccacgctgggcgccagctgggaactggacctgttcgatcggctgggcgcacagcgcgacgctgccgtcttcgaggcgcaggccagtaacgaggatcgcgatgccgtagccctgacgctgatcggcaccacggccagcctgtactggcaactgggcctagccaacgaacgcatcgacctggccgaacaaggcctggcctatgcccgccgtacccgcgagctggtgcaggcgcagtaccagagcggcgcggtctccgggctggagccgcgtgaggccgaacaggcgctggcccagcaacaggcgcaattgagccaattgatccaggtgcgcaccgacctgcgccaggcgctgggcgtcttgttcgatggcgccgccgcgcccggtaacgaaccccagcgcgtgccgatcagtgcactgccgaacatcgctgccgggctgcccgccgaactgctcggccgcagaccggatctgcaggccgccgaactgcgcctgcgcgcgaccctggccgccagcgacgctgctaaagctcgctactacccgtcactctcgctgaccggagccctgggcacatccagcaaggagttgctcaacgtactgagcaatccggtgggtacgctaggtgccaatctgaccctgccgttcctcaacgtccgcgagatgcggctgaacaccgccattgcgcgcacgcgccatgaggaggccgtgatcctattccgcaaatcgctgtacacggcactggcggatgtggaaaaaaccttgtcggccaggatccagcttgccgaacaggaagccgcccagcagcgcgtacgcgaccaggcgaccgagatcgagcgcctctacgaggcgcgttaccgcgcggggcaagtgcccctgcgtgcctggctggacgcgcaggagcggcgccgggccgcagattcggcttacgccgcgctgcatcttgcgcggctgcagaaccatgtcgcgctgacccaggcgttgggcggcacggcagcaccgtaa

SEQ ID NO: 365752 - DNA, 1947 bp, Pseudomonas aeruginosa
atgaacgctgcgctattggaaatgcgcgccctgcgccgggaattccctgctggcgaaggcgtggtcaccgtgctcaaggacatcgacctgcgtatcgatgccggcgagatggtggccatcgtcggcgcctcgggctcgggtaaatcaaccctgatgaacattctcggttgcctggatcgcccgagcgccggcagttaccggatcgccggccaggaaaccggcgagctgcaaccagacgcgctggccgccctgcgccgcgagcgcttcggcttcatctttcagcgctaccacctgctggccgacctgtccgcgcagggcaacgtggaactgccggcggtctatgccggcaccgacgccgcagcgcgccaggcacgcgcccaggtgttgctcgaacgtctcgggctgggcgagcgcctgcagcatcgccccggccaactgtcgggcgggcagcaacaacgtgtgtcgatcgcccgggcattgatgaacggtggcgcgatcattctggccgacgagcccacaggcgccctggacagcagcagcggcgaagaagtcatgcgcatcctcaaggagctgcacgccgaggggcacaccatcattctggtgacccatgacatggcggtggccagccatgcgcaacgggtaatcgaaatcagcgacggtgcgatcatcgccgaccgccgtaatgtggcggtcgatgcgccacgcatggtgccagcgccaccccaggcaccggcggcgtcatggcgggcgctcgccgaccgcttcgacgaagccctcgccatggcgctcagggccatgaacgcccatcgcctgcgcaccttcctgaccatgctcggcatcatcatcggcattgccgccgtggtctcggtggtggccctgggtcgcggtgcgcagcagcaggtaatggcgcagatcagcgacctgggcaccaataccctggacatctatccggggcaggacttcggcgacctgcacgccgacgccatcgagacactggttgcagcagacgccgaggcactggcggaacagccctatgtcgacagcgccacccccaacctgtcgatcagcgtcaccgcgctgtatcgcgagcgcgctgtgtctgcccaggtcaccggggttggccccaggtacttccgagttcgcgggttgcgcctgacagcaggccgcttcttcgatcaacgcgacgccgagcaacacgcgcaggttgcggtcatcgactcgaaggccgccgctgcgctgcacccaggcggtggcagccccctgggcgaggtggttctgctgggcgacatgccggtcgagatcatcggcgtgctgaggccgacccagaacagctttggcggatcgacaccgaccttctatgtcccctacacggcggcggcaacgcgcctggtgggcaaataccacctggacagcatcaccttgcgggtcagcgacggcgtttccagcaggatcgcccagcaggcagccaccgcactgctgaccgaacgccatggcggcaaagacttcttcatcatgaactcggatcagatccgccagaccatctcccgcaccagcactacgctgacgctgctcatctccaccatcgccatgatcgccttgctggtcggcggcatcggcgtaatgaacatcatgctggtgtcggtgaccgaacgcacccgcgaaatcggcgtgcgcatggccattggtgcacgacagtccgacatcttgcagcagttcctgatcgaagccgtgctggtgtgcctggtcggcggcgtactcggtgtatcgctggcactggggctcggcctggttgccggcatggccggactcggttttccgctgtccttttccgtctggtcaatcgtactggctgtggcctgctcgaccttgatcggcatcactttcggcttcctgccggcacgcaacgccgcccggctcgaccccgttcaggctttggcaagagactga

SEQ ID NO: 365753 - DNA, 1203 bp, Pseudomonas aeruginosa
atgacgttgaatcgcaaatgggccgtcagtgccgtgatcggtgcctgcgtgatcgcaggcatcgcgctgtggcaggccaatgccaggtcggccgtcgagtacgccacggccgccgtcaccgtgggcgacctggagcaaaccgtactggccgtcggccgcctgcgtccaaaggagttggtagccgtcggtgcgcaggtatccggccaggtgcaacgtctgcatgtcgtgctgggccagccggtcaaggccggcgagctgatcgccgaagtcgatgcacagccgcagcgaactgcactgcgcaacgccgaagcctcggtgaactcgctgcaggcccagctcgctgcacggcgagctacattggtacaggcccaactcaacttccgccgccagcaggagctgctggcggtagatgcgacatcgcgcgccgatcaggaggccgccaaggcggcactggacaccgcccgtgcggaaatcgcctcactgcaggcgcagatcgaacaggcgcgtacccaggtcgagaccgcacgcatcaatgtgggctatacccgtatcgtcgcgccgatggatggggtcatcgtggcggtggtcaccaagcagggccagaccctcaactcgttccagtccacaccgaccatcgtcatgctcgccaagctggacgtgatgacggtacgcgcgcagatcgccgaagccgatgtggataaggtccagcccggccagacggtctggttcaccacgctgggcaatagccgtcagcgctaccaggcacgcatcgagcagatcgaaccagcccccgagtccatcatcaatgatacgggatcaggcggatcagcaggatcagcaggatcagcagcgggcgccaccgccacggccaaggccatctattacaacgcgttgttcgacgtgcccaaccccgagggccagttgcggccttcgatgaccgcgcaggtgtcggtgcaaatcgccgcagccaaacaggcggtgctgatgccgaccgctgcgctgggtgagcgggttgcggacgacacccatatcgttcgggtgatggacaagcgcggccaggtggccgagcggcaggtgcgaatcggcctgcgcaccaacgctcaagcgcaggtgctagcgggtctggagccgggcgagcaggtggtcataggcgaggagcagcccgacaccccgatggctgaccctggcctgatggggttctga

SEQ ID NO: 365754 - DNA, 1080 bp, Pseudomonas aeruginosa
atgaggctgccgcgcgggctgagccgtcagatcgtgctgtcgatgagcgctgtggtgctggtcgtcatcctgctcagcctgctgggctcgtatgcgttctacgcgctgtggttcgcctatgcgccaacgagcatcccggagtccggcgactggataccgaccgcgccggagtgggcctggatggcgctgaccactctcgtcgcgctcgcgctagcggtgctggtcgcagtcaatctggcgcgccgcatcctgctgccgctgacttcagtcgccgaaagcctgcggcgtattgctcagggcgagctagacgcacgcgcggccagtgaggatcgttcgctcggcgaggccacgctactggtcgatgacttcaacaccatggccgaacggctgcaacgcatggcccaagaacaactgttctggaacgcggccatcgcccacgaactgcgtacccccgtcaccatcctgcgcggacggttgcagggcctggccgaaggcgtgttcgcgcccgacgcggcgcaattccgcagcctgctggcccaggtcgaagggctgggccgattgatcgaggatctgcgcgtggtcggcctggccgacagcggccacctggatctgcactggcgcgaggtggaactgtcggaggaaatcgaggcagtggtgcaactgctcgcgtctgcgctgcaggaagcgggattcaccatggaggtcgagctacaggccgggcgcgtggcctgcgatccgcagcgcatccgccaggcgctgctggccctgctggaaaacgcccgccgccacgccgagcccggcatccttcgcatcgaatcacgtctggcgcaaggcgagtgcctgctgcgcgtcgaggacggcgggccgggcatcgcgccggagcttgccgaacgcctgttcgatgcgttccagcgcggtgaacactcgcgctcgcgggagagcggcggcagcggcctggggctggcggtggtgcgcgccatcgcccaggcccacggcggccaggcgagttgccggccgtcgccgcgcggcggttcggtgttcgagattcgatggccagccgagtctggcgaaatcgactga

SEQ ID NO: 365755 - DNA, 783 bp, Pseudomonas aeruginosa
atggagattatcgaaaacttgatcgacgtgaccttcatgaacgaatttgccgatgcgctgggcgcgccagccgagcgctcgaacgggcggcagagcctgatcctgatcgccgaggacgagcccgaaatcgcggacatcctgattgcctatctcgcgcgcggcggcttcaagaccctgcacgccgccaatggccggcgggcactggagctacatcgcacgcacaagcccgatctggtgctgctggacgtgcagatgccgcgcatggatggctggcaggtgctgtccgaaattcgtcaccgcggcagcacgccggtgatcatgttgaccgcgctcgatcaggatctcgacaagctaacgggtttgcgcatcggcgctgacgactacgtggtcaagccgttcaatcccgccgaggtcgtggcacgcacgcaggcggtactgcggcgcgcctcgcatgctgagcatgaaatgcctagcgtactgcgcgtggatggcttcgagatcgaccttgagcatcacgaagcatcggtgcgcatcggcaggcggcagcacgcgcttgcattgacgctgaccgagttcaagctgctggcgtacctggcgcgcacaccgcggcgggtattcacgcgtgacgaactgttgcacgcctgcctgcccgaaggcgacacgctggagcgcacggtcgatagtcacatcagcaagctgcgcaagaagctggagaacctgggggtcgagggcgtgccccacggggtgcgcggggtgggctacaagttcaggagtgcggtatga

SEQ ID NO: 365756 - DNA, 504 bp, Pseudomonas aeruginosa
atgaggatcaaaccgatgcggcgcggcggctgggcgctcgtgctggcagcactggtgctggccggatgcgaccgtggcgcgcaggaggccgcgccggtgccggcccaggtgtcggtgctcacgttgaccgcccggcaggtcacgctcgaagacgaactgcccggccgcgtggccccggtgcgcatggctgagatccggccgcaggtcggcggcatcatccagcgaaggctgttcgagcagggcgcggaaatccgcgccgggcagccgctgttccagatcaaccctgcgccgttcaaggccgatgccgatatggccgccgccgccttgcagcgcgccgaagcggcgctggtgcgcgctcgtgtccaggcggcgcgcctgcagccgctggtcgaggccgacgcagtgagccgtcaggtcttgacgatgcggtgtcgcagcgcgaccaagcagcggccgacgtggcacaggcccgcgccaccttggcgcgccgccaactcgatctga

SEQ ID NO: 365757 - DNA, 705 bp, Pseudomonas aeruginosa
gtggcacaggcccgcgccaccttggcgcgccgccaactcgatctgaagttcgcctctgtggatgcaccgatcggcggccgcatcgaccaagccctgatcaccgaaggcgcgctggtcggccccaccgacagcacgccgctggcgcgcatccagcagatcgaccaggtctatgtggacgtgcgccagcccgccgcggcgctggaagcactgcgcgcggcgctggcgccgcggcacgcggctgacaacggctcgggcagcgacagcctgccagccagcatcctgcgcagcaacggcgagccctacccgcaggccggtcgcatcctgttctcgggcatcaacgtcgatgccggcaccggcgacgtgctgttgcgcatcctggtggacaaccccgaccggttactgctgccgggcatgttcgtgcgcgcccgggtgccgcgcggccagccagccgatgcgctgctggtgccgcagcaggcgatgtcgcggacaggcggcaaggctggggtgtgggtcgtggatgcacaggaccacgcgcagcgggtgacggtggaactgggcgaactggtcggacgcgactacctcgtccgcagtggactgcaggcagggcagcgcgtcgtggtcgaaggcggcgaacgcctgaccgacggtgcgcccgttgcacccagggcctggcaggccgctggcgcacgcacgcctgcgcgctga

SEQ ID NO: 365758 - DNA, 3141 bp, Pseudomonas aeruginosa
atgccgcagttcttcatccaccggcctgtgttcgcctgggtcgtcgccgccttcatcgtgctgctgggtttgatcgccatcccgcaactgccggtcgcacgctatccgtcggtggcgccccccaccgtcagcatctacgcgagctatccgggcgccacgccgcagacactcaacgattcggtggtcgggctgatcgagcgcgagctgtccagcgtcaagaacctgctgtacttcacgtcctcggccgacacctcgggttcggcgcagatcaccgcgaccttcaaacccggcaccgatcccgacatggcgcaggtcgatgtgcagaaccggctcaaggcggtggagccacgcttgccgcaggtggtccgccagagcgggttgtcggtcgaatccgccacctccagcttcctgatgatcgtcagcctgacctcggaggacgatggctacgacgagattgcgctgggcgactacctggcccgcaacatcgtcgaggaactccggcgcatcgacggcgtcggccgggtgcaactgtttggtgccgagcaggccatgcgcatctgggtcgatccggcccaactggtcgcctacggcctgtcgatcaacgacctgtccgacgccgtcagccggcagaacgcgcagatcgcgccgggccgtgtgggcgatgcaccgaccctaccgggccagcgggtgaccattccactgaccgtccaaggccagttgtccacgcccgagcagttcgctgccatggtgctgcgcgccaacccggacggctccagggtgctgttgggtgacgtggcgcgcgtcgaacttggcgcgcagtcctacggcttctccaaccgcgaggatggccgtcccgccgccggcgcggcggtgcagttgtcgcctggcgccaacgcggtgcgcacggccgacgcgatccagacccggctggccgagctgagcgcctccatgcctgccggcatccactacacgaccccgttcaacacggcgccattcgtgaagatctctatccagaaggtgatctacaccctgctcgaagccatggtgctggtgttcgcggtgatgtacctgttcctgcagaacgtgcgctacacgctgattccggcgatcgtcgcaccgattgccttgctgggcactttcgcggtgatgctggtcgccggattctccatcaacgtgctgaccatgttcggcatggtgctggcgatcggcatcatcgtcgatgacgcgatcgtcgtggtcgagaacgtcgagcgcctgatgagaacccgaggtcttgcgcccaaggaggcgacgatcaaggcgatgaaggagatcaccggcgcggtgatcggcatcaccctggtactgaccgccgtgttcattccgatggcgttcttcggcggctcggtgggcgtgatctaccggcagttcacgctgtcgatggcggtctccatcctgttctcggccctgctggcgctgagcctgaccccggcgctgtgcgcgaccctgctgaaaccggtggcccccgagcaccacagccgcggtttcttcggctggttcaaccggcgtttcgaccgcatgaccgagggctacacatcgcgggtggccaggctggtcagacgcggtggacgcgtgatgctggtctatgcggcgctagtcgcggtgctggtgctggggttccggctgctgcccacggccttcctgccgcaggaggaccagggctacttcatggcgtccttccagttgcccgccgatgcgaccgccgagcgcacgctggaagcggtgacggcctacgaacagcatgtcgccacgcgccccggcattgccggtaaccaaaccaccctgggtttcggcttctccggctccggcccgaatgcggcgatggccttcaccatgcttaaggactggggcgagcgcgacggcgccacggcggccgatgaagtggcgcgcgcgcagcaggcgatggccgggatcgccgagggcgacgtcatggtgctgctgccaccggcaatcgaggaactcagcacctcgtcgggattctccctgcagttgcaggaccgcgccaaccagggcctggccgcgctggcggcggccgaggcccagttgctcgatctggccgccaacagccgcctggtcgccaatgtctatcgagacggcctgcctgtcggtcctagcgtgcgcctggtcatcgaccgccagaaggccgaggcgctaggcgtttcgtttgcggctgtcagcgatcttctgtccgctgcgatgggctcgctgtatgtgaacgactttcccaatgccggacgcatgcagcaggtcatcatccaggccgatgcgccggcgcgcatgcagatcgacgacgtgctgcggctctacgtgcgcaacaccgccggcggcatggtgccgctgagcgaggtggtcacgccggtctggacggaaaccccgctgcaactggtgcgctacctgagctatccgtcggcacgcttgtccggcacgcccgcgccgggcgtctccagcggtgcggcgatggcggagatggaacggctggccgcgcagttacccccaggctttgccgtggcctggaccggcgagtcgctgcaggagcggcaatcggccgcgcaggcgccgctgttgatggcgctgtcggtgctggtggtgttcctggtgctggccgcgctctacgagagctggtcgatcccgttgtcggtgatgctggtggtgccgctgggcctgctcggcgcggtggccgcggtgtggctgcgtgacatgcccaacgacgtgttcttcaaggtcggcatgatcacggtgatgggcctgtcggccaagaacgcaatcctgatcgtcgagttcgccaagcaattgcgcgaacagggcaagggattgcggcaagcggcggtggaggccgcgcgcctgcgcctgcgaccgatcctgatgacctcgctggctttcggcctgggcgtgttgccgctgatgctggccatgggcgctagcgccgagacccagaacgccatcggtaccggcgtattcggcggcatggtcagcgcgaccctgctagcggtgttcttcgtgccggtgttcttcgtcgtcgtgatgggaatgcagggacgcttcggtcgcaggcgccagcctcgacgcggcgctcgtgacaaccgcaacgtggtggaggaatga

SEQ ID NO: 365759 - DNA, 1446 bp, Pseudomonas aeruginosa
atgcgcatcctgatgttgccgctggtgctggccttgtcggcttgctcgctgacgccgccgctggtcaggccgcaagcgcccgtgcccaccgtgtttcccgacgcagcggcgccagaggttgccaccggccatgctgccgacctcggctggcgcatcatgttcggcgatccccgcctgcaacatctgatcgcgctggcgctggagcacaaccgcgacctgcgcctggccgcgctcaacgtcgaggcggtgcaggctcagttccgcatccagcgcgccgcgcgcctgcccggcgtgggtgtcgaagctggcgccacgcgcgagcgcacggtagccaccacagtcggcggtacggccagtccttccggtgtgcaggaacaactcagcgtcggcctgggcctgagcgccttcgagatcgacctgttcggccgcgtgcgcgccctgtccgacgccgcgttcgctcgttaccttgccagcgaacagggccaccgcgccacgcagatcgcgctggtcggtgcggtcgccgatgcctacttcgccgagcggctggcgcaggaacagcggcaactggccgaacacacgctggccgactggcgccagtccatggcactggtgcacctgctgcggcaggccgaccagagcagcgggctggacgtggcccaggcggaaggccaagtcgccaccgccgaggccgacctggaagcccgccaacgcgcccaggcccgcgcccgcaatgcactcgcgctgctggtggggaccgaactgcccaccgaactgcccgcgccgctggcgctggacgcccagccactgctgacacggctgcccgcggggctgccctccgacctgctggcgcggcggcccgacatcctgcaggccgagcaggcgctggtagcggccaacgccgacatcggtgcggcgcgcgcggccttcttcccgcgtctgtcgctgaccgcttcgctgggttacgcgagcccgtcactgggcggcctgttcgacgccgatcagcgcacctggcgcttcgcgccgcagatcacccagccgctgtttcagggcggacgcctgcgcgccgaactgcgcctggccgaagtgcgcaaatccgccgccatcgccgagtacgaacgcgccatccagaccgccttccgcgaggtcgccgatggcctggccggcagcgccaccttcggtcgtcagcgcgacgcgcaatatcgggcggtggcgagcgccgagcgtcgcgcggaactgtcgagcctacgctaccgggccggcctggaaggacgcctcgaactgctcgacgcacagcgccagctttatgccgcccggcagaccctgctggatctgcgccgcgacgagatcagcaacatggtggcgctgtacaaggcgctgggcggcggcctggccgatgcctcgccggtcgccgcgggtgcggcgctgaccgcgccgcgcatcgaatag

SEQ ID NO: 365760 - DNA, 1293 bp, Pseudomonas aeruginosa
atgcagatccccggcagtcccgacccggccacgcctgtcgctgaggcgcagatgctggagcaggccgtccacgatcccggcccgcgctggcgcttgcgcttctggatgatcttcagtggccaggccctgtcgctggtcggctcggcgctgacccagttcgtgttgctgtggtggatcaccgacaccaccggcagcgtttccgccctggcgaccgccggcatggcggcgctgctaccccaggccctgctcagtccactgggcggcacctttgccgaccgttacagccggcgcctgctgatgatcgctgccgacgttatcagcgcgctgtgcatggcggtgctgatcgtgctgttcctgaccgaacgcatcgaactgtggcacgcctacgtgatgatgttcatccgcagcgccatgcaggctttccagaccccggccgcgactgcgagcatggcgatgctggtgccacgcgatttcctgccgcgcgcggcgggcctgaatcagtcgctgcagagcttcaccgtggtcgccgccgcgccgctgggcgcactcgccatcagtgtgatgccgatgggctgggcgctgggcatcgacgtgggcaccgcgctgctgggcatcgtgccgttgctggtgttccgcattccgcaactgcgcgcggccggcgcgcgcggcatcggcggcatctggaccgagttccgcgagggcctgacgctggtctggggccatccggggctgcgccgcctgtatggactgctgggcgcggtagtgctggtgatcatgccgtcctttgcgctgctgccgttgctgatcaaagagcatttcaacggtggcgcgccgcaggtggcactgatggaggggctggcgggcatcggcatggtgctcggcggcatggtggtcgccgcgctcgcaccacgccgccaggtgccctgggtgctgtggggattcgccgcctcctgcctcaccctggcgcttaccggcctggtgccgggccagttgttcggcgtggccgtggcctggtgggtgctcagcggcttcaccttcatcctcggcaacgcacccctgaccgcgctgctgcaggccacaattcccaaccagttgcaggggcgtgcgctgtcgctgctggcgatggccatggggctggccgccccggtcggcctggcgctggcgacaccgcttggcgagtggatcggcatccgctggctgttcgtgttgatgggcgtggccggcacattggtgagtctggccggcttcctttcgcccccactacggaaactcgacatggagcaacgctcgtga

SEQ ID NO: 365761 - DNA, 279 bp, Pseudomonas aeruginosa
atgaaaccgatcatcccgttcctgctggcagccgtgttgtgtgcctgcggccagtccgaaacatctcagaagcccgctgattccgcagcaaacatcccgacggtggaagaactcgcggcaaaccccgaacggctcaaggaactacgccagcaatgcaagaccgaccgccctaagctaggcgacgtattgtgcaaccgtgttgccgaagccacgcgcaagcggttctatggcgatggcgaaatcccctacacaccgccgaaagagtcgcccaagttctga

SEQ ID NO: 365762 - DNA, 246 bp, Pseudomonas aeruginosa
atgagcacgacgaaaaagctccgcttggggccactcccgcgccaggaagtgaccaaactgaccttcgcttgtccggtcagcttgaaagcccaccttgaccactatgcggcgctgcacgcgcagacctatggagaagcggtcgatgcggtcacgctgatcccgcacatgctcgaagccttcatggccggcgaccggggattcaggaagggtgcggcgatacggagcacaccatcgaagccgacgtga

SEQ ID NO: 365763 - DNA, 651 bp, Pseudomonas aeruginosa
atgccccgcgccacgatgagagtcgcgcccggtgatcctgaaaagccggcggcttcgaaagccgatttttatgtcaggttgttcaccaggtcggtggccgttcacgtcatcggttgttcagcatcgcaaaacctggaagggtgttccgtggtacagctgaatggccgggtcaggcggcgtagacgactggccctgcttcgaattccgagtggttggcggcgaacgcccaggcgactcgggagaacttgttggccagggcgcgcaccaccatgttcgcatggcgtcgctgccgtagcgagcggacccagtgggccaaggcaccctgctgatgctccaggcgctgcaggtagacccgggcgcactgcactaaaagccgccgcagatacttgtctccctcgtttgctgatacccagcaaattggctcgaccgccggtgctgtgctggcggggtaccagccccaccgatgccgcgaaatcacggctgccgccatactgcttgccatcgcccatttcggccgataacaggctggctgtgatcgggccgacacagggaatcgtcagcaagcggctccccaggtcatcttcctcaagctgggtggtcatttccttgtccggtgccttgatctgtccgtccagacagcgtgaatgctga

SEQ ID NO: 365764 - DNA, 2727 bp, Pseudomonas aeruginosa; identical to SEQ ID NO: 346669

SEQ ID NO: 365765 - DNA, 597 bp, Pseudomonas aeruginosa
atggcggctttggagagaacggcatatccacgactagcaactaccctcagtgcgaaggacttacaccgcaactattcgctttcctcaggagagcttgactggatttccaggacagctcgtagcccagccctttcccttgggctggcagtccagctcaaggtattccaagagctccattactttcctcccctagacgagatacctccagaaatcactgaccacatcaggaatacactcggttttggccctcgtatcacttcccgctataccaactcgcgtactttttataggcatcaggcggccattcgtgagtacctccagatcaaggctttctatggtagtgaagcgctcaccatagctctccaccttgcgcacgaatctgccgaggtactcgaccagcgggcggatatcatcaatgtgctgatcggcgagttgctgcagcgcagctacgaactcccagcctattccaccctcaatgacgctgctgaggatgccttagttgcaatgcaggagcggctattcaatctcgttgtgaccagggcgccaattgaggtggtctacaaactgaaagaactgctcgaaacggatttcgggtga

SEQ ID NO: 365766 - DNA, 792 bp, Pseudomonas aeruginosa
atgaaccagctaggtagtctagcgggggatgggcgagcgtccggctccttaatgggggtgattggaaccttgcccgacccacggggtgtccatttgagcgttagcaaaaacaaagagatttcgagtggcgttgatgggtgggggtattcgggcagattagggttattgtacaaggtggcccccacaacgaatgtgggtgtctcctacatgttcaaaagtcacatgaacgacttgaaagggaagggggctgttacagcggtggacggtattgccggtaatgtgcctatcgaaggcgaggttcggtttttggacttcaatacgccagccaagcttgatgtgggtatcagccatcaggtcacggataaatggttgatcgcttttgatgtttctcgcgttttctggaaggatgctttgaaggatattaaggtggggttttccagtgacgtcggaggggttgatcttaaattacctcaaaacgctaaggatcaaacgatagtggcgatcggaacttcgtatgccgctacccagaatttaactttgcgagcaggataccgtcaggctactcagccattcaacgacgaggctttgcttgccctaataccaaaaactatacagaagattgcctccttaggttttagctataatttctctcaatcgagcagatttgatgctgcatattcgcacgacttcgagagcagcatgaccaatagatcggcttacaacacttcgtcacctgtcaggacgtccatggcacaagataatttcgtcattggctataattattcattctga

SEQ ID NO: 365767 - DNA, 354 bp, Pseudomonas aeruginosa
atggtacttattcagtgggctttctgggtgttggctgcggctgctgcgggcgggttgttcttagggttgctgtcgaaaaggaaagtgcgttatccctcttggttcggcttggggcatggcgggctgggcttggcgggtctcatgacgctggtctatgctttgtataccgccggaccagaagccgcgttcccgcaggccgcgttctgggcgctgggcctgctggtagcagcctttctgggaggggcgttgttttttggggtgctgttccgtaacgccaagccttggtgggcgatcatcgggcacggcggcttggcgttggcgggcgttgtcgtgctatttatggccgcctattaa

SEQ ID NO: 365768 - DNA, 846 bp, Pseudomonas aeruginosa
ttgccctaccagcccgtcttgtgcgggctttggcagtaccagcccgcggcttttagtgaggactcgcaaacaatgtacgtacttcaaggattcgttgaaattgggcaggatgcagcagcggtggttgatactggcacccccggcgtagttggcgtattcactgactcgatccagacctgcatgatcgcagccgttgaatgcgataaaggattcgtagtcattcatgattctgcccagcttcaactccccggaatcgccgcactaatcacgaccatgggccgctgcaaaaaactctcagtagttgtcccagctggcagtcaggaccagcattcagagcgtattactcgactcaaaaggattactggtgttgcagcaaagaacttcaccaagctgaccgtgccctcctttggctatgcggtgtcctataccaccgatggagggatggaagtacatgcacacggcgctacagctgcttcgcttccactcccggagaaggggatcaggacctcaatcgcagagatcaacaatttcttcatcaagtcaaactcacaatcgctcgcggtcgatgttcagttcagcgacgggagatacaacgccgtcaagccgatccagaagaccgttgagcagctaatgaaagttctcagcgaacagcccaagtactttttcaataacgcagccctgctgtacgcagcgaatgatctgggcttgcttgttcttccatcagatctggtcagattcgttgaagacaacgcgcttcagccctatcgcacaagtgtcgtgcctgcgcatgatcagcaacggcaggcaatgcttttcaacaaattcgtgtcgagccgcagcgtttaa

SEQ ID NO: 365769 - DNA, 393 bp, Pseudomonas aeruginosa
atggcgggcatcatcgcggcggttctcggcatcatcgccctggcctggttcctgcgccggctgttccctgccctgttcgctgcggtgttcgtcctggctgcgccggtgtggctggtcggcggcttcctggtcgatctgctgcgccggccgctggccttcctgcggccgctcggcctcggcctggcccgcctggtcggcttcgtcctggtgctgccgctgctgcccttcatcttcgcctggtcgttctttgcggagctgtggcggcagttccggccggtcaagtccagcgccccggctccggccgagaccaagacgccgatacaggcggcgacacaacgcactgcggacgtgatcgacctgtgcgcgttccgccaacggcgcagcaaagagtaa

SEQ ID NO: 365770 - DNA, 2520 bp, Pseudomonas aeruginosa
atggatttgagagacatacttgaacggctttgggccgctattcttgccctgttttttggggcctggtgcgtgtcgatggctcccgcccacgcgaacatttttccggcttgcgacccagcgacggaaggcggtcgcttcttcggtgacgccgatgctgacgcctgggtggcgcgggtctgcgaagcgcagaactccacttatcagacgtggcaagaacgcctgcaaacgctcgacctagggcagcaagatttgtcgatggcaaccaatgccggagactggcaaagctaccgggagaagtgggccgagcttctgccgatcttgaaagagatggaaacggccgcaatggcgaaccgaaccgccaccggcgcggcaccgattgtcagtttgtaccgctccgatcttgcgtacttcctacagaatgccggccttggcactgcgaacagcttggaggcgttcagcgagcgcgtgattgccggtcttgacggcgagcgcccggcggctgcggctacggccggggtcaatgtagttcagcagtcggtgacgcggggcgtcgagttcgtgcgcggcctggcggccgtggagacggacaaggttcttgcagagtatcgggcgaacacggacgcccgcattgcggagcgaaacgaacagctccagggaaccaccctgagcggctatttcgggggcttcggcgagcgcatcaaggcagctttcggcggctggttgttctacctggtcacggtttgctttgtcggcgcgtggctggcgcacaagcggcggcagaaccctgtgacggtcggcacggccgttggcctggccttcctcgttccatcggtcggcatgttgcttctgttcgtgttcgcgccgttcattccgggctggttcatcctcgccgcgacggtcgccggaacagtggcaacgtatctgaacgcgggccgggtgttcggctggctcgcgggcctggtcggcgcggagtctccgactggaaagcggctgcgcatcctcggcgcaacgattgaaaacctgcgcggccaagtgcaaccgtccgggccagttgcggccgccggtgcggcggtcgcggcggtcgataacagcagcacgcatccgctgggttcgcacggctcggcccgttggggaacggtcgatgaaatccgccagggcggccacctggtcgcgcctggtaagccgggcggcttcgcccttggccgggtgtcggatgcgcccgccggcctcgatcagcgtttccgctttaccggccatgtcgtgaccgtggccccgaccggctccggcaagggcattggcgcggtgattccgaacctactggactatccaggctcggcccttgtgctagacgtgaagggcgaaaacgcggccgtgacggcacgcgcccggcgggcgctcggccaagccgtccatgttgtcgatccgttcgccgtcaatggcgacggcggcgcggccttcaacgtgcttgaccggctcgacgtgtggaacccggattgtgtgagtgaatcggccatcctggccgatgccctggtgatcgccgaaagcaagggcgatgccgtgcatttcgatgaatcggcaaagaacttcctgcaaggcttgatgctgcacgttgccgggctggatgacgcggaacgccggaacctgggcgagctgcggcggctgctgacggcgggggaagcggagtttttcgacgtgttgggcgcaatggcggccgacgatacggcggcctttggcatcccggccagggcggcaaatacgctcatgggcatggccgacaaagagcgtggttccgtgctttcgacggcccgccggaacacggcatttctcgatgacccgcgagtgtcggccgcgctgtcgcgctccgacttcgacctgtcggccatcaagcaggacttgatgacggtctatctcgtcatgccagccaatcgcatcgggcctaatgcccgcttcctgcgcctgttcatcagctcggtaattgcggccatcacgtccagcaacgtgcagcccgcgcaccgtgtcgcattcctgctcgatgagttcggccagctcggctacatgaaacagattgaggatgccgtttcactgctgcgcggctacggcctggccttctgggtgttcattcaagacctgtcgcagctcaagggcacctatccgaagtggcaaaccttcctggcgaacagcgccaagtcgttctttggcacggacgattacgacacggccaaatacatcagcgacagcctgggcaaagccacgattgagtttgagacggaaaacaccggcaagaacagcggtagcggcctatcgggcggcggcggctcgatgaaccggggcaagagcactggcaccagccagcaattcaccggccgcgaactgctgacgccggatgaggtcatgcgcctggggccggagcatccgattgtcctggtgcgcggcgaacggccctacctgctcgaccggctgaactacctggccgatgccgaatatgccgggcggttcgatgcgaacccctaccatagctaa

SEQ ID NO: 365771 - DNA, 225 bp, Pseudomonas aeruginosa
atgaacgccaggagagaggacgcacggcgcaagattcagcttggcggcttagtcgtcaaagcggggatggccgactacccggcggcggtcgtgctaggggcgctgacgcttgctgcgaacgcgctaaacgggcctagtgccgaagctgccttacagcgttttcgtgaggccggcgacagggctttctctgacgataacggagcggatggcggcaaccatctgtag

SEQ ID NO: 365772 - DNA, 252 bp, Pseudomonas aeruginosa
atggcacgtaagacactcgcagaacgcaaagcggcaaaggtcgcggagcttcaaaagatcaaggctgagctggccgagctagaagcaaagtcggctgaacggatcggcaagattgccttagctgctggccttgttgatctcaacctagacgacgacacgctgagaaaggagttcgaggccatcgcctcgaagtttcgcggccaggaaagcaagcaagctgcatcgccttcggcagcgcctagcgcggtctga

SEQ ID NO: 365773 - DNA, 3351 bp, Pseudomonas aeruginosa
atggccatctaccacctgaacacgcacacgataggacgagcagccgggcatagcgccgtggctgctgccgcctaccgttccgcgtccaagctggtagatgagcggactggggaggtgttcgacttcacccgcaagggcggtgttctgtcgtcggaaatcctcacgcctgccggcgtaacggcccccgaccgcgccgccttgtggaatgccgccgaggccgccgagaaaaggaaggatgcccgcgttgcccgcgagtggcgggcggcccttccgcatgagctgaacgaggccgaccgtaaagcgctggcaacgcgcatggggcaggctatcgccgaccgctacggcgtggccgttgacgtgtgcatccatgcgccggacagggaaggagatgaccggaattttcacgttcatatgctggcgaccacgcgcaccattcaggccgatggaacgctgggcgggaaggccgtcattgagctggcgaacaaagacaggcagaaggcgggcattccaggcaccagccagggcgacattaccgacattcgccgcgagtgggctgagctgacaaacgaagcattggagcgggccggcattagcgcccgcgtcgatcaccgcagctatgccgaccagggcatcgagctaaccccgacccgtcacattggcaccgatgctgtggcgatgcagcggcgcggcctggaaggcgtggagcgcatcgacctgcacaacgcagaccggcaggaacaagcccgccagattaccgagcggcccgaaatcatcctggacaaaatcacggccacccaggcggttttcagccgcagggagattgccgccgagctgaaccgctacattgacgacgccgagcagttccaggcgcttctagcgaagctggaaaactcgccgcacctgatcgaattggagccggccataggccgccatccggccaagttctctacccgcgaaatgatcgacaccgagcgggcaatggtggcgagcgccgagcgtctggctggcagcggcaagcatggcgtttccacggccatcgtgaatgccgccattgatggagtcggcaccctttcggacgagcagaaaaacgccgtgcgccacgtcacgcaggccggcagtttggccgtggtgatcggtgacgccggtaccggcaaatcgttcagcatgaaggttgcccgtgaggcgtgggaggcggccggctacaacgtgcgtggcgcggccctggccggcaaggcagccgacgaattgcaggccggcagcggcatcgaaagccgcaccctggcgagcctggaatatgcctggaagaacggccaggacaagctaaccagccgcgacgtcctggtgatcgacgaggcgggcatgataggcagccgccagcttggccgcgtgctgaaagccgccgagcaggccggggcaaaagtcgtcctgctgggcgacgataaacagcttgctgccatcgaggccggggccgcatttcggggcgtggtgcagcatgtcggcgcggcagaaatcaccgaggttcgacgccagaaagaggcatgggcgcgtgccgccggccaggagcttgcgcgcggttccgttgccgatggcttggcggcctatgccgagcgcggccacgttaaaatccacgacagccgagccgccgcccgcgacagcctggcggccgcctatgtcggcgaccagggcaagggtagccagatcatccttgcgcacagcaataaggacgttcaggcgctcaatgaagccgtgcgccaggcccgcaaagaacgcggcgagttgcgcggcacggcccgctttatgaccgagcgaggcggccgggaatttgccccaggcgaccgcatcgtgttcctgaaaaacgaccgcgatctaggcgtgaagaacggcacccttggcaccgtcgagcgggccgacgctggccgcttggccgtgcgcctggatagtggcgaaatgcgcgagttcagcgccgagcaatatgcggccgtcgatcacggctacgccgtcacgatccacaaggcccagggcgtgaccgtggatcgcgcctatctgctggcgacccccggcatggatcgcagcctggcctatgttggcatgacccgccaccgcgaggccgtgaccctgtttgccggcgctgatgacttcaccgaccgccgagcgggccgcctggtcgatcacggcgcagcgccctacgagcacgacccgaaaaacggcctgtcctacttcgccacgctggagaacgacaagggcgaacggcacaccatttggggcgttgatttggaacgtgccattgccgacagcggcgcacagatcggcgaccgtatcggcctggcgcatggcggcgctcaaaccgtgcgcctgcccgatgggcggatggtggagcgcaacacctggcacgtgcagactgccgaggaactggccgccggcaagctggcccaggtgatgggccgacagcggccgaaggaaagcacgctggactatctgcccgacttcgcagaacagcgcggcttcgacggcgaaagcgtgttgcggcgctgggtcgagcgcggccgggccaaggtggcccacctggcgggccggatgcgcgatgccctgcgccgaggcttggaacgccacggccgtcccgacctcatgccggccaccgacattaccggcacgccaaccgtgcagcggccgcagcagaacgagcgcacgccagaggacgagaaagcacgcaaggcgcgggaaatcgccgagcggttccgccagaaggtggcccaggagcgcggcgagctggccgcctcgcagcagcgcccgcaagccgagcagcaggcccccgacgccctggccggattccgggccagtgtcgagcgtgccgaggcggcaggcggcggcctggccctggacgtggcccgtgcgcagcttgccgtcgcccaggagttccacgcggccgggaaagacccccggcaccattcggcggccatcatgcaggaaggccagcagcgggcctttgcgggcctggcgcagccgtcccaggccaaggccgagccggagcgcctggcggccgtccaggtcagcgaacaagaccgcaagcgggcagagatgaatgcacgccaagaagtcagccggttcaagacgctggcagcaggccgccgcaacggcattgccggttacaccgaccgcagcccgtcgaagtggcaggcattgccgggcgagctgcgcgagcgcatcgagcggttcaacgcgatgcccaaggagcgccaggccgtcgagctggacaagatgcagcgcgagcttgccgacaggtatgcacgcgaccccagggcggcgcagcgcagccgcgagcagtctaggcagcgcggcggctacagcagatga

SEQ ID NO: 365774 - DNA, 384 bp, Pseudomonas aeruginosa
atgagcgaagaacgcacagagccgaccaacgacgagcttgcccaaagctacgccaagcagatcgagcaggcgcagcagcggcgcgaggcgaaagaccaggagcggctagaacgtcacggcaaagcggccgagctggcatcccagggcatcgaggccgaacagccggccggcaagcaacaggcccagggcgacgagctggacgcaggccagaaagtcgagctggacgagatcaacggacagcaagcaaggacgctggcaaaggaattgaaccgggataacgagaagggcgaccaggtgaaagaggcccgcgcccgcgagatcgcggaacggttcaaggagaaagcggcccgcgaccgggagcagtcccgcagctttagccgctaa

SEQ ID NO: 365775 - DNA, 381 bp, Pseudomonas aeruginosa
atgacagagaaactgaccacctacgatccggtcgaggacttgaccaccgacgacgccgtggccgacttcatagcgttagcagaggaaacgggcgacccggcctacatcgcccacgcccgcgaagtcgctgcgcgggccatgatcgccggcagtggcaatgtctatgccgatctcggcgatgccgacgcggccgccatgcagaacaaggcgcggcgcgtggcccggatcgcatctgcaattgaggcgcggcaatggtcgcatgagcaagcggccgatgccctgggcctgccgccggccgagctgaccgagctgctggccggccggttccgggcgtattctgtcgatggcctggaacgcctcgcgtcgagaatcgaaaaatga

SEQ ID NO: 365776 - DNA, 288 bp, Pseudomonas aeruginosa
gtgccagagcttgaatggtcgcaaccagctcgcgccgatctgctggcgattgtcgattacatttcggacgacaaccccgacgctgcgcaaaggctgaaagacgatatcgaggccaaagcggcgaagctgccggagcatccgaggctctaccggcctggccgggttgagggcacgcgggaaatggtcgtgcgggcaaactatatcgtcgtgtacacggaagacccttttaccgtgcgcatcctgcgcgtgctgcacgccgcgcagcagtggccgccggggcaggactaa

SEQ ID NO: 365777 - DNA, 300 bp, Pseudomonas aeruginosa
atggccgctcaaacatccatgttgcacgttcgtgtagacgacaaactcaaggccgaggccgccgaaacgctcgcgactttcggcctgacggtttcggatgctgtacgcatcctgctgacccgcgtggcgaaggaaggggggttgccggccggcttgaccgctgacccagacgcccatgatgcttggttccgggccaaggtgcgcgaagccctggccgacacccggccaggcgtgccgcatcagcatgtcatggacgaggcgcaagccctgatcgacaggaagcgccgtgccagagcttga

SEQ ID NO: 365778 - DNA, 657 bp, Pseudomonas aeruginosa
atgcagatcggttacgcccgcgtcagcaccgacgcccaagacttgaccacccagcgcgagctgctggccgccgccggctgccagcgcatctttgccgagaagatcaccggcacccgcgccgaccgtcccgagctggcgcggatgatcgatcacctccgcgccggcgacgtggtgacggtcacgagccttgaccggctggcgcgatccacccgcgatctgctggatatcgccgagcggctgcaagccatcggcgcaggcctgcgcagcctgtcggagccctgggcggacacgaccagcccggccggcaagatggttctgacagtctttgccggcatcgccgagttcgagcgttcgctgatcgttgagcgcacccggcgcggccgcgaggcggcccggcggcgcggcgtgcagttcggccgcaggcctgccctgaccccggcgcaggtatcccatgcccgcgagctgctggccgaggggcgggccgtgccggaagtcgctgcccttctgaacgtgcaccgggcgaccctttaccgggtgctggcgcgtggcgaggaagtgacaaagaccgaggcccgccgacgtggtgcgttcgccgaggacgctttgagcgaggccgacgcgctggccgccggcgaccaggagggcatgaaggcatga

SEQ ID NO: 365779 - DNA, 225 bp, Pseudomonas aeruginosa
atgagcaagcctagcattctcagcgccggccgcccgagcgcccgcaccgacaaagcaaaggccgccaccctggcgagcctggccgacgatgccggcggcatgaaacgggttaatttcgagctggatgccgcccgtcacgccaagctgaaggtgtatgccgcccgccagggaaagagcatcaaggaactgctgacggagtacgtcgatagcctaccagatgcatga

SEQ ID NO: 365780 - DNA, 876 bp, Pseudomonas aeruginosa
atggctttgggacaggcacaactaagactgttcgagccggcagacgaggccggcacgtaccacgacagcggcagaaccgggtttttctcgctcttggtggcttccggccgtgagaagcggcaggactcctaccggctgaccttcatgcccgaggtgttggggatgctcgacccgagccgcgacacctggctttcacaggccgagttcatccggccaaaccggcgcgtggtcaatctggcccgcatcggcctgctgttcgcagacctggacacgtaccggcagccgtgggccgaaggccgctcccccgaccaactggccgccgccgttctgtaccactgcgcccatgaaggcatccccgcgccgtcgatcctggtctatagcgggcgaggcatacaagctaaatggctgctggacggcaccctgccgcgccaagcactgccgcgctggaatgcctgccagcggttcctgatcgatcgtttgactccccttggtgcagattcccaggcgcgggacgcaagccgcgtcctgcgcgtggtgaataccgtcaattccaagagtggcgagatctgccgcgtggtgcatgtggaggccggcccggacggccagccggtgcgttattcattcgagtacctggccgaggtgctgcttccagtggcacgctggactattgagcagcaacgccaggagcgcatcgagcggcgacaactgcacctgatcccaggagggaaaaccgatcacctgcgcggcttttctggtcggcaactggcgtgggatcgcctggaggacttgcgcaagctggccgagctgcgcggcggcgtgcgtgagggcgagcgcatgcaggggagcccgcagaattcggaaaaaatcgtacgctaa

SEQ ID NO: 365781 - DNA, 588 bp, Pseudomonas aeruginosa
atgcatcacgaagagcaaaagcaacagccagagcaagagccggctcaagaagcatctagcaaagcaacccgggcagggcaggaagtgagccccgagcaggttggccgcgagttgaactggtacgaacagaagctcgccgatcggagggaacgcctccaggaacgtgccgcgaagatctcagacgagagtggcgtgctctaccagcgagcgaagaccatggccagcgctatccctttcgggcaaccgatcctggtagggcatcacagtgaaggtcgggaccgtcgctaccgcgaccggatccacagcacttacggcaaggcgttcgcgttgcaggacaaagcgaagcattacgagcagaaggccgcggccgtggggaccgggggaatctcgagcgacgacccggacgccatcgagaagctccaggcagagttgcagcagctggaggcgaaccagcaacggatgaaggtcgccaaccaggtgatccggaagcacaagaccctcgaggctcgacacgccgccttggttgcgcagggggcgaatagagaaaacggaaaaaatcgtacgctaaggttttccgggcagccttag

SEQ ID NO: 365782 - DNA, 276 bp, Pseudomonas aeruginosa
atgaacacgaagcacattgcagcgtattcctttacctccttcagcgttgagggaaccttcggctgcacgttcttcgcaccctcattagaggaagtgaaagagatggcacgagcccaaggcttccgcaacctccaatactatccacggttcatcatggatcgttctgccatgcgtgcacgctcgaaagagcttgcacgtcaggtagtacctgaaagcgtgcttgggatgctattgcacgatgctccattgaggactgacgatatggttcccttctag

SEQ ID NO: 365783 - DNA, 1074 bp, Pseudomonas aeruginosa
atgaccgggtcgactgtcgccctggcgcaatcggtgcctccggccagcaccgaggacgagtccgcaggtggcccgatgggcagccaggcgcaacccggtgttcgccccccacgatcgcagccccgcgctgccgtggcggtccccggcgggcagacgggaacgccgaaccttccccaggcgatccgctggacggaggactggtcgcagcccgtcagcaaggatgcgccattgatcgacaggatcaagcacatcccgatcggctcggatgacatatacctctccctcggcggtgaggcgcgcgcatactacaccgcctgggatcatcagaatgccgggcgcactgcgaatgacgccaatgacccggtgcagcgtcgcttgcgactgctggccgatctgcacatggggccgcacgtccgggcctttgtggaactgggcgacaatcgtgagtacggttccagcctggtcactccgccgaaccgggggcccttcgacgtcgagcaggcgttcctcgatgtgacggtgccgctcggcaaagctggaaagttgacgttgcgtcctggtcggttcgaaatgccgcttggcaacggcaagcttgtcacgctgcgggacggtgtcaatcagcgtgtgctctatcagggcctgcgcgcgacctatgcccttcccggcaagatctctgtcgacacgttcgccgttcgccccgtaaacattaaggacggcgaattcaacaatgcccctaaccacacacagtcattccacggcgtttacgtcagcgctccgcacgtggtggctggctttggcgtcgacgggtactggttccaggtgaagcgtgacactgcattgaacgctcagggcagggcctccgagaaccgtagcagctggggtgcgaggctgtggcagcgcactgcgacctgggatctcgacgtggaaggtacctaccagtccggtcgctttggaaccaaggacatcagcgcatgggcgatgatgatggatggtggttataccttccccaaggttgcccttcagccgcgcctggggctcagagccaatgtattggctctgttgcaaaaatcgtga

SEQ ID NO: 365784 - DNA, 813 bp, Pseudomonas aeruginosa
atgcaccggcgatccctcatcaaatctgcgctttatacggctcttgcatcagccaccgccgcctcgggcgtgcccgcgatggcggtgacgccagccaggaagcgcagtttcgttctgatacacggcgcatggcatggcggatggtgctggcgcgatgtagcggctttgctgcgagctcagggacacaccgtctacacaccatcgctcaccgggttggcggaccgttcgcaccttttgtccaattcgattactctccagacacacatcgacgacatcgtgaacctgtttgcatgggaagacatcgaggacgcggtgctggtcgcacattcgtatggcggttggcccgtttccgcggcgctcgcgaagatcgggaacaaggtggcctctgtcgtcttcgtggatgccttcgtgcctgaaaatggacaacgcgtaatagatctcaactcgccgcagtttcaacaggcgctcaaggacgcgatcgccaaaggcgaggcgggacgacccgcgccaaaagccgaggtcttcggcatcaaggatactgccagagcagtttgggtgcaggcgaagatgaccccgcaaccatcaggggtcgcaatccagcctatcgtcctgtcaggcgcgcgcgatcgcgtagcacgcaaaacgtacgttcgcgctaccggctttgcgatgccgacgttcgacagctattttgccaaggcgcagaaggatccctcgtggaccgcgataggacttgcagccgaagagtgcgggcacgacgtgatgatcgacataccgcagcagctatcggaaatcctgctgtccgcagcttga

SEQ ID NO: 365785 - DNA, 882 bp, Pseudomonas aeruginosa
atggtcgtgacgctgctgggcacgggaacgcccacgttgagcccggcacgcttcgggtattcgacgctggtgcaagtcgggggcctcaatctggtgttcgatgcagggcgtggaagttccatccgccttgcacaactgggcgtgaagctgggcagcatcgatgccacgttcatcacccattatcactccgaccatgtcaacggcttgggtgacttgtggtcgactagcctgctgccttcgccgcaaaatggtcggacagcccctttcgagctttatggcccggttggcatcaagcaggtggctgccggcatgcaggcgatgttcgagcctgatctggtgatccgtcgtcacgacaacgaagtgaccgccgcggcggagaagctcaacgtccatgagttcacgcgagacggcgtcgtgttcgagaagaatggggtgcgcgttacggccttcacggtggatcacggcgcggcgatcaagcctgccgtcggctacaaggtccagtacaaggggcgcaccgtggtcctgtccggagacaccaaatacgatctggaggtcgtccgacaggcaaccggcgctgatctgctggtgcacgaagccagcatcgttgcggcaagccatgtcaacgatgcatgggcaaagccttcgatcgcgcatcacaccagcgccgaagaggcaggcgacgtgttccgccaggcgcacccgaagcttgccgtattctcgcacatctcgcggccgggcccgcaggacgagaccaacaccgatgcggcgctcaagcgtcgcgcgctctcgcactggccgaacggaaacgtcgtcgtcggcaccgatctgatgcgcatcgccattggctccgcagtgtcggtcattccttctccggctcagtga

SEQ ID NO: 365786 - DNA, 1398 bp, Pseudomonas aeruginosa
atgaacaaggcacaatcccccggccccgacgtgcggaaaagcgacatcgaaatccgcgcgcgcgctcgggatggcttcttgtcgacctcttctcccgatcctcgcgcgttgatcgcgcgtgagcctatgcactcccgtcagatcctcgctgtggcgcttgccgcggcgctcaatgcgcttgacgggttcgatgtgctgtcgatcagcttcgcggcacccggaatcgcgagagagtggggtatagatcgcgccgccttgggcgcggtgctatcgatggagctcatcggcatgggcgtcggggctttcgtgctgggtgcgatggccgatcgcatcgggcgacgtcccactatccttaactgcctcgtgattatggctttcggcatgttcgctgcctcgatggcgccgaatgtgacgaccctgtcgatcttccggcttttcacggggcttggcatcggcgggatgcttgcggccacgaatgccatcgtggccgaatgctccaacgcccggcgacgcaatctttcggtcgcggttatggcgggcggctatcccgtcggggctatcgtaggcgggctgattgccagcgaactgctcgaactcaccgaacgctgggagtcggttttcgaattcggtgcggttgcgaccgcctgctttattccgctggtgctatggctggtgccagaaaccatcgcgtttctgctccacaagcgtccgaagggcgctctggagaagatcaatcgtacgatgacccgccaagggcgtgccccgcttcttgaactgcccccgcaagatgaagcgcctgagcgcgttggcgtcgcagccttcttcagccccggcattgcagccgtaacagtgctgctggtcgtcgcttacgctatgcacatgatgaccttctactttctcatgaagtggatccccaaaatcgtggcggacctgggtttcccggcggcatcggctggcggggtgctggtatgggccaacgtgggcggcgctagcggttcgctcgtgctcagcctgttgacgcagaaagtcggggtgcgcctgctggtcataggctcgatgttcctgggcgcggtggccatcgctgcattcggccagggcttcaccacgctcgcttcgctctctttgctcgcggcgatcggcggtttcttcaccaatggggcgactgcgggcctctatgcagtgatcgcgcagtcgtttcccgccgcgcttcgggcgggtggcacgggcctcgtcatcggcataggccgggcgggggctgcgatgggcccgatcgttgccggtctgttgtttgccagcggcgcctccctgtcgcttgtcgccgtccttatggcgggcgggacactgataggcggaattgccctttcgtttgtgcgctaccgggagagcgaggtcgcctga

SEQ ID NO: 365787 - DNA, 504 bp, Pseudomonas aeruginosa
atggctcccgaacgcgtagagcgtctggccttattggacaccggcatccatccgatgcgcgcgggcgaaccggagaagcgagcgcacttggttgagcttgggcagcgtgaaggaatgagagcagcggcggacgcctggctgcctccgatggtcgcgcccggagctcttgacgccgacccttcgctgcgctcggatctctatgctatggtcgagcgaatgaaccccgcgattcatcaggctcagattacggccctgctcacgcgcccggacgcgcggcaggtcttgccgctgctgcgctgtccggtactcgtcggcgtgggggaactggacgcatggagcccgccggcccagcacctcgacatcgttgatgtcgtgccgcaggcgacttatgtcgtcttcgctggcagcggccacatggccccgctcgaagcgcctgaagcagtttcgcaagcgctctcggagtggatgctgacccccctatcgaaggagcacgcgcatgaatga

SEQ ID NO: 365788 - DNA, 402 bp, Pseudomonas aeruginosa
atgaatgatgccgcccgtttcggcatcgaacatgcctgcgagcgcctgatcaagcgctttgcgcagcttaacgacgcccacgaccacgatgccctcgccgaaatgttcgtgagcgagggcagctttgcccggccgacagacccgaccaatcccgtcacgggccgggaggatatccgcgcgttctttcgcgaccgtcccaaacggatcacgcgccacgtcatgacgaacatagtggtcgaggtcttggacgaaaacgctgcgtgcgccagaagctacgtcgtcctctattccggcgaaaaaggcgcgcaagtgctcctcggtgacttcgatgacaccttccgccgcgacgatgacggcgcatggaagtttcagagccgcgccggctccctcgcattcggctga

SEQ ID NO: 365789 - DNA, 882 bp, Pseudomonas aeruginosa
atggcacggataatcggtggcatcggaacctctcacgtcccgacgatcggcgtcgcctacgacaagggacgccaggcggatcccgtctgggcacctttgttcgacggctacaaaccggtcgccgaatggcttgcagagaagaagccggacgtgttgctattcttctacaatgatcatgccagcacgatgttcttcgacctttaccccaccttcgcgttgggcatcggggaccgcttccccatagccgatgagggcgcgggtctgcgcgatctgccgcaaattcgcgggaacgtagacttccaggcgcatatcggagaatcgctggtcaacgacgaattcgaccttgcgttcttccagaacaagcccatcgatcatggaattgcatcaccgcttccgctcatgtggccccacgagccggactggccgggggtcgtcgtccccatcgcggtcaatgtcctgcagtacccgctgcccaccggccggcgctgctatcgcctgggccaggcagtgcgccgcgccattgaaagctatccagaggacctttcggtcgtggtggtcggcaccggcgggctttcgcaccagattcatggggagcgagccggctacaacgacactgattgggatatggaatttctcgagcagctttgcgacacgccggaaaagctgctccacttgcgccacgcggattacgtgcgcctcggcggcgccgaaagcgttgagcagatcatgtggctggcaatgcgcggcgccctgcccgatcgtctgaccgaaatccaccgtaactactatctgatgaccaccacggcgatgaccgtcgtggtctatgaggaggcaggtgagcgcgcgcagccttccgcagcaagcaccagcgtggaggcctga

SEQ ID NO: 365790 - DNA, 369 bp, Pseudomonas aeruginosa
atgttcacccagaacccgcagaccgtcggtatcgaagaactcaccggcacgtacgtcttcgatctgcgtacctgcaaccgtacactggcgtttaaccgtttcttctggaacatgatccgtccgaagtatcgccaagccttcctcgacgacgaggaggctgcgatgacggtagcctccctttcggacgaggagaaggcactcgtgcgcgcgcgtgactggctgggcatcgtccagtatggcgtcaacttcttcgttctcgagaaatgggcacgcgtagtgcggcggacgaacctcgaagtctatgccatcatgcgcggcgagacgctcgaagagttcatgcagacccgagcagtgccgcacgccacctga

SEQ ID NO: 365791 - DNA, 951 bp, Pseudomonas aeruginosa
atggcgcgctacctcgaacaacgattgaagatccggcatttgcgcgtgattgaggctcttgaccagcacaagagccttctgcgggcctcaaaggcgctcggcgtcagtcagcccggtctcagccgaaccttgcaggaagtcgaagatatcgtcggctgcgaactgtttgagcggcatccccggggcgtgcaaccgaacgctgtcggacgcctgctggcaagaggcgcccagcgtctcctgggcggcatgcgccagatcgaggccgacctcggagagctgttcgaggaacacaagcgaacgatccgcgtcggcgcgctgcctgtcgcggcgcacggacttttgccgacggtgatttcagacgcgaccgaccgaggctcccacctcggggtcgaggtcatcgaaggtctgacgacgcaattgctgcccgccctgcattcgggcgagatcgacgtcgtggtgggccgcctctacgagccggatgcacccgatggcctgatccggcgcgcactctatagcgagcccgtcggtctcatagcccgcagcgaccatcccctgttcgaactcgatggcgtgactgcagaggacgtgcggcgctttcacgtcgtctctccggccgtgagtactcgcgtcgaacacgacgtgcgtaccgcgctctccgccatgcaggtagacctagatgtgtccattcggtcgacatcggtcgggttcatgcgcgagttgttgctaacgggaaatttcatctcggcgatgccgaaggtccttgttgcgggcgacctggaaagagggctgcttcgcctcatcccgataccgcttccggccccgccgcgccgcgcgggcatcatttaccgcgaaggtttgagcgacgcaggcaaattacttgtagcggccatcggtcgcgaggttgagcgactggcggctagtgggatcattgatgcgtttaacgaggattga

SEQ ID NO: 365792 - DNA, 1251 bp, Pseudomonas aeruginosa
atgaccgtagtaaaacgcaccaagcgagcgaagcccgaccctgaactcgttaagctcgccgacagcctgctggtcaattacaagaaaccggaagatttgattggcgaaaacggcctgctcaagccagctcaccaagatgctggtcgagcgtgcgctggaagccgagatgaccgagcacctgggcatggcaagagtggatcgatcttcaacgccggcggtaatgcccgtaacggtcacagcgacaaaaccctcaagggcgatttcggcgaactgccgctggccatccctcgtgaccgccaggcgctgttcgagccgcagctggtggccaagcagcaaacccgctggacgggcttcgacgacaagatcatctcgctgtacgcccgcggcctgagcgtacgagagatccaggggcacctggaggagatgtacggcaccgaggtctccccaaccctcatctcgaccgtcacggacgcggtaagcgacgaggtgaagctctggcagggccgtccactcgatccgctgtacccgatcctttatctggactgcatccacgtcaaagtgcgcgatgccggcgcggtgcggaccaaggcggtgtacctggctatcggggtcaatatggacgggcacaaggaagtgctggggctgtggatcgcccaaaccgagggtgccaagttctggttgcaggtagtcaccgagctgaagaaccgtggcgtgcaggacatttttatcgcctgcgtggacggcctcaagggcttccccgaggcgatcgaaacggtctatccgaaagcctgcgtgcagttgtgtatcgtgcacatggtgcgcaacagcctgaacttcgtgtcctggaaagcgcgcaaggaagtggccgccgatctgaagctggtctacacctcggcgacggtcgaactggccgagcaacggctgacggagtttgaagaaaagtggggtggtcagtaccagtcaatcggcctgtcctggcggcgtaactgggcacgggttatcccgttcttcgaccatccggccgagatccgcaaggtgatctacaccaccaacgccatcgaatcgatcaacatgagtttgcgcaaggtgatcaagacccgggcctcgttcccaactgacgaggccgtgagcaagctgttttatctggcgctgaacaacatcagcaagaagtggacgatgccgatacgggactggaaagcggctctgaatcgcttcagtatccagttcgaagatcgattgatgcaggattaa

SEQ ID NO: 365793 - DNA, 468 bp, Pseudomonas aeruginosa
atgcggggcggcatcaagttcgagattcgttgcaacctggatggcatgacgctcttcggcgttgacaaactgagccgcgacgatattcgcagcttttccacccaggacatcgatccgctcgatgaagaactgggggcgcagcctgcggcaacgccggccaagtccaccaaggcatccagacccgccaagcccgcatccgtgcaggcgtccgcggacccgatggtcgataccacgcctttcggcgtggatgcgccgacgcccgctgcggcggctgcccccggcagcaccgaagatggcgacgccgcactgttcgggctgctctggccgctgggtgagtccgtgaaactggattcgaccatcgaccgtcgcaccctgcgcgcgcagatcgcccgcctgggtgaactgggctacgcgctggacttcaagacgcaggagtggagccgccaggccgaactgcaacctgcgtga

SEQ ID NO: 365794 - DNA, 519 bp, Pseudomonas aeruginosa
atgcagcaccttttctggcgtctcaacttcctgctgctttctggtgcgacgcacagcggacagatgtaccacgaggcggccgcactggccggagagcttgacccggcctggagctaccgcagtaaggagctgatgaccctctatgccaaggccaaggcatacgaagccggcgagcgcgtggaggtgggaggtcgtcagtttccgccgctctacacgcccaagaacgacacccttatcagcctgttccagatcaccgaggacgaacagcgccgccttaaaaccctggtcagcaaggacattgccaaggaacgcgacagagagcgccacacggcccgccggcgggccgccggtgccattgaccgggcgatctatgaagccaacagcttgagccgtaagaagccgtgggaagcccttgggatgagccgggcaagctggtatcgcgccggtaagccgatgcccccctccgatgagacaagtccgtccgtattacagagccgacaagggggtagtgatgcgtga

SEQ ID NO: 365795 - DNA, 306 bp, Pseudomonas aeruginosa
atgagggcgcggcgatcctttccgccggcgttgctggccgagctgcgcgacatgccggtgccggccgcgctcgatctcctggggctgtactggaagcgcgaccctgattttcggccgatcaaggacaagcacaccacgcgcgtgaacgtggcgattggcggcggcatggtggagctgctggcgactgggccgaagtggtacgacacccgcgcagagaagggcggcggtggtgccatcgaccttgccatgcacctgttgcgcctggacttcgtttcagccgtgaagcgcctacaggctgcgatctga

SEQ ID NO: 365796 - DNA, 759 bp, Pseudomonas aeruginosa
atgctttgcatcgagacgaagtcggggctttacaagccttctggcattcgattcattcacgagcgtgatgggtacgaaatcgatccactgaatcaggtcaaggacaatacttttgtcctcaccgagatgctgctgtcgtggcagttgaagtgcccagtcgggtacgcagtgcactttccagacttcgatcttgagagttcacaaatagctagcgcttacgtaccgctcgaccggccgatccccgacggcattctgatcctgcagaagcaccgtagggacatgccggcgcgcatcatgcaacttatggaacactggaaagctgcactcaattatggcagccaggacaactttggtcgtgaagtcgagcatttcctcgatgcggtctggccgcaggaagtgcgggacgggcatctcggtcgcaagatcgtcgcggacggagagctgtggcttcgattagacgataagcaggcgcatcaggtagccatgtgcctcgatactaatcacaggctcattgcgggcttctcaggcagcggtaagacgctcattgcgcgctccttggctgagcaatttgcgcttcagggcctcacggtgctttttctgctgaagaaccgccagattacgcagaaagtcgctggccagttgagtcgttttggtcggacggtcacggttcagacctttcattcgtactgcgagtccctaggcatacggaatagagaaaaacgtgttatgggttctaccccatttccacggacggtttga

SEQ ID NO: 365797 - DNA, 282 bp, Pseudomonas aeruginosa
atggctgagccgtatcctatcgtcccgctgtcctggctggacggtctcaacgacctcaacgaccaattggtcgcctacgaactggccgtccgggcgctgttccggatgttcgccgaggacggatcgccctacgagctggagacggtgctgtccggtctgcatgatctggtgcaaccggtgattgagggctaccagtcgatagccgatcagttccgcaccgctgaatcactgggcatggtgggcgtgtgccaactggccgatgacgcggagtcctctgcgtaa

SEQ ID NO: 365798 - DNA, 1410 bp, Pseudomonas aeruginosa
atgaccaaagcaaatgaatgcacctgcccttccggcgacggctccctccgccatccctgcccggcacatccggcaccggtagagcaggcagagcctgccagttgccaaggcaccaactgcggaacaacaactggcgatcactcatcggaatgccttgcggaagccgccgccggtcagggatgggaactgaagcctggagacctgtgtggaagagactgtcctattcataaaatattggcagagcaggcaggcgggggtgagcgggtggcgttcgaggcgtaccgtgaccgccgaaacgcactgcttgagtccgaggggcacaacccgggtagtaaatggcacgtaaccaacgcccattaccccacatgggaggctagccgcgccgccctggcgcaaccctccccagtgcgctcgagtctcttgatcaacggataccagttgcgcgccgcccttgacttcattgcgccggatggcactgccgagcaactggaaagcgaggcctgcatcgagtggcgccagcaggatgccgatttcctcgaagcaggcctatacgccttctgcgctgagtatcccgaagaaggcggcgtcttgttggatgaggagccaaccactgcgcaaccatccccgttgcagtccgagcaggcagaggcggagcggccggaaatgtcgccagaacgggccgcgtacttcatgcgtcgcttcaagtccgaagagaagttgctcggtcccaatgagcaagccgccgtggactacgtgctgtcgctgctcgcccagcacgaccgcatcgtcggggcgctgcgggcggatcgcgattcgtgggccaagcgctgggacgaggccgtcaggtacggcgcgcgaatcgaagaacagcgcgacgctgccctggccagggtggcggagctggagcgcgtcctgcgggtagtggtcaacgctgccgaccatggctcatggccgaccacggtgatgcatggcatcgagaaggtgcgtgaagttctcgcaggctcagccccgcccgtcaaggctcagcccgaggaaacgcccggagaaatactcgccgccaaactgatcgaaacatgggtgacgaaacatggaaagccggccccatggtcaacagctgtagagatcacagcgcttgcgaccaacatgcccaatgacgagcgagaccgactgctcgcactggacgatgacgtggacgcccaggctcagcacagcgtgccggagctactggagtgggccgttggccgttggcacgcggaggtttcgctgcgtccgctcatcaacgttcatcgtcgagcacttgacgatacctggcgccaggtaattcgccgcttgggcggtgacactggattgctgtgcggcccaagtcatgacgaacttctcgccgccgctccagcgcaaggaggtgagtga

SEQ ID NO: 365799 - DNA, 1410 bp, Pseudomonas aeruginosa
atggccgtaaatgaagaagctgctccagtaaacgcaaaaccagcaaaacgattctttgttgagatgctgacaagggatatagaactaaaagatgctgttcttgacatgctggacaattgcctagatggcgccttaagaaagaataataacaaccccgtcaatacaagcatgccttatgaaggctactatgcaaaaatctctttcaataaagacagattttcaattatcgacaactgtggcggcatcgatgaagacctcgcaaaaaattatgcgtttcgactaggtcgaccagacactgaccgtgataaagatcttgcaacagttggcgtgtatggcatcggaatgaaacgggccatttttaagattggccaagatgcaaaggtaacctcaatacatcctagaagctcctttgagatagctatatccccagaatggcttaaagatgatgataattggaatctgcctttcgagaatatagaaaaaccagatacagaatatggaactcacattgaaatagctgagttatatagtgcaatttcaaaaacatttgaagatgatttttatgatgatttttgcgccacaataaaagagcagtatagctatataattcaaaaggggttcaaggtatacgttaacgagactcttgttgaggcaaagagattaggcctactcgtggacgaggaggcacttcgaaatagcaaagcaggaattacgccatatatatatgaggtttctaacaacgggcttaatatatttttatcggtgggtttctaccgacctcttccgtcagatgaagagcagatagatgaaattgagggacgtcacagtaaagacgacgcaggctggacgattatttgtaatgatcgagtgattattgcaaacgacaagtcttcacttactggatggggtagttcaggggctcctgcgtatcatagccaatttgtagcgatatctggtgttgtaatcattcgcagtaaggatgcaagtcttttgcccgtaacgactacaaagagaggcatagacgtcaattcagatatatattgggctctacgtgataagatggtcgaggggctcaaaatgtttacgaaccatacaaacaaatggaaaactccctccgaagagagagaaaccattcagaaatctacaactcctgtagctcctcaaaatgtagcgtcctcagttccctctgacaagtggagagtcgtacgaactggtttaggggggaaacaatacataccggagcttcctgttcctaggacgaccaacccaaacaaacaaataaaattctctcgcccggcagatgaaattaaaacggttgcaatttatctttttgaagacgaagaagcgaagcctacagatgtaggcgagcaatgtttcgttgaaatactcaagaaggcaaaaaaagcatga

SEQ ID NO: 365800 - DNA, 1011 bp, Pseudomonas aeruginosa
atgactgcagagaacatcccataccatttgcgccaaaacaaagcagtcgagagaaatctatttgtggatttactctcaagagtcaaccgttttagaaatatatcttcctatcgatatataagtatgggcgggccatttcttgaggacttcaagctactacactcgcagcttcgaatgagtgactttgtatgcctagaaataaaccaagacgttcacaaaaggcaggagtttaacaagccattctcatcactaaaacttatcaactcaagcactggcgactacattacaaactcaacctttgaagatgccccatatgttatatggctggattacgccgcccccaaacaattgctatcacagttaaacgaatttaacagcctaattagcaaactcaaaccatatgacattgttaaaataacgctgaatgctaacatctctactcttggctgctctggtgcgggtgaagctctatgggaggaaagacttagtaaactaaaatcacgaatggggagctacgcccctactaatatgaccactgatgacctaaggcacgactacacaacacaactacttcaagcattgcgcacagcctcaatacgggcgcttcggggacgtcctaatgagcgttttacaccactaacgagctttacctataaagactctaaccataaaatgctaacactgacaggtataatacttccaacaaaccgaggaaccagcgaaaccaaagagcaaaaaataggcaacttcttcaagataacaagactaatgaaatggaaatactcaaatttaaaatggtctaacccgaaagacatatcattaccagacctatcagcaagagagcgactatttcttgagcctttactatcagaagataagtccaacggctttattttacataaacaactaggcttcaaaatagaagaaaaagccaaggactcagttaaccttctgaataattttaatgaatactaccgtcatctaccatggtatacgaaggcgacaatatag

SEQ ID NO: 365801 - DNA, 855 bp, Pseudomonas aeruginosa
atggggcgaagagacattgctgactctagaaatgatttatttggacatttttttcgactcgtttcagaaatgcggccaaagttttttttggcggaaaatgtaccaggaatactgaatgaaaaatataaaggcatagttagcgctgcactttcgctatgcccgtcagactatgaagttcttgcacctttaactgttaaggccagcgactatggtgctcctacgactaggacaagagtattctttatagggtatgatcgttctcaggttagttttagacttcagcacagtgactttgctcctcgaaatatagagaaagtgaatgttgctcaggctcttgcggggctacctcaaaaaataagtgagaaatggcaatctgaggaaagcggatggcgcccttacactgtaattacccctgatactccatttttgcaacgggtctacggagagatacctgaaggtgtcggagatcctctggctctaaaacgtttcgctgaaaaactccaagtttgggggtgcatggggactaagcatacccctgaagttattagtagattttctaaaaccataccaggcggagttgacaaggtttctaaggccgtgagattagacccagatggcttttgtccgacattacgagcaggcacatccaaagataaaggaagttatcaagcagtaaggcctatacatttttcagcccctagggttattacgccacgggaagccgcaagattgcaaggcttccctgactggtttgtttttcactcaaccaaatggcactcatttcgtcagatagggaatagcgtaccgcctattttggcggaaagtttgcttcgagtgatattttctcgattgtaa

SEQ ID NO: 365802 - DNA, 312 bp, Pseudomonas aeruginosa
atgcaactcaaaaatatcaaaacgtcaagccaggcgcaacagctagcgaccactgaggaggttggatttctcctgacccccagcgggctctgtgcgctccaggtctgcgaggggattcccatcgtagaggtaatgcaacgttacgaggagtcgctcaacgctctctgcgttttgctcaggcgcataggtagggatgtcgatcaccctatgaacgactccgaagctgaagctatcgcgctgctcactgaggtggtggcggctatgcacagtagctgcgtgcgcggccttgatgctacgggaggtgctgcatga

SEQ ID NO: 365803 - DNA, 243 bp, Pseudomonas aeruginosa
atgactgccacattcttgttcccgggcgggtacgaggtggacgccgccagcggcgcggagctgccgggcaactaccgcgtcgagtcgatctccctggaccaggtcgtactcaccgacaaggacggcaaccgcgtacccgtgggcttctccagcgttgccccgacccaagccgcctcctcggcccaaggcgcctccgttccgccggcgctgcccggggcggtaccgcagccgttcatccagtag

SEQ ID NO: 365804 - DNA, 1575 bp, Pseudomonas aeruginosa
gtggcaggagcacataaaattacacctaccaatcctagactgtcagcattactgaacgatgtctcgagagggaatattaagatcccagtatttcagagagagtatgtctgggatgatgagcaaatcatgagcctgctggattccatctatcaaggttatcctgttggctcgctgctcttatggtcaacaaaggaaaagttaaatcatgagagggatgttggcggatttgagctccctaaaacgccggaagattatcctgtaaactatgttctagacggacagcaaaggctgacaaccctgtatggagtttttaactcggatgcagaaacatccgatccagacctggctgaaagatttaatgtgtcctttattccatctactggcgagtttgtacactcaagcgccgctcatgaaggcgccataaatttacgtgtaattctagacacaacaaaactccttcctgaacttactcgattttcgggcgaagaccaaaaagtcattgcagaactgacagaaagatttaaggattatgagtttccagtagtcacaatcaaggatagaactaatcaagaggtatgtcgcgtatttcagaggatcaactcatccggcactagcttgagtactcttgagttactagctgcatggacatggtcagatcagtttgatctgagaagcgaaatagaagttttgattgatagcttggctgacaaaggctttgagcagatagaagaatcacttctcatgcgatgcttggcggcgatatcaattaacaagattgatgcagatgctctggttgacgtgcctcccgcgacgctaattgaaagcatgtcaaaacttaaacaagcggcttattcatgtgtcgactttttagaaaagcaattgcatgtcaaaaactttgtatttgtgccattcccaataatgttagtccctctgattgttttctactctaaatgtctaaaacccaatgcgcaccaagtaactagtttaaaaaaatggttctggcattgtgcgtttacacagaggtataaagcaggaactaattcccatgtcatgactgatatcgaaaagatgcatgctcttgcttttggggagaatccatttggttatctagatgacaaggttgatccagaaatttttagaaagacctggcgtattaactcaactgctgccaaggcaacaatatgcttgtttgcgcaatgccagccaaaaagtttccttacagggcagaatattgacttgggtgaggcactgtcctcttataactcaagagagttccatcatatctatcctaaagcatttcttgcgagtcgtggcattaatttccacgaggcaaatatcattgctaacatatgtctcttgaactcaagtgacaacagggcaatttctgataaagatccctatacttatttccaggaaataaacccggaaattaagaataatgtatttaagtcttcactgataccagacgaatattttgatggctcaaaaccttatgcggacttcgttaagagtcgttctgaactgctgtccgctctagctgaaaatttaataaagcaaggagatgcttttatttag

SEQ ID NO: 365805 - DNA, 639 bp, Pseudomonas aeruginosa
atggctgccgccattatgcactgtgcgcatgctgtggataagtctgtgtgtagcgcgggtgcggagagattgcacgagccattgcgggatgcgcctatctggctgccggcagacgatccgcgaaaagcgttccggcaccttgaatccgccttgcgaaatgcccggtcggcaattggcgcttctgtgggtttgtctgtggaaaagctattcgcattccccgttgaaaaaatgccttcggcggtcgggggaaaggcattggacggggccgcaggatttctcccggttggcgaaagagccagggaaaaggcgctgtggaatgcgccacgacggtgcatcgcgaaactgtggacagtggattcacccatagcgccgccgagcaggcttccgtcgatcgccgcggactttcctgaaaagccggaaaacccagtattcatgggcgtcctggcgtcgaaaggggaagtcctggagacattttcacgggcattcccgttccgcgggtttcctgtggaaaagctgttggcaaactgtgccggaagcgggccgccggggttgccccagggattcggccgagccatggcttggccgggagagatcgttctgccgggttcctccgaacggctgtcgatatcttgtggataa

SEQ ID NO: 365806 - DNA, 954 bp, Pseudomonas aeruginosa; identical to SEQ ID NO: 357675

SEQ ID NO: 365807 - DNA, 2184 bp, Pseudomonas aeruginosa
  misc_feature (2144)..(2153): n is a, c, g, or t
atgcacaaggatttacctgtgattaatcgtgccgaccttctgaaaaacctgcagtccctgttaccgcatattgagaaggacatcctcgcctacagcgagtccaatgcggagctcagtgagcatttgcagagcgaatatcgcgcggcggttgaggctgaacgcaccgccgagcactttgtttcctggcgtgaagcgcaaataacccaggccgccgtggcctgggttttgacctgtgtgttcgtgcgttttcttgaagacaacggcttactgagcgagccagtgttggctgggccggtgaaggatgcgcaagggcgaaatgccttgcagcaggccaaagagcgtatggtggcttacttcaacgagaacccgacctttgaagagcgccactacctgctcgatctattcgcggagctggaaaaatatccggtgatcgcggagctcttggatcatcgtcataaccccctctggcagattccggtttcggctgatggtgccaaacgtctgatcgacttcttccagaagatcgatgcagacagcggtgagatcctccacgactttaccgaccgggaatgggatacccgcttccttggcgacctctatcaggatctttctgagtccgtgcgcaagcgttacgcgctgctgcaaaccccggagttcgttgagagctttattctggattacaccctggagccggcgattcagactttcggtttgtcgggcctgcgcctaatcgacccgacctgtggttcgggccactttttgctgacgaccttcgagcgggtgttcaataagtggttgaagcgtgagccaggtactaattcccgtgagttggcacaacgtgcgttggatgtggtgcatggcaccgatatcaacccttacgcaattgctatctgtcgattccgtctgctgattgccgctatgaaggcagcaggtagtaccaagatcaaggatgcgcccagctttcatttcaacctggcctgtggcgattcgttactgcatggtcgtcgatttgagtggcaaggtcagggtattcagcagatgctgctggatgaggagggcaaacacgtatacgaggtggaggactcagaaaagctaaatcagattctggggcagcaataccatgttgtagtgggtaatccgccatatattcaagtaaaagataaggcgctgaatcagacctatcgagatagatatccaacttgttatcgcttgtattccttgggagtgccattcactgagcgtttttttgacctgactctatgctcagagggtaatcgttctgctggttttatggggatgataactactaatagctttatgaagcgtgagtttggcaggagactggttgaagattatttgccaagtaaagatataacgcatgtgattgatacttctggtgcttttattccaggtcacggaacgccgacagtaattttgtttgcccgtaatcagcatcctcgatccgacgtaataagaaccgctttgggaattcgaggagagccaagtactcctgcggatgcatcccagggcaaggtgtggcggtctattgtggggttgctggaaaagggggatggtgaaaatgagtttgttactgtggcaaatcagttgcgtagcttgtactcctctcatccatggagtatcggcggtgggggggcggctgacgttaaagaggctattgatggagcggctgctaacaagttggatgatatttcgttggctattggctttgtatgtgtaacgaagcaggatgatgtatttgttcagaataagaagtgctttgagcgggttggtgtaaaggcggaagagcgccgtgcctttgggaatggagaagaagtccgtgattggcttcaaaactcaaacttagaggttctatttccttatgatgaagaagttcggacaaggaaggcagaggatttcaaaagtgccttaaaatttatgtggccttttagggagattcttgcttctcgtaaagtttttggtggtcagacctatcgtgaagctgggaagccttggtatgagtttgggcaaattcctgtcgaacgtttcaagatcaagagctccatagtttttgcggaaattgcaagccacaatcacttcgcttttgataggggtggtaaggttttcaatcgtactgcgccagtaannnnnnnnnngtactgcgccagtaataaaattgttggctaa

SEQ ID NO: 365808 - DNA, 321 bp, Pseudomonas aeruginosa
atgaccgtgaaaccgatcagtgatgagcagttggcggagttggaagaagtagtagttaggttaacgcatggtgattggtgggtcgattggaatggctcttatatcgaaatagctagtccatcgaatatcaagagcctgatcgcccgcctgcgcgctgctgaggtcgatgctaagcgctggcgtcatgcgcgcgacatcctaactgtcgaggcgattgagtcggctcaatctgacttcatcaacttcggtttgccacctgttgaaagcgaaagcatccgcgcagatcaggccatagattccgccatggagagcacgccatga

SEQ ID NO: 365809 - DNA, 540 bp, Pseudomonas aeruginosa
atgagcattgactggagcaaggcacctgagggtgcgaacaaggctggattcactggggatgaccaataccttcagttctatcgcatacctggaatgtttggcgactacgattactggagtgagaaaaggggatggcacggtaatgacttcccgacctgcgcaaattacctctttgatcgtcccgaaaaggtcgagtggaacggccagggcctgccgccggtgggcatcgagtgcgagacctggcacgtttgcaaacctgacgacatcacggttcgcaagattctcttcatgggcagtagccttgtggtgatgagcgacaaacttctaggcgaagtcaccggccgtctcgaaaaggtccagttccgccccgtccgcacccccgagaagatcgccaccgaggagtgggagaaggccgtgcaggagatgctggcgctcgatgagtacccgcatggccaggatcgcggcggcatgatgtctcgcgccgacttctgccgcgtcctctacgaagcgggctaccgccgccaggaggaagggaaatga

SEQ ID NO: 365810 - DNA, 801 bp, Pseudomonas aeruginosa
atgagcaatatcgtttctttacgcaacaccggggggtttacccggatggataacgacctgtacgaggcgctcattggcgctgatttgtctggcagggagctgcgggtagccctggctatccatcgtctcactgccggcttcaaccgtgattctgtgaaggttgcggctctctacatcgccaagatgatgtatggcgagaaagaggctgagaaggagcgggccaatgtatctcgcgcaattaacgcgctgatccgtcagcgggtgctgtatcgcgaaggtggtagccgtgatccactgacattcctaccagtttctgagtggaagatagaggctaaatccactgtgttgaaatctacacactgtgtagaaatggcacctgccagtgtgtcgaaagttacacacattaaagacaggaaagaaaatctagttccttcggaacttgtcgacgctgtcgcttcgaccgggccaattttggttctcgacggatcgccgtctcctgatcagcccaagtctgagcgcatcccgttctcccgtatccaggaaatctacaaccgggtttgcggtggcaagctgcccgagtgcttgaagctcagcgaagatcgcaagcgcaacatccgcaagtgctggaacctccagttcggcggtggctacccattccgcaagggtgagttctgggaagggtatttccatgactgcctcaccaacaaacattggcttggcgagaacgaccgtagttggcgtgcagacattgagtttctgacccgcgagaagacagtgttgaaagtcctggagggcgtgtga

SEQ ID NO: 365811 - DNA, 408 bp, Pseudomonas aeruginosa
atgaccaactcccgcgccaagggcgcccgcgtagagttggacttcgccaggctttgcttcgaacacctcggtatcaaggtcgagcgcaatcttgagcagagtagggcgggtggctacgacctaaccggtttgcctgggtgggcacctgagatcaagggcagggctgaattcccatcaaaggctgaattccttcggatgtgggctcagacgttggatcaggctggggacgccttgaagcccctattggcaatcaaggcaaatcgcagaggctggacctgcttcatcgacgccgcggagcttagacctgacatctatgagcctggtaaatcttggatttgtttagaaccagaagacttcttccaatacgtccgttcgacgatgccagttacccatcaggaggcagcatga

SEQ ID NO: 365812 - DNA, 1050 bp, Pseudomonas aeruginosa
gtgccccctgatgtacccgctcattggcccgagtcaatgcagttaaagtggcgccaacgaatgcaggctattcaagaggatgcttcgcttagagttattgaagttcctcattataaacgccgttggataggtcgtcaggggctgttcaatctagcggctaaaactgatgaattaagagctgcctgtggggagtggcttttggatgcactcgaaagtgcttgtcattcgcccgaacttcaaacctgtgctcagttggctgacagacttcgcactaatactaatttcattcgggttgcagagctttattttggtgatgctctgcttgatttgcaggcgttggtatccgatttggtgtcggacgacaatatccctcaaatggctgccgcacgtttaaaaccaagcgctatggaaaagtttcgtgcttggcaagaaatctgggataagcagcgcctggaagatgccattgatgccaagtacggcgtcgatatgccgctcacatacgaagatggcaaagatcccgagagaaaaaccgaataccaactcgccaaggcccaagcaaatcttgaaaaagcgggccgtgtaggggaaataccgcttccgccagagtacaagtccaccgacttccgtaagcctagctattggtcgctgcgcggaaaactggatgttcctaaagagcgctttttctcactgcctggttgtgaaaaaggcggtgatggcacgctggtcatcggctgggccggtctgaaccatttgcaacgtgctcaggccattgcagcctggtatttggatcgcaaagagggcgaaggctgggaagcggagcggctgatgccgatgctggtggcgctggatgagctgatcccttggttgaagcaatggcacaacgaggtggatcccgagttcagcgagcgcatgggtgattactacgagggcttccttctcgaagaactgcgtaatttagaaattactcggactgaccttttgagctggcagccggctgcagtagctggaaaacgtggcggtcgaaaaaagaaagtggccgagcagaactga

SEQ ID NO: 365813 - DNA, 507 bp, Pseudomonas aeruginosa
gtggacggggtgaagctccagttgccgctgccatcggcggtgacctgcccgatcgggttgccgttgccatcggtcagggtcacgctgctgcccggctcggcggtaccgctgagcgtggtgccgttgctggggttgaccactggcgtggccggggctaccgagtccacggtgacactgctgcccggactggtgttgccggaggcgtcggtggccgtggcgttgaccacggtgccgttggccagcggcgtgcccggtgtgaagctccagttgccgctgccgtcggcggtgacctggccaatcgggttgccgttgccgtcggtcagggtcacggtagcgcctggctcggcggtaccgctgagcgtgctgccgttgctcgggttgagcaccggcgccgccggggcttgcgagtccacggtgacgctggcgcccgggctgctattgccggcggcgtcctgggccaccacgttgaccacggtgccgttggcgatcggcgtggacggggtgtag

SEQ ID NO: 365814 - DNA, 429 bp, Pseudomonas aeruginosa
gtgacccgggtcgatttctacgtgatccccagcgccgatccgtcggcgcgcctgcaggtcgcctgccgcctggccgagaaggcctggcggcagggcatgcgggtctacctgcactgcgccgacgagacgcagcgcagcgagttggacggccgcctgtggagcttccgcggcgaggccttcattcctcacagcctggccgaggaagacgccgaggcgcccgtcaccctgggcctgggcgagaccccggggaaccatcgcgacctgctgatcaacctgaccctcgaggcccccggcttcgtcgcgaacttttcgcgggtggccgaactggtggtcgaggagccagcgatccgccaggcggcacgggataaattccgcttctaccgggagcagggctatcctctacaggaccatcgcctgccgcgtatctga

SEQ ID NO: 365815 - DNA, 267 bp, Pseudomonas aeruginosa
atgcctgttcgacttctcaaccgtttccgccacgccgccctggcgtgcctgctcggttcgctttccctcaatgcggcggccgatcccgtcacccttaccctctacaatggccagcacgccgccaccggtatcgccatcgccaaggccttccaggacaagaccggcatccaggtgaagatccgcaagggcggcgatggccagctcgccagccagatcaccgaggaaggcgcgcgctcgccggccgacgtgctcgtaaccgctccataa

SEQ ID NO: 365816 - DNA, 414 bp, Pseudomonas aeruginosa
atgtacacgcgcttcctgctggccattgccgtcgccttgctctcgatagccggcgcgtctgccggcgaccggctgccgggcaaggtgacggtggtgttcgaccaggccctgccgaacgttcccggcaagagcatgaaggtcgtgctcgtcgactacgcgccgggtggtgcctcgccatcccatacccacccccgttcggccttcatctacgccacggttctcgaaggcgcggtgcgtagcggcgtcaacggctcgccggccaaggtctacaagaccggcgagcatttcatcgaagagcccggctcgttccacgacgtgagcgcgaacgccagcgacacggcgccggcgcgcctgatggcggtgttcgtgctcgacagcgacgagggggcgctcgtcacccccgcgggcaaatga

SEQ ID NO: 365817 - DNA, 2052 bp, Pseudomonas aeruginosa; identical to SEQ ID NO: 342489

SEQ ID NO: 365818 - DNA, 186 bp, Pseudomonas aeruginosa
gtgaaaacgttggacaactgggtcaacgcttcccgcaacggccagccgttgagctctcctgaccgtcgcgcaatcaccagagaggacagcgagttagcacgattgcgagccgagaacgccgagctgaaactggagcgtgaaatcctaaaaaaggcggcggtattctttgccaaagagtccaggtga

SEQ ID NO: 365819 - DNA, 219 bp, Pseudomonas aeruginosa
atgctcgccatcttcctcgccgccttgctgttcggtttcgccttcaatgtttctcctggcgcggtgttcagcgaaacgctgcgccgcggtttgaccggcggcttccgcccggcgttgctggtgcaactggggtcgctgatcggcgatgccgtctgggccctgctcgggcttaccggactggcgctgcgtaaccgctccataaaccccaccttcaactga

SEQ ID NO: 365820 - DNA, 249 bp, Pseudomonas aeruginosa
atgaccctgatttcccatgacgagcgactcatcaaggcgctggcagtcgccatcgtcgaccacccgcgagcgacgctgaaagaactggccgaggcggccggcgtaagcaaggccaccctgcaccgcttctgcggcacgcgggacaacctggtgcagatgctcgaggaccacggagagaccgtactgaaccagatcatccggcctgcgacctggagcatgccgagcctctggaggcgttgcagcgcctga

SEQ ID NO: 365821 - DNA, 630 bp, Pseudomonas aeruginosa
atggcaaggaagcgcagaggtagagggaagcccaatttgtctggcggattgatcctcgcggctatcgtgctgagccttctcgcttctattcctacgcaggcctggatggttttgatcggcgtagcgattatcggctttggcgtatggctgatagtgaggttctccgataaaccgtcggtcgtagctttccctcctagcaagcgcccctcttcttcgaaggcaacacggtcagacaatgcagctctgtcccatgatctgacattttctctagatgaagtcgctcccttacaggcaaatacgctcactcgtactcagaaaaaggtttcggctcaggctccagcgtcatcgtctgagaggagagatagcgccgggctgtttaccgtgacgcttgaggtatcggagcggccgtcccatcgaatcccaagtgcgcctgctaatttggccgtttctaaagcgcgttggttacctcaggacgaattcatcgagattgccggagagaagatttcaggcgggatgatttatgtcggcgaggatcggaacagccgttatggttcctcggagcccagcctgatcaaccccaagcttaaggtcgcgcgaggtattgtagatctgtctcttatacacatctga

SEQ ID NO: 365822 - DNA, 405 bp, Pseudomonas aeruginosa
gtgcgtgttatcacctacaccaaaaacgcgaccgccgtcgtcaacggtcgtctcggcgaaaattacctgaccgaagtatcgaccatccattccttttgctgggaactcatccagggctttgatgatgacatccgggaagccttgcttgcgttcaatgccgaagatcttgtggctgccaaggcccatgcgatgggtaagaaaaggggcgagtccgacaccgaccggcggaagtatgcggagatcgaggcagaggcggaggaattacgaaagactgatgaatttaggtatagcccggacagaaacacattcggtccgggggcgctatcgcacaccaacgtcctggacgtgaccgcatggctaattgttaaacgcccaacgctgcagcgcatcctagggatggtctga

SEQ ID NO: 365823 - DNA, 1002 bp, Pseudomonas aeruginosa
atggaggagtgtttccttcggtacctcatgctctttcttgcagtgcgagcagagttttcgcgcaagtcgctgggcgatgatcaggttcaccgaggtcgccaggttgaacgctggcacgcccatgttcagcaggcgggtcagggtctcggcggcgctgttggtgtgcagggtggacatcaccatatgcccggtctgcgccgccttgatggcgatctcggccgtctccaggtcgcgaatctcgccgaccatgatcacgtccgggtcctggcgcaggaaggcgcgcagcgcctgggagaagtccatgccctggcgcggattgacgttgacctggttgatgccttccaagttgatctccaccgggtcttcggcagtggagatgttgatgtcggtggtgttgaggatgttcaggccggtgtacagggagaccgtcttgcccgagccggtgggcccggtgaccaggatcatgccctgcggctgcttgagcgcagccaggtagagttccttctggtcttcctcgtagccgagggcgtcgatgcccatctgcgcgctggaggaatcgaggatacgcatcacgatcttctcgccccacagggtcggcagggtgttgacgcggaagtcgatggacttggtcttcgacacgcgcatcttgatccgcccgtcctgcggcttgcgccgttcggagatatccaggccggccatcaccttgagtcgcgcggaaatacggctggccaactggatcggcggcttggctacttcatggagcatgccatcggtgcggaaacgtacgcggtaaatcttttcatagggctcgaaatgcaggtcggaggagccgcctctgatcgcatccaacaacattttgttgacgaaacgcaccactggggcgtcgtctgtctctgcactggaatcatcatcctggcttgcgcccgcaccggaaccgacatccaggccttccagatccacgtcgtccagtcctgcaaggctgtcagtggcattttcgaatag

SEQ ID NO: 365824 - DNA, 831 bp, Pseudomonas aeruginosa
atgtgcgcccaagccacccgcctctcggacctcaaggtcaaagccgccaagcctcaagagaaggactacgtcctgagcgacggtgacggactacaaatgcgagtgagaagcaatggctcaaagctctggaacttcaactaccggcacccggtgacgaagaaccggatcaacatgggcctcgggaccttccccgaagtttcattggcacaggcacgcaagcgaaccgttgaggcacgtgaactcctcgcccacggcatcgaccccaaagagaaacgggatgccgtacagcaggctaagaaggcggcgaccgagcacacattccagaacgtggcgacggcctggtatgaactgaaaaaggatgcggtgacacaggcctacgccgaggacatttggcgctccctcacgctgcacatcttcccggacttgggctgcacgccgatttccgccatcaacgcccccaaggtcatcaatctgctccggccgctcgaaaccaagggcagccttgagaccgttaaacggctgacgcagcggctcaacgagatcatgacctacggagtcaattcgggactgattcacgcgaacccgctcagtgggatccgctccgtcttcaagaaaccaaagaaaaagaacatggcagcgcttccccctgatgagctgaaggagctcatggtggcgatcgccaatgccagtatcaaaagaacgacccgctgcctcatcgaatggcagctccacaccatgacccggccagccgaggctgcgaccgcccgctgggtggacatcgacatcgagaagaagatctgtaaccgctccataaaccccaccttcaactga

SEQ ID NO: 365825 - DNA, 702 bp, Pseudomonas aeruginosa
atgagcgaccagcccagcctgtcccggggaggcatgagccccgaaggcaggaccaaccccgtcggcaccctggaacccaggctcgatccgcaggacaagaaggtgctgtgctcggcggtctgccattgcagcagcacgcccaacctcagccaggatggaaaaagcctcaagcaggcgtgcgtggcacagcggctgggagagttggacgaaattctccagggacgcagcccctacaagcccgaggtcagctacgacatgaccaagaacccaccgcagccgattctcgatagccagaccggtaacagtccacatggctggataccgggatggatcagcaagtattgggatgaagatccggagcatccgccgttcaagccagggaaaggaatgattcgcaggcccgacgtgatcatcgttcagaatcccaacaggccgccaacccaggacaatatcaaacaggtggtggagatgaagtttccgcctgacccacataatagggaacaacttgaggattatgcagcgattgccggcaacaagaacaagattgttgaaatgaaaccctccgactgcgactgtggccaggaaaatcaacgatccaaggtgccagtagagcaagcagggtgggccgtcgccatcgcaggtggagtgatgttcgtcttgacccgaggccgttcccctcgcccgatgattcccgcctattga

SEQ ID NO: 365826 - DNA, 270 bp, Pseudomonas aeruginosa
atgcagacgtttaaggaccaggaggcggagtacctgcaatggcttacggagaatccgtccagctacgtggcgaatctcgataagcgccattccttccgagactacccactcgttcatcttgcctcgtgcggccatctcacccgcgggggcaacttcactacaggcgactactacaaagtctgcgccgaaaccctcgaggagctcgaggagtggtgtttgcaagagcaccacaaaccttgtaaccgctccataaaccccaccttcaactga

SEQ ID NO: 365827 - DNA, 276 bp, Pseudomonas aeruginosa
atgggcttcgaagggcgcctggtcagccacggcatgcgctcgatggcgagcaccattctcaacgagcatggctgggaccctgaactgattgaggtagcacttgcccacgtcgacaaggacgaggttcgcagcgcctacaaccgggcggactacatcgagcgcagacgcccgatgatggcttggtggagcgagcatatccaggaagcagccaccggtaatctctcgatgtcggctatcaaggaaaatcgggacagaaaagtcgtttcgatacgttaa

SEQ ID NO: 365828 - DNA, 195 bp, Pseudomonas aeruginosa
atgaaaatcatgattaagctgattgccttccacacggcatacagtaattctgacattgcgctcaccccaaactccaagcaaggtttcatactgttgactaaccacagtcaggtcgcgcggatcggtattgtagtttgtgaatacaataacctgttttatcagggaatcattttcttgacaaacacggagcattga

SEQ ID NO: 365829 - DNA, 849 bp, Pseudomonas aeruginosa
atggcgcctccagggaataaagtggctatacctgggcagacagcatctacagactcaacgggttatacacgaggaaccagtaatgctacagcgctaattagtcgtgcggctgtacattgttatgagacgctttcaggtgtgatcgatgcaaccgcaactgcgggttacgatgattcatatacagcgcctctaattaaggcaatgctagcccatgggtgtagttggggaagcattggaagtcgtctggttgatataattagcgagcagcagagcataaaaaatcctgtaagctttgcgagtcggtggatcggatacggtttgcctgatataggtcgggtcttggagtgtactgagcagcgggcgacaattttaggtttcggcgaactgtctgatgcacaagcccatctcttcagaatgcccctaccgccgtcgttaagctcggttcgggagtggcgtcggttaactgtaacccttgcctggttttcgcctattcaaccgagcaatcaaaaatatagatgcgcaagtatgtggttcgaggcgaacaatcctgttgccaatcagaggcgtgaagctgcaagcggaaattctggttggcaggcagtaagaaggggaacgcttcagcatgaaatatttgagggcgattgggctcagcctttcgtcgatggagatagcttggttttaaaaataaactgccgaaaggaagcggcagctatagattcccctgttccctatgggctagtagtgtctttcgaggtccgtgagggggttcaactgccgatttaccaagaaatcagagataaaatccgcattcagccagctgtgccggtcaggcaagggccgattatttaa

SEQ ID NO: 365830 - DNA, 897 bp, Pseudomonas aeruginosa; identical to SEQ ID NO: 233190

SEQ ID NO: 365831 - DNA, 1395 bp, Pseudomonas aeruginosa
atggcaagttttttacattcagtcggcgccgaaaacttccgctttgaaagcctcaaagaggtcatggcgaaagccagtccggcccgctccggagacatgcttgcgggcgtggcagcactcaacgatggtgagcgtgttgcggcgcagatgaccctggccaatatcgaactcaagcatttcctgcaagaagtactgattccctacgagagcgacgaagtcacccggctgatcattgatacacacgacaaacaagcctttgcgccagtcagtcatctgactgtcggcggctttcgtgactggctgctgagcgatgccgccgatgagcacagcttgcgtgcgctcgccccaggactgacgcccgaaatggtcgctgccgtttcgaaaataatgcgcgtgcaggacttggtgctggtcgcacagaagattcgcgtggtcacccgttttcgcaacacccttggcttgcgcggccgtctttctacgcgcttgcaacccaaccacccgaccgacgaaccggcggggatcgcggcgagcattctcgatgggttgatgtacggtaatggcgacgccatgatcgggatcaacccggccaccgatagcattgcctccatctgcgaaatgctgaaaatgctcgacggcgtaatccagcgtttcgagattccgacccaggcttgcgtgctcacccacgtcaccagttcgatcgaggctattaatcgtggcgtaccgttggatctggtattccagtcgatcgctgggactgaggccgcaaatgccagttttggtatcaacctgcagaccctccaagagggttacgaggctgggttgtcgctgaagcgcggcaccctcggcaatgacttgatgtacttcgaaactggccagggcagtgcactgtcggctaatgcccatcatggcctcgaccagcagacttgtgagacccgcgcttacgcagtggcccggcacttcaagccatttttggtcaacacagtggtgggttttatcggtccggaatacctctataacggcaagcagatcatccgtgccggactggaagaccacttctgcggcaagctgctcggtgtgcccatgggctgtgatatttgctacaccaaccacgccgaagcggatcaggacgacatggacacgctgttgacgctcctcggtgtagccggcatcaacttcatcatgggcatccctggctccgacgacatcatgctcaactaccagaccacctcgttccacgacgcgctttatgcgcggcagtcgctcggtttgaaaccagcacctgagttcgaggcttggctgcagcgtatgggcatcttcaaccaggccgatggtcgcgttcgcttcggcgagcaattgccaccggcgtttcgccaagcgctggcgcaactggcctaa

SEQ ID NO: 365832 - DNA, 855 bp, Pseudomonas aeruginosa
atgcagcccattgaaaccgagcaagaagaccaagcgacaccctcggcggtcactcaaaacccttggcagcagctgcgtaacctgaccagtgcgcggattgcccttggccgcgctggcagtagcctgccaaccaatgcgcagctggacttccaatatgcccacgcccaagcgcgggacgctgtgcacttggcgttcgaccatacagccctcagcagcggattggccgagcgcggacgcgccagcctgctgttacatagcgcagcggccgaccgccacagttacttacagcgccccgatttaggcaggcgcctagacgacgcctcggcttgtcagttgcgcgactacgcccagaagcaccctggtggggtcgacttggccattgttgtggccgacgggctctcggcgctcgccgtgcaccggcacactctgcccttcctcgcacgtctggaggagcaagcacacgccgaggggtggtcgttgtcgccggttgtgctggtggagcaagggcgggtcgcggtagccgacgaggtaggcgagctgctcggcgcacgcatggtggtgattctgatcggtgagcgacctggattgagctcgcctgacagccttggcctgtacttcacgtatgcgcccagagtcggtttgactgacgcctaccgcaactgcatttccaatgtgcgcctggaaggtcttagttatgccatggctgcacaccgtttgctttatctaatgcgggaggcctgtcgtcggcaactgtccggtgtcaacttgaaggatgaggctgaggtacagagccttatttccggcgagacatcgacagcgagttccaacttcttactcggtgatcactccagatga

SEQ ID NO: 365833 - DNA, 402 bp, Pseudomonas aeruginosa
atgcaaaccaaagccgtactgagccaagccgaagtcagccgcattcttgctggcgcccgtgccgaagccgagaaaaaccagtgggcggtgagcatcagcgtggtcgatgacggcggccacccactgggcttcgagcgtctcgacggttgtgcgccgatcggtgcctacattgccactgaaaaagcccgcagtgccgccctcggtcgccgtgaaaccaagggttttgaagacatggtcaatggcggtcgtacggccttcctgtccgcgccgcttgtgacctcgctggaaggcggcgtgccggtgattgttggtggtcaggtagtgggtgccgtgggtgtttccggtgtcaaagctgaccaagacgcccaagtggccaaagccggtgtcgctgcactgagctga

SEQ ID NO: 365834 - DNA, 2181 bp, Pseudomonas aeruginosa
atgactgatcgcgtgaactgccagcgcctgcaagtagccgccaacctgcagcgtttcgtcgatgaagaagtgctgccgggcagcggtatcgaacgtgatgcgttctgggccggcttcgatgccctggtccatgatctggcaccacagaaccgtgccttgctggctgaacgcgatgccctacaggtaaagctggacacctggcaccgtgagcatccgggcccgatcagcgacatgtctgcctaccgtgctttcctcgaatccatcggttacctgctgccgcagccggacagcgtgcaggccagcactgctaacgtcgacagcgaaatcagcagccaggccggcccgcagctggtggtgccggtgatgaacgcgcgctacgcgctgaacgccgccaacgcccgctggggttcgctgtacgacgccttgtatggcaccgacgccatcagcgaggagggcggtgcgcagaagggcccaggttacaaccaggtgcgtggcgacaaggtgatcgccttcgcccgtgccttcctcgatcagactgcgccgctggccagtggctcccacgccgattcgaggggctatcaggtggttgatggtcagctccaggtcagcctgaaagatggctcccagaccggtttggctcaggccgacaagtttgtcggctaccaaggcgaagccgctgcaccgaaggccctgttgctgaagaacaacggcctgcacgtagaaattcagattgatgccagcagccagatcggtgcgaccgacgctgcgggcgtaaaagacctgctgctggaatcggccctgtcgaccatcctcgactgtgaagactccgtggcggcagtcgatgccgacgacaaggtggtgatctaccgcaactggcttggcctgatgaagggcgacctgagcgaagagctggagaagggcggcaagcgcatcgtccgtcgcctcaatccggaccgcgaatacaccgccgccgccgccggtggcgagttgacgctgcacggtcgctcactgctgttcgtgcgtaacgtcggccacctgatgagcaacccggcgatcctcgacggcgaaggcaatgagatacccgagggcattcttgatggcgtgatgaccagcctgtgcgccttgcacgacctgcagcgtcgcggtaactcgcgcactggcagcgtctacatcgtcaagccgaagatgcacggcccggccgaagtggccttcgccgatcagctgttcggccgtatcgaagacctgcttaagctaccgcgtcataccctgaaaatgggcatcatggacgaggagcgccgcaccagtatcaacctcaaggcctgcattgccgccgccggtgcgcgggtggcctttatcaacaccggcttcctcgaccgcaccggcgacgagatgcacaccgccatggaagccggcgccatgctgcgcaagggcgacatgaagagcagcgcctggattcaggcttacgagcgcaacaacgtgctggtggggctgagctgcggcctgcgtggtcgtgcgcagatcggcaagggcatgtgggccatgccggacctgatggccgccatgcttgagcagaaaattggccaccccaaggccggtgccaacaccgcctgggtgccgtcgccgaccgccgctaccttgcacgccatgcactaccaccaggtggacgtgcaggccgtgcagcgtgagatggaggccatcgacttggccagccagcgtgacgaactgcttaacggtttgctcagcgtgccagtggcggccgagcgcaactggagcgttagcgagattcaggaagagctggacaataactgccagggcatcctcggttatgtggtgcgctgggttgagcagggcgtgggttgctccaaggtgccggatatccacaacgtcggcttgatggaagaccgcgcgaccctgcgtatttccagccagcacattgccaactggctgcaccacggtgtgatcagtgagacccaggtgcgtgagtcgctggagcgcatggccaaggtggtcgatcagcagaatgcgggcgatagcgcttaccggccgatggcagcggattacgtgaggtcggctgccttccaggccgccagcgatctggtgttcaaggggcgtgagcagccgagcggctacaccgagccactgctgcatgcctggcgcctgcgcttcaagcagcaggcatga

SEQ ID NO: 365835 - DNA, 1893 bp, Pseudomonas aeruginosa
atgcaccacgatctgagccgccacacccaccaggttctgtccgtggcgcaaggcaaggcgaacctcgccggcccagccgccgacccctcggtcgcccgttcctggctgcgctgcttggagcagcaccacctcgaccctgcgcagttgatggcacctgcggtgctcgaacactcgcgcatgctcgagcgccgcgaacagctgcaacaggtgctggagatttgcagcagcgagatgaacagcctgcaccgtcagctggccggctccagccatgcagtgctgctcaccgatgccagtgggctgatcctcaactgcgtgaccgagcaggcgaataagcgcaccttcgaacaagccgggctgtggctcggcgccgactggagcgaggcctgcgagggcaccaacggtatcggcacctgcctggtcgagcggcaaccactaaccatccaccagaacgaacattttcgcagccgccataccggcttgacctgctcggccagcccagtattcgacctccatggcgagctgttggctgtgctcgatgtgtcctcggtgcgccacgacgtctcgcggcaaagccagtttcacaccatggccctggtcaacctgtcggccaaggtcatcgagggctgccactttctgcgcagcttcgagggtgaatggctcttgcgtttccatgcccaggccgaatatatcggccaattcagcgagggcttgctggccttcgatggagatggccgggtcagcgcagtgaaccagagcgcgatcaacctgctcggcctgccgcgtcagcgtctgctcgggcgtaccctgctggaaattttcgattgccgcctggatgacctgctcggtcgcgcctcgccgcagcccagtgccacttggccgctgtatacccagcgcggtcagctgctcttcgccatgctccgtggccaggcgcgccacagtccgcaagcccaggatgggcaagtcttatctacccctgggttctgcctggtcgacgcggacctgcagaacgattttcgtcgcgccctgcgggtctacgaacgcgatgtgccgctgctgatcggcggtgagaccggtaccggtaaggaggccttcgccaaagcgctgcacctagccagttcgcgcggcggcaagcccttcgtcgcactgaactgcgcggcgatcccggagaccctgatcgagagcgagctgttcggctactgcggtggcagctttaccggtgcacgcaaggaaggtatgcgcggcaagctgcaacaggccgacggcggtaccctgttcctcgacgagatcggcgacatgccgctggcgatgcagacccgcctgctgcgcgtgctcgaggagcgccgggtggagcccataggcggcgaggcgcaacccatcgacgtgcgggtgatcagcgccagccaccgcaacctcggcgaacgggtaaccagcgggcaatttcgcgaggaccttttttaccgcctcaatggcctgatgcttgagttgctgccgctgcgcgcgcgcggcgacaaggcgcaactgttgcagcacctgttcgatgaggaagctcgtggccaggctctgcggctggaggagcgcgcccgacaggcgctgctcggctaccgctggccgggcaatgtgcgtcagttgcgcaatgtgctgcgtaccctggtggcgctgtgcgaggacggactgatccgccatgccgagttgccgccagaaattcgtagcgttccggccctgaccgatgagtgcgacgacgccaccccgctcgacgacgccgagcgcagcgccttgctcgccgtgctggagagccaacgctggcacatgacgcgcagcgccgaacaactgagcatcagccgcaacacgctctaccgaaaattgcgcaagcacgccatcagtccacgccgctga

SEQ ID NO: 365836 - DNA, 1956 bp, Pseudomonas aeruginosa
atgagtgcgacttctccgtattccgttcgtcccgaggttctggccaacacgctgactgacgaggctacctacaaattcatgtaccagcagtcggtaatcaaccccgacggcttctggcgtgagcaggcccagcgtatcgactggatcaaacccttcagcaaggtcaaacaaacctcgttcgacgatcaccatgtcgatatcaagtggttcgccgatggaaccctcaacgtggcctacaactgcctggatcggcacttggaagagcgtggcgaccagctggcgatcatctgggagggcgatgatccgtccgagcacaagaacatcacctaccgcgagctgcacgaacaagtgtgcaagtttgccaatgccctgcgcggccaggacgtgcaccgtggcgatgtagtgaccatctacatgccgatgattccagaagcggtagtggcgatgctcgcctgtgcccgcatcggcgcgattcattcggtggtgttcggcggcttctcccctgaagcgctggccggtcgcatcatcgactgccagtccaaggtggtgatcaccgctgacgaaggtctgcgcggtggtaagcgcactccgctcaaagccaacgtcgatgacgccctagctaacccagaaactgccagcgtgcagaagatcatcgtgtgcaagcgcacgggcggcgatatcaagtggcatccgcatcgcgatatttggtacgaagatctgatggcggttgccggtagcgtatgcgcgccgaaagaaatgggcgccgaggaagcgctgttcatcctttacacctcgggttccaccggcaagcccaagggcgttcagcacaccaccgcaggatatttgctgtatgccgcgttgacccatgagcgggtattcgactacaagccgggcgaggtctattggtgcaccgccgacgtcggttgggtcaccggtcacagctacatcgtctatggcccgctggctaacggcgcgaccacgttgctgttcgagggcgtgcccagctacccggatatcacccgcgtcgccaagattgtcgacaagcataaggttaatatcctctacaccgcgccgaccgcgatccgcgccctgatggctcagggtgatgcagccatgcagggcgcggatggctctagcctacgtctgctcggttcggtgggtgaaccgatcaatccggaagcctgggcctggtactataaaacggtcggccaggagcgctgcccaatcgtcgacacctggtggcagaccgaaaccggcggcatcatgatcagccccctgccaggcgcgaccgcgcttaagcctggctcggcaacccgaccgttcttcggcgtgcagccagcgctggtggacaacatgggcaacctgctggaaggggccgtcgagggcaacctagtagtcatcgattcttggccaggccaggcccgtactctgtaccgtgatcatgaccgtttcgtcgatacctacttcaagaccttcaaaggcatgtatttcaccggcgacggtgctcgccgtgacgaagacggttactactggatcaccggccgcgtcgatgacgtgctcaatgtttccggccaccgcatgggtaccgccgaaatcgaaagcgctatggttgctcacccgaaagtggctgaggccgcagtggtcggtgtgcctcatgacatcaaggggcagggcatctacgtttacgtcaccctgaatgttggccaggagccttccgagcagctgcgtcaggaattgaagaactgggtgcgcaaggagatcggtccgatcgcctcaccagacgttatccagtgggctcccggtttgccgaagactcgttcgggcaagatcatgcgccgcatcctgcgcaagattgctacggcggaatacgacggtctgggggatatctccaccttggcggatccaagcgtggtggtacttttgattgatacgcatagaaccatgaatgtcgcctga

SEQ ID NO: 365837 - DNA, 1149 bp, Pseudomonas aeruginosa
gtgtctacgaaactaggggcgattcatggctcattggctcgctcgtcagcaaacatgctcaaagacacaaagtatccgcgcaatcaaagcacatacgcccttattcaaaaggctgaggcaacgctggcggctaacataaccgctgaacgccacggttgctgctttaacagcagctgcatgcgcaacactgtgttgcatcagggatatcatatgctggatgcaagttttctaagcgagctgtattggtacacatgcgtggtcgatttaggcagctattcagccgcggcggaaaaagccggagtcggtaaatcgagcttaagtcgcagggtagtcgctctcgaggaacggctcggtgtgcagttgctcagtagaaatacgcgcaggcttaccatgaccagcgccggagaagacatctaccggcatgccctcaacatgcttgctgaggcacatgccgcccacatcagtgccgaggaaaaccgaggtacttgcagtggccttgtccgcattgctgtccccagtatcctatcagactggttaataggcatattgagccggttccaaaaagacaatcccaatgtgcgctatgagctttttattgaagaggggcttgccaatccttccaggcaccttgatctctgcctaagcctactgccgccgccagaggacagcgctgagcttgttgtgcgcaaactggtaaacctgcaaagaggtatcgtgataagccccaccttagctgggcgactgggtgcaaatagctgcctaaaatcgattcccgacaatcagctcttggcctatgggaccagcctgaatctgcagtcatgggtgctgaaagacagcacgcgcacgctgcaaacgccatcactcatcaccaccaatctacaagccttgaaggacgctgctaaagccggtcttggagctgcctacctgcctttggcagcttgtcagcatgaactccagagtcaatcgctgcagttagtctgtacttctgagcaaacaaccgcgattcatctgaatatgctgactccatcatttcgaggcattaccttcacgactcgcagccttatagaagttatccgtaagagcgcaatgcttcacgtgccggtttgtgaaacaccaccaataagcagatgcaatagcactctcgtttga

SEQ ID NO: 365838 - DNA, 912 bp, Pseudomonas aeruginosa
atgacttcatccgcgctgttaccccgtcatatcgccgttatgatcatcgctttgatcgcatgctctttcgccggcaaccatgtggctgcccgtatcgcatttgaccatgacaccggcttattgatggccatgctctgccgatctggggtgaccatgctggcattgattgcgctggtgatgtggcggcgtgaatcactgcgactcacaccccagacttgggcctggcaattgttactagggctgttgattgccatccagagtttttgcatctactcggctgttgcccgcattccagtggcattagcactattggtggtcaacctatcgcctatcttgctggcaatactaacttgggccttaggcggcccccgcccaacgcgacgcgccagcctgttgatggggctgattttgtttggcttggtattggtcctcgatttgccctcacgccttgccaatccaggaacgatcgatgctagctggatagaaggcgtgttgtttagcattaccactgccgccatatttgcctgcgcactttgggttaccgatcaccggctggcgcggatgcctggcgcggtgcgcagcatgctcaccttagcggtggtattcatcgcatcagctatcgctggcgcagccgggctggtacctggcggcatgagcttaccaagcgcattggctggctggatcgccctcggctgcttggtggtgttatatggcacggcattctccgcgctatttattctcgtcacgcggctagacattgctcgtaacgcacccgtaatgaacatggaacccgtcgcaggactgctattcggctggctgattcttgatcagttactcggtggaatacaggtgattggcgggctgattgtgatttgcggaatcgtcatgctggcgtataaaagaaccgcctaa

SEQ ID NO: 365839 - DNA, 1509 bp, Pseudomonas aeruginosa
ttgatagtcgatgccagccttctggtaggctcgcacaacatcgctggagccgatcttggccatccagttcttcaggttgttggccgcctcatcggcaccgccggcggtcttcatttgcacctgaagcatcgagcccagttgcgtgacggcatccatgccgaagatctccaacttgcccatttccgcgagcagttggggaaaccatcgggccatgtcactggcctcgaacgagccggcctgcccctggaaggcgatagcctccagtgctttctccatcaccctgggatcggagatcttcgcgttctgctggagcgcctgcatcatcctcgcggtatccacgccgccggcgccctgccccaccacgaacttggccgcgaccggagagaaccccgacgccacgtccagatccatgcccgcgctgaccaattggttgatcacatcggccacttcgttgcgcgccatcccggtgtcgcgggaagtggtaatgaccgtgcgcgacagatcccgctcttcagcggaaccggccaccccagccttgatcgcgatatcccgaacgattgcctggtagtccgcgctgatcttcgtaggcacagccagagcggcagtaccggcgaccgcctggccgaccgtcgagcgcataccggacttcccggcctccaggcgagccatgccgctggcttggagcttgatgccctgcgcctcgcgggcggcctggcggaaggcatcgccgagtcgccccgcctccctggcgttgtctcgcagcacgttacgcagccggcccatttccgtttgctggtccgccaagctgcgcttggcttgctgggcttcacgctgcgccacctcgatccggcgctgaatcccccggaccttttccgcgtaggccttgttgtcggccgccgcctgggcttggcgttgcttgtacagttcggccgccgcctgagcctggccccgcaaccgcttcgcctcccccttgttgccgccctcggcttgccggttggcctcttgtgcgagctgccactggaggtagcgcaggcggtccatttccgtcgactgcgtagccagtcgccgggtccgagcctgatccgccgcggccaactcgcgattgagcgatgccagccgggcggtggctgctgcatgctgagactccagcgccgcgccgaccctctgctgttcgccataggcccgcaaggtgctgcggcgctgtgtgttgcccaactccaacgccgccttggtctgggccttgaacagatccagctcccgccctttggcctggagctggtcgatactgccctcgacggtgcggaatgctgcattcagcgaaccgctcacggcgccgccgatcagcagcccgagggagagttgattggacgccataggattctctgtcggttgaaagtggctcagtcaccgagccaccagatcatgcgagccaacggcatagcctcgatatcggcgacggagaaatggaactccgccgccagacgcttggccatgcgcttgtggtgttga

SEQ ID NO: 365840 - DNA, 1515 bp, Pseudomonas aeruginosa
atgtgcctcgcgaacggggatatgtactggatccatgggaacgacgcgctccgtccctcgaacgagctagccacttcggccgtgtcagaaccgatcaaagtcagacttccggggaagataaaaccggcgcggttcgcgaatgctaatgagaagagtgcggccgccaatgttggtgcaatagcacgagatcttgtgattcgactaggctcgcccggcctgatcgtgtgcccaagaaagctggacacacggctacttgcccgtgagttgctggaaggccgagaggaggttgagaatgacgacgttctaaagaccgcagccaacatccttgaccgctacccttacttgaacttcttagccgagtgtcttcggtatggagtgtcgtaccacaacgcatctctgccctttgatgtgcgacgcgatatagaaaaattaactcgtgcacgcgctctgtcagttgtatgcgcaaccaccacactcgctgaaggtgctgaccttccgttccgatggactatcgtcgctcactggctcagcagcatgcgtgatgatggtcgggtaatgaagtcgatgactttccgtaacattgcgggccgttgcggtagagcgggtgccttttctgaaggcgatacgattctcttcgaaaacttgatggggcccccatccttgaagcgggggcagcgaaacaaacgtagcttggaagaagtcatgtttgcatcctcaccgctccagtcgacgcttgggggggagtgggacgagaccccaatccaagggcagaaactgctggaggcaacaatcagtgcgcaactgctcgcgtgtatcggagagcatcccgacactgaagatatcgtgtcagtattgacggaggcctcttacgctgggcataccgatggcaagcaaaacgtacgtcgaatcttgtcggagaccgtcagcacaattttagacgatcaggaggctggcggtgcaatggcagtcatgaacagcccaatcagactcacggaatttggccaagctgccaacctcagcggcttctcacccggaacatgtcggctaatggtggaatttctgtccgaggagtccttcgaaactggcgcggggctctacagtgagcttctggagcggttcaacgacgtccccgagcagtcgaatgagacgttaaaaaaaatcttctccggagttaaccacagaaacgtggttaagactgaaaacatcgaagagatgctaaacaacttactattgcgcatggacttacgccaggtctttgaagggctgcgcagcaagaaatccgcagctaagccggacacggttgagacgatgttcgaggagttcgtatcgttcattaatggtgttgtggccaatttcctaccatggattcttagagctctcgggaaacttagtaagttcggaagcgaaaaggcagctgccacagactggtcgaaaatggctaagacgattgagactgcgttgggcgctagaagcggcgatacagaattcgacgacttgctgattccaattgaatag

SEQ ID NO: 365841 - DNA, 414 bp, Pseudomonas aeruginosa
atgaaagtgatgaagtggagcgccattgcactggcggtttccgcaggtagcactcagttcgccgtggccgacgcattcgtcagcgatcaggccgaagcgaaggggttcatcgaagacagcagcctcgacctgctgctccgcaactactatttcaaccgtgacggcaagagcggcagcggggaccgcgtcgactggacccaaggcttcctcaccacctatgaatccggcttcacccaaggcaccgtgggcttcggcgtcgatgccttcggctacctcggtctgaagctcgacggcacctcggacaagagcggtaccggcaacctgccggtgatgaacgacggcacgccccgtgacgactacagccgcgccggtggcgccgtgaaggtacgcatctccaagaccatgttgaagtag

SEQ ID NO: 365842 - DNA, 1047 bp, Pseudomonas aeruginosa
gtgggccatttccggcagcagggtcagctcccagggcgccgacagcagcgaataggtgtagtcggcgatcaggcgctggccggtgatggtcgggtgcacgctgtcgttgaacagcaatttgctcgggtcgggcgtgctgccgttgatcccgtaggtcgggttcatggtgcagccgttgccgctgaaacaggtgccgatcaggttctggtcggcggccaggccgaaggaagccgggttggccatgccttccttgagcagcagcgggatgttcaacggaatgacgttggcgccggcctggctcaactgggcggtcagctcggcgttgaacgtgccgctgagttggctggcgaaaggctgcaagggaccaccgaaggtagccggggtcaggcccaggtcgggcaacagccagaccacgatgtagcgcgcgccggcctgctgcagggcctgcacgctatccaccaggcgaccggcggcctgttgtgcctggacgtcgttgaggatgcgcccctggaggaagtcgttgccgccgccggtgatgtagtacaacgcgttcggatcggcacccaggccctggcgggcacggtccaccaggtagccatcgcggctgcgcaggagggtattgtcgcgctcgatcagcgagccgttggccgcggtgatcgagtcgtagatctgatcggtccggtagccgcccaccgcccagttgttgccgtcggcgatgccctgctgggcgttgaccggcgaggtcgaggcagccaggtcgcccggggcgatgccgagctgattgccgagcagcatgggcgcggtcggtccgaagatctcgccgctgccgttctggtaggtcgggccgacccggttggtgaaacgcgaggtgcttccggcggggccggcaggatcggggaactgcccggcatcgctgaggctgtcgccgaacaccaccagcgtcgaatagggcgaaggagcagcctgcggggcggtggacagcgaagccagcaggcaggccgctaccagtggcttgagcgccattctgatcattctcttactccgtga

SEQ ID NO: 365843 - DNA, 984 bp, Pseudomonas aeruginosa
atgtgtataagagacaggctcaagaccagcggcatcctggccacagctccatttattgagccagtgcttcgctacgaatcttcggataaaaatcttgaggacctaattgaggaggcagatggcgtcctcaagccactgtcgctaaagggccgcaaggccttcgttgaactggctctgtctggtctgtttgatgggagctctgatgacggccctttactccggaagtcccaatacgcgccataccggcatcaggtctcgatgcttgaacgaggcattcgacctggccgccccggtattgtaacttccggcaccggctcaggaaaaacagagagttttatgcttccgatactggctgctctttctaatgaagcagtcgagtggcaaaaaccggaatccaaatatttgcaagaacactggtggaaaactccgaagtcccaatgggccccccggagagctggcgagaaacggccgagtgccgttagagcactcgtactctatcctatgaatgctcttgttgaagaccagatggttcgcttgcgcaagactctcgactcacaagatgcacatgaagtaatggatgctcgattcgctgggaatcgtcttttcttcggacaatatacgagcgctacccctgtaacaggctacgagcaacatcctcgcctcgcaggtgacaagcaggaagcgaagcgtcgagctcgacgcatctctagattgcgtaaggcgatgcaggatttcttctgcaaccagagcgcagcccgcaaatttgatgaaaattctgagcgtcagcaaggacgtattcgagagaccacgcgctacatcttcccatcgatagatgggggcgaaatggtttcgcgatgggatatgcaggcttcgccgccagacatactagttaccaacgcatccatgctgggagctatgctgtcgagagaaatctggagaagttatttcctacgacaatgcgctgtccctacctcaaatatctga

SEQ ID NO: 365844 - DNA, 453 bp, Pseudomonas aeruginosa
  misc_feature (433)..(442): n is a, c, g, or t
atgcaaattcagaacgaagcactattcaagcaccacttactgaacggaatcaatctttttaccggttcaggcttctcggtactagcccatgggatgctgagagacatccctaaaaccatgcccgttggcgatggtttgcgaaaagagcttttagattacttcgacagagaccctaactccaacctttcattatctcagctttgtctaatcctaagtgcaacaaaaaaagatgaattaatagagtttttaaaaaccagatttaccaccataaactataacaacgaatacgacgcccttgaacgggtaaacatcaaatcaatctttacaacaaatatcgacgacttaacgtatcgaatttacgaaaacagcaacaactactacctgctcgacatggccactgcggatcgccgtcttcaaccagttcgccaggctnnnnnnnnnnccttcgattaa

SEQ ID NO: 365845 - DNA, 474 bp, Pseudomonas aeruginosa
atggaaaccctcagcaacatccagtgcttcgtccgcagcgccgaggccggcagcttcgccgaggccgccaggcgcctgggcctgacgccggccggggtgggcaagaacgtcgcccgcctggaaagcaacctcggcgtgcgcctgttccagcgcagcacccggcgcctgaccctgaccgaagccggggagcgtttcctgcaagaggtcggcggcagcctggagggcatccagaccgctctcgccaacgtctccagcgtcggcaaccaacccagcggcacgttgaaggtcagcatggggctggccttcggccgcgactacatcctgccgctgctcggcgagttcctcgaacgctatcccgacatcgtgcccgactggcatttcgacaatcgccaggtcgacctcatcggcgaaggctcgacgccgccatcggcggcggtttcgaactgcctcccggggtggtggcgcgcaacctga

SEQ ID NO: 365846 - DNA, 849 bp, Pseudomonas aeruginosa
atgaacgcgaaagagttctccgtgctctttagtctttcacaagcgcaggaatggttggcagataaagaactggagctcaccaacctaatttttaaggaatgcgactcaaacgaaaaaagggacttaatttgctcgttgatagagcgctttacctatctatctatgaaaagctactgcgaggcagtcgacaaactagtcgacaacgtaatatcaatcaatggactagaagacagcaatacaacattcgcagcaatgagtgcagactctggagcagatagctctcaatatataacttacgatctaaagctaatcctagagcgtaaaaaatggcgaaaacacaagctaaagagccgtttcacatcggcctatgacgaattcaaaaaagacaactcatacaagaacatcgtactaatagacgagtttgtaggctccggccagactgtactaggccgaataaaaaccataaaacagcaatttggcaaagcaaacgatggcaactacaatctattcgtaaggacagttgcatccaccaagtccggcgcggaaaaaataaaaaacgagggcatagattttgagagcataattacgctggaacgtggaataagcgaccattacgacaacaatagtagcgacgaaaaaatagacatcatgattcaattagaggaaattttgagcaaggagtacgaaggaaaggagatgccaagccttggttatggaaaagctgagtctctttactgccgagagcgcggaaacacaccgaacaacgtattcccaatattctggtggccatttcttgcagctggaggtgaacgaggcgttatactacatagggctatgggagatgcataa

SEQ ID NO: 365847 - DNA, 1035 bp, Pseudomonas aeruginosa
atgcataaagaaaaacatataatcagagcatgggaagaacacttcaaggatcgcggaatctcaagcgatcttatcgtgcagtatacaacctacataaagaaactatcggaaaatgaccttccaataatatttgagattgaacatctctcacttcttattggaataaatctccccagtctccgcaagataattaacgcgccagaaaaattctatagaacatttagcattcccaaaagaagaggcggagaaagagaaattagtgcgccgcttccttccctcctagcatgccaagattggatctataaaaatttactggcaaaaatttcaattcacgactctgcacatggatttgtccctggccgctccatactaaccaatgcatcgccgcacctagcgcaaaaagcgctactcaagatggatttaaagaatttctttccttccataccgataaactgggtaatgaaactattttcggattttggatacgccaacaacgtcgccttttatctcgcctccatatgctgccttaatgaatccttagcacaaggttccgcgaccagtccatatctaagcaacatccttgtcaaagggctagataaacggctaaaagcactatcagattcgtaccacttagaatatacgcgctacgcagatgacctaaccttctcgggaaattacataccccacacattcccatcaacagtggaggaaattgtttcagactttggcctagaggtaaacatcgaaaaaacgcgactacatacaaaaccaggccaaagaattgtaaccggaatttctgtagctggggcaaccccttcgttgccaagagcctcaaagcgccagataaggcaagaagctcatttcattcaaaagtacggactaatatcacacatatcaaagaaaaaaatccgtgcacctacttacatagattcaatagagggaaaactggctttttggttgcaagtcgaaccaaacaacgaatttgctcgggagagcttgtcccacattagaaaaatcagaagagaccaccagtaa

SEQ ID NO: 365848 - DNA, 243 bp, Pseudomonas aeruginosa; identical to SEQ ID NO: 361032

SEQ ID NO: 365849 - DNA, 1314 bp, Pseudomonas aeruginosa
atgctgctttcgactgtaattcattatggggtttctccgaactggcacgaccagcagcgcatattccagttgctgttgctgagtggctcgtcactgttttttttcttgtattttccttcttcgtttattaggcgaaaggtttttgccgctctattgttgactctcgggctgggtgttttttcctcctttctttctgataatttttcctgggcgctcaaggagtggtcggtattcgccggcctgatgctgttctccttcaatatttccgtcagtccggagtgggttcgccgtgccgctatctgggggctggtcgtgttgggagggttcttctgctaccagttcctgctttcctatctcgcggccttcgtcagcggactccgtgagttgaatcccagggttttgctcagcggcttttccaacgttcggaccatggggcagttccaggccatgctgctgccgctgatggctgcgctggggctgtacctgcgagagaccgggcggttcaggctgtcccggcttgtcatgctgctgctggccattcaatggtgcatctccgtcgccttggctggacgcgggctctggttgggtttcgccgtcgcgcatctcgcgctttgctggatcggccccgtggggagccgctttttgatcgtccagttgtccgcggcattcgtcggactggcgctctatttcctgctaatggttgccttgccgacctggctcggtatcgacatgaccctcatgtccggtatgcgcagtggtctgtctctgcgcgacgtgttgtggcgagatgcctggggcatgttcgtagcccatcctttgcttggggtcgggcccatgcatttctcggcggtgccgaacagcgtcggtgcccacccgcaccagatgctgctgcagtggttcgctgaatggggcggggtcgctggccttctggtggttgggctgatgatccttggtctgcttcgcggcgcgcgttacctgcgtgaacagggcgatccgatggacgccggactgtggctggcccttgtttcggtcctggtcctggcccaggtggacggcgtgttcgtcatgcccttcacccagaccgtattggccttgctggtaggcatcgccatggcgcgctggtcgaagccggtcgcgccgtcccccgcacagcgctggctctgtcggggcctggctgtcgttgtcattgtcgtgctggggcgcgtgttgctgctcgaagtgccggggctgaccgcggccgaggagcgctacctggaaatccacggcggcggtgaggcgccacgtttctggattcagggttggattcccatgtga

SEQ ID NO: 365850 - DNA, 465 bp, Pseudomonas aeruginosa
atgaaagctcagaagggttttactctgatcgaactgatgatcgtggtcgcgatcatcggcatcctggccgccattgccatcccgcaataccaggactacaccgcccgtacccaggtgacccgtgccgtgagtgaaatcagcgcgctgaagaccgctgcggagtcggcgattctggaaggcaagaagctcgtttccagcgatacccccggaaacaatgaatatgatcttggctttaccagctctactctgcttactggtagcggtaaggggcagatcaagattgacaaagctgataccgcaactccggagatttctggtactctgggcaactcttctggtaagggtatcgctggcgctgtcatcactgtcaagcgtgatgataaaggagtatggacctgcggcatcactggttcgccgaccaactggaaaaccaactacgccccggctaactgcccgaaatcctaa

SEQ ID NO: 365851 - DNA, 1701 bp, Pseudomonas aeruginosa
atgaacgattccacgcctctcagcggccttgccaagcaactggtcctgaacgaactcctcgacgaaaagaccgcccgccaggcccaggtgcaggccgcgcgcaacaagcagtcgctggtcagccacctggtccaggccaagctggtgcagagccgggcgttggtcgaggtggccgccgagcagttcggcatcgcctattgcgacctgaacagcctggatcgggaaagcattccgaaggatgtcatcagcgagcgcctggtccgccagcaccgcgtgttgccgctgtggaaacgcggcaacaaactgttcatcggtctctccgacccgaccaaccatcaggcggtcaccgatatccagttcagcaccggcctcaccaccgaagccctgctggtagaggacgacaagctcggcgtagccatcgagaagctttacgagggcgccatggacgccctcggcgacctcggcgatatcgatctcgacggggtcgatgtcggcaaggcggaaagcgccagccaggacgacggcggcgacgatgccgaagacgcccccgtggtgcgcttcgtcaacaagatgctgctcgacgccatccgcggcggctcttccgacctgcacttcgagccctacgaaaagacctatcgggtgcgcttccgtaccgacggcatgctccacgaagtggccaagccgccgatccagttggccagtcgtatctctgctcgtctcaaggtaatggccggcctggatatctccgaacgacgcaaaccgcaggacggacggatcaagatgcgcgtatcgaagaacaagtcgatcgacttccgcgtcaacaccctgccgaccctgtggggcgagaagatcgtgatgcggatcctcgactcctccagcgcgcagatgggcatcgacgccctgggctacgaggaggaccagaaggaactctatctggccgcgctcaagcagccacaaggcatgatcctggtcaccggccccaccggctcgggcaagacggtttcgctgtacaccggtctgaacatcctcaataccaccgacatcaacatctccaccgctgaagaccctgtggagatcaacctggaaggcatcaaccaggtcaacgtcaacccgcgccagggcatggacttctcccaggcgctgcgcgccttcctgcgccaggacccggacgtgatcatggtcggcgagatccgcgatctggagaccgccgagatcgccatcaaggcggcgcagaccgggcatatggtgatgtccaccctgcacaccaacagcgccgccgagaccctgacccgcctgctgaacatgggcgtgccggcgttcaacctggcgacctcggtgaacctgatcatcgcccagcgccttgcgcgaaaactctgttcgcactgcaagaaagaacacgacgtgccgaaggaaaccctgcttcacgaaggtttcccggaagagctgatcggcaccttcaagctgtattcgcctgtaggctgcgaaaactgcaaaggcggttacaaaggtcgcgtcggtatttatgaagtggttaaaaacacccccgccctgcagcggattatcatggaagaaggcaactccatcgagatcgccgagcaagcccgcaaagaaggcttcaacgatctgcgcacctcaggcctgctgaaagccatgcagggaatcaccagcctggaggaagtcaaccgcgtgaccaaggattaa

SEQ ID NO: 365852 - DNA, 612 bp, Pseudomonas aeruginosa
atgacccaaccctggatactaggcctcacgggcggtatcggcagcggcaagagcgcagccgccgagcacttcatctccctcggcgtccacctggtggacgccgaccatgccgcccgctgggtggtggagccggggcgtccggccctggcgaagatcgtcgaacgcttcggcgacggcatcctcctgcccgatggccagctcgaccgcgtcgccttgcgcgagcggatcttccaggcgccggaggaacggcgctggctggagcaattgctgcacccgctgatcggcgcggagatcgtccagtacctggccagggccgaatcgccctatgccatcctggtctcgccgctgctggtggagtccggccagcgccagatgacccaccgcgtgctggtggtggataccccggaacatctgcaactacagcgcaccatgcttcgcgacaaggtctccgaggagcaggtgcgctcgatcctccaggcccaggcccggcgcgacgagcgcttgaagcacgccgacgacgtgctggtcaacgacggcgacctgtcccacctgcagcgtgaagtcgaacgactgcacgccttctacctgaccttgcgaggaggccgagcatga

SEQ ID NO: 365853 - DNA, 210 bp, Pseudomonas aeruginosa
atgggtgtccatgaatgggcccgagagggcctgcgagagttgctgtcgaggagcgacgaggcggaccgggcaatgcgcctgcgcgcgttgctcagcgcaatcatcgaactgaaccgggcggagcgcgatgctggcgacctggccagcgaactgcaatttcttgcggagaatctcgacgaccagcgcgactacgctttcatgcgtccctga

SEQ ID NO: 365854 - DNA, 471 bp, Pseudomonas aeruginosa
gtgaaacgattgcattgggttctgctggccatgctgctgcccggcctggcactggccgtggagaagggctccaccctggagccctggacgttgcaggaccagttcgaaaaggcgcactcgctggacgactccacccgggtcctgctggtggcgcgggacatgggcggctcgaagctggtcaaggcggcgctggcggaacgcccaaagggctacctggaggcgcgccacgcgctgttcctggcggacatcagccgcatgccggcgctgatttcccggcttttcgcggtgccggccatgcgtgactacagttatccggtgctgctcgatcgcgacgcggccatcgcttctcgctatgcctcggacgagggcaaggtgctctgggtcaggctggagcagcgccgcgtgttggaaacccgccagttggattcgccggtggccctgcgcatcgccctggaacaactgcagccgtga

SEQ ID NO: 365855 - DNA, 450 bp, Pseudomonas aeruginosa
gtgagcgaagggcgggtgaagtggatcggcgtgcgctccggcagccgcgcgccgatccaggaactggaggcggtggaggcacggcgcggcctgggactgacaggcgaccacccgcacccgccgcgccaggtcaccctggtgcagtgggaacacatcgaggccctcggtaccctgctgggcaggccgctgttgcccaacgagatgcgccgcaacatcgccgtcgccggcatcaacctgctcagcctgaaggaccgtcgcttccgcctcggcggcgcgctgctggaaaccactggctggtaccaaccctgcggacgcctggaaaagcacatcgaccaccgcacgctgaagagcgtgcgcgaacagggcggcatcaccgcgcgggtgatcggcagcggagtgatccgcctcgacgacccgctggtgatcgagctccctgtctgtctagaatga

SEQ ID NO: 365856 - DNA, 171 bp, Pseudomonas aeruginosa; identical to SEQ ID NO: 320798

SEQ ID NO: 365857 - DNA, 738 bp, Pseudomonas aeruginosa
atggcgaagcctcctatcacccaagcccgcgacgtcgacgcggaacttgtgctgcaactgaacaagttcggcagcgccgccgaccttcggagccaacaggccaagttgaccggcgctgcgcgagaaatacgcaagctgactggtggcggtaccgacctgttcgggaagctgggttgctacttgagcttcgagcaaaagcagctcctacaagacgctgcgcgcttgctcgactcggtgaaccagcaggtcgagcatgcgaaggaaaagcgtgatcgcgacgagaaacaggccaagaagcggcgtgagctgcgcgagcgcctggccaagcaactggtcgcctcgaactacccgcttccgggaaatacgctcgaagagcggctggaaatcctgcagatcgcgttgatctacaaccgggccaaggtgttcgatcccctgtactccacgcaccagctccactcaaaactcaaacgctggctggagcgtcccaagcagctcatcgggtggcgcagtgaagccgagtatttcgctagtcaggtggggagcctgcgatgtgacttcattagccacctgactcacgaaatcgcctacgacgatggcagtgaagtcgaggagcgcctgcgcgtcatcaagcagaaggtcgctgactgcaccgcacagatcgctctgaccagcgaggagcaggaaacccttcagctctggacagacgctctgcaatcggctccggagggcctcatatga

SEQ ID NO: 365858 - DNA, 498 bp, Pseudomonas aeruginosa; identical to SEQ ID NO: 361518

SEQ ID NO: 365859 - DNA, 831 bp, Pseudomonas aeruginosa
atgaagcctatgattcaagcccacctggtcgagcgcgaccagttcggcttctggacccatccgaactatccggacctggccgacaactgctcttccagcgaggcgcaggaaactctgcgccggcttggactggagttgcagaacgtcttcatggagtcggatgcgcctcgcctctacgactctgcccgttcggaccaacgatacagcgagtggatcccaacgcggcccgaaggcgccggttggttcgtgctgtcgatccacgataccgataacggcccggtgtgtcagtacgtgcgaccgctcggagagcacctgagtccaatcggtctcgatgcggcagcagaacagcatgagcgcctgctcagcgaggcttgtgccaaggccttgaatcagcgcgacgtcgcccaggccagggtcgcggagctggagcacgtcctgcgggtagtggtcaacgctgccgaccatggctcatggccgaccacggtgatgcatggcatcgagaaggtgcgtgaagttctcgcaggctcagccccgtccgccaaggctcagcacagcgtgcctgatggctaccgcctggtccgcctcgaacacttcgccgccatcaaggcgcagctcgatcctgagcaggtcgacgcgtaccggggccggaacatctacgacgaagacaaggtgtacgcgaactggaacaaatgccgctcggcactcgacgagataaaggatgtgtttcagcagatcgattgggacaccgaaaacgagctggccgacctgctcgccgccggctcctcccaagctaagcccagcaccgacgacgggcagggaggcaggccatga

SEQ ID NO: 365860 - DNA, 708 bp, Pseudomonas aeruginosa; identical to SEQ ID NO: 342242

SEQ ID NO: 365861 - DNA, 219 bp, Pseudomonas aeruginosa; identical to SEQ ID NO: 342243

SEQ ID NO: 365862 - DNA, 1344 bp, Pseudomonas aeruginosa
gtgagtgttctggaactcacgccgccgcactccgtcgaggcggagcaaggggtactcggcggtctgatgctggacaacgcggcatgggacattgtcggcgatcacctgcagaaggaggacttcttccggcatgaacatcggctgatcttcaccgccatcagcgagttggccgcgaaggacgccccgtttgacgtcgtgacggtgtcggaagcgatcgaagaccttccagaagccggtgggctggcctacctcggccagctcgctgacaacacgccctccgtggccaatatcgaggcttacgcgcagatcgttcgcgatcgggcgcacctgcggcagttgatgtctctcgggcaccactgcaccagaaccgcctcgaaccaccaggcgaatccctgtgaggttcaggaggagatcgagcagaagctgttcgccctcggccaagatcagcacaagtccgactttgtcgatatcaacaagggcctcgcgaagatcgtcgacaccatcgattaccgcttcaacaacaacgtgacggtaacgggggtcccgacaggcctgaaggatctcgacgagctctccggcggactacagaagtcggatctcatcatcgtcggtgcccgtccctcgatgggcaaaacgtcgtttgccctcaacttgatcgacgccgcgctgcagagcgaccaacagaagtctgtccaggtttacagcatggaaatgccagcagagcagctgctgttcaggcttgctgccctgctcggccacctggaccttggcaagctgatgaagggccaactgcaagaagaggattggcccaggctgaccgtcgcgatccagcgcataaacgactatggcagccgactggtcatcaacgaccagggcaacctgacgccgactgagctgcgcgccaaggttcgccgtgcagccaggaagtacggccaccccgtactgatcctggtcgactacctgcagctgatgcgctgcccaggcctggaaaaccgagccaccgagatctcggaaatctcccgctcgctgaaagcactggccaaggaaatggattgccccgtcgtggccctgtcccagctcaatcgcagcctggagaaccggccgaacaagcgaccgaacaacgcagacctgcgtgagagcggcgcgatcgagcaggacgcggacgtgatcatgttcgtgtaccgcgacgaggtctaccaccccaacaccgaggccaagggcatcgccgaaatcatcatcggcaagtaccgcaacggccctatcggcaccgtccacaccgccttcatcgccaaccagacccgcttcgccgaccttgcaccaacttggcagggagctcttgcatga

SEQ ID NO: 365863 - DNA, 681 bp, Pseudomonas aeruginosa
atgagctccttcattgaacttccgatctctcgccggcgggagccggcaaggagtctagtcatgcgtgaccagcagcccgctaacaatctcctttcgatagcgagcgccgaatggatacaagccttgcagaacttctgccaccacggacgagtgtatgacgggtccgccgccaatgcctggctattggatgcctgcctacttgttcccagcgctgccctcatccacggtgtcatcgagtacgttcttaacagccgtgaggacataccatacggagggctacgcccaagctgggtggctcagcggctcgagcaggagggattgattagtcaccggtgcggggcagtcttgcactggcaggagcacggctatcgcttttccacggtggtcaggatcgaccccgaacagatttggcccgataagcgctcgagacccgaagcattcgttaccggaccactagatagccaggagcttggggtaattgaaatcctggcgcatccgaacgccagacgtcgtagtccgtccccggtgcgcctggcagcactggttcgatcttcgctagccatacctgctgagcctcttcatcccattgcaaatccgccagttcttcatgcagtgctagccacctatcccgaattggcatctcccgaatggtttccagtggccaggagtagcgacgcatga

SEQ ID NO: 365864 - DNA, 186 bp, Pseudomonas aeruginosa; identical to SEQ ID NO: 326419

SEQ ID NO: 365865 - DNA, 528 bp, Pseudomonas aeruginosa
atgaacactgaagcccgtttcccgagcatccacgcctcggccgcgttcaccgactcggcggtggttcatgccaatcacgttggggtcaacccgatcgagctggacgccctcagccaagtgatctcgcgcctttcgcgggacgagagcacggtcgcgcccagttcgatggagcgagagcttcgtgagctggaagaactggggtacatcgagatctcaaccacccaggccgggaccctggtggtcactacgcgcgctccggggcaactgctttcggcctacttctggtcggtatggatcccgcgacacctgttcagctgctcgctgaaagtgagcctggtgccgcacctctgctgcggcactcaggactcacagcacctcaccgccgtgttccgcattgcaggcagcaaggacgccgcgcgtgagttcctgcatcagttggccaacaactatcccgggcatgagccggagttgcccgaactggtggccgttcaggtcggtgatgcactcagcaaggaggccgaatcatga

SEQ ID NO: 365866 - DNA, 258 bp, Pseudomonas aeruginosa; identical to SEQ ID NO: 352891

SEQ ID NO: 365867 - DNA, 897 bp, Pseudomonas aeruginosa
gtgaccgcggcgctgcccggcattccactggaggcctggcggaggcggggtcgcaccctggatttcaagggcttcccgatccgctactgggaagccgggcagggtcggccgttgctgctgatccacggttttcccagcgccgcctgggactggcactacctctgggagccgctggcgcagcgctaccgcgtgctggtctgcgacctgctcggcttcggcgattcggccaagccgcgcgcccatcgctacagcctgctggagcaggccgacctgcaacaggcgctgctcggccgcctgggaatcgacgagccgctgcacgtgctggcccacgactacggcgacagcgtcgcccaggaactgctcgcccgccatcacgaaggccggctgcggctcgcctcctgcgtgttcctcaatggtgggctgttcccggaaacgcaccgcccggtgctcagccagaagctgttgctgagcccgttgggcgggctgttcggccggctgttcgaccgccgcgccctggcgcgcaacttcgccaaggtcttcggcccgcgcagccaacccggcgagaccgagctggatgccttctggagcctgatcgaaagcaaccaggggcagcgggtgatgcatcgcctgatccgctacatcgtcgaccgccgcgagcagcgtgagcgctgggtggcggcgttgcagcacggcggggtgccgttgcgggtgatcgacggagccgtcgacccgatctccggggcgcacatggtcgagcgctaccggcaactggtcgccgatgccgactgcgtgctgctcgatggcatcggccattatccgcagatcgaagcgccggcggcggtgctcgaacattacctggcgtttcgcgcccgactggatgattcagagttttcttaa

SEQ ID NO: 365868 - DNA, 774 bp, Pseudomonas aeruginosa
atggtcgtgtctgatcactatttcagagggcatgaaattagcgtaagaacggttcctgagactggtggtagtaatttgataaccatgtctgatttttcggcaaagctcaattctcaaataaatacatttatacaagataggattgatgaagacaaagaagcaaaggttgctctaatccagcagtcaatggagtcattggctgctgaacaaattaattccgactttacggcgaggcatgagcttccggctggttctcgtccaaacaccgtaacgattccccaggcaggtgactctgcaatcacggtcggatatggatttgacttaggacagcacgatgagcaggaactgatttccatggggataccgatttctaccagggacaagatccggcctggtctgggcttgagtagaactgatcctaatatatattctgctcttgctttaatcatccctccatttaccgatgatgatgggatggtgttgttctctacgaaactagatagggtggctggcgctgttcgtagcaaattctctgacgtttggagtgggttgcctccagccgtccggacggtggcggtagatatttactatcaatatggtcaaggaaaagtatttcctaattttgaggcagcaataaggcagcatgattgggcttctgtagtttacgagttgagaaattgggatggtcatccaaatgtgcccggcgactacagaacaaatcgcttgaatgacagggcggactatcttcaacaatctttaggtcttccgaactag

SEQ ID NO: 365869 - DNA, 510 bp, Pseudomonas aeruginosa
atgtcctctacccaacaccaactgatcgagcaatgcgccacccgcctacgcggcatcgccgaagccctggacaacatccacgacagcaccccgcaccgctggtcggcggacctcgacgatgttcactcttgcgccgagagcctgctggccatgatcaaggaccaggcgccggctctagatgcccagggcctggccggcgccgccctggagcaaccatccccgacgccagtgtgcacaacgccgacaggcgagaactatccaggcgatggcgtgaaaagctgcaagaagtgcccagagcaggcagaggcagaggcggagcagcctgaagtcgtggccttcatccacgaacgaaccggtgccgtagcgaatgcagaaatggtgcgggccatggaggaaggctcagtgctgtccggctactccatcggcctggtcacgctcgcccagcacgaccgcgacgttggagcgctgcgggcggagaacgcgaagctgagcgaagccctggaccgctga

SEQ ID NO: 365870 - DNA, 228 bp, Pseudomonas aeruginosa
atgggaagacggccgaccaagccggggagcattccccggctccgcgaaagacgccgcggagacaagatctattactactacgacctcggcggcaagccacgcaaagaactgtccctcggaacggactacggcctggcgatcactgaatacgtccgcctggagagggcgcgcacagccgatgcaaagcaagcggagacgctcacgtttcgctatgtggctcaacgctag

SEQ ID NO: 365871 - DNA, 3087 bp, Pseudomonas aeruginosa
atgaatctgatcaattactggccaagttcggaacacatttcccagtgcatccgtacggaggcagaggagttagctgagcacgtactcttagcggtgcatgagcctatgcagttgcttcgggtaggtaacggagcagagcagcaatgtactgaggccgatctgctagcgcattttcttgaggtggagagaccgattcccttggtcgggcgttccggcgttggaaaatcccacctgattcgctggttggaagctcaactaaaactgcagtcgcgatccgccaactggcatatcgttcgcattccgaagaatgcaagtttgcgccaggtattggaaatccttctggatggcttggaaggagaagaattcgagagtgcacgtctacggattcggtcggtaggtgaaatgctgaggaccggagaggtcgctgacttgctgttgaccttcatgtcacagcaattgcagcgactcaacgcccgcgtcgcagagcaaattagctattaccgcggaaatccgcaggccagtcaacacttgtctgctgaagaaaagcagcgttggcgagatgttaacgcgcatactgcgccggggtgcggtctttccgaactgattaccgacccaaatttcaagagaagcttgcttgatccgaagcattgtatttatcagttcgcaagtcggttgactcaaggtgctaccgatcaagagttaagtcgaaacgattaccagatcagggccgaggacctggatttcagtttcaacctcgatgacctgtcgcaaagcgctcggcagtatgtcagtcgcgcccaattgaataccaatcggcaagcccaagaggccgcagcgggagttttaaacgaagttttgggtgagtccaccagaactgcttttcgtcatttgttcagtttcaatggcggcagttttttagatctctttaaagacattcgtcgtaccttgaaacaccaggatcgcaccctggtggtactggtggaggacatggcggcgatttctgctatcgaggacgtgctaatcgatagccttctggaagaggccgttagagatgaaaagcaggaactgtgtacgcttcgctcggctatcgcggtaacggatggttatcaaggatatctgcggcggcaggacacgattaaaacacgtgcacagtatgaatggttgatacgcgatcatggccagagtcgcgagcaaacgctggagcgcattgttgatttctgtggtcggtacctgaacgctgcccgtcacggtagtgcaacgctgagagcgtcctggttggagcgttcgactgaaaccagttggccggtaatctgggaagatcccgaaggccccccagaggaactccaggcgtacggctattcgccttctggagtgccgcttttccctttcaatcgcaacgcgatcaatgcgctggcggatcactattgcagcaacgatgaagagttgaaattcaatccccgccaagtgttgaaccagatagtgttgcgcgtattacgtgatcatcgtcaggcatgccaggagaatagattcccacctgccgatttcgccggtatcaaagccggtgcggggctggttgacctgtatagactcgatgaaccagcacgctgcgaatctttggctgctatctgggggtacggttgccgatctatcgcagagttgcagcagggcttggattggcgggtagcaaacgtcttcgggctaaacgcgttggcgtctctgttggaagaagtccaacccgttggttttattcgtccacctactcggacagacactggcccgaagaaagctaagccgacggtagagccaagaggactgaaacccgagcctgatcccgatcagcaccgattggaagagattgtttcagagtggtttcagcgcacaaagaagttggaacaagacgaatccagggatctaagaaacgccctgaacaagatgtatcagcaatatgctcatccggactggtttggcttgggggcgcggccggaattactgcgtggggcgattgttaatatcaatattccattctcccttactgggaacaaagccaccaatctggtgtggttttgccaggaggcggactttgaggaccctcaaaaggccgctgctttgaagggcgttgcgctggcgcttctgcgttacgagagcgtcaatcgaagatccactgggataggttggcaatatcctggtggattcgatgattacttgcgctaccagaatttcgccgcacgttgggttcctcaggttctacagacactttcgctgatggagcgctcaaagcttcatgaggtgatgcaggaacaattgagtttagtacccatcctggggttatggaggactgcgtccaatgatcgtcaacgactcaatgaattgctcactccggcacaaaagattctagactcattgccaaaacctgcttctcctatattgctagaactccggaaaagtgccttggatgagtgggaagggaagcgagatgcctggttgaagttggtggctgcaaatgaccatggtatggatggagagttggcgctcaagtcattcagagatgctagtaagatcggtttcggacaaaaattggctcggtatgagaggcagatcatccaggaactgcagtcgtcttttaatgtattgtccgctctcgaaggctattctcgacacgagcaattttgcctcttgctggatgaaatggctgagattgtacgtggtgtaagcgaggacggactgtattatcccactctgcttgcagacgtgccgaattccaagaaaatgcttgagatattgagcaatatcaaaggaagcgaggtttgggcagcagttaaggtttttctctcgttttggaatgaatccgaactacccaagaaaatgcagttgatcaatcaggtcgacggtcacaatttagagaaatccgttcaggcactcagtgcgtgggataaattctacgcatatgtattgccgcgcctggagaatgagaatcgtcaatctgggttggacgtcttagagcagtcacatgagagagttactggcttgttgaaggggttgacgagcactttgacggacttgttggaggcatgccgtgagcggtcttga

SEQ ID NO: 365872 - DNA, 885 bp, Pseudomonas aeruginosa
atgtcgatggtgaataatgctcacccaggcagcagtctgatcttgctaaatcttattgatcgagcattggttcgcaggggaaaaccaattgcgcgcgcggagttattggagacattgcggccggagttgctcccgaaaagtgagacaggagcaaaacgttttgagtcgaatctggatttctggttggaagaagggttgtggttgcaggacagtgagggaatgattttcgcaccccctcaggccagtgagaaggatctcccgtcgcgtgtattgcagttgcttattgataatgcatccacgcggtcggaatcggctatcctggacggtactcgcactgaaccatttcttcgtgcaatgacctgtttgttagcgcagcgtcggtacaccttcatgggaggggagtcggtaagttcttccaatgccgccgaggcggtaaatagccatctgccgggtcgggaattgaatgagtctaacgaactctcgacctttttggcctatggggaattccttggcttcttggagcccttcggaaagggttacattgtagatcctactttagctatcgaaccctacctcgagagaattttcgaaggcgggcgagtacttccgtttagagtatttgtcgaacgtttgggagagtacttgccactgcttgatgaggggggctatcgtcgattgttggaaccttgcatggaaaattggaagccagacgcaccatatgaagtaagtgccgcactcagtcacgctctagtccgtctggaaagtctgtttcgattgcgcttggaaaagtcctctgacgatagtttgagtatgcgtctgctgttaccaaatggtgttcaacgctccgtaggtgagattcaataccgtaccgaggtcgctgtatga

SEQ ID NO: 365873 - DNA, 2466 bp, Pseudomonas aeruginosa
atgattcaggcccaatggaatgctttgcagagggctctactggtgccagagcatcaatccgagcagaccgtcgtcgagccgtacttcctccgcctgctgatggtattcggcgacgcaaaggcgggctcggccgatcgcgccgtcgcttgtcgtgatgctttcggttgtgctcaagctcatggctgcactgatttgctgctacaactgcctgccggttccgttgaaaggcaacacctagcccgagtgggcctgagtcaagatccgttaaccgaccgggtcaggttggagactgctctcgaggaagcggagttggcggtttacagacgtcagcgtcgccgagtcctgcaccaacctcaaatagacgtggccttgagcagtgctttgggccgtgttggatttagcaactacaacggcctcggtcagcaagttgcagtgcggacattgctgacctctccggatgacagtacggtcttcatcaacctgccgacaggttgcggcaagacgctggctgttcatgctttgagtttgtttgcctatcggcagaaaatggtgcttgtcattgtgccaacgaccggacttgccatcgagcaggccgcgcgtgctggagaagtgctggaggctgcaggatgcgatcacggcggtagctacgtttggatcgggggccaggaggaagctgagcgtcgagagattcgtgagcgtctgcattacggcacacaacggatcttgttctgtgcgcccgagtccgccatatcgggccttagaccattgttgttcgaactcgccggaaaaggactgctgggtgcgctagtaatcgatgaggcacatctggtcggccaatggggggcggagttccgtcctgacttccaactgcttgcccctctttttcactccctcagagaacactcctcaagtgccatccgcaccttgttgatgtcagctacgtttaattccgccgctctggaggtgttgaaggaagccttcgtccccgaaggaactcgggctatcgagataaatggcagttttttgcgcccagagttgaacttcaatgtccgccgagttcttgcagacggagagcaccggcaggttgtcgtggacttgctatggcgcttgcctcgacctctgattctttacacgacgacccgggaggatgcgcagaactggcgagacatgctggtcaagcagggcttccgtcggcttggcctgttccacggcgaaaccaacacccaggagcgcgagcgtctgatcggccagtggcaggatgaccatctggacatcatggttgcgacgtccgccttcggtgttggcatggataagagcgatgtccgttcggtattgcatgcggcagtgccagaaaatttggatcgtttctatcaggaagcggggcgtgccggacgcgacggtaacgcctgttggtcctggctggttttctacccgggccagataaatgtggcagagcagatttcacgggcaaggctgatttccagtgaagtgggattggatcgctggaacaccttgctgcagagccgtcgacgtagcaatgatggttgcttcagtgtttctctgtctatgttacgccgcgatttgaaacggcgcagcgaaggtaacgcagagtggaatgtacgcacgttgcttctgatgcagcgtgctggtctgattcgattgcgctattcaccgcccgaggtgcctcacgaaaacgcagcggtagtcgatacggaattgcctcagggcgacaattactttgaccgcatcgatattcagatcctgatggatgcgcatcagtccacagatacttggcggcactatgttgatccgcaacgtgcccttgaacagcgggccatggcaaacggtttcgccagtttgcgcagatggctggatgatccggaccagtcgctgtgccgcctgttagaagagttctatcgactggatggcatcagccctgaacgcagttgcggtggttgccctggttgccgcgctcaggggcggggaccctttacgccaacgttgagtgcgtctttccatgtgactggtgtagtaactcccgctatgccgaagtggatgccagactcccagttgctgcggattcgctaccgtactgagagttatcgtagcgtcactccccgtgctctgattcataactggcggcgatggatggtcgctcttctgcgcagccagcaggtgcaggctgtccgtgccagtcggaccttgttggatgaaatacagaccgatgctggtttgaaagcactaccgttctggtgtgccctggagccgcacgacagtgctgggagttggactgagttggttttactcatgccggaggaaagcaacctgcctgcgggtggctatgaggttccagcaagattgatagttgcgcccgagactctgagtgatccgtatcacccgtaccgaacctggtgggagtgtgattcccaaagcaaggatttggtcgacttcgaaagggaaatataa

SEQ ID NO: 365874 - DNA, 3093 bp, Pseudomonas aeruginosa
atgaaccaggttttagaagtcggtgagttggttctgtccagtgcttttcctggcattggcaaattgtcgggattggatcgtgagaggggcgagtgcgaagtcaccttcttcgaatcccctttgaaccctgaggcgagggcgctcagggtcgatctggccgacgttaggaaagctcagttgtatgaggaagccatcgtctattgtcgagatcactcgacaggtatctggcggcgcggtcggtacggcggttcgcgaccattcaatcggcatctggtgatctttcgcgctgacgataacgatcaagcggttgttgatatcgatgaaatctactgcctgaaccttaaagcgcaggatttgctcgacccttcggcgttcctggcggctagagctaacgacgcgccttttttcttccccctgcgccaggatttcctcgaagcctatatcgagcagcgggcggcttgccgttccatcggtgcgattaccagcagcagcgtagagttggagccgcatcaaattgccgtagttcggcgcgtccttcaggacccattcccgaagtacttgctagcggatgaagtgggcttgggtaagacgatcgaggctggcctgatcatccgtgagcacgtgcttcagaagaagttcgacgccaatgttttaattgcggcgccggcttctcttgtcactcagtggcatgaggagttaaagggccgatttcatcttggcgagttgatgtctacaaagcatcgatcggaacaactgattcgagtatgcagtcatgaacagttagtgacggctttgcgggagggtggccagcctagcttgcttgtcgttgacgagatgcatcaattggcgccgttggcctggtcctctgagcaacattcaaatgaccggtttcaggtgctggcggaggcttgccaggcagccgagatgactctgttgttatcgggaaccccgttgaatgggaacgaaagaaattttctggcgatgctgcactgcttgagtcccgaggcttatgagatttcggaagcgggggttcagcgtttcattgctcgagtcaaggaacgtgagtggcttggagggttgtatagcgcactgaccccgggtaactcgaacgccgcattggaacaagcactacaggatctgcggggaaaattccctgaggatcaggagttgcatgagagaatcggcagtttgatgcctttggtggatctcttcgccgaggagagcggcgagcagcgcgagcaacaaatcataggcttgcggcattacctcggagaacactaccgcctgcatcagcgcatgctacgtaaccgccgggaaatgggccatctcgcgcagttgtttccaggattggctggtttgcgccgcaaatactggccgacggaaccacacagcatgccattggatctgttgttggaagagtaccgcagccaggcctgccgagatcctgatgagttccagtcgatgagttctggagaatacctgaactgggttgacgacttgttgggcagtccattactggtcaagcagcgggccgataggttcgacaggcaactgtcggcgacgcttgaagcaactgagcgagagcttcttgccgaaatatccaaacaggcctcactcgagcagaagtgtaaagatcagagtttgatcgcgagtctggaagattggttggccgaaaaccctaagggcaaggtggttgttttctgcggcgacgaggtagttgcggatcatgttgccgctacgctcgatgactctctggctgtaggtatagagcgcaatgcatccgaccgtgacttgcagttcttgcagtctggcagttctgtgcgggtactggtctgcgatcaaggtggtgaagatggtcttaacctgcatggggggcagaaactcgccgtgcattacagcctgccgagatcgttcagtcgcgttgaacagcgtctgggacgattgaaccgttacagtgcaaatttacgtggcatcaggcctgtggaaagcctggttttgatgtctgaacatgatggtttgttccgacggtggctagatctgcttgacacatcggtaggtgtattcaatcagacggtggccagtttgcagtacgtactggaggagcacctcgaaaagacttggcaggcagtcgcgcgatccggcgatgaagagttgcttgtctgcgccaagcaattgagcggcgagggcggcctgctggaccgcgagcgccgtcgggtgaaagtacaggaagaattgcttgcattggacgaggatgtcgctaaggcacgcgacttcgcggaaacaatttctgagtcggacgaaatagccgaggagcagattggccgcatgtgtgcctggatgacccgcggcttgaacttcaggctagagggggatctgcagcagcaattcaggttgggcttcggccttgaccccgctgagggtggcggtcgtaccctggtggacgtgaagacctttatcgaaggttgcatcacgggcattgatccggaaagtggtaacccgccatacaccgctcccatgagcttcttgcggcagcaggcttcagttcaatcgggcgtgtaccccttccgttacggtcagccgttcgtggattccatatatgaactggccgcgggtgattcgcggggggcaacctgcgcattcttgcgaattcttaatagcagtgcactgcagacgccaaagattttctttcatttcaagtggctggtaacggctgcccggccagattgcacgtatcaggaacaggttatcgccgatgagttactggcacctgcggtgtatggccactggctcgctgaagacggcagcctggtaaaggccgaaagcacattgaaatccttagaatggccttacaagaagcccgcgggcgccatcttccaggatatcaatctgcgccatgatgtctggtccgagttggagtttctattacctgcggacgaatggaaacgcatggtgctgggtatcactgagttgagccgaaagaggattgtagaggagatagtcgctctgcgaggttccgtccttgaaccgcacgtgcaccttatggcgttacgcgcccagatcctgtgctcgaaagatctgtggaggaatgaatga

SEQ ID NO: 365875 - DNA, 1167 bp, Pseudomonas aeruginosa
atgggcctgaccatcatcgaatcctatgtggtcatcaatgcgtcggtgctgtttatgggcttcggtgcctcgcagtggacacgcgaatatgcgttggccatcgtgcgttacgccgtttccgttggtgccaagctgttcgtcctgaccttgatcgtcggcttgattgtggactcggccaagacatggcaggcggcctacaaccacgacgacgcgagcatgtggacgatggtggggctggctctggtctgcgcctatctggccaagactatccccgagctggtcgcgggcatgattagtggcacctcgatgggcggcggttcggccatcggtggcatggcagcggccggtgcagccggtgcagcggctgctattgcaaccatcgccacggccggggcggccgctccggcggcggccggtgctcttggcgcggccggtagtggtggtgcagccggtgcaggtgcagcgggtgccggtggcattggtggcggcggtctggctgctgcgatcaattccagctttgccggtggcagtgcgcccgcagcggccgcaactggcggcagcggggcagcttccggcctcggtgcaagcactggcggccaagcggcggccaagggcgcgtcatcggcaggtgcccgagtgggcggcagcgccgcgccacaatcgccggggccagcgccgcagcagccgagcagcggtgtgcagcaggccgccaagcaggccgggaaggccgcgcagggtggtgacgacgacaagggccagcaaacggcggcaggggcgcaaacgcctccggccggtaatgcggacgcctcggcgtccagctcggcccctagcgcctctgcgcagtcgccagcggcccaagctggcgaagggcagggcgaagccaagagcggcgtttctggccatcaaatcgcgtcgggcattacccgtggtgcgggcatcctctccgcgattgccgttcccggcatggaaggcgcggcaggcctgtcgctgggtgccggtgcgccgcagccggtgcccggctccggtgctgacgctgatggctcgatggctcccagctcggccccgtccagtgcagaaccgcagaacgtcattcgcccggcagaaccgtcgccagcatcgccaagcgatgcaggcccggccaagccagacaccaaagggggggagtaa

SEQ ID NO: 365876 - DNA, 306 bp, Pseudomonas aeruginosa
atgatcgccgaactcgccttgttcttcctgcccttgctggccatgtttttgataggccttggactatgggcgttagggcagtggttgcgccgtagaggctacagtgaccagctcgacaaaatcgacgcgaaagtgtccaccgcccagcaaaaaacgcgctggctgttccgcccgctgagcggcgcaatggtcagtgtagggcgcggactgagcagggttcccctgttcggcaaccgtcgcagccgcgacatgtgggacgacctcgaagaactgtcgaagcatcaacgcaacaatcgccgggactaa

SEQ ID NO: 365877 - DNA, 699 bp, Pseudomonas aeruginosa
atgcaacccaatagcaagaaaaagggtcagcgggcaccgaaagccccgcccggcacgccttacctcgcagcccgccgcgagtggaacgagcgttatggcagtcatatcatcgacgcccgcaactggcggacggccgcgtttgtcgttggtgtcgcgctgattctttcggcggccgggaacgtcattcaggcctccaaagagaaaatcgcggtctactacgtcaacaccgacgccaacggcaaaagccgcgaaatctggcgggccgatcaggccacgccggggccgaagaccgaacaaatccgcgctgcgctgcaagattgggttcttggtgctcgcacggtgtatgcggacaacagggctaccaagcgcgtcgtcgatgcgacctatgcgatgacgctgcccgacagcgccgcttatcagacgctggccacatatcaccgggaacacaacccgtatcagcgggccgccaatgaaaccgtcgaggtggccatgcaaacgcctgtccagctctcgaaagacacttggcaagtcgagtggacggaaacggtgaaaaaccgcacttccggcaagctgatcggcacccaaagctatcagctcacggccaacgtcctgatcgctgcgccgaaggatgaagcccagcttatggccaacccggttggcctctacgtccgccaattctcttggcccgttcgcaactaa

SEQ ID NO: 365878 - DNA, 939 bp, Pseudomonas aeruginosa
atgatgactggtgaatatatgaaaaagactcaatggatggcgggccttttcgttgccgcaattgctgcccccacgttcgcgcaagacgttccggcgctcgctgctggccaaggtgaagttctgccgccggtcaatctggtgtcgcccgatcaggtgcggctcgatggtaaggaggcctacggcatccgcttggccaatcagtggaaatcacaccctgaccgcccgcgtcgtggcgcagacggtagcgtgaaatacctttttggtgccactctgccgacgttggtttgcacccccttgcaggtctgcaatatcgaactgcaaccgggcgaaatcgtgaatgacgttcacgcgggcgacaacgcacgttggaaaatcaccccggccacgatgggcagcggggcgaacgctacgacggtgattgtggtcaagcctaccgacgccggactggtcactaacctgagcgtggccaccgaccgccgcctgtactcgatcaagctggccagcacgcaacgcgagtggattccggtgctgtcgttcgactaccccgacgacgtagaacgccagtgggccgcgtaccgcgagcagcacgccaaacaggtctacaacaacaccatgccgaccgggcagaatctggccaacctcgatttcggtttccgcattggcggtgatagcccgagctggaagccggtgcgcgtctacacggatggcaccaagacctacattcagttcccgtcggccagcttcggcggcgaggccccggcactggtggccaagggcaacgacggcggcctgttctcgaaggctaccgagaagctcgtcaactaccgcccgatcggcgatcgctacgtggtcgataaggtgcttgaccgggcgtctctgattgtcggcgtcggccgcaatcaaaccgaagtcaccattacgcgcacggggggcaaataa

SEQ ID NO: 365879 - DNA, 384 bp, Pseudomonas aeruginosa
atgtcctacgtcgaaccgaccgtgacggccagcgatgcgcagacgctcgcaagcgatacggtcgcctatctggctgatccgcttcctcctgcgcgaaccaccattgtgctcgatcctcctgccgcgaaggatcacgacgcactgacggcggccatgctgcccgcgctccgtgcgcggggctacggcgtgacgttggttgatccgcagaccggcaaggccggtggtgcgggtgtgcctctgcgctacatcgcatcgccgctcgatagcggcgtgctgctgcgtctgcaatatcagggcatcgaggccagccggtactacccgcgcggctctaatggccagctcctgccgggtgccccgttcacggttcgagggggtgcgcaatga

SEQ ID NO: 365880 - DNA, 1461 bp, Pseudomonas aeruginosa
atgagcacaaacgataaagacaacgaccagaacaccgacctgccgcttgaggatgcggaagtgcataacgaccgcgaacacgacgacgatgccgacatgcacgacgaccctgatatgcgtgcggacggcaacggctcgcccgactatctggcgacaccaaaaagagggaagggggttcgccgcctgaacaacaaaccgttgttcgtggtcggtggcgtgatcctgctcgctgtggctggcgttagctacacgtttttccagcggcaggcggcgcaggttgcccccaaggccgaaggcgacgggccaccagtggcgacggtagcggccccccctgttcggccggacggcaacgactacgtgcccccggcaggtcagccgcagatgcccacggacacggcgcagccggtcgaaaccggcggccagccgaccgaagcccagcagaaggcggccccggccgcgccctctgaggccatgcaacgccggttgcggcagattcagcaggccgaagacaaacggctggccaagtgggacgaagccctgaacggtgacgcttcggtgcagggcttcacgaccaagggcggccagaacggcggcacccagcaggtggccatgcagcaagcaggcgggaaccgcgtcaacgccgacgagctgatgaaccgctacttggccgcgaacggtcaggccgcaggtatgggcggcatgggcggcggtatgccgggcttgggcggcggcggtatgggtggcaacagcatggcggccgaaaaccagcaggatcgcaagcaagcgttcctcgcaggtacgccagaagctgaggtttatctggctcgccagcgcaagggggccgtcgctccgtcgcaggaaatcaaagccggttgggttatccccggcgtgatgatttccggtatcaactccgatctgccgggccaaatcatcgggcaggtgcgcgaagcggtgtacgacagcgcgaccagcacgcaatgcctgatcccgccgggttcgcgtttggttggcacctacgacagcggcgtaaccctcggccagcagcgggcgctcgcggtctggcggcgcatcatctacccggatggttcttcgatctcgattgacaacatgccgggcgctgatgtgggcggctatgctgggttcaatgacaaggtgaacaaccattatctgcgcatcttcggcagtggcttgctgctttcggtcttctccgcaggcatccagctttcgcagccgcaggccagcaacggcgagaactacagcagctcgcaaatcatcgccgggtcgctgggtcagcagatggggcagattggtatgcagatggcccaacgcaacatgaacattcagccgacgctcgaaatccgtccgggctacgagttcaacatcatggtgacgaaggacattatcctgccgacgtgggaaggccacccgatggccggaagcaccggcaagggctgcaattga

SEQ ID NO: 365881 - DNA, 471 bp, Pseudomonas aeruginosa
atggcaagcacccctaacagcctgaacccgaccgggccagcgccgaagatgatgccggaaggctcgcgcaaggtctgcgtcctgaacggtagtcgccagctcgaccaggtggtgaaaggcgagtggatgactatcaaggttctgccggaaaacggactgcccaagggcatctaccaactggccgaagccaccaagccggacaccggcaaggatggcaaggaatccgcctacaccgggcaggttctgcacgtcgatagcaaggcggtctaccagctttccggcaagggcattgtcgagcattcgcgctcggcctttgccgatctggaagccaagggcgaccagatcgttgccggtcgcacctacacggtcggctatgtgaacgggaagggcaccgcccggcccggccaagccgccagtctggcgcaacagcagcagcgcagcgcctcgaagggcggcggcatttccctttaa

SEQ ID NO: 365882 - DNA, 249 bp, Pseudomonas aeruginosa
atgaactacaccgccctttactcgaccatctaccgcgtgcggaaccttacccgcaccgtcgccaaaatcctcgcttgggcgctcggtctacagctcgccatcctctacggactggccaccgtcgccgacgcgccgctgatgcagcttgcaggccccggccttcgcttcgcggccgttctggccgtggtgatcttcgccccgcgagtcttcgacgccgcgctacgccgcatcgccacccgccgggcctga

SEQ ID NO: 365883 - DNA, 630 bp, Pseudomonas aeruginosa
atgcgtgatcctaacgaccccggcacgatggacatagggatgaccaccctaatcggttatgcccgtgtctcgaccgctgaccagtcgcttgatatgcagatcgaggccttggaaaaggccggttgccatcaggtgttcaccgacgtggccagcggggccaaggcggcccggccgggcctagaaaaagccctcgcatacctgcgcgaaggcgatacgcttgtagtgtggaagatcgaccggcttggccgctcgcttggccatttggtgcaaaccgcgcttgagctgcgcgagcgcggcgtagggttccgttcgctgaccgacgcgggaattgacacggagacccgaaccggcaaactgatgtttaacctgttcgccacgcttgccgagttcgagcgtgacctgatacgggaacgaaccaaggccgggttggccaccgcagcggcccgaggccgccacggcgggcgcaggccggtagtaacaccggccaagctggaaagagcgcgtaagctgatggccgacaaggggctgaccgtccgcgaggcggccgccgctgtcaaagtcggcaagactgccttgtatgaggctttgaaggacgccggcgacggcgaccgcacggagggcgacgaatag

SEQ ID NO: 365884 - DNA, 615 bp, Pseudomonas aeruginosa
atgttgttacaccttgtaccccgcctgttcgcgtgccgtgtcaacgagccggaatgcgccctgatcgactttcattgtcccgcgctcgggctgaagctgcgcaacggcatcgagctggtcgcccggcgaccgtacccgaacaagcactatctggtggcttgccgcaaagttgggcaaaaggccatgaacggctttctggtcgagacgaccgagcgcgtgcgcgagttcacgacgctgacccgctgggctgtcggagctgatcgcatcgtcaaccatcaagtgcagtatttcgtgctcgatgacgagctggacgccatcaccgactgcatggtgctctggtctgcaatgtcgccgagtctcggcggtttttcccgacgctggcccaccgtggccaacgactggacaccggccgccgcacagccgcgcatggaactggtcagccgcgaccgcgctggccattacgccgaccgcctcgatgacgcaggccgcgtgatcgagcgggccgaagtgtttcagttgcataccgtcgagcgtgagcgcgttctgtatcgcagcaattcatccatttatgaccgcatcccgaccgccgatatggcgttccgggccaccatctaa

SEQ ID NO: 365885 - DNA, 432 bp, Pseudomonas aeruginosa
atgaacgaccgcacccggcttggcttttttgtggggattccgcttctcttggccgctgctggaatcgggcttttgggcgcactctacggcagcccttccgaccgcataaaagcgcgggccgagcttagtcgcgcagtggccgaagacctgcgagcggcctacagctacaacgcctttatccggcaggcggccgccaatgcgccggatgccatgagcaacaccatcgcgggcgcatgggagaactgcgccctgatcggctttaagtcgataggtggccagcaggtgccggagtacccgacgcaacacgaactagacgtgtgcgaggcctcggctgtgcaactggccaccagtcgcggccacgacgccgcagcatcgagccaatacgcccaacgactccgcgctgccagcgcggcggtgcgggctgctaactaa

SEQ ID NO: 365886 - DNA, 390 bp, Pseudomonas aeruginosa
atggtcaattcgaatagcaagacggtctgcgaattgtcgcagcggttcttcttcgaggctgcccatacgttgaatcgtggcatagagactgagagtagccggcgcatccatgggcatacctatgaagcggaggtcaccgtcgcaggtcaaccagatgccaccaccggcatgctaattgacctgagctacctacgaagtgagattgcccgtgttcgcgagattctcgatcaccgactacttgacgaggtgcaggatctggggccggccactatcgaaaacctgtgtgcttttatccgtaagcagctcgaagattcagtgcctagcctatgcgccgtgatggtcgagcgtcgcctcagcggtgaccgctgcgtgttacgctggacgcggtag

SEQ ID NO: 365887 - DNA, 4434 bp, Pseudomonas aeruginosa
atggaaatatccctggatcgtttgtgtaccgccctcgatcgcctggaggagttagagaccaacttgttggcttggggggacaccggtggcttcttcaccgaagacgagatacttgcgacactcgaagaggtgcttcccgaagatgatccctatgacgttctgctcggactctgcgatcatgcaatggtgatcgaggctcctcaccccgagggattgccgaagcgctacaggacgcgaatgggagaggctgtgcatctgtaccgccatcttcgccagtggttcttaaacaaaccggtcgaccaggcccgtacgctagtttccgattttcgtttcgttcggaggccgcgtagttacccctgccgcgatcagagtttgcagaaactgctagatggcttgggcgaggacgcttctgcgcgattccacctgccaatccgcgctctactgggaaaccaggaaaacctgcttctggccggctttcaggtgcgtgctactactcgagtcctgcaggcctctaaggatcggtccatccatgctgccggcagcatagtctgtgccggcactggtagcggcaagaccttggctttctatttaccagccttagctgccttatgcagtcaattggctgaggatgcttcctcgcgagtacgcattctggcgatctacccgcggcgtgaactgctgaaagatcagttcatggagacttggagccaatgccgaaaattggacgaattggtcaagtcgcagtcaggccgaaagatttccattggggcattttttggcgacacgctggagaacaccagtactgcccatgaggccgcaaaaaggttcagcggcaatttgccgttcgacttgttgcgttgcccaacgaaggattgctccggaaaaatggaatggcgtctggagggttctgtcgcgcaacgcgaagaactgcactgcagtcgctgtgatcattatgtacctcatgatgaggttcgattgactcggcggtctctggctgctgcgccaccggatatcctcttcacgacgactgaaatgctgaatcagcatcttgggaactatgcattccaccacttattcggggtaggtaactgcgcggggcccacactggtgctgctggatgaggtgcatacttatgaaggcagtagcggagcgcagacggcctacctgctacggcgttggatgaagcgaagtgaatgccggccacacttcgttggactttcggctactttgagcgacgcacctgcttttttttccgagttaatcggggcgaaagaaggtcatgtggagttgatcgagcctcttgctgatgagatggtggatgagggcgccgagtatctcatgttgttgcgcggggatccggtttctcaaactgcattgctttccaccaccattcaggccgccatgttgactcggcgtatcctagataatcgtgacaagagatcgcgtggaacatggggaagtaaaactttcgtctttaccgatgatctggatgtcaacaatcgaatctatcaccaactggctgacgctgaaggttggaaaactaggggcgcgcagttggtgccggatcatgaaccgctggcaagcttgaggggtagtggtcgctatctggattatccaagccgccttaaacgtattcagttaggccaagactggcaaataggcatggatatcgggcattcgctcgacaatgatgatcgcactcgggtaggccggacctctagtcaggactctggcgttgaccctaactccgagatagtggtggctactgcttcgctggaggttggctttaacgatccatcggttggggcggttttgcagcataaggcgccgcgaagcgttgcgtcctatctgcaacgcaagggacgtgctgggcgcccccgcgggatgcgcccatggacccttgttgtgctttctgagttcggtcgagatcgagttgctttccagcgttacgaggagttgcttacccctgaaatcaagcgacagaggttgccccttcagaatgggcatatccagaagatgcagggggcaatggcgacgctggattggctagcgatgctgctgaaggaggggtcggtttggagaatcctgaagtatcccaaaagatcgtctgtacaactgacgaccttactctcggctgttgagcaagtactgcaacctggtggaatgcaggaccgatatgttggttatttgaaggacgcgttgcgcatagataagacagccttgcagcaagtgctgtgggcttcaccgcgatcattgatgttgtcttttttgccgacgcttcggcggcaattgaaaacgctgtggtgcgagtatggagagaagtggaaagaattaccccgaggccgctctccgatgccggctttcattccagaggcaatgttcgccgaattaaatattcctaacctattcgtgtctttgcagcgtggggagggtagtgatgcaaaatgggaaggactgccattttatcaggctttgcgcgagttctcccccggcaggatttccaagcgttttgctatcaagtatgacttggctgactggttgatcccggagggatttcagccgattgccgataccctacaacaggttgactttgagattgcggaagcattcggagagtacctacagaacgaaggggcggtggccgcgggatccgatgcagaattgtctgtggtgcgcccacgggaaatacatacccgcgctctacgcaaggcgagtgggttgacggaaaagagtaattcccgcctgcgttgggactcggaattcatcttggccgaacatacatctgttcagaagccaccgatgggaagttgggggaagcacctgattgatgtggcgttttgcctccaccaacagatgacgccgcttgaggtggtgcgctatagcaaaggagctgacgctacgctgcgttttcgcagcggccaaatcgcgcgggtgaattttacatggaaaagccaaggtgagccgatagccgtaggtgcgcgtcagtgggtggatggtatgcgtcttcgttttcgagtcggcgatgaaacgattgccggtctcctggggactcctgccatatcggccgcgttgcgtccgttgttgttccggcggcgggtcgagcaactaggtcgtttcgacggtgacccctttacagccaattgggtatgcgagtgcttccttgccgctttggccgtcgagttgaaagacgtagactcggccgagccatcggtgatgcatggggccttgtgccgtctactttccgacgagggcaaggagcgcttgctcgctattccgcaaagccttttccaactcgatgagcaagaagaaagttccagagagcaggaattgcagggcgacctgcgcggactcctggagtgctctgaagtgcaagcccaactggcagattgtgccgagcctctgtggcgggatattcatgccttgccagatatcgtggaatggacaaaagaactgctggccaatacgttggcagcagcaacccagcaaacactatgcaccttgcttggggacgttaacgagcgctcggtgaatgctgatgcgctttggcaagacggtgacctggaagtatggctcagcgaggtcgaagcgggtggttgtggaattattagtcgcttggccgaagactacttcgatgatcctttgcgatttctgaatgtattggcgagcagtttgcgccctggcgactacgagcagattgacttcgatctctacgaattgctggagaaagcttctgttgatgaggaggtcgagaaggttctcacggatgtccgtgcagctgccgatcataagcagcgtcgcaagtccggtgcagccatgcattccagtctcttgcgggcggggtttgcacttagtcacagctttctcagtgtattgcactctcgcatactcaagccgagcagcagtcggcaaacggatgctgaactgcttacattgctcaagcaatggcgagaactcgaggtcaggagtggcattgagtggccccttaatatcgtttcccacacgctggcggcgcagaagatgagagcgaatgcgacggtctctgatttatttcgtgctcattgtgttaatcaggggttattgtggccgcgaggtaacacaattcgccagtcggaattgaatcgttacaatccttttagtaatggtgatgcggccacggaacgaatgctgggcgctggtttgttcgccgggcgtagacctcgggtagtgtattcaaagtcctatttgagtgaattgcacaaactcttgcgagaagagggtggcgttgaattggtgattacccgcgaccagcaggggggagtgtccaaagttattaccgaggtgcagttgtatccggtcgactatctgggtttgttactttacccaagagtgggcgaactacagagagaagacggttccctggtgctggtcatagagttggcggaggctttgcagtga

SEQ ID NO: 365888 - DNA, 2184 bp, Pseudomonas aeruginosa
atgagtatcccaccagattggcttcggaattttttcgctgaagacaatcaaatcgatcttgatcgagtgctttctctgactaacccgtacgatccaaagtttcaggatctactcaagccactcgtgtcttcagcaatcgagggaaaatggccgttgctgctccccgttagtcgtggcggcgaactttatttctatggtgctgagcgcgacaggcgatctttggaggagttgcgacagatactgcaagcggtgctgggagccgcggatacgtatccagagtttccgttgattaagatagcccgggaggaaatcgaaaagagtcttttacagcaggcacctgcagggcttctcaaagttgatttgttgcgacagtcgcaaagtgacttcgctttacgtaaacgtgtgtttcaagcgttggcatcggtgctggatctctaccagcaacggccgccagtaaccgctgtggtgaagcggccagttgggcggatccttcgggatttcttcgccgcttgtcagtccagggatggttcgaaagcatcgcacttttttgacgaactcaaaacgacaggcaatttcagtcagcgaaacttgatctctctggagttgcaggcctgggaggctgagcgtcgttggtcggacattctaggacatccccgactagtggatatgctgggtggaagaatgcctgcccaactggttcgggttctattgcgcgccataggtaatttaggcggtgatcgcttgctggagccaggagcgtttggcgaggtccccctagagcatatacgtcttctatgtcagccgatcagccctctttttgccaatcggcctcccctggagacccgcgaatgctttgcatccgactggaaactctgggcgataggcgccggcgcattgggcttctccgatggccttgatgatcttcctgacttcatcgatccggcctggatttgcggattgcacgactgggcagatttgccgactaagaccgcggtagcgccaatcatagcgccaatcacttcgctgcaaaaagtgggatcacctcagaccttcaacgatctgcgactggtgctcgaaggctcgctatctgcctccatggaagagttgcgcgagatctgggtcgcagtgcaggaagcacccgaagagttaaaaaatgaactctacgtttatccacgcctgcagtcggtgtggcaaggcatatgccagttcttcgatggtagtagggaacttggttggaagggatggctagaacgcctgaaggaggcttctactgacccagatgccctgattcatgagttgcaggaggagagccagagttggtcaatagagtccttctcggaggctcagttgagtcagtgtctgcatggcgatgccagtacttccctattgttgcgagacagcttgccgctactgcttgactggctggatcgtcgtcaaatcctctgctccgggcacttctggctggaatggctggagttgctggcgctcgatgatttggttaatccgtcggacgtacaattggcagggcagattgtgcagcgctttttgtcccgccctagccaaatcggcgaccgtgcgcgcctaggggaatccttggagttgttatgggagaagggcggttcggtcagtgcttattcggaaatgctcgagattgtcgagttgctcctggacgagactcaacctgggcagcaagagttgcaaaagctctggttagtacttcaaggattcgccttgagtcgctggactcgtctcgagttagcgcagcgttttctcaccaaaagtctcgccagagagatttttggtgagagcaatgaagcgagttatccgccactaactgctgaaggagacgatgctgatcttgacgtcaaaacaagaaagctatcgggtaggctgctggctatctacagccttactgaaggggccgcgcggcgggctaaaacggtgctggaaggcatgttcgaagggctccgagtggaactcaatcatgatcacactgcgacccctgctctgcagaatttagccaaaaaagctaattacttcttgtttgttgccggtagcgcgaagcatcaagccttctatcccgtgagtcggataagacaggatttgatctatcccttaggaaaaggcgcatcgagcatcatcgaagcattctgcaaaagctgcgtaaattctacttcggagtga

SEQ ID NO: 365889 - DNA, 204 bp, Pseudomonas aeruginosa; identical to SEQ ID NO: 18022

SEQ ID NO: 365890 - DNA, 789 bp, Pseudomonas aeruginosa
atgaacagtatctttcgcgcaaagctgcgtaatggcgttctttcggcggccgtgacggccagcgttgcccttggtgccgggttctttgcagctccgacaccggcttacgctatctactgctccaactgctcgacgttctatcagcagatgttcgagtacgccgaagcggtgaataccaccctgaacactgcgcaacagctacagacgcagattcagcagtatcaaaacatggttacgcagggcttgagcctgcccaattccatgttcggcagcatcgcggccgacctgcaaagcgttgccagcatctacacgaagtcgcaggccttgggccgccaaatccagaacatggattcgcagttcaacatgcagtttcccggctttcagtcgtacctgaattcggccgcggcctcggccaaggctccggcatcgagcacgatgcccgaccgttacgaaaagtggtcggaacagggccgcgacaacgtgaaagcggcgatggaggcggcgaacctcaataccagcactttcgagtctgaggacgcccagctttcccggatggtggcacgctcgcagtcggccgctggccggatgcaggcgattcaggcgggcaatgaaattgcctcgcagaacgtgcagcaactgcaaaagctgcgcgacctgatcgccacgcaaatcaacatgcagggcaactacatggcgcaagaacaggatcgcatccagctcgatgacgctctgcgtcagcagcgccgtagcggcaccatcacacaaaccggcagcaacaaggggtattaa

SEQ ID NO: 365891 - DNA, 2508 bp, Pseudomonas aeruginosa
atgcttgcgttagcacccttccgtagcaaggccgctggcttgcccgatctgctcaactatgccgccctcgttgatgagggcgttgtattgggcaaagacggctcgctgatggctggtttcttcttccgtggtgacgacgcagcatccgccaccacgtcagaacgcaactacctgaccgcgttggtcaaccagtacctggcccggttcggttcgggctgggctgtatggactgacgcttcgcgcttggcctcgccgggctatccagcccctgagcagtcgcactttcctgaaccgattaccgccttgattgacgcagagcgtcgggcggccttcgtcaaggaaaatacgctgtttgaaagcgagtacgcgctagtcctgcaatacctgccgccgacgcggcgggattccaagctgggcgaactggtctacgacgatgacggcgtagacgacagcaacccggccgaccggctgttgctggacttcaagaaaaagctcgatgacctgcaagacggcctcggcgatctgatgcacatgcgccgcatgggcaccatcacggtcggcgagggcgacgatgcctaccagagcgatgagctgtgcaattacctgcactacgtgctgaccaatgagcctatcgcgctgcgcatccctgattgcccgatgtatctggatgcgtggctgggctatcccgagctgtggccgggcgacacgccgaagctgggcaacaagttcatttcgtgcgtggctatcgaaggcttccccggcaactccttccccggcatcctcgacatgctcgacggcctgccaatgtcctatcggtggtcgtcgcggttcatcttccttgaacagcacgaagccgtcgccgcgctcaaccgctaccgcttgaagtggcaacagaagattcgcggattctggtcgcaagtcttcaagtcgcagaagggcatgattaacaccgacgccctgaaaatggcgcaggaaacggaggtggccatcaacgacgccaagtcgggattggtcgcttacggctactacacgccggtcgtggtgctgatgcacgaagaccgcaatttcctgtccgaacaggcccgctacgtcaagcgcgagcttgaacgcaagggcttcgcggcccgtatcgagacggtcaacgcgctggaagcgtggcttggctcgctgcccggccagacctacccgaacgtgcgccgtcctttggtgcataccctcaacctcgccgatctgctgccactggccagcgtctggcccggcctgcgcgaaaacccgtgcgatctgtacccggccgggtcgccgccgctcatgcacacggtaacgaccggcgcaacgccgtttcgtctcaacctgcacgtcggcgacgttggccataccctgattttcggcccgaccggggccggtaaatcgaccttgctggccaccctgcaagcgcagttccggcgctatcgcagccgtcgccgccgcgatggcagcacggcaccggcaaccgtgacggcgttcgacaaggggcgttcgctgtatgcgctgtgcaaggcgactggcggcgttcactacgacattggcaacgatgaggccgacaccccggcgctgacgccgttggtggacattgatagcgagtcagaagccctgtgggccgaagaatggattgcgacttgctacgagttgcaggccaaaaagccgcctacgccgcagcaaaaggccgagattcaccgggccatgaacctgctgcgcgaggcaccccgcgagttccgttcgctcaccgattacgtcacgacggtacaggatgccgaagtgcgggacgcgctgacgcactacaccatttccgggtcgatgggccacctgctcgacggcaaggaagacggtctgaaattcagcaattacacggtgttcgagattgacgacctcatgaaaatgggcgacgcgaacgccattccggtgctgctctacctgttccgccggttcgagcgttccttgaatggccagcccgccatgctgtcgcttgatgaggcgtgggtgatgctgggccatccggtgttccgcgagaagctgcgcgaatggctcaaagagctgcgtaagaaaaactgcctcgtcatcatggctacgcaaagcctctcggatgcggtcaagtccgggctgctcgatgtgctgctggaacagtgcccgacgaagatccttttgccgaacaaggaagccgaccttcatggcaccaaagagacacccggcccggccgacctctacgccatgttcggcctgaacagcaaggaaatcggcatcctgaaaaatgggcagtacaagcggcagtattactacaagtcgccgctcggccgtcgcgtgttcgagctgggcttggggcctcttaccaaggcctttgtagcggtatccgacaaggaagacttggcggaggtgcggaacctgatcgccgatcatggcgatgactggccgcttttttggttgcaacacaaaggagttgattatgaacagtatctttcgcgcaaagctgcgtaa

SEQ ID NO: 365892 - DNA, 315 bp, Pseudomonas aeruginosa; identical to SEQ ID NO: 18025

SEQ ID NO: 365893 - DNA, 492 bp, Pseudomonas aeruginosa
atgatcgcaaatgctctgtctgcttcgccaatggcgtcgaaggcttctcccttcatgtccaaagcgcgtgcggtgctgaccaatccctacttctggctgatggccgctctgttcttggtgcttctctttggtgccatcgaaccggcgcacgcggctgacgcaaccgaaggcggcggcgcaggcctgccgtgggaaggcccgcttaccaagctcaagcagtcaatcagcgggccggtggccttcgtgatcgcgctgctcggcatcatcgcgtgcggcgctacgctgatctggggcggtgaagtctccgagttcacccgccgcatcatctacgtcgttctggtggtctgcatcatcgtcttcgctaacacgctgctgactggtgcgctgttctctggcgctgtggtgccgcacgacgctgcaatttctgccgctgatgtggccgcctacgcgaaggctcacgccgcagccctgaccggggtagggggtcgctga

SEQ ID NO: 365894 - DNA, 984 bp, Pseudomonas aeruginosa; identical to SEQ ID NO: 18052

SEQ ID NO: 365895 - DNA, 261 bp, Pseudomonas aeruginosa; identical to SEQ ID NO: 18051

SEQ ID NO: 365896 - DNA, 1242 bp, Pseudomonas aeruginosa
atgaacgggcctaaaccaattagtgacatcgtagggggcaatctgctggccagactggagcagacgcaccagaggtatcgtgaaaaagtggaggccgcagccctgcccggcgagacgttcgagcaagccgagaagcgcctacgtgaagaaggcgagcgcgaacagaggcggaaaagcaacgaggttgcccagctacaagccgaggcaactatggccgcacagttgcgcgatagaagccctatcccgcgaagcccaatccctaacacatcgtcccccagtggacagagcaaacggagcaatcaagcctcaatgcgtcgccctcccgagagcgaccgacagcccgactttttcgtgccgggtctgtacgacgtagccaccaaggacaaccgtagcctgatggacgttgcgttgttccgcctgtcaaagcgcgacaagcgagcaggcgaagtgatccgctacgacctgccggacggcttcgttgaagtgaaggccgggccggatggcatggcgtcgatatgggactacgacattgtgctgatgctcatctcacacctaaccgagtcgatgaatcttttcaatgccgggcgtggtgccatgccgggcaagaaattcgtcccgcacgcctcagatattgccaagttctgccgtcgtggcgacggcggccgtcaggccgacgagctggaagccgcgcttgaccgcctgctaggaacgaccatcaagagtgtgcgcgagactccatcacgcaacggcaagcgcgttgtgcgtgagacggaagcggaaagcctcattggcccctaccgcgtcgtgtcccgcaccgataccggcaaggtggccagcattgagattgaggcaccaaactggatttaccgggaagtgaccggcggcagacagccggacgtgctgacagttcacccggactacttcctgatcgaaccgggccttggccgtttcgtgtaccgcctcgctcgccgggctgctggaaagagcacggccaagtgggcattcaagaccatctacgagcgcagcggtagcaccggcacattcaaagagttctgccgcatgatgcgccgcatgatcgacgccaacgacctgcccgagtacgacttgcgcgaggaagacggtcagagcggcccgctgctacttatcacgcgccgcaccgacgcgatggagctggccgccaaggacgaacccgaggcagacggcgacgagcaggagaacggcgagaatgcggccggtgtgtaa

SEQ ID NO: 365897 - DNA, 963 bp, Pseudomonas aeruginosa
atggcggttttccagggcgccgtgcgggttttcgcatggcagcgcatgcggagcgtcgtgcagttgcgcctgccagtagtcgagttcgtccaggcgcgcgccggcctgttcgtgcaggtgccggctccaggcctggtaggaactgctacgcggcccgagatcggcgtcgaggtcggcatagagacgctgcaggtcttccagcaggatacgccaggacaccccgtccaccgccaggtggtggatgaccagcagcaggcgctggctgccgtcggccatgtccaccagcagcgcacgcagcagcggcccctgttcgaggtcgaggctgcgctgggcttcttcgcaaagcgccagcaacgcctcctcggaccccgcctgccggcgccacagcggctcgccggcctgctcggcgtaggcctggtgccagacgccgcgctcttcgcggaaacgcaggcgcagggcatcgtgctgcgcctgcaggcgttccagggcacgccccagccggtcgccgtcgagcggctggcgcgcctgcaacaagagagactggttccagtgctggcggttgggaatcgactgctcgaagaaccagcgctgtaccggcgccagcgccacctcgccgcttgccggaccctgttccgccgtcgccgcacccgccttggccgccagggccaggctgcggatgctctggtgctggaacaggtcgcgcgggctcagttgcaatccggcctggcgcgcacggctgactacctggatcgagacgatcgagtcgccgccgaggctgaagaagttgtcgtccaggccgacccgctcgacgcccagcaggtcctgccagatttccgccagggttcgctccactgcgttgcgcggtgcgctgtagcctgcctgcgccacgcttacttcaggcgccggcaacgccttgcgatccagcttgccgttcggactcagcggcatccgctccagcgctag

SEQ ID NO: 365898 - DNA, 2463 bp, Pseudomonas aeruginosa
gtgccgctccacctcatccgccagatgttgcgcgctccactgtccggcgtcgccgagcaggacccgggctcctgccagcaggggtacgaagagttgttcggcagcggcatcgaaactgatcgaggcgaactgcaattggcagtcgccagggccgacgccgtaggtccgtgctgccgcctggcagtgcgcgacgagcgccgcctggctgaccgccactccttttggctggccggtcgagccggacgtatagatcacgtaggccagcgtctcgccagctacctccggcagcggccgcgtatctgcactcgccggccaggtggcggtctccagcggcagccgctcgacctctgccgggcagggcagccgctccgccagggtttcctggcagatcagccagcgcgcgccgctgtcgcgcaacatgtacgccaggcgctccgcggggtagttcggatccagcggcaggtagccggcaccggccttgaggatgcccagcaggccgacgaccaggtcgaaggagcgctcggcagcgatcgccaccaacgcttccgcggccacgccgcgcgcccgcaggccacgcgccagacgctcggcgcgcatatccagttcggcatagctgagatgctcgtcgccacataccagcgcgatcgcctcaggcgccgacgctgcctgatgcgcgaaggccgccgcgacgccgccccgcggcagcgcctcgagcggtgcctgccaatcccgcagcgcctcctggcgttccccggcgtcgagcagggccagctcgcccagcgctgcctggggggtctcggccatccgctgcagcagatgcagcagatgacggtccagttcggcgatgtccgctgcgtcgaaatcgcgtcgcgcatagacgtactgcaggctcaggcgctcacccagggtgacacccagcgtcagcgggtagttggtctgctcgtggttgcttggcgtggagaactccagatcggcgggagcctggcgcagagcctcggccacggggaagttctcgaacaccaggatgctatcgaacagagcctcgccgccatgcccggcccagcgctggatgtcgtacagaggcgtatgctcgtgttcgcgcagcgccaggttgagcgcctgcatcccctgcaggtattccgcgacgctctgctgtggctgcggcgcggcgatcaccggcagggtattgataaacagaccgatctgcgcctcgatgcctggcagttccgccggccgtccggccacggtggcgccgaaggctaccgtctcctgcccgcagtgccgctgcaggagcagcgcccaggccgcctgcaccaaggtgttgagcgtgaccttctgaccttgggcgaaggacgccagttggcgggtcgtctgcggatccagttcgcgcagatgctcaccctggccaggctgctccgtcctcgcctggcgcgccaggcgtgtcggcatctccagggaggccagccgatcgcgccagaagaactcggttgccatcgcatcgcggctctgcaaccaaccgatgtagtcgcggtaacgcccaacggtagcggctacctcctgccccgcatagcgctgcagtacctcggcgagcagttgggcgttgctccagccatccatcaggatgtggtgataggtatagatgaggtgcatccgcccattcgccagcggcaccaacaccaagcgttgcaacggcgccctggccgggtcgaaaccggcttcgcgctcagcctctgcctgccgttgcggatcactgcctggcggggccagccgcagctccagcgtcgcctgctcgaataccacctgcaacggctgaggccagccgtccttccagaggaatccgctgcgcaggatctcatgggcatcgagggtggcctgccaggctacgcggaagcgatccgggtccaatccgccgatatccatgcgcaactggttgacatagtcgccttccgttccatgaagactgtgaaacagcatgccctgctgcatcggcgacaacggatagatgtcccgcaccgaatcaggatccaaggacaattcatcgagctgcgtctgggaaagcccggccagcgggaagtccgacggcgtcacaccccgatgccgcgggtcgagacaatgctcgatcagcgcgtgcagctcccgcgcgtagtcatcgaccaggcgctggacggtcgcctcggcgaacatttcccggctgaagctccagtgcaggctcagctcgccgccgtagacctggccttcgatgctcaaccagttggccagcggggcgcacggatcctgggcggcgccggcgctttccgtggccggtaccagcagcgccgccccatcgaactggcggtcgaaccggcccaggtaattgaaggtgatccgcggctgcggcagtgcggccaggcgggtcgcagcctcctctccagccaggtagcgcagcaggccgtagccgacgcccttgtccggcacgccgcgtag

SEQ ID NO: 365899 - DNA, 384 bp, Pseudomonas aeruginosa; identical to SEQ ID NO: 304918

SEQ ID NO: 365900 - DNA, 756 bp, Pseudomonas aeruginosa
atgaacgacgtaaccactccggccctgaacaccctcgcccgtcaggttcatttcacgctgcaaggcaagggcggcgtcggcaagtcctttatctcgtccctgctcgtccagtacctcggcggcaagggcctgccggtcacggccgtggacaccgatccggtcaatgccaccctcgccggttacaaggcgtttaacacccagcgccttgagctgatggaaaacggctcgctgatcgaacgtaatttcgaccgcctcattgagcaggtagtcgaggaagacaccaatttcgtgatcgacaacggcgcggcgtcgttcattccgctgtcctactacatcgccgaaaacgacgccatcaacctgattggcgagaacggcaagcaggtcatcattcacacggtcatcaccggcggccaagccctgcgcgacaccctcggcggcttcgcctctctggccgagcagatgccgggcaatgccgagctggtcgtctggctcaatgagttcttcggcgacattgaggccgaaggcaagaccttcgaggaaatgaaggtctaccagaacaacaaggatcgcgtgcgcggcatcgtgcgtatcgctcgccagaccggcagcacgttcggcgaggacgtgaaactgatgctcgatagcaaactgaccttcgatgaaatcaagcagtcgccagacttcggcctcatgtccaagtcgcgtctctcgaaggtcaaaacggcgatcttcgagcagttggccaccatcatctga

SEQ ID NO: 365901 - DNA, 456 bp, Pseudomonas aeruginosa
atgattgactttgacgagatacggaaacaggtggcgatcaagcataacgtgctgatcggcaaggacgatccgatactggtcacggtcacggtcagcgatatggtcttgggccgctacctcgaactggtttccgaccagtacgacgaagccaacagggccttgaccgtgagcctgcaacagcaggtcgaacagtccaaggaaacggccgggaaggtgatcaccgacgcggccaactacgtcagcgaacaggtgcggcaggccgtgactgccgccctcgccgatgctggcaacgacgtgcggcggcagatagccaacgcgcaggccgcaagccgcgatgcggtggccagtggccgggatgcgcaggcggcgaagaccggcgcatacctggctgcggccttggccggggttgccgctctggtggccgtggcggccttggtggtcgttcttttgaaatga

SEQ ID NO: 365902 - DNA, 369 bp, Pseudomonas aeruginosa; identical to SEQ ID NO: 284558

SEQ ID NO: 365903 - DNA, 291 bp, Pseudomonas aeruginosa; identical to SEQ ID NO: 284559

SEQ ID NO: 365904 - DNA, 312 bp, Pseudomonas aeruginosa
atgaaagatcgagcacacgacacggctatggccgaagtgttccgcaacgaccccgcctacgcggtcgagctgctgaacagcatccttgaggatggcgagcaaggcgaactcttgattgccctgcgccagatggccgaggccttcggaggcgtgcggcaggtggccaagtcggccgagctgaaccctaatcagctttaccgcacgctgtcacagacgggcaacccggaggtgcgcagtctgaccgcgatccttcgcgctatgggcctgcgactggccatccagccgctgcaccctaccccggccgcccactga

SEQ ID NO: 365905 - DNA, 327 bp, Pseudomonas aeruginosa; identical to SEQ ID NO: 18048

SEQ ID NO: 365906 - DNA, 444 bp, Pseudomonas aeruginosa
atgcagatacgtgaacagggccgcaaaattcagtgcatccgcaccgtgtacgacaaggccattggccggggtcggcagacggtcattgccacactggcccgctatacgactgaaatgcccacgaccgggctggatgagctgacagaggccgaacgcgagacgctggccgaatggctggccaagcgccgggaagcctcgcagaagtcgcaggaggcctacacggccatgtctgcggatcggtggctggtcacgctggccaaggccatcagggaagggcaggaactgcgccccgaacaggcggccgcgatctggcacggtatgggggaggtcggcaaggccttgcgcaaggctggctacgcgaagcccaaggcggtcagaaagggcaagccagtcgatccggctgatcccaaggatcaaggggagggggcaccaaaggggaaatga

SEQ ID NO: 365907 - DNA, 156 bp, Pseudomonas aeruginosa
gtgcacgacagcagcgagaaggtcgtcggctatgacgtgaagtacatgctcgacggcaaggccgggcagatccgcatggagcgcgatccgggcagccagatcccggtcgacaagaatggccggctgatcctcagccagggcgaaacgctgcgctga

SEQ ID NO: 365908 - DNA, 2277 bp, Pseudomonas aeruginosa; identical to SEQ ID NO: 329331

SEQ ID NO: 365909 - DNA, 2277 bp, Pseudomonas aeruginosa
ttgaccgtacctactaataccagcgttgttgagtacgaaggcaatggcgttaccacggcattccctgtgccgttcaagttcccggccaatgatgaccttgtggttacgaaagtctataacgacgttgcaaatgtcttggtgctcggaactgattacacagtggtgggtgctggtgcgcagagtggcggagccgttatcgccactagcgctcctgaaaatgggtcgaccatcaacataacccgcgagcttgacactgttcaggaaacagaccttagaaaccagggtaggtacttcgcagagacgcacgaaagcgtattcgattatttgactatgcttattcagcaaggatttgctgttctggctagaaccctgaagcggccagtcggtaaagactattttgacgcggaaaatcgaagaatctcaagggtcgatgatcctgtagaggatggagatgctgctaacaaagtatggactcagcagtatgttgggtctttgatctctagcggcaccggaccgattaaccttgcttctaacgtcacctatttttctcctgaactggttccgcatgttctacaggatctttctggcggatcttcctctgatggcgcggcgctagtttctcgcgcaactgtcgctctcgactctgtttacaacctacagggcgcccggaagatttccaatcaactgatgcgcgttgccggctactacccaggcggatctgtatctggaaactcatctgccactggcggtggattgtttagatgggacgcggacaggccgaagtcccaacataatggcggcaccatcatcagcccaaccgttccatggaacggcctccaaagcactgtaggtgcatacctctctggttctggcgagactacacctggcgggaatggttgctgggttcgtgttgctgatgatgtcaagcttgttgactttggcggcgtgataagtgagtcgctcgactcatccgccgcgtttagtgcagcattgaaatattgcctggcgaccaataaggaactttaccttcccgaaggtgtagttcgcgtaaattctgctgccgtaataaatggagcgactacgcttttctcttcggtgaaaatcagaggtacattcaagacgagcggtgttgctgctgggtatgtcgtaagtcgagttggcagcttgatctatactaacggaaacagcgctcttgacatttcgttcaatgacttcaggaatgaaaatttcgatatccgtggcgtggcatttgtagatacatcattctatccagccggaacccctgtaaatccaaatcctgcaatcgttatcaggaagggtaatcctgacgcaagtagtaacaggtacataactggcaacgttcttgaggatgttgccttcgttagctatcaggacgctgttaaaaccattggggttgcaacagggttgcccacctataactacgttggtccaacttcgttgaatcgtgtgtatttctacaagtgcggcaccgctatgcatctacaggattgcacgtacaatcacctgttcctgaacgagtgcctactcttcgatctgtcgtcgcagtctattttcctgaccaagacggttagcggaactggcgggaacgtagatgtaacgttcagcaactgtgtattcgaatcaatttgggggattatgaatactgctaatggattgacgtcttccacgaagcgcaacaccgcagttttcaactcgtgcaatagagagttctgcggcctttatggaccgactggtggcggcggaaacttcgcaggaagcccgcttgggtatattggtcatactgatgtaatgatcaatggcaattgggagagaggccaggcatttggtgaaactgccttgccagcgattgattctggcgctgttattttcgcaagtaggtacgttgatgttctcatgaatggcggccaagttggttcgccagaatatgtcaacgttgttgactttagcggaacgattccagcatctggcagcctgacaaaaactttcaatgtgagcggttcgtttgtgttgaatgctgacgtcgcgtatgacgacgggtttggcgggcaccagaacgttgttgcgtacggcaacccgactggctcaaaggcgcgggacgtgacgggtacgatcatttctgctggcctgactgcaacctacggcgatggtccctctggcgcggcgttcacggtaacgttcaacaacggtaccgcgtcgccgatcaatgtgaagatccgagtcacgaacagggcgggtgctatcgttaccgtgtcgtga

SEQ ID NO: 365910 - DNA, 516 bp, Pseudomonas aeruginosa
ttggacttcaccgccaaggcgagtctggaaatactcgagaggagcctctccaagcatcttgttgtttgcagctatagcgcgaccaaggcgggccagattgttggcctgagcgactgttcctccattcttttggagttcagcagctttctggttcacatagatggcctgctgatcaataggcattccgttgaggaccttctgagtctcaacctcttgagaaaccaactcctgaaactctttctgtgcagaagtgccctgcacggaccgaccccactccttccacatttcatcgctagcaggtacgccgctagctatctgagaattgatcttgttaatcgtctgctgagctgcgttctcccggcgaagagcggccatctcggccttttgctgaagccggtctatcttgctttcaatcatgccgccaacgcgaaccaaatcatcagcagtaagagctccctggacctctctcagagttttctgtgctcgatatggatcatccgcagcctgacgctgtag

SEQ ID NO: 365911 - DNA, 1110 bp, Pseudomonas aeruginosa
gtgagcgttctttcgtcgcacctactgcgcgggtacaccatcgaggaccaagctttcacgctgacgcccaatggcgttctgtggatggtccgtaacgatggtgtattgctcggtttcacgttcatgccagagcagcaggttttcgcctggcatcgtcacgacaccgatggtgaggtcgaatccgtagcgactgtcccagagggcgacgaagatatcctctacatgatcatcaagcgcacgatcaacgggtctaccaagcgttacatcgagcgcatgcagtcacgccagttgaacaagttcgaaagcggcgattacgtctatgaccgctcgttcttcgtcgactgcggcctgacctacgacgggcgcggcaccatgagcgctacgttaactggtgggactgactggaaatacccgaaccctttgacccttgaggcgctgtcggctccgttcaaccccgggcatgtcgggcgctacctaatcctttatggcggtggagacgaggacaatatcggcgatgtgctgaccgtcaagattctctcctatgactcccctggcgtcgtttccgtggaacctcagactatcgtccctgagtcattgcgcgggatatcggcaacgcgttggggcttcgccgcaaccaccatcagtgggcttggccatcttgagggaaagacggtttcgattctcgcagacggaaacgtcgcgcctcaggcggttgtctctggtggttccatcacgctggatggtccttcacttgttgtgcatatcggcctcccgatcactgcggagatagagacgctagatatcaccatgcagaaccagcaggctttcctcggcaacaagaagcgcatcaaccagcttgtagtgctgctcgagcaaagtcgcggcttttgggcaggcgctcggagtgatcgtttgagggccgcaagtggctgggaatacaagcagcgtgcgacagagaactacggcgagcctatcgaactgaagacaggcaaggcggagatcagtatcagcacagactggacggacgatggccgcatcttcatccgccaaagcgacccgctgcccattacgatcttgggagttcttccgaatgtccaggccgggggctga

SEQ ID NO: 365912 - DNA, 291 bp, Pseudomonas aeruginosa
atgcctggtaacggcatgcgtgctgatcatccatgggacgccgattcggtcgtcgtaccgaatgcatccgaagatcacgacaggttctccgcggctaaccagaacaaatgcctcttcgctctgttccagggcgtagcgcaattcctgctctacatcggcgccacgaatagcctcgaattcaagtcgatccgcctcgcggacattggccacgacgcgagcaataatctgctcgtctacagccctaagctcagcccccggcctggacattcggaagaactcccaagatcgtaa

SEQ ID NO: 365913 - DNA, 2727 bp, Pseudomonas aeruginosa; identical to SEQ ID NO: 346669

SEQ ID NO: 365914 - DNA, 804 bp, Pseudomonas aeruginosa
ttgctgccggcattccaggcgcgggccgagcagacgtacgcccatgcggtcggcgcgggtatccacctgccagtcgccgttgaacgcatcgaacaggctcatggccgggaagtcgccgatctgcgcgccgaggatcagctccaggcgcgcttcgccggtgcagtccatgatccgttcgctgggcaggggcagcgcgcgcggtcgcgcgccatcggccagccagccgaggctgtcgcctgcggccagggccttgccgtcggcgcgggggccgcccaggccttcgcgggccaccgtggccaggctgcccaactggcgctcgccggcgaagccgccgggcgccgccaggtaggcgcgggcgccctggcgcgggtgggcgaaggccaggcgctggccgtcgcgcacggcgaacgcgccccaggccggcagcggctggccatcgagggtcgcgccgagatcgccgccggccagggccagccagccgtcggcgtggcattcggcgacgaaaccgccgagggcgatctcgatcaccgcggcgtccaggggattgcccagcagccagttggcccagcccatggacagccagtcgagggcgccgccctgggtcacgccgagatggcggcagccgaagcggccgcgatcctgcaactggaccagcggggtgctctggcacacccgcagtccgccgtggatggagtcgttcatgcctggacctccaggggcgtgtcgtcgccgccgaggcggacgaattcggcgtgtccgatgggttcgaagcgcacccggtcgccggcgcgcagcaggctgtag

SEQ ID NO: 365915 - DNA, 780 bp, Pseudomonas aeruginosa
atgacgccaggtacgctggaagccttcatcgaccacctttcaattcccaaatcctgcgaattgaacaagcccgttttcaagaagctttttcttgaaatcggcatcctcgatatcgccgataaagcggccctgaaagacgatgttgagaagatacgctggctctacaccctgaagcccgccacgatcaacatcgcagcccatgttgatagcgaacgcgatttctctgaagtcgccattctccaggtagagctcaccgcgaccaagcgcctaaagcgcatcgcgacctttatgcagcggtcgatcccgtacccgctcgtgctgctgttcactcaaggaaaccaggtctgccttgctctgtccgacaagcgcattaaccaggcggacaaggaaaaatgggtcgtcgaggagcccctctacaccggctggatagacctggccgggccaacggcagcgcaggccaccttcctggcagactgcaatatcaacagcttttccttcgccaacttccttagtttctataaaagcctgactgaacgtgtcatagctattaattgcgccacccatagcggacgctatgagcggggcgaagctgacaatatagaaaataaaccgagcgaggcacgtcttgaacggctccgcgagcttgaaaagctcaacttgaaaaaagcagaaatcgccaacaagctgagaaaagaaaagcagctcgggcgacaggttgagctcaatacacaaattaaaaagatcaacgacgcacttgaaaaaattagagagaccatttga

SEQ ID NO: 365916 - DNA, 225 bp, Pseudomonas aeruginosa
atgaaagaaaaatttgacgacgaggaactgagggtcattcgcgtgaagcgattgcaagacatgcttggaataagcaggtcaacgatttactcgagggttgatccgaaatcaaagtggttcgatcccgactttccaaaaccattcaaaattggaggctacgcagtgggctgggatctacgcgaggtcgttaaatttgttgagatgaaaaaaatggaggctcgatga

SEQ ID NO: 365917 - DNA, 699 bp, Pseudomonas aeruginosa
atgctcaacgacactaataccttacagcaccacccactcagacaccctgataataaaaacctccacctgcactacgatgacacatttgaaggcttccaactaatgcgtgacaaggggcctttgattcgagagagcctctccgccctcaagcatactatcgacttggcgctgactgattacccgagagtcctggctttcagagtggatctttacgtacctaaaaaaattaaactacctgactacgcatacacgaacaaggtcataaccaagttctttgaatcgttcacaaaaaagatcaagtaccaccagaatcgggtggctgagcgcggctactcacgtggttgcaaagtgcggtacgtctggtcgagagagatcggccagggaggtagactccactatcatctgttgattcttttaaatcgcgacgcatactacaaattaggcttattacgatcggaaaagatcaatatgttcagacggattgaagagtcttgggcaagtgtacttggattatcagtcgatcaggttaggggattggttaacagaccaccgaaccctgagtactttatcaatcgagaaatccgtcgagataagattgatgagctccctgaacttttcttccgagccagctacctgtgtaagaaagcgaccaagcactatggtgaccgtcagcggagtttcgataccagtcgggggtag

SEQ ID NO: 365918 - DNA, 351 bp, Pseudomonas aeruginosa; identical to SEQ ID NO: 334664

SEQ ID NO: 365919 - DNA, 228 bp, Pseudomonas aeruginosa
atgagtggtgacaaagcttgtggttgtgcgaatagcgttgcaccgtcgaatgaggtgtccacccgaagcaatggggctgcgtgggtcagtgagttttctgtacccaagatggactgtccctctgaagaacgcatgattcgcttggctttggagggactggaaggtatcgagtcgttatccttcgatctcagtcaacggcgcgttcacgtctatcactcgggggtgtag

SEQ ID NO: 365920 - DNA, 867 bp, Pseudomonas aeruginosa
  misc_feature (24)..(33): n is a, c, g, or t
atgccaaaccgaggttatccgcannnnnnnnnncctataaactcaataaagtcgctcggactcaacgctgggcttaaacagattgcgattgagttgcgtaatgtttttaacaactattggcgggaggatattttttctcattttgaaagggagtgcagaaagcttttcaaagaagacggaattattgatgagaaaaaaattattcgctgctggaccgctgattttcgtcaatccggaagcaccgagttaaaagagcgttttttctatgcaatgctttaccatattggagcagagcaggagtactataaaggcaatcatggtgccgctggattacttgccatgagatcggcacatgagcttggtcgatttgatgggtggcgcgcatgcatggaaactataaatgcgccctacaacggccgcattaaaggtggagaggctggaaaagccataagagaagatgcctacatcgagctctttagatacatacaatcaggccccatcaaagaaggctcgacttggaaatctaaagaagatgtaatccgagactgcgagcagagacttcaatcatatatcaataaaaaatacccgctcttttcttttatggccgacaactttattgacaactccctgagcaagaaaggcttagtaaaggatgcttttttgtcatacaagaaagcagtaaaagacaaggtcgatactgactcaacccccagcgaccaaattaattctcagaatgctaaaacaaatgccgatttaaccttcgaccagcgcctgtcttttcttcagcgacagcaggattgtgcatctcctgccaacgagacagattcatccaatgaacagggagccgaccctgatgaacagccttaa

SEQ ID NO: 365921 - DNA, 582 bp, Pseudomonas aeruginosa
atggccacccaacccttgctgtacaccctgcatatccaactggaaccgcttcacttcaacccaccgatatggcggcgcctccgcgtgaccggcgactgcacgctgcgcaagctgcaccatttcatccaagctgcctttggctggcatagcagccatctgcacgagttcagcgatggcatcaggcgcttcatgccgttggatgctgaattcatggacatgcatgacgacgcgctggatgaccgcaaaaccaaactgcgacgcgtgttgaaagaagcggaccgcctgcgctatctctacgacttcggtgatagctggcagcacgtgattgctgtggaggccattgagctcagcgacttcacaggcagctggtgcgaggtactcgatggcgcccgcgcctgcccacctgaggatgtcggcggagtgccgggctatcagcacttcctggacagcatccagcagccaagcagtgaagaaggccgccgctcacttgagtgggcgggaggtacgttcgatcccgacctatttgatcgtcgagcagccgacgccgccgtaaagcggatctgcaacaacttatggggctag

SEQ ID NO: 365922 - DNA, 1119 bp, Pseudomonas aeruginosa
atgggcattggcatgggcgccgcctactaccaggtgcgcgagcaaatgcgccggcatggtgtggtggcgcgctccagcaactacaccctgtatgccgacatcagcaaccgcgtgatgcgggttatggccgaggaactggccggcattgaggtgtattccatcgatgaggcctggggcgacatgaccggcatcgccgatatcgaggcacacggccggcacatccggcagcgcctagcgcgtgagattggcatgccggtgggggtcggagtcagcaccaccaaaaccctggcgaagttggccaattgggccgcgaagaagtggaagggcaccggcggtgtgctcgatctgacctccccggcccggcaggagaagctgctgcgcatagcacctgtaagcgaggtgtggggcgttggccatcgctcggcggccaagttggcggcgctaaatatcaccaccgcgtgggatctggcccagttcgatatcggtacgctgcgccaaaccttcggcgtgaccatggagcgcactgcgcgcgagctgggtggcatcagttgcatcggcttcaacgaggggccagcaccaaaagaggccatctgctcaagcaagatgttcggcgtgcgccagacggagctggcgccgattcgcgaggcgctggccgcctacgtgagccgggcggcggagaagttgcgtagccagacctcgttgtgcagcaccatccaggtaggcctacaaacccagctggcagaccttagggggccgcgctacgccaatgcagttaccctggcactgccagcgccgacagacgacacacgtgagatcctggcgctcgcccagcaagggctgacgcagatatatcgccccggctacccatattcgaaatgctccatcctgctgatgggcctaagccggcgcggcgagctgacgccagacctgttctcgccggcgccacgccgcggagctgagcggctgatggcggtggtcgaccaaatcaatcagaaggaaggacgaggcaccgtgcgtatcggcagcgtgcctgctgcaccggcctgggctatgcgcagagaaatgctcagccagcgctacacgacgcgctgggaagaggtgattggggtacgtggatag

SEQ ID NO: 365923 - DNA, 507 bp, Pseudomonas aeruginosa
atgcttatctatcatcctgcatacgacataaatcacagcatttatcgaatcctgctcatcttgaactcatctatccataaggagtttcaatgggatttgctgagggtgatggacttttacgtcctctttccgcatttgctaaagcacgtatcgcctttgccggtaacggtcaggtcctacaaaaagcttatcaatgcgttgcccgatgcctatgagtcgatgctgaacaccaagcgcattttgtttgaactggagcctatccagaatacggccattcaaaacattatggccaaagacctgatagatcttaataagtttcagaaagggattgtcacacgatctggaaccgcgctccctgacgagctaacggtacgtctccaggcagacaaaacggtccacgaagagtggttcaggtttatcgtgaatgaactccctgtactcgaatttaatggaaaaaccggattgaagcagaggtccggactaatggaatacaaatatgacacctga

SEQ ID NO: 365924 - DNA, 549 bp, Pseudomonas aeruginosa
atggggaatagcgctgagttccatggagaggtgcagggcgatgctgtcctgggggacaagtatgtcaatgaggcagcgctgcttcccctggaaaaagccattcgcgccttgcagcgatccatcaaggaaaacccggaactcgaatcgatcatcgaggagttggccgagtacacgacggacaggccagggcggcccatcatcggtgttgaaggcaagctcaccaacggtaatcgccaggatttaatcgagaatgcgatctatctgaagaataaattcgagcggatgctcgcgaaacgtcagatgtcgctgatcgaacagaaggtctatgcccacgttctggccatgatcgacaccactttcaaccagaagatccgccctctcattctggagaagaaagataagtccgttgtcgacaaggccgtgcaagatcacatcgtcgacccggtatatcaatcaatcgtcggcttcaattcctcaatcacgacacagcatgtcttagggatgctttatttcctgaccggcaagtgccatctcgtgtgggccgaataa

SEQ ID NO: 365925 - DNA, 216 bp, Pseudomonas aeruginosa
atgttcgatgacgttatgccccagaagaaagccagcaccatcggacagcgcatcgacttcagcaagaatctcggggagatttttcgagaccttacgatcaagctcgacaccgaggtcaggccgcgctgccccgaccttaaagatacgatctggatacccctcctttccgggagcgacctccagatcgatgaccaagctcttgggttggggaactga

SEQ ID NO: 365926 - DNA, 2436 bp, Pseudomonas aeruginosa
atggggaataatctggcgttcgacgagcttgttgccagtattatggatgctgtctgtgcttcctcagtaaaccaggaggccggaggtgcgcataactccaccgatttggctgctgacaatgatatcaatgaagagcatgtcccggagataaaaacgaggtctattcagacaagtaaagtctggaaggctattatggatacagaagtcgaggggctgccaacgctagaggtgtcgggtgagcctgtctttaataaagacaaaactgggctcatgattccatatacagccagtggtgaggttttagagtcgttcgagactgatgataaaattaatctcatcaagaaggatggtgaaaagcaaatcaatcttggtgagatagatcttcgtaagagtacaaagtctgctctgtgtttggtgtactcaggaaaaaccagagctgttattaaagctgatgatgtgctctatcttcaaagcaataagaacaggtcctcgttgacccgtcgtaagcgcgcgatagagcgtatattaggtcgtcaatcagttgtaacagggctggttgactattttgacgaaggctgcagtatagttcctgagcgattttctgtgccgccaactgaggaaggtttcgcagtctaccagcgagaaacttcaagcgggcagactattggtctcaacgatgcacagaaggatgctttttcaaagttgataacaaacgggccagtgggttttttgcaggggccacccggtaccggtaagactgagtttattgccgcattctgccactacctgataagtgaagagggtgctaggaatatccttcttgttagccagtcgcatgaggctgtaaatactgcggcagagcgcattcgtgcccactgccgcagactgaataccgatctcgatgttgtgcgtttcagcaaccgcgaacaggtagtctcagatgagttgcaggatgtctattccaagtcgattgtcacccagcaacaatcgagctttagcgctgaactaaaaaggcgtttgtctctgatggctccctcgcttggggttagcgccgggtttatcgcgagcctggttgagcttgagtcgaggattcatggactggtcaaaagcattgagcgcctggataaggatctgcaagatgctggtgagggcactctcgagtctaagcaattgaccgcaagcctgagtcgaatgcaagaggatctgcttgaggcgcttgccaatgactatggtatctctgcagccccagagtctactgctcggaatatgcttgagcaggcctatgccagtgttaccgccagccacggtgtcaggccgcatgaatttaagcgttgcatggatctgatcaagctgtctgaggagttgctgcaacgtattgccactgatggcgctaattacgatgagtttctgatgcgcgccagaacactggtctgcggtacctgtgtaggcgtcggtctaccgcatttgaaacttgctgaaaaccggtttgactgggtcattatcgatgaggctgcacgttcttcacctagcgagctggcgattgccatgcaggtgggaagccgaattctgttggtaggggatcatcggcagcttcctccaacctatgcagacgagcatctcaaggccatcgcccgtgatttgggactgcatagtcagtcagacgagtttcggcggatcatgcggagcgatttcgagcgcgcttttgagtctgcttatggccgaggtgtcagtgccacacttaaggttcagtaccgtatgcaaccaccgatcggagatctggtttcggaggttttctacggtggtgaactaatgactggtgcgcggcctgtgccggaatgcttttcgaatgccccagatgttatcggttcaatcgtaacttggttggatacgggcgttctcgggaaacaagctaatcactcggagcagcaaggtagtaccagcttggtaaaccatgctgaggcaaactccattattaagatgctcaaagatattgaaagtgacatggaattcagctcggcattagttgaggaaatgacggaaaccatggagcctcctattgggatcatctgcatgtattctgagcagaagaagttggttcgtaaaaagtttgccgagaaaacatggtcggaagatttcaagaaattggtcaagattgacactgttgatagttaccaaggaaaagaaaaccgcattgtcattgtttctctgacgcgatcctctgcagatctttctccaggcttcttgcggttgccgaatcgaataaatgtggcaatgtcccgagccatggatcgtttggttattgtcggtgacatgagtatgtgggcaggacggaacgcggatctgccgttgggtaaagttgccacttatattcaagagcgtcaggatggtgagcgctacaggattacgtcggtagtaaatgcaaaaggagctgcatga

SEQ ID NO: 365927 - DNA, 351 bp, Pseudomonas aeruginosa
atggtcgcccaaatcacggtgagcgaccttaaatccgtgcatggcagcgaactgcgcgaccaagattttggccaactttacccgatcactctcgtcaaagttctgcgcataccgattgatgaattcgttgagccggtagtgacttgccggaagctcgcacagctcagaaaattcttgagtaacggactgcacggaggggtttctgataggacgcagacaacgttttgccaactcatgatcccgctgtcccagataaaccagaacatcccgctccctggaaagaatcttgaagcgcccctctggggttttggcatctacatcatcgagcttattgaagtcccacaaacgtaa

SEQ ID NO: 365928 - DNA, 219 bp, Pseudomonas aeruginosa
atgcttgaaaatcggctccccctgcgctcggaacccatcaaccatgagttccttcggtttgacacttccctgattgagcagctgatcaaacacatcaaaatactgattcagacctgccgcctcgggatgcgggcgaaacctattattaaattgacgctcgttggccagcttcaagaagtcatcgagatgcattacatgctcgcgctcattgtcgggtag

SEQ ID NO: 365929 - DNA, 321 bp, Pseudomonas aeruginosa
atgaaaaactccatccgggtcgccatatttatccactccgtgaaagactccatggcgcgctatcctcgtttccttatgctcgataacattgaagataaggggatgatggagccccgaagtcagaatttccaacgcgtattggtggaaaagtgtgacgagctggagaatgactaccagattatctgcacgacatccatgatagatcccaagctgaacacttcagactatgtggtggggcctttctataagaaaggagagcacacgctcaggttttcgaaaggcgatagtgcgcggcgcgaaatgcgggaggatgatgagtga

SEQ ID NO: 365930 - DNA, 333 bp, Pseudomonas aeruginosa; identical to SEQ ID NO: 340550

SEQ ID NO: 365931 - DNA, 570 bp, Pseudomonas aeruginosa; identical to SEQ ID NO: 360700

SEQ ID NO: 365932 - DNA, 348 bp, Pseudomonas aeruginosa
atgctgccccacggcgaggccaacatgctcgacgtctgggaacaaggtgcaaccagctcgataggcaacagccgtggccggctactcctcgatgccaggcaaacgctgcggcgcccgatcgatccgcagcaggttgcctccgcgaacgaccaggccgactacacccgcacggccagcaacgagatccacagccagttcaaacgactgcccaatcccgacctggtcatgtatgtgttcccgcacctggccggcagcgatcccgccccggtcccgggctacaccaccgtgttccccttctaccagcgagtccagtacgccatgccgggcgagcgcacggaggactactga

SEQ ID NO: 365933 - DNA, 141 bp, Pseudomonas aeruginosa
atgaacggtaccgggcgcgtgttcgcgctaatcgactgcaattccttctactgcagctgcgagcgtatctgccagccggagctgaagcgccggccgttggtagtgctttcgaacaacgatctgaagggtgccaactgttag

SEQ ID NO: 365934 - DNA, 438 bp, Pseudomonas aeruginosa
atgtccctttccatccttgcccgcggtgctcgcctgcgtgagcgcctactctccgacgccgcagaccttcgtatcaccggcttccagtcgcccgccgaggacgagaaggaagaggggctttccctcgaccgcctcaccggcctgggcgcgccgcatatctggggtgtgcaggtgctggatgacactctgatcgggttcggtatttttccgggtgaccgcttgatcgttaaccgtgctgccggccacctggagggcaggctggtggtggttgatctgggaggcgagggctaccgcgtgcggctggtggcgcgggatctgttcggcggtctgtggctgagggctgccgatccggcggtgccggatgtgcagctggatggtgaagagcctatcgaggtgtggggcgtggtgagctgggtggtcagccacgttgcgccatga

SEQ ID NO: 365935 - DNA, 189 bp, Pseudomonas aeruginosa
ttgggtgaaggcgcggagaaagacccgatcgttcgtgactaccgggacgccctgaaatttctgcagctcaccgccgagggcaagttctccctggggcaggacgacccggtggccaactccaccagcggggctccccaggtggtgactccgggccgaactttcagcctcgatcagttgaaggacttctga

SEQ ID NO: 365936 - DNA, 195 bp, Pseudomonas aeruginosa; identical to SEQ ID NO: 358958

SEQ ID NO: 365937 - DNA, 195 bp, Pseudomonas aeruginosa
atggacagcacggagtattacgccggcgagaaaatcaagcgcgcgctggcccgctacccgttgcacgtcatccgcgccgacgtcgacccagagaccaatcccttcggcctgcagtgggactgctactccgatacgcctcaacgtatcgaactcgaggagccggtcgcccccaccaagcgggagggcggtctatga

SEQ ID NO: 365938 - DNA, 441 bp, Pseudomonas aeruginosa
atgagcagctacgaactagttaaaagaacaaggattgatggtgatttcgagggtttcgatgacgaggtgctttttaagcttgaagatggtacctactggattcaagatcaatatatgtattggtatcactacgcatactgcccaaaaatcaacatcctcagagcaaatagcagggtattcctgaatgtcgacggtcaaaatcaagtagttccaatacgacagatatttgacgtagtcgagtctcaaattaacggcgattttaatggctgggaaggcgaaacggcttaccagttaaccaatgggcaaatctggaagcagagcagctatagctacgaatacacttactcatacatgcctgaagtcttgatttacaacaccggatccggatacaaaatgcaagttgaaggaacaattgccgacgtagctttaataaaaaaataa

SEQ ID NO: 365939 - DNA, 1755 bp, Pseudomonas aeruginosa
atgaatcaagaatggattctccaaacaaaagaaactcgccgagcattctctggcgcgacctggatcccattgagggcatccataaatgacgaaaaaggggatattaaaaaaataggctatatcagcgaatattttggttgtggttctgccgcgtttccgccagagcatcgggaattaattgaggagcgtttaagctggagtgatataggaataggtcatgccgtggcgcctcatgcttacgaagacggctattacgcttccattgatcaattccagtacaacgataaagagccaataggcgttaaccttatcttcgagcatccgcagcctgtggttggtggaacacaatggatattgaatcctgatctggtcgttgcactccgtctgataaaggaaggaaccaactgggttagacctgaagagaacttcgttgtagtggcccgcgagagttttgatgagaatggtgagcattgcctgatcgagataaagcgagagtttctccttgactatttagctgcaaggaacctgtcacttcgcctctcgtattaccggcaaagagtggcaaatgttccccttcttgaaggcagcgagtacgcaaatctaaaagagcatcaggtggagcgagacggcgggagatttgagctcataattcgtgacattaatgacgttttcggcggaagctgggcgatgttccgtgcctggcgaacggacgtcaatgaagaggaagatgcccctgtgatggggccggaaaatgaccataataccgatcatgaaagttcgagaggacatcgtggcggttatgaaggtattcgtattgagggtgaattttggcgagatgaatggattgaacaccaatctcaaagcctgcgagttcgtggagatgcagatacgcaacttcctcaatttatcgtcgacactgatggtaagcgcatagagtcttccgaactagataatgaagacattggtcgatggctgtggtttcgctccggtgtagtttctgagctgcttaataatcgcgggtttgcgcttaaatggtatacagcagaaacaggtggtatttactcaacatccgggtataagactcacttcggaattaattcttctgatctaattactgtctatgcttatgatgtcgcccgcctcgcctcatgggaacagcatatttgggccgcacataacgttgccccggaaggtaaagtgtcaaatgagttgctagctgcgcaggtcaaagctcagccggcatccacacacgccgttgaagtcttgctattccagagcatgcgggtgttagaggcgggatttcaaaaaaagtaccaaatctcgctattcactcatgacatagatgatactgaagctatgcagcaaatttctcgttttgcaagcaaggaccaagcatcgttgctaagactggctaaagagcttgtcaggatattttcggatcgactcaacattcgcgaaattcgcaaactttcaacccatgcagagaaagataagcttggttcaaataagcttctgcaagatatcttatcgcagaagattggatccgataaggctcgccaagtattttccgaaatcgctggcgtctatgacatgcgcgtcggcgatgcacatccgaccggatcaaaagttacagatgccatcaagcttgctggtattgatcaggacagttcgttcctaaggcaaggtgagcaactaattcacaacttcggtcgatccgtttggtttataggtaattttctctttggacacccatga

SEQ ID NO: 365940 - DNA, 1050 bp, Pseudomonas aeruginosa
atgttgcgggcatttgaggtcgagaacggactggcctgcaattgcatctgccctggctgccgcaaagcgctgattgcagcgaacgggggcctgaaagtcattccgcacttccggcatgtccaggccgaagactgttggcgggggtacaaggaaggggtgcgacgcgctgcgatcgcggtgattgcgaagtaccgtccactctggcttccagccttttccggccgggaaagcgctgccgctgcctcggggaaagtcttctttcgcgatattggcttctcggcgaagccagtcgctgctgaggtcgttgagcggtttgtggatttgggcgacgtccgagcccacgcggtgctgaccgtgcagggccatcgactactcgtccggatcaagatctcgcctcgcgccgaacacgcgcgctacgagttgctcaggggcctggcagactcatctctggagattgatctcagcaacctcagcctcgagcagataagcgacccaaaggtgttcgagacggcggtgcttgcggatcacagcaacagatcctggattcgctctctgcgttccgagctactggcaaaacgtgcccagcaggagctggaggcagatgttcaggtggagaatgatcactgggagaaggagcaagcacggcgcgaggcatttgaacgcgccgagcaggaaaagaaggccgtactggcccaggctcgggcaacagctttggaaggacacagacaggagcagctggctaaagcagaagagcaacgagcggcaggaattcctgggaaggatgaccgcggcgctcgcgtgcaaagggaagaactcatcattagacagaccattcgcgcagcccaggaatggggaggcaaagcggttgaatgctccgcttgcctggatcgtgtcccgggaagtggtgtaactgaaccagccgaaggcgccctgcgggcgaaagaggatggtcatcgtggttcttggctaacgttgagtttgcgaagaccaaacactcaccagagaaaccacgatgaccaagcccactatcgcattgaccgagttggttga

SEQ ID NO: 365941 - DNA, 2616 bp, Pseudomonas aeruginosa
atggccatatacgaggaagtgttggcttggtcggaaaggctgccaccgtggcgccgcgacgccttgcgtcgcctgtgtgtccagggtggctggaacgatcaggattttgtcgaaattctcgatctcgcaaagcaacaccatggggcactaagcgcattccagccggctctgcagccagttctattcgccgccgagcatttccccgccgaggcgaatcaggaccgcaccgtcgtgctgcgatccctgcattcacttaccaacgtggggaagatcccgaacaaccaggctctggacttccagccgcatggtctcaccatcgtgtacggcggaaacggtgcgggtaagtccggttacgcccgggtgctgaagcaggcgtgccgtgcccggagtccaggtgctgtttacgccaatgcctacgctgcgaattaccagcagctcgtgccgagcgctgccatcgacttcgcactggatggcgccgccgaacagacgacctggagcagtcgtcgcgatagcgtaacgcggccagaactccggggcatttccgttttcgatagcgactgcgcgcggcattacctgcaatcacgagaatctgccaactttcagccgtctgctctgacttatctccaacagctggcgaatggactcaatcaagctctgcgcccaacgctgcaggctgagatcgcggggcttgctacagacacgacaccgttcaatgtcattccgaccgacaccgaggccggccgggctgtgcatccgattggcccgaccactgatctggcgcgagcacgtgaattggccacgctcaccgatgatgagcaggcagagcgtgcgcgccttccgcaggaaatcagcgaagcggacccaactgccagggcctcgctacttgaccatgctgcgacgcgggtcgatgagctggccaacatcatcgccgtggcggccggcgtagtgtctgatgaggctatcgaagccaagcaccaggcacatcgagccgtcgttgaggctgaggcagctgaacgtgcagcgtctgccatgttgcaagcggaagatgcgacgcagctgcttcctggaacaggacaaggtccttgggcggtgctgttcaacgctgcccgtgagtactcgtccagcactgcataccccagacaggcctttccggtgaccgatgatggtgcagtctgtgtgctttgccagcaggagctcagccctgaagcgcaggaccgcttgcagcgattcgatcactacattcgagaccgggcggccgaggctgcgcaagttgcacgcatgacttggcagcagatcgttcgggaagtcgggcaggcaagtgtcgacttcgcagtagcccccaacatgctggagagcttgtgggcgcgtattccagagcttccgggtgatatccagaccttccaggaagacctcgctgcacgacttcagtggctcagaaccgctgtggctaccggggcatggcaggatcgcccagggtatcgtcgagcgaacccggcggcgtcgctcccccagatcgcggaggcacttcgcgtggaggcaggccgcctgcgtgcaaacatggatgcggaagccttggcgaccaaaaagcttcggctgaaggagctggaagcgcggcagctactttccgagcacgtcgaaggcatagcgcgggtgattgagaacttggcagacagggctcggctccagaactgccttaatgacattgctgccacgcggccgattagcatgctggctggccaactgactcgggcttacatcagtgaagcgctggcgggacgcatgaacgatgaactcaccaggctggaacttcggcacgttgaggctggagtcagttcagccggtgaggccggggcagttcgcctgggaattcagctgttggactgtcagttggacccgcaccaagtactgagcgaggcagagcagcgtatgtgtgcgctcgcatacttcttcgctgagcttcaccagtcggggtcgacctccggaatcgtcttcgacgacccggtctcaagcctcgaccacagccaccgaaccgctgtcgcacgacggattgtcgaagcgtccgccaaccggcaagttattgtatttacccacgacgctgtgttcttcggtgaactgataacgctctgccaagatgcgggtctggtgcctgaagtgaggtcgatcagctaccgagcggaaggtcctggctacgtcgatgccggtttgccttatgacatgcgccggcaccgcgagcgcatcgcacaacaccgtcgcgatcagcagcaaattgcagcaaccttcaacaaccctcccggagacactgagcggtatacgatccgcaatgcatacagtgaccttcgcgtaacgatcgaaatcggtatcgaggacacggtactcaacgaaaccgtcgtccggttccgcgatggaatttcggtaggccggcttaacggcgtgatggctgtgcaggaggaggatttccgtgaagtgcagcgcctgcacgatcgatgctgccgcaatgtgagtgcgcattcacatgcggccggccagcagcgtcctgtaacacatcctgatgagttgcttagggatatcgaggcagtgaacacgttgtttacgcgtatccgcagccgacggggctga

SEQ ID NO: 365942 - DNA, 741 bp, Pseudomonas aeruginosa
atggattttcactgccatctcgacctctaccccaacgcgcgcgagatttacgctcaggcagttgagaggaacacgttcacgtggttggtaactacaagcccccgtgcttttacggctacgagcagggtgctcggcagtcatcgcaatgtcctcatcacgccaggattgcatccagagatcgtgcatgagcgtcatggcgaactcgccgatttactggagcagatcaaacatgtttcggctgttggagagataggtctggatggctccaggcgttttcagcacagctacgaaactcagcaacgagttttcgctgccacgattgagcaatgcgcggcagttggggggcgtgtgctgagcattcactctcgccaggccgtgaaggatgttttgtctgtccttgcacagcatccgggtttcgggacggctgtacttcattggtttaccggcacggttgctgaattgaaggccgcttcggagatgggatgttggttcagcatagggccagcggcatttacctcggcctctggtaagtcgctggcaaaaaaattaccccgtgatcgggtggttcctgagagcgatgggccattcgctcaagtggatggggcgacagtcatgccatggagttcagacgatactgccgagcttttggcccgagcctggggccttccggtgaatgaagtaagacttaggctcgaagccaactcacggcggttgatcggtgcgatacagcgggccgcttga

SEQ ID NO: 365943 - DNA, 1266 bp, Pseudomonas aeruginosa
atgatcaaagtcatttgcaccagcgtagagcgccttcctactcaactggcggacggtgagcgcgcatttacctacttcaagagtgcgaggcgcgacggcgttggcactatcgcaaaaagttggcacggatcgttgaagcgcaaggggtttcgtccgagtcctgccacgtgggacttcgttcagttttgcttggctgtgtgcgctacagacctttgtgccctacgaagcacaagcgctgacggttggacacggacaatcgaattgagtgtggggttgcatgagccggttcgatgggagccgtggaagaaagagcttgagcagttgctgaaggttttgactggggactattgggcgctgatcttcaccgatgctggcctacctccccctcaagggcggtatgtcgccaagaatcaagattgcgtgtccttgctctctggtgggctcgacagccttattggtggccttgatctagttgctcaaggtcgacgccccttgtttgtctcccagttggcacatgaagactctctgcgtcagcgacgttacgcagcgattcttggcggtgccgatgctcactaccagtggagtcatgggatcagcttcaaggggcctagggagccctctactcgtggtcggtctttggcattttacgcgtttgcggtactggcagcgtccaggctgggggctgcgcgccccacgatctacatccctgagaacggatttatctgtgtgaatccgccgcttgttcctggtcgggtgtcgagcctgagtactcgcaccacgcatccactcttcatctgcaagctacagcaggtattggatggagtcggtgtatcggttctgttggagctgccctatcggttcaagactaaaggggagatgatgaacgagtgtcaggatccggtacgccttcagcagcttgcatccgatacgacgagttgcggccggtttcgcacttacaaccgaacccattgcgggcggtgtgtcccttgcatgatccgtagggccgccttcaaggcttggaaattgggaacagatgataccgactatgttttcccaaacctgctcggcagcagcaaatccagcgggccggatgatccaatggcagtggcattggcagtgctaacggcgaaagagaaaggcatcgacaggttccttggagcatcgctggcctttgcctctactcttgagcggcctcggtatcggtctgtactcaccaatggtattcacgagttggagaaccttctgaccggagatggattgctttga

SEQ ID NO: 365944 - DNA, 852 bp, Pseudomonas aeruginosa
atgggaacctcaacatcaagtggtggtggcaggtctggctctccattcgacccggagtggttggatcagggtgctgctggtaccaacggagcaggagcagccgatggtgcgccggatggtactgaggactgcgatggggaggcgcctcaagaggtttcagaggatgcaggcggcggcgatgcccaggagcaaaacgtagcaccggatcgcaggtttatgcctgcccgcgccaaccttgggaagtacctaactgggggcggccgtgagtcattacgtgccgccgccagcagcatgataaacaaaggcatgggcggggctggtcgtgcgagtaacaccatgcgcggagtcgcccaaggcgctggacgtttgggatcgtttctggaagcggttaggaacggcaccgaccctcaagtcatcgactggattcagaaggttcgtggccagaaactctctgctagcgaccttgcgttggaagtcatcaaagaggtcatgccggggaccgggagtgtcgacgacgagtcacttagaaacgcagctgctgacgctctggcgcaattgtacgagcaagatcccaacgtcgatatcttccagctcagcgaccagcagatcactgcagtaatcgggttcacgattgccaatgaggtctgcaatcgtatggatttgcagctgggccaaacctacgaaaagctgaagtactcaccagttgagatccagcaatttcgtaacgatatcaaagagtgggttcatggagaggtgcagcgaatcatggaagctcttgcagcgcagcaagtagatcctcagacacttgctcagtcggtgctgcagaccgcgctggaggtatttgcggaatga

SEQ ID NO: 365945 - DNA, 1917 bp, Pseudomonas aeruginosa
atgtggcacgacaacgagacaacggtcgactatctaaattttggagtggtggctgatgcctgtgccagcctgctgaggcaaagcggcggtgaacctatctcaataggtgtgtcgggtggctggggggctggcaagtcttctctggtcaaaatgatcgcagcccgcctcgaagccccagcacaacccccagctctaggctcccaagccgcgactccggcacaccggtatgtcgttattactttcaacccatggctctatcaggactttgaaagcgctcgcagtgccttgctgcaaattgtcggcgacgaagtgctgcggttggccaaggggaatgagacgctgctgaagaaagcccttgaactcctgcagcggatcaatctcttgcggctggtgcagataggtggtgaggcggcggtcactattactactggcatacccgttggagcagtgggtaaggctatcggcaaagcagtagattattggagcgctttcagtaaaaaccccgatgcatcccaaagctctgcagatagctctgagggcggagaaggacaggatgatggggcattcgagtttaaacctgacggactgctaaatccggctaaaccactgtcactacccaacgaaattcatgccttccgctcagcacttgagcagatgctggaagcgctgaatattaccttggttgtgttcgtcgacgatttggacaggtgtttgcctgaaactgctatctcgacgcttgagtccattcgcttgctgctcttcctcaagcgcacggcgttcgtcatcgcagcagacaacgatttcattcacggtgcggtgaagaagcatttcgaaggcactggcatcaccagcgacatcgccacgaactacttcgataagctaatccaggtacccctgcatgtgccacggatcggcgtgaacgaagcaaaagcatacttggtgctgctattgcttgagcgcgaggcaagggccgggacattccccaaagataaattcgatcaggccaagctggacatccctcagcgcctggccagaagctggcttggcgaaaccatcacgtctagttttttgtacgagctggtgggaaatgacacacgacttcaggaacttatggatttagcgcaggggctggcaaccctaatgttcaagtccacgaacatcagcgcgaaccctcggttgatgaagcgattcctgaatactgtgtttcttcgagaatccttggcacggcctcagggcatcacgctggacatttcagcgttggccaaatggcatttgctggaaaggtacaaagaagaactggcggatgtgttgtcgtcgatggtcagttctgaaaacgatggtcaagtagcggagcttttgcaggcagaagaaatcgctcgcgaagggggcgtattgccaaaaccgttcgcagatgagccattcgtcaaagagtggcttcagctggctccagctctcggtgccacagatttgcgccccctacttcatctcagtagggataccgctacacgtgatttcggggacgacaacatgactcccgcggcgcgtgagctccgcgatgtactgaagatcgccaccagtgccaacgagcctctcaccaaggcaataagagccgtagacagcgctcaagctgagctggcaatggtgaaggcttggcagagtacggcctccacgcggacgtggaaggcaactatcgaaatgatcgtcctaatagagccctgcaaggttcatccgacacttgggaagcgtgcagcggcgctcctgagtcttgctccgcccggggatatcgggcctggaataatgcctgcactggcaagccagccgtgggctacagatatcttgaaatcttgggtggatgacccagacgttaacactcgcaccaagaatgcaattaaagccgcgctaaggaatggagtctga

SEQ ID NO: 365946 - DNA, 1056 bp, Pseudomonas aeruginosa
atgtcacagcgcaagatcgccatagtcggcggcggactggccggcctctacgccgcctaccgcctgcagagcgcgggtatcgacttcgacctgttcgaggcacgcaagcgcctgggcggtcgcatcctctcgaccgcgaagggtggtctcgatctagggccgacctggttctggccggatttccagccccgcatgcgggagctgctggccgagctgggactgcctgccttcgagcagcacgagcaaggcgacgcgttgttcgaccgcgggccgggccaggtcatgtgccggcagggttatcaatcgggcaacctgtccatgcgcatcgccgggggctcggcgcgcctggtacaggccctggcggctgccctgccagcagaacgactccatcttgaaacggagttgttggctgcccgcctgaccaacgacggcgtgcagctgcagctgtcgagtgatcggcgcgctcagcctgtctatgacgccctctggctggcgatccctccccgtctggcaggtcgggttgactacaacccgcccctgtcaccgccagcaattcagcaactgtccgcggtaccgacctggatggccgcgcacgccaagtacatggcccggtacatgcgccccttctggcgccaacagggtctttccggcgatgccttcagcgctatcggccctctcggcgagatccacgatgccggccatgacgaggcggcagcgctgttcggtttcttcgccatcggcgcccagcagcggcgcgcgctgaatgaatcagacctcaaggcgctgtgccgagcgcagttgactcgcctgttcggcgaggcggcaggcaatcccgtcgaagactgggtccaggactggtcggcggaagccttcacggcgacgcacgacgatctgactccgccccgctggcatagcgtttatgaggtgagccactcgatagacggcccatggcggaaacgactcaagctcatcggcagcgaagctggtggcgagcaaggcggatacatggaaggggccttgctggcagtggatgccgcccttcaactactaacctga

SEQ ID NO: 365947 - DNA, 774 bp, Pseudomonas aeruginosa
atgaatagtttttctaacaaggttgccatcgttaccggcggcggttcgggcattggcaaggaagtcgccaagcgcctggtcgaagccggcgccgccgtagtgatcggcggccgcgatgcggccaagcttgcccaggccgcccaggatatcgacgcgagtggccggcaggtgcgcgcactggccggcgacatcgcccagcccgccaccgcccaggcgctggtcgatctggccgtgggcgagttcggcgggctggacatcctggtcaacaacgccggggtcttcaatcccaagcccttcctggaggtgaacccggacgaatacgactggttcctcgataccatcctcaagggcaagttcttcatggcccaggccgcagccaaggccatgcagcagcgcggcggcggcgccatcgtgcagaccggctcgctgtgggcgatccaggccatcggcgccacaccttcggccgcctactccgccgccaatgccggcgtgcatgccctgacccgcaacctggccatcgagctggccgcgtccaacatccgcatcaacaccgtggcgccggccgtggtggagactcccgtctacggcaccttcatggatgccgagcaggtgaaggaggtcctgccgaccttcaacgccttccacccgctggggcgcaatggccagccgggcgatgtggccgcggcgatcctcttcctcgcctcgagcgaagcctcgtggatcaccggcaccgtactgccggtcgatggcggcgtgaccgccggccgcaactga

SEQ ID NO: 365948 - DNA, 933 bp, Pseudomonas aeruginosa
atgactacgcctgcctacctcaatgccctgcgcgcattcgaagctgccgcgaggcaccagagcttctctgccgctgccaccgaactgaacgtcaccccggctgcggtcggccagcaggtacgcagcctggaggcatggctgggcatcgcgctgttcacccgtgccggcagcggctcggcgcgcctggtgctgacggatgcggcccgtgccgcattgccggacatacgggagggcttcgagcggctgagcctgggcctggaacggctgaaagacgccagcgtgcatgccgggctgaccatcaccgtgagcccggcctttgcctcgaagtggttgctgccgcgcatcgaacgtttccagcaggcctatccggatctggatgtgctgctggacaccaactcgcgttcggtggacttccaggtcgagcgcgttgacgtcggtgtgcgttacggctcgggcaggtggccgggcctgactgcggtgcatctgatggatgaggtgatgttcccggtctgcgcgcccgactacgagctgctggagaatgggcggctgccgcccgaggcgttgtcgcgctgcacgctgatccatgaccattcgatggccaattctccggattacccgacctggaggatgtggctggacgcctccgggtaccggcaggtcaagactgaccacggattgcgcatcaacaactcggcggccgtgctgcaggcggcgatagacgggcaggggttggccctggctcgcagcgtgatggtgaaggacgacctggacgccggccggctgatccgccccttcgcggacaaggggctggactgttcgctgacccaggcctactacgtggtctttcgacccgaatgcggcgagctgccgaaggtgcaggccttccgtgactggctgctcgccgaagcgggcaaggtagcttcagaagcctag

SEQ ID NO: 365949 - DNA, 642 bp, Pseudomonas aeruginosa
gtgattccggaacgtctgaatgccgaccttgggcaacgcgcgatcatgcacggtgccaccctgccctggctcgccagcccgctacccggtgtcgaccggcgtccgctctatcgggtgggcgccgagcaggcacgggccaccagcctggtgcgctacgcccccggtagccacttcagcgcgcacctgcactcgggcggggaagagttcctggtcctggaaggcgtcttcgaggatgagcatggtcgctatcccgtgggcagctacgtgcgcaatcctcccgggagccgacattcccccggtgcccgcggcggctgcatgatcttcgtgcggctgcgccagttccatgtcgatgaccgcgagcaacgggtcgtccagttgaacgcacaaggcagccagttactgttcgaaaacgcccatgagcgggtatgggtagaggatgtcccgccccgctcgcccgcgcacatggccaatccgcgcgggctggagctactggtgctcgaaggcgcagtcgcaggcgaggattaccgactggagccgctgggctggatgcgcctgccgccaggcatgcccttcgaagccgaaggcgggccggagggcgcgcgcctgtggatcaaggatgcctccccggacctaggcttctga

SEQ ID NO: 365950 - DNA, 744 bp, Pseudomonas aeruginosa
atgcttggcggcaaaactgccctgatcaccggcggcacctctggcatcggcctggccacggcgaagatgcttctcgaccacggcgcccgcgtcgccatcaccggccgcgatgccgacaagctgcgagcagcccgcgagacgctgagcccggatgtcctggccctggttgccgacgtgcgctcgcgagaacagctgcaggccatggccgagaccgtccgccaggagttcggtgctctggacatcttcttcgccaatgccggtgtcgcctatgcgactccgctatcgagcaccaccctgcagcagtacgatggcctgatggacatcaacctgaaaggcctgttcttctccctgcaggccgtggagccgatcatgcgccccggcggctcgatcatcctcaacacctcatggctgaaccaggtcggcgcgcccggccgggcgctgctgtcggcttcgaaggccgccgtccgctccctggcccgcacactctcggcggagttgctggagcgccgcattcgcgtcaacgccgtcagccccggcgccatcgagacgcccatccaccatcagcccggccagggcatcgatgcctatcgtgcctatgtcgagcgggtgggggcgcaggcacccatcggacgcatggggcgcccggaggagatcgccgccgcggtcctgttcctggccagcgatgcctccagctacatgctgggcgccgagatagtcgtcgacggaggcagggccgaactgtga

SEQ ID NO: 365951 - DNA, 888 bp, Pseudomonas aeruginosa
atgatcgatagccaacacctggcgatcctgagggaggtcgcccgcctgggtagcgtcacggccgcagccgagaaactgaacgtcagccaatcggccctctcccatacgatccgcaagttcgaggaccgctacggcatcaagatctggatgaagaacggccgctccctgcgcttcacccaggccggcgaatacctgctgaccctggcggatcgggtgatgcctcagatcgagcacgcggaacgggtgctggcggacttcgccaaagggcggcgcggcgccttgcgcgtcggcatggagtgccatccttgccagcaatggctgatgcgtatgaccgggccttatctcgcgcagtggcccgaagtcgacttcgaggtctgcacagccttccgcttcgatggcgtcgccgccctcctcggctatgaaatcgacgtgctgattacgccggacccgctgcttcagccggagctgatcttcacgccggtcttcgactacgagctggtactggtggtccatgagggccatccgctcgcggatagagccctggtggagccacaggacctgttgaccgaggagctcatcaccgtgccggtcaccctcgagcgcctcgacatctacacacgctttctggtgccggcccattgccgtccccggcgtcacagcaccgttgagacgaccgacctgatgctgcgcctgaccgcggcgggacgaggcgtcagcgtcctgccggattggctggtgcgcgagcaaggaggagaccttcctgtaaaagccttgcgccttggcaaggagggtctgcacaagagcattcacctggggcttcggcgtggcgaggagcagatcgactacatcgcggggttcaccacgctggccaaaggcatcgtgagctga

SEQ ID NO: 365952 - DNA, 1236 bp, Pseudomonas aeruginosa
atgaacgaagcagtcgcacctctggccgtcccaggtcggtcaagagctccctcgatcttcgatgaggtgatcaatcgcaaacacaccaactcgatgaagtgggattgcgggcacctgttcctccagccggatgaatcggctgcggacccgctgccgatgtgggtggcggacatggacttcagagccccgcaagccgttctcgatgcgcttcaggaagcggtgagcttcggtgtcttcggctatgcggccggcgcctcgaaaagctatgtggacgcggtcctggcctggcagtaccaacgcttcggctgggaggtgcctcgcgagtgggtgatgcagacctcgggcatcatcacgaccatgaagacggccatccaggccttctcggcgccgggtgattcgatcctcattcagccgccggtctacgtgcatttccacgaagacgccgtggtgaacggccggcgcctggcctacgcaccgctggagcacgtcggggacggttaccgtttcgacgagaggaaattcgaagcggccatccagggcaataccaggctgttcatcctcagcaacccgcacaaccccaccggtaacgtctggtccgaagccgagctgcgggcgatgggggagatctgtgcgcgccacggtgtgatcgtgctttcggacgagattcaccaggacttcgtcctgaacccggccaagcgacatattccctttgcatcgatcggcgaggcgttcgcgcagaacagcattacctgcaccgcgccgagcaagaccttcaaccttcccagcctgcagacggcgaacgtgttcgtgcccaatcgccgcctgcgcgaagagctggctcgccagtacgaccgaaacgtctaccgcttcgtcaatgcgctcggggtcatcgctggcgaagccgcctaccgacatggcgggccctggctggaggagctgctgggctacgtgcgcgacaaccatgcccacttcagccgtgaaatccatggggcgacgtcgaagatcaaggtgcttcccaccgactcgctgtacctcgcctggatggattgtcgaggcctgggcatgaatgccgatgagctggaccgcttcatgctgaaggaagccagggtctggctcgacaagggccagaagttcggcgtcgagggccacggcttcatgcgcgccaacctaggttgcagccgggcaaccctggacgtcgccatccagcgaatcctgaccgccgtcgggacgctctga

SEQ ID NO: 365953 - DNA, 1020 bp, Pseudomonas aeruginosa
atgaagaagtcaatgctcctcattggcggccttgccatgaccgtgctcgctacccaggcgtcctgggcggcaaccctccaggacgtgaagacccggggaaaactcaactgtggcgtatcgaccggcaacaccggcctgtcggctcccgacgccaagggcgtctggcaggggctcgacgtggcggtctgtcgagccgtggccgcagccgtgtttggcgatccgaaagccgtcaacttcgtcccgaccacagggcagacccgattcaccgcgctggcttccggcgaggtcgatgtgctcgtgcgcaacagctcctggacctttacccgcgatgcggacctgaagctcaccttcgccggcatcaactactacgacggccagggcttcctcgccaggaagtcgctgggtgtcggcaccgtgaaggagctggacggcgcctcggtctgcgtccagaccggctccacccatgaggtcaacatcgccgagtacttccgtacccacgggatcacctacgaatcggtgcccatcgattcgaccgccgaaggggagcagaagtacctggcgggtgcctgcgatgtcttcaccaacgacgtctccggcctggcggcctctcgcgccagtttcgtcagccccggcgatcacctgatcctgtccgagctcatttccaaggagccgctggggccgatggtgcgtcagggcgacgatcagtgggccgatatcgttcgctggaccctcaatgccctgatctccgcggaggagctcggcatcaccgctgccaacgtgagcaagatggcggaaggaaccgccaacccggacatcaaccgcctgctggggaatgacggcaacctcggggcccagctcggcctcggcaaggactgggccaaacgcgccatcgccgccggcggcaactatggcgaaatcttcgacgccaccctgggcaagaacaccccgatcggcctggagcgcggcctgagcgcgctctggaaccagggtggtctcctttacgcccctcccttccagtaa

SEQ ID NO: 365954 - DNA, 1248 bp, Pseudomonas aeruginosa
atgtcgactttgacgctatccgacagcaacgctcggccgaggacgttcgagctgagcatgctgctgcatgacactcgctaccgctcctacaccatccaggtcatcgcgctgatgtgcctgatgctggtcgcggcgtggctggtggacaacaccgtccgcaacctggccaccatgggcaaggacttttccttcgccttcctctggacgccggcgggctatgacatcaatcagcagcccatcgagtacgacagccagatgagccatggccgcgcggcgctggtgggtttcctgaatacgcttatcctcgccatcctctcgtgcattaccgccacggtcattggcgtgctcgcgggggttctccggttgtccaacaactggatagtcgcccgcctgatgacggtgtacatcgagaccttccgcaatatccccgcactgctgttcatcctggtgatcggcgccgtgatggcccagtcgatgccggcgccgagcagctaccggggtgctgagggcacgctcgccgtcgtcgccaccaatcgcggcatctacattccgcagccgctgttcgcgcaggactggggcagcctgaatcttggcgtgatccagccgagcatgaacgccattgccttcctgctcctgctggccctgtgcttcgtcgccaaccgggcactggtccgccatgccgaccgcgttcaacgcctcaccggcatccgccccagcacctggtggaagagcctgctggtgatggccgtgccgcccgcgctgctgctggtcgccatgggcttccatctgggttatccgcagcttcgcgggttcaacttccagggcggcatccagctgggcaatgccctgatcgccatgtggatcgggctgagcctgtacaccggcgcgttcatcgccgaaatcgttcgtagcggcatccagtcgatctccaaagggcaggccgaagccgcacatgccctgggcctgcggccgggccgcaccatgcgcctggtcattctgccgcaggccctgcgtgtgatcgttccgccgctcacatcccagtacctggacatcaccaagcacacctcgctgggattggcggtcggctacatggacctgcgctccacccttggcggcatcagcatcaaccagaccggcctcgagctggaggggattctgctgatgatgctgatctacctggccatgagcttgctcatttccgggctcatgagcatttacaacaaccgcgtgaagctgcaggtgcgctga

SEQ ID NO: 365955 - DNA, 1293 bp, Pseudomonas aeruginosa
atggctagccacgaaatctcctgggtgcgcgagcggatgcttgcccaatccgtagcgccaacccgacaaggcggcagcctgaactggattcgcaacaacctcttcaacggctggctcagcagcctgctgacggtcgcatcgttgctcgccgttgcctccacggtcttcgcggtggggccctggctggccaattcggtctggcaggcaagctcgcttggcgagtgccggcagatcctgggcggcgaaccgggtgcctgctggggcgtgattcgcgaccgctggccacagctggtgttcggcttctaccccccggagcaatatgctcgcccggtgctggcgttcgcgctgctgttggtcgcgcttgcgcccatgctgttcagccgggtaccgcgaaagctgctgtggttcagcttcgtttttcccggcctggtgttctggctgatctggggcggcaccctgtggctgactgccatggcgtatgcggggctgctcatcggcgctgcactcttgcgactgggtgagaaggtcagcacggtagtcggcatcatcctcgccgttgccggcaccgtggcgtggtggctgtgcgctgccggtcccgtcgcaacctggctggccgggcacctggcccccatttcgctgacgagcgtgacatcccgcgaactcggcggattcctgctctcgatcctcatcggcgtaaccgggatcggcctatcgttgcccctgggcatcctgcttgccctcggtcggcaatcctcgatgccgctgatcaaggtcatgagcgtggtcttcatcgagttcgtgcgcggcgtcccgctgatcaccctgctgttcaccgcctcgctgctgctcaactacttcctgccgcctggcaccgagttcgacctgatcctgcgggtgatcatcatggtcaccgtgttcgccacggcctatatcgccgaagtgattcgcggcgggctggcggcactgccccggggccagttcgaggcggccgaagcccttggcctcggctactggaaggcccagcggctggtgatcatgccgcaggcgctgaagatctccatcccggtgatcgtgagcaccttcatcgggctgttcaaggatacgaccctggtcgtcttcatcgggctgctggatccgatcgcgctgtccacggctatccgcgcaagcaccgattggcaaggcatctactgggagttgttcatcttcatcggtgccctgttcttcctcttctgcttcgccatgtcgcgctactcaatgtatctggagcgtcggctgaagaccgaccaccgctaa

SEQ ID NO: 365956 - DNA, 789 bp, Pseudomonas aeruginosa
atgaatgcttccgcacaacccattacccagcgcgatgcgatcccggtcagccaggaggtcgcgatccagatcaccggcatgaacaagtggtacggcaactaccatgccctgcgggatatcgacctgacggtgagaaagggcgagcgcatcgtgatctgcggcccctctggctcgggcaagtccaccatgatccgttgcataaaccggctggaggagttccagcaagggcgcatcgtcgtcgatggcatcgaactctccagcgacctgaagaaggtcgacgaggttcgccgggaggtgggcatggtgtttcagcacttcaacctattcccccatctgaccatcctggagaactgcaccctggccccggtctgggtacgcaacgttcctcagaaggatgctgaagaactggcgatgcactacctggccaaggtcaggattcccgaccaggcgcacaagtaccccggccagctctccggtggtcagcagcagcgcgtggccatcgcccgcgcgctgtgcatgaacccacgggtcatgctcttcgatgagcccacctcggcgctcgatccggaaatgatcaaggaggtgctggacaccatgatccagctggcggaggagggcatgaccatgctctgcgtgacccacgaaatgggctttgcgcaggcggtagcgaaccgcgtcatcttcatggaccaggggcagatcgttgagcagaacgagccgcaggccttcttcagcaatccgcagtcggagcgctctcgcctgttcctcagccagatcctgcgccactga

SEQ ID NO: 365957 - DNA, 1323 bp, Pseudomonas aeruginosa
atgaattgcttcgatcgttacggacagaccctttccaccacctccgaactggcagccgagcgttaccgcgcgggtgtggacctgcttctttctctctggcccggagccgcggagacgctggatgaagccatcgccgccgacccgatgttcgccctggccctggcggcccgggctcgcctgcatggcatccgcgcggaagtgacagaagcgcgtgcaaaaatcgctcgcgcagaagagctggtggccaggaatggcaccgaacgcgagcgtagccacgttgccaccctgtcgctggccctccatgggcatgcacccaaggcgttggccagtgcactggcccacctcgatcgatggccgcgcgatgtcctgatcatgtccatgcccctgggcgcctttgggctgtttgccttctccgggatggcggaccacgaccaggcgcgtgtggatttgtgcgagcgacacgcccgccattttgccgaagacgactggtggttcctgacctatcgcggctgggcccatggggagaacggcaacatcgtgctcggtgtcgagctgacccggcgcgcactggagttgcgcagaaacaacgtcaatgcggctcacgccattgcccacgtgctgcatgaagccggcgcccatgaagaggccggtgcaatgatcgagggctggctgccgggctatgaccgcagcggtacgctccacggccatatcgcctggcatggtgcccttatcgcgctggagcgtggcgataccgaacgcgccctcgccatctaccgagaaaacgtagcgccggcggtttcgactggtgtgccggttaacgtggtcagcgacacttcgtccttcctgtggcggcttcaggcttatggccacgcggtaccggccgggctatgggaggaggccgcggactactcttcgcagtacttccgccaggccggtttcccctttgccgatttccacatggctttgctcgctgcggccacgggtgacaaggccgcgctcgagcagcgcgtcatggccctcaacggcttgctggaagccagtgcgttgccggcggggcctgtcgtgccggcgatctgccaaggtgccctggcgtttgcggaagaagactacgcgcgctgcattcaattgctggagccggttgccagagaggtggtgcgcattggcggcagtggcgcgcagcgtgaaatcctcgaagacaccctgctggtttccctgatgcgcagcggtgagacgcagaaggcgcgggccctgttggatgcgcgtctccatcgccgaccgtcgcagcgcgacgctcgctggctgaattcgctggctactgcctga

SEQ ID NO: 365958 - DNA, 1245 bp, Pseudomonas aeruginosa
atgaacctgaatgcaacagccgcgcaaagcggcttccaccgactgctcactggcacgctgggagccgttgcctcggtggcaatcgcgcagcttttcggcacggccctgtggttcagcgcgaatggcagcgccggtgacctggctcgcgtctggaatctgagtgcgaccgagatcggttggctgaccagtgccgtgcagctcggattcattctcggcaccctgggcatctccctcagtggtgcggcggatcgcttccgggccagctcggtcttcgtttacagcgcggtggccggggccttcttcaacctctgcttcgcctggcttgccgaagggccggtcagcgggctcgttttccggttctgcgtgggtgtgtgcctagcaggcatctatcccatggggatgaagctcatagtcggttgggagccgaatcgaaccgggttcgcgctgtcgcaactggtggcgatgctgacgctgggcaccgcgctgccccatgcgatgcggttgatgggggaggcgctaccttggcagtgggtaatcagcgcttcatccattctggccctgattggtgccggcatcgttcgggcgctcggtgatggcccgcactcgcgtgtgcagtcgcttccggcgggtagcgtgagggcgcgagccgcagcggtgctcggagcgttcaaggtcaggggatttcgcgccgccaccctgggctacttcggccacatgtgggagctctataccttctggaccatggtgccactgatcgtcgcgagtacatcgttggcgacgagctttccggagttgggcgtctcggggttgtcgttctgcgtgatcggggttggagcgctcggggccttgctggggggagttctgtctcagcgcctgggcagtgcaagggttgccatcggggcccttgcattgtccggggcctgcggcctgatcttcgcgcttggctggcgcgagctgccggttcccgcactcctggtgctgctggtcgtgtggggcgcttcggtggtggcggactcgccgcaattctccgcactggcagccaaggcgtgcccgcccgaggcggttggtggtgcgctggccatccagaactgcatagggttcgccattaccgtcgtatccatcgccgccacgacaacgctgttcgagcactacgggctggatgcgagctggttgctcattgcaggccccgtattcggccttgtcctcttcaggctcgcggtgagcctgccggccaagcacgagtag

SEQ ID NO: 365959 - DNA, 732 bp, Pseudomonas aeruginosa
atgccgcgtgttctcatcctggtgctcggtctgttgctctccgcctctgcctgggctcagacaatcatcgcggcagctgacgtctatcccccctttgccgacccggcccacccttcgcaaggtatctgcttacaaattgttcgggcggcgtatgccagtcagggctacacggtcgacatgcgcttcgtgccctgggcgagagcggtcaagggtgtgaaaagcggcgagtatgacatcctgcccaatgcctggtggacgcaagagcgggcggagttcctgctgtatagcgagccctatatgaggagcgagatcaagttcatcaagcgcaggggcgatccttttgaataccatggattgggaagcctgactggaaaaacagtggggatagtcaaagggtatggctacggcgacgaattcctcaatgccaccaacttcactcggcccgaagtggcccacaccctgcaaaacattaagaagttggcactcggccggatcgatttgacactggaggacgaagtcgttgctcgttgggtcatcaagcaccatgcgcccacgctaatgcaacagctcgagttcacccagaacggcttgtccagccaacagatgcacgtcaccagcagtttgaagagtccgcgtcacaagctcatcatcgacgtgttcaacaaagggctggccaccatcaaggcagatggcacctacgacaaaattctccgggagaacggcctgaagtag

SEQ ID NO: 365960 - DNA, 1170 bp, Pseudomonas aeruginosa
atgagcatgcgactctgcggtgttctctttcagcttgtctttctactaggttttgaacagtcggctttagctatgcccgtgactgagaatctcgacgtcggcggagccatccgcggtcgactggatatcgatcctgaccgggacatttctgagttcaacttcgataccctgattctgagggccgactacgactcggatcgatggatcggttcggccaagtaccgtttttatggtgacgcctaccccttccgctacaccgacgacgttggcgatatttcgttcttcgagtatgcctgggttggctatcgcttttctccagatcaccagatacaggtggggcaaacggtcattcccttcggcctgtccccctatttcggcagcacgttcttcgaaaccctcggtaacgtcatcggcctggaggatacgcacgacatcggcttcaagtaccttggccaggtcggggactgggatgtccaggctgcctactaccccattaccgcgcagcaaggacgtgggaccagtcgtggtggaaagacctatggcactaccgtcgccacggccgattcctatgtaaccgacggcagtaacaacgaagaacgcgatatcgtcattggacgcctggcgcacaactatcagcaagatgattggcaaggggaagtcggtgtctctgcgctgacctcaacccttcacaatcatgacacccacaaagatggtcagcgaaatgccgccgccctgcacatgacggcacagcatggtccctggggattccaggcaatggcagcccgccaagacatggagccaaaaaatccaggggacgatcgcttggtgagctttggcggtttcgacgctaccttcaatgtcgcggccaaaggcaatttctatgtgggggatatcagctacagcctgcccgcgcgatatggttggttgtcgggagtcaagctgtacgccaactacagcctcttcgacaaggacgaagggcagttcaaggactcccagcgcgttattgtcggcagctcgttcagcctggggccgttatggatcgcccttgagtggttgcatgggaagaatgatccctatattggtggcagcgacttcacccagagccttggtggtggtggcagcaaccaatgggaaaaccagctttacagtaatatcggctactacttctga

SEQ ID NO: 365961 - DNA, 1776 bp, Pseudomonas aeruginosa
atgagcaagcaacctattaacactgatgttggtaatgatatcgaccccattaccttcgaagtcatgcgcagcatcttcgaatatgcgagtgaccgcatggcaacggtcctgcagcgttcgtctttctcgcccatcctggcggacatgctggacttctccaacgccatctatgacgccgacctgcagctgctcagccaggcggccaactgccctgtgcatctggcggcaatgaagttcagcgctgaagaagctgtgaagactatcggtaaagagaacgtccacgagggtgacgtgatggtggtcaatgacccctatcgtggtggcacccatatcaacgacatttcgttcatcaaaccgattttctacaagcaagagctgatcgggtatggcgtcagtcgcgggcactggatggacctgggcggcggcggcgccggtggccaggccttcagcactcacattgcggccgaggggctgcgcctcccgccgcttaagatttactcggcaggcaggatcaacgaggatctcctcgccatcatcatgaacaactcgcggacgccgcacttcatcaagggcgacctccaggcccacttgggcgcactgcttggcgcggagcaggaactgcagcgtgcctgcgaccgctacggcgtagatacggtcaaaaaggccatgaagaagatccaggcctatacggagaaaatgatccgcgaggccatcaggaagattccaaacggcatctacgaagcggaggactacgccgataccgacggcatcagccatgaacgcgtcaagctgaaggtgaccctggaaatcaaggacacttcgatcaaggtcgatttcgccgggaccgaccccatctgccaaggtgcgatcaactcgccccgtgccaacaccatttctgcggctctctactccctgcagttcttcctggctcccgatgccccgcagaaccaggggatgttcaaccccatcgaggttgtgctgcctgaaggctgctggttgaacgcgcaatggccggcgcccacgattggttgcaccacgctgacctcctcgaagatcaccagcgctatctggcaagcgctggccaaagccattcctgagcagatcaccggctctacctgttccgagtgcaactggttcgtggccagctgcacttccccggacggcaagaccgacgtcttttcagatctgccggccggtggctggggcggaacgccgtatgcggacggcatgagcgtcaccatggacccgctcggcaactgcatgaacatgcccgccgaaactgccgaactgttcttcccgatcgcctatgaggcattcgaactgaggggcgattctgccggtgccggccggcatcggggcggccttggcgcgaccttcaaagtgcgcttcctgggcggtggcgaactgggtatggaaacgtctcgcaccctcgaaggcagcccgggcgccgctggcggcctgccaagcgcagtgcaacgctccacccacatccacgctgatggctcggtagaggtaatcggcggcgtcgactccgacggttcctggaccaatccgctgctggcatcgcacaaattcaaggctggcgacgtattcatgttcgagagtaccggcggcggcggctggggtaatccacagaagcgctccgtgaatgaggtactcgaagacgtgctggatgaatacatcagcattgatgcggcgaaaaaatactacggcgtggttatcaaccccgagacgatgcaaatcgatgaggcggcaacctcggccttgagaggataa

SEQ ID NO: 365962 - DNA, 2028 bp, Pseudomonas aeruginosa
atgtggagagttggcgttgacgtaggtgggacctttaccgacctgttcgcctgggatgacaaaacgggcaagcaggtaacggcgaaagtgctgactaccaaacaagaccgctcgatcgctgtcttggaagctatcgaaaaagcaggcatcgacattgccgagatttcgcatctcatgcacggcacgaccactgccacgaatgccctgatcgagcgcagctaccccgacgcagccttcattacgacagaaggttttcgcgacaccatcgaaatcggtcggcagcaccgtgagcacctgtacgacccgtatcagaccaaaccgaaaccgatcatcaagcgccgctatcgctataccgttccggagcgaaccaacgtgcgcggcgaatccgaacgtccgctggaaatcgcagcggcccacgaggtcgccaaaaagatcaaggcgtccggcatcaagtcggtcggtatcggcttcatcaactcctatgccagcggcaaacatgaagagcagatgcgcgacatcctgcttgagcattgcccggatgtgcatgtggtgctgtccgcggaaacccgtccggtattccgcgagcatggtcgcttcactactaccgccgttcgcgccgcctgcatgccggtgatggtgaagtacatggatgacctggaggcccggctacgccagcaccagttcaccggcaagctgctcattctgaagagcagcggtggcgtgatgtccgcggagctggcccgcttccaccctgaagacttgctcgaatcgggccctgccggcggggtcgcctatgccggttacctttccgagctcagcggcttcgacaagatcctgcacaccgatgtgggcggaaccagcttcgacgtttccatcgtcgagcatggcaaaggcctgatcacccgggatcatgagctcgagtgggaagtgccgatcgtggtgccgatgctcgatatccacagcgtgggttcaggcggtggctcgattggctgggtggatcagggtggctcgctgcgcgtgggcccgaaaagcgccggttccgaaccgggtccagtttgctacggccggggcggcgtgcagccgaccatcaccgatgccaacctgctgctggggcgtctggagccgacactaggtgggaagttcgacctcgacgttgatgcggctgacaaggccatgtcgaagctggcaaaagagattggcctctcaactctggagactgccgaaggcatgattcgcatcggatgcgagtacatggctcaagcggtcaagaagatcctggttgctcgtggccgcgaccctcgtgactttgtctttgcaagcttcggcggcgccggcgccttgcatgcgtgcatcgtggcgaagtccatgaatatccccaaagtaatcgtgccgccttacgcgggtgttgcctccgcattcggcgccaccgcgatgaatctgcgccaggatctggagcgcttctactactccccggtcaaggatgctgatctcggcaagatcaacgagatgcttgtcgaactcgaagagaaagccaaggcagttctcagggaacaaggcatcgacaacgacggcgacatcgaactgattcgaaccgcgcagatgcgctatgtcggacagtcgtatgaagtggatacgcctattcccgacggcaaaatcactgccgatagcctgcccggcatcgagcaagagttccatgccgcccacaagcaggagtttggtgtcagctccgaggacttcgcacccgcgttcgtctcgttcggtgtcacggctattggccgaatggactcgccgcctcctgtggacctggtcaacgcaaccgaaggcgacgccatcaaaaccgtgcgcgacgtttatttcgatggcgagtggacgcaatgcaaggtctacgacggtgaaatcctggggaccaaacaccggatcgtcggaccggccatcatcgagtacgaacatgcttgcactgtcatgccgcccaagacgcatgcgcacgtgaacgccatgggcgcactcgtaatcgacatcgaaaaataa

SEQ ID NO: 365963 - DNA, 1164 bp, Pseudomonas aeruginosa
atgtcctggtggccgaagattggcacgctgcgcagcttctgtgatgagcgtcaggcacggtttcttggcgagagcgcggagcgcgcgatctatgaactcggcgagttctgcgccgagcacggaattgatgcccactatcagcagagaggctggttgtggacggccaccacgcctcagcatatcgacacttggaatggcaccttggcggcctgcgaacgtttgggggtgcggcctttcgagcgacttagtgccacggaggtagcgcgccgtactggttccgacgttcatctagcgggcgtttttgaacgaagcaatgccactgtgcagcctgcactgctggcccgtggcatgcggcgagtggcccttgctcgcggcgtcgaaattcatgaacgctcaggggtgaccgaaatcgagcctggacaacccacgcgagtcaccaccagccaaggcgaggtggaggcccgccatgtcgtattggccacgaacgcctgggctgcgcaactgccggagctggctcaactgattgtgccggtgaacagctccattgtggttaccgaagcggttcccgctcgcctggagagggccggatggagcggcggcgaggctatcactgactcacagttgatggtggattattaccgtactactcgtgacggtcgcatcgccttcggcaagggcacaggggctattgcctttggctctcgcattggtccggtgttcagcgaagaccctgccagcctactgctcaccgagacggatcttcgtcgcacctatcctgcgttcgacgacgttggtctgactcatggatggtccggccccattgaccgcacctatgacagtctgccggtgttcgggtgccttgaagggcatgccaacatccattacggggttggttggagcggaaacggtgtgggcccgagtcgactgggtggacgcatcctcgccagcctcgccctggggcggaacgacgaatggggctgttgccccctggtggagcgcagctgccgtcgctttccgcccgaaccgttccgctatctcggtggatcgatggttcgaaacgcagttatccgcaaggagcgggcagagttaggcggtattgcgccgtcgaccgtcgaccgctttcttgcacgttttgccccggccggtctcgaagacaaatcctaa

SEQ ID NO: 365964 - DNA, 348 bp, Pseudomonas aeruginosa
atgtcccctgtacgcgttcgcttgcacgacgaaggcaacttcacttcggctgcgccagtaggccagccgattggaaatcctatcgccatgtcccgcactgccgagcatcgggctctggaggaccgaaacgccacgactggcatctgggaatgcagccctggccagttccgccgtcaggtggccgaagcagaatacagttacatcgtgagcggggagggcagcttcaccccggacgacggtcacccgatcgagtttcgcgggggtgatgctctgtacttcgaggcgaacagccagggggtctgggatatacgccagaccgtgcgtaagacctacctgattctgagctga

SEQ ID NO: 365965 - DNA, 1494 bp, Pseudomonas aeruginosa
atgacgctcagcatccaggacatcatcgaaaacggctctttaaggacacgcctcgttaatggtgaggccggcctttcccgtcaggttcgctgggctcacgtgtgcgaactggcagaccccaccgagtggttgggtgacggcgatctgctgatgacaaccggaatcggcattccaggtgaaccggccgcacagcgccagtatttggagcgattggcgcatgcgaaagtggcaggactgatgattggcgagaacatgcaagcgccggccgatcttggagccttatgtgacgctgccgagcagcaaggattccccctgctgatgacccattactcggtgccattttcggcagtgacgcgggcaattttggatgcgggccgacagcaagaattcgaacgccgcaatgcgatcagccaagtgtacgaaagcgctcggatggggctacgaggtatcggcgttggcgcgttgctggagcgactgcagaaggacgttcgggcacacctctatctgttcgacactcatagcctggaaccttggcttcagggtctggaggcgctacctgacgcatggcgcctggcagttctcgctcgtcgccaggagattcgcggaacgatgccggcggtgctgcgctgtacccgtgccgacgccgaagatgaagccttggtgatgtccctccccacgcaaccatcctgcgagatcctcgccagcggtggcgagcttctggattatggcctgctgcatcacgttggcgccgtgctcggcatcgaactggaacgcctacaggcggagcaagagcggcaacagcgcctgggttcagagctgttggacgatcttctccaacagcgccttgtagaacgtgcggcgagggaacgcctggaacaaatgcgctgtccagtggagccggcagtggtcgccctcgcccgaccggccgctgaaatgccggcagactggcaacggcacctgcgccgccagggtgtcgaattcctggtacggaggcagggggatgagttgattctccttctagctgccccagaggcggcgtcgcgcgtgcaggccgaagtcggctgcccattagggcttagcaatccccttggacatcccgcccgtgcgctggaagccttgcgcgaggctcgtctcgcattcgcacatacatccacccatcgtccgttggtggcctatggaagcgcccacaccgaacagccatggttgcccgacagcctcgacgaggcgaagcggattcaccgaaccgttctgggggcgctggtggactatgacgagcagcaaagcacgcaactgcaccacacgttgcgcgttttccttgagcagaaccgttcctggcagaaaactgctctgcatctgaacgtccacaaacagacgctggtgtaccgggtccatcggatcgaggaaattacaggccgctccctcgacagtaccgaggacgtcgcggtgctctggattgcgctacgtgcaggtgacattgccgggatcagtggatga

SEQ ID NO: 365966 - DNA, 786 bp, Pseudomonas aeruginosa
atgaagactgtcggtgtgctcggtgtgggcgaacttaccgaaaaagtcgtgagaggcttgcgtagaggagggtattacggccctatctacctgagcccgcgcaatcaggagaaagccgagaaactcgcgaaagagttcggctgcaagatattggtggataaccaggcggtggtcgacgccgcgcagattcttctcctcggagtgcggcccgacagcctggaatcgctggcccatagtgtcgacatcgggccccagcacttgctggtttcctttgtcgcgggcgcatcccatcgcgaactgatgcagttgttcgggacggacaagacagttcgctcgatgctgtcctatgccgccgaaaccaacaacgcaaccgtggtcctgaacccgcccctggcggaagtcgaggcgctgttcagctcgctgggcacgctggttccagtggatcaggaagagcagttcgaactcgcgactgtcgccgcctgcgtgaacggttggttgtatttccttctgcacgacctgcatcgctggatcgcggaaaaagggctggatcccgaccaaagccgaaagttggttatcggcagcctgagcgattgcattgcatacgccaaagcccacgaagaccggtcctttgcagagctcggcaattccattgctacaccaggaacctttacggcgctcggtctcgagatgctcggattgcaccaagcgaatgccgcttggagtgccgcttgtgaagttgttttagatgccttactgacaaaaacaaaagagggtgatcgcaaatga

SEQ ID NO: 365967 - DNA, 1023 bp, Pseudomonas aeruginosa
atgaaagaaaaaacccatgtttccgtgaccaagctgttcgccgccacaccgctggtgctcggcctggctttgggtgcggccaacgtcaatgcctcggaatgcggggctgtcacgatcgcaagcatgaactgggcgtccgcagagcttcttgcagaagtggacaagttcattctgcagaacggctacgactgcgatgccagcgtcgtactgggtgacaccgtgccgactctgacttccatggctgagaagggtaagccggacgtggcgcccgaatcctggaccagcctgcggccgccgatcacgcagaagaacatcgcggaagggaagctgctgattgccagcaagtccctgaccgaggggggggtgcagggcatctacattcccaagttcattgtcgacgagcatcccgaaatcaagacgatcgccgatgcattgaagcaccccgaacttttcccggatccggaagacccgtcaaaaggcgcatggtccgcgggacagcaaggttggggtggcacggtcatcgccagtcaatactacaaggcatacaacgcagagagtgcagggttcaacctcgttgatactggctcggcggccggtcacgacggttctctgattcgcgcctacgagcggaagaaaggctggatcggttactactgggatcccacttcgctgctcggaaagtacgagatggtgcgcctctcctcgggtactgcttatgacgaagctgagtggaatcgctgcaacaaagtagagaagtgccccgaccccaaacctaatgagtggccgtctgatgaggtcaatacgatcgtgaccaaatcgttcgcggatcgctccgggccggcatatgaatatctgaaaacccgctcctggcccaatgcactggtaagccaaatgctcgcatggatggcggacaaccaggcaacgggggaggatggtgcgaaagagttcttgaagaagcatccggacgtatggggcaagtgggtttctccggaagcgtctgaaaagatcaagtcggccttgtga

SEQ ID NO: 365968 - DNA, 888 bp, Pseudomonas aeruginosa
atgagctggtttaatgaatttccccatatggaagacgactcccttcgtgcactcaagcagacgatcgacgagggatttcggtcattcactcgcggctacggcgatagcattgaaagtttctttgccccgctgcagaagttcctgctcctgtccgagcgcctgatgacccagactccgtggccgatcattgttctgatgattctggccatagcctgggccgccagcaggagcatgaaggtggttctgggaacgctcttcaccctgctcgccatcggttacctcgacatgtgggacgattcaatgcggacgatctcgatgattttcgtctgtaccgtcctgtcgatcgtcatggggttgcctatcggcatactcatggcacgttcggaacgctttcagcgggtggtcaatcctatcctcgatgtcatgcagaccatgccgagcttcgtttacttgattccggtggtcatgctgctgggcatcggtagagtgcccgggctgatcgccgtggtcatctatgcgatcccgccgatgatccgcatgacgaacctcggcatccgactggtcgacaaggacgtgctcgaggcagctgatgcctttggctcctcgcactggcaaaagctcaagaatgttcagctgccgctcgcgctgccgaccatcatggctggcatcaaccagacgatcatgatggctctcgcaatggtcgtcattgcctcgatgatcggggtccagggactcggccagcccgtcttgaaggctatcgccaatcagtacttcacgctcggaatcttcaacggtcttgccatcgtcggcatcgccatcatctttgatcgagtcagccaggcgtatgggcaacggctccagaaacaccgggagatcgtccatggctaa

SEQ ID NO: 365969 - DNA, 1077 bp, Pseudomonas aeruginosa
atggctaatcagcacttcgatggcatcaagatccgcaacctgtacaagatatttggtccggacgccgcgaaacacgtggaggccgtgaaaaatggcctgacgaagaccgagttgatggaaaaattcggccatgtcctcggcctgaaggacatcaacctggaaatgcctgccggatgtatccaggtcatcatggggctgtccgggtcgggcaagtcgacgctgatccggcacatcaacagactgatcgatccgacggcgggcgagatcctgttcaatggcgtagatgtcgccaggatgagccaggacgatctccgcgagttccgcagacagaagacggcgatggtcttccagaagtttgcgctgctcccccatcgcaatgtgctcgagaacaccgtgtacggcctggatattcagggcatcgctcggtcgaagagcaccgacatcgcgatgcgctggctcgaacgggtcggcctgaaaggcttcgagaagcgataccccaaccaactgtccggcggcatgcagcagcgcgtgggactggctcgtgcgcttgccaacgacgcacccgtgctactgatggatgaagcctactctgcgctcgacccactgattcgggtggatatgcagacggtactcctcgatctgcagaaagagatcaagaagaccatcgtgtttattacccacgatctcgatgaggccttgcgtctcggtgaccagatcgcaatcttgcgcgatggccaagtcatccagcagggcactagccaggatattgtcctgcgccccgcggacgaatatgtcgcgaatttcgtgaaagaggtcaatagagggcgagtgcttcatgtcgaggctgtcatgatgccatcgtcttccgcccccgtgggcgggatgacgatcgcagcgggaactacggtcgaagaggcggtgcgcatgctgtcgtcagtgccggacggcgacgtgacagtggtctcgccgtcggggaaatcgttaggtgtcgtgaccttccggcgtcttgcagaggccatggtcaattcacaagaggttccgaaccggcacggtcgaacccttgcggtggcccattga

SEQ ID NO: 365970 - DNA, 756 bp, Pseudomonas aeruginosa
atgatgagaactctgaaaatcagcctgttgttcggtctcctcttcagcgcctttgcggcccatgccgaactgcccaatggctacagagtggtgttgctgaccgttaattttccaccctttagcatgtcgatcgatgacaagaacttcgccagggatgggggtatcgatggcatcagcacagacattgtccgggcgatgttcaaacgcgccgatatcgactacaacctgaccctgcgctttccctgggatcggatctataacctgaccctggacaagcccagctacggactgtttcccacgaccttcacccccgagcgggagccgctgttcaaatgggtggggccgcttggcagcacttcctgggtactgctcgcggcgccgaacagcggagtcaaggtggactctctggaggaagcgtccaagttcagaatcggcgctctcaagagcaacgcgctaacacagcacctggaagccaaaggcattccattggtgatagccctgcgggaccaggcaaatacgagcaagcttgccaaggggcagatcgacctgtgggccaccgatgatcctgctggccgttatatggcccgccaggaagggatcagcggcctgcgggtggcgatgacgctcaacaaggcagatatgtttttggcgctgaacaaggacactccggacgaagtagttcagcgtctgcagaaggccctagacgagttgcgtagcgaaggcttcgtcgatgacattaccaacagctacctgtag

SEQ ID NO: 365971 - DNA, 291 bp, Pseudomonas aeruginosa
atgaaaggttactggatcattctcggtactgcggttaaagacctgcagtcgcaacagcaatacgctcgcttgtggcagcccatcggcgagaaatatggtgccgtagtcaaggtgctggatgcaggctcgctcaaggagttctgttacagcagccgtgtgctggtcgtggagttcgcatctcttgagcttgccaacgcctgctacgacgacccggcttatcaggaggcgagggagtttgcgcttcgtgctgcagcgcgcgagctgattatcgtcgaggggcaactcgcataa

SEQ ID NO: 365972 - DNA, 1053 bp, Pseudomonas aeruginosa
atgaagacttcaagtgcatacgaaacacctgccgacgagggcgtggactcgcccgtgaagcccgacctgcgcgtcggtttcatcctgatgaaccagttcacccttgtccccgtcgcaggactggtggactccctccgattcgccgcggacaagtcgttccgcagtcaacagatcttctgcaaatgggactggatgacttgcaacgacatgccgatcaccgccagttgtggtatgccggtgacgccgaccaaacccctggccgtgatcggcgaatacgactacgtggtgctggccggtgggcttctgagtgaaacccgaaatccacccgaatggctgcttgatctgctgcgcgagctgcatgcggcgaagacgcccatcatcgccctgtgctccagttccttcgtgcttgggaaggccggactgctcgacggacgccgctgcgccgtacatttcaccattcgtgaagagttcatggagcgcttccccaatgcggaagtgctggtcgacaagagttatgtcgatgacgacgggatcatcacctgccctggcggcactgccatcgatctcgcggcgaatctgatcagtcgccactgcggcaccattcgggcacagaaaggccttgaatacctgttggtggacgatgaagaaattcagcgacaaacaccaaatgaaaagtcgcggataaccgaactgcacgtttacaagaacgacatggttgagcgcgcgatcagctacatgcgcagccatatggatgcaccgagttcattgcgagcggtagcggaaagtgtcggtacgaatgagcgccagcttcaccgtgcgttcatgtccagcaccaatgaatcgcctgcccaatactggcgcaagctgcgcttggaccatgcgaagaagctgctcatgaacacaaaccagcacgtcacacagatcgcctacgcgactggcttctccgatgcttcgcacttcatcctctggttccgcaaacagttcggcgaaacgccttgctccttccgcaagcgccgccatgaggtggagaagctaatcaataccggacactga

SEQ ID NO: 365973 - DNA, 1392 bp, Pseudomonas aeruginosa
atgtaccgtggcttctggtatgcgcaggcacttgacctcgatagtcatctcgctccggcgcttgagggtaatgaacaggctgacgtctgcatcatcggcggcggatatctcggtctctggtcggccattcggctcaagcaggccaatccgacttggcggatcgtaatcgttgagcgtgatcgctgcggctctggcgccagcgggcgcaacggcggcatcgccaccaactggtgggcgaagtacctctccgtgatgagcatctgcggtgagaaggaagcgcgtcgtatctgcgaggccgctgaatccgcgatcgacgagattggcagcttctgccgtgagcaccagatcgatgctcagtatcggaaggatggctggctgtggacggccagcaaccagcgccaggtgaattcctggaaagtgctgaccgatagcctggagcaccacggtgtaaatccgttccagacgctcactcccgaacaggtgcgccagcgtactggttcaccgcgcatgatgggcggcattttcgatcccaacgcggcgaccgtgcagccggccatgctggcgcgagggctgcgccgtgtcgccctgaaactgggcgtcgtgatctatgaaaaatcaccgctgacccacctggagcgttccgagcgccccgttgtgcataccgcgcgtggccagatccaggcgaagaaggtcgtggtggcgatgaatgcctggggcgcgcaattcccggaactgcgccgcatgatcgcaatcatgtctagcgacatggtcgctaccgctccggtcaagagccgtctggaccagatcggcttcagcggcggcgagtgcatcaccgactcccgcacggtgctgaactactaccgcaatacccccgatggacgcatcgtcttcggtaaacccctgggccagttcgcctacgccgggcagatcggcgatctgtacgagcggccgtcacccgccgccgaaaaagtggccgccgagatgtaccgcttctacccgcaactgagcgatgtgccagtagtgagcaactggacgggccccatcgaccgggccatgaaaggtctgccgaatttcggccgtctgggtggccacccgaatatcgtgttcggtatcggcttctcgggcaacggcgtcgccaccaccgtgtttgcaagccggatcatcaagtcgctggtcgaagatgccaatgatgagtgggccaactgcggccttgtgaatcagaagatgaagatgttcccgccggaaccgttccgcttcattggcgcgcacatggtgcgcgatgcactggtgcgcaaggagtccctggaggacgacgaccaggatgccaatttcctgaccactcagctcgcctcgttggctccggctggctacgtccccgcgcagaagaagtag

SEQ ID NO: 365974 - DNA, 975 bp, Pseudomonas aeruginosa
atgaagcatcgcgtcgtattcctcgatgacgagggcattgggccgggcgtcatcacccccgagttgcccttcgaccacgactgggtgagctacccctacacccagccggagcaactggtggagcgcctgaaaggtgcgaccgttgccctgacttgcagcgtcccgctgcgcgaggagcacttggcccagttgccggacctgcagatgatctcgctggcgttgaccggcaccgacatcgtggacctggactactgccgcgcccatggcatcaaggtcaccaatgtcccgggttacgcgaccaatacggtggccgaacattccatcggaatgatgttcgagctgttccgcagggtgtccagttaccaccgtctgatgcagcaggttcatagcggtgcccgggaagcgaaaaacatctacttcgatttcccgattcgcgacctgcgtagccgagtgcttggcatagttggcaatgggcctatcgcaaagcgcgtcgccgaactgggccgggcgatcggaatgagtgtgatcttccacgatcgtggcggacgttattcggggccgaacttcgtgtccctggacgtaatgctccagcgcagcgacgtactgatgatcaactgtcccctgaccgaggagacccgtgacctgatcgatgcgccgcagttggcgcaaatgaaaccggatgccgtaatcgtgaataccggtcgcggtggcgtgatcaacgaggccgcgctgatcgaggccatggagcagggacgccttggtggtgccgcactggatgtcatcgagcacgagccaccgcaggcagacaaccccatcttccggctgatcaatcacccgaatttcattctcaacccccacgtggcctggagtagccaggatgccatgcaagggttgatcgaccaggcgcttggcaacatagcccagttcgtcaactcgacacctaccgaagcgttgcgtgcaggggcggcccgatga

SEQ ID NO: 365975 - DNA, 1452 bp, Pseudomonas aeruginosa
atgagtagcactattaaaagcagttttgtagcgggcgtgttcgtcgagtcgcgtggcgatgagcagattctggagaacctgaacccatccgatccgcgtgacgtcgtcgatcgcttcgcgcgggccgacgcacaactgacccaggcggccgtagaggccgccaatgccgcagcgccggcgtgggccgcgagcaatccgcagttccgcgcggatgtgctggaccgaatcggcagcgagatcctggagcgtcgcgaagagctcgcccgtttgctggctcgcgaggagggcaaggtactgcgtgaggcgctcggcgaagtagatcgcgccggtcgctcgttcaagttctatgcgcaggaagcacttcgggcgtcgggtgagaagtacgaatccgtgcggcccggggtaggcatcgacactagccgccagccagtgggcgtagtgggcatcatcagcccgtggaacttccccattgccattcccgcctggaaaatcgctcccgctctgtgcttcggcaattgcgtggtgttcaaaccggcggaactggtgccgtcctcggcctgggcgctggccgagattatctcgcgctctggcttgcctgcaggggtgttcaacatgctgattggtcccggccgcagcgtcggtgatgcactgatccgccacccgttggtgaaggccatcagctttaccggctcggaacagaccggccgccagatcgccgccatcgcagtcgagcggatggccaaggtgcagctggaaatgggcggcaagaatccgttgatcgtgctggacgatgcggatctggacgtggcgctggatgttgccatccagggctcgttcttctccaccggtcagcgctgcactgctagctcgcggctgatcgttaccgagggcatttaccctgagttcgtggcgcgactggtcgagcgtacccgtgcattgaaagtaggggatgcactggatgcctctaccgacatcgggccggtggcagacgccaaacagctggaagtcgacctggacttcatccagtcggggcttgccgaaggcgccacccttgcctgcggtggcgagcgcttggttcgtgaaggtgatggctacttccttgagccggcactgttccttgatgtgaaaccggatatgcgcatttaccgggaggagatcttcgggccggtgctgagcgtcctcaaggtgcggaactacgaggaagctttcgccgcggccgaagataccccgttcggcctctcggccggcatcgtgaccacctcgctaaagtacgccgagcacttcaagcgaaactcttcggcaggcatggtcatggtgaacctgcctaccgctggtgttgattaccacgtgcccttcggtggcaaccgtggctccagctatgggccgcgcgagcagggaacgcatgcgcgtgagttcttcaccaaggtgaaaaccagttatcagttgagttga

SEQ ID NO: 365976 - DNA, 897 bp, Pseudomonas aeruginosa
atgaagacaggtcgtcccgccacaccgatcacgctttctgaaccagaacgagccgaattgctacgtcgcgttgccaaacgcaaggggccggctgattcgagaatacgtgcggaaatcatcctcggctgtgcgcaaggcgaatccggtacggccatcgcccggcgtctgggcattggggtacacaccgtgtcccggtggcgcctgcgttttgcgcgtctggggttggctgggctgaacgacgaaccgcgttcaggccgtccgcgcagcatcagcgatgagcaggttcaggaagtcatcgatcaggtcacccagaccaaacccgatgacgccagtcactggagctcacgcagcatgagccaggccgtcgggatctcaccggcgagcgtgcaacgcatctggcgggccttcgggctcaagccacacctggagcggactttcaaactctcgaccgacccggcattcgtcgacaaggttcaggatatcgtcgggctttatctgtatccgccggacaaggccctggtgctctgcgtcgatgagaaaagccagatccaggcgctgaaccgaacacaactcagcctcccactggcaccaggccaccccgccacgcgcactcatgattatcagcggcacggcacgacttctttgttcgcggcactggacgtggcgaccggtgcagtgatcggacgtctcaaacgccgccatcgtagtaccgagttcctcgcctttctcaaggacgtcgacgcctctgtgcccagtgatagggaggttcacttgatcatggataactatgccacccacaagaccgacaaagtgcgggggtggctggcggctcacccccgttaccaggtgcacttcacgcccacctcggcgtcttggctgaacctggtcgagcgctga

SEQ ID NO: 365977 - DNA, 1947 bp, Pseudomonas aeruginosa
atgactattaggcataaacttggttgggcgtttcttcttattgcagtcctcccggcaatattggtcgccagtctggtcgtgatgaatgtgcgggatcaggcaagaaatacgtttcttgagggcagttcaagagaaattcggcaggtggaaaattcgatgcgaatcttctttgattcgatcagccaggatgtcgattttcttgcaggccatcctttaatagaaagcatcgatgggaatctgaagaagtatcttactgaggattcatcacagctccccatgtcagaacacgacaaacggatccaagaccttttcgacaatctggcagtaagccacccagattacgcctatatctacctggcgacctccgacggcgccacagtgccctggccaagaaactccgttcagagtggctacgacccgcgcaagcgtccttggtatatggctggaatggccagcaaaggcaaggccagtcgaaatcccgcatatttctggccacaggataatgcgaccttgataggagttactcgcagcttcgccaatgaattaggaccggaagggggagcaatagtcatcgacgtatccctccagagacttactgagatcgtcaagaagatcaagctgggagagaccggctacgtcatgctcattgaggacactggcaatatccttgttgacccggcacagccagagaataacttcaagaagcttcatgaactgaatggagagtacaagaagcttgccgaaacaaagtccgggcttataaaagctgagcttcatggcgtcaaatacctggcaaatgtctggcattcggatgcgcttgattggaccttcattgggctcgttccggaagacgaggtaatgagtggtgcctcacgcctgacacttcagatcgtgacgataactgccgtgctcgcactcatttttgctctgcttggcgggacgttctccaaactgatcgttcgcccaattcaggacgttaccgaagggttggaggacatcgcgcaaggggagggggatctcaccaactgcctggacatgcgtgggcatgatgaaacagcccagctcgcaagttggttcaatcagttcctgagcgtcattcgtggcctgatccagcgcatcagcgaagcagtaggacaattggccgacactgcaagccgctctatgcaagttgctgccgaggttgctgatgcggcaaatcgtcagcgagagtccgtcgacctggtttcgacggctttccatgaaatgctcgccacatcgaacgatgtcgctcgttcttgcggccaggctgcagagtcagcggaacgcggacaacgcgaagcctgggcgggtcaacagcagatcgacactgccgtgcacagcgcaagccgcttgagttctgagatcacccaagcggctgactcgatgcagcaactggaaaaggacagcaatggaatccaggacattctcgggacaattcgagccattgccgatcaaacgaatcttctggccttgaatgctgcgattgaggctgctcgggctggggagcaagggcggggatttgcggtggtagctgacgaggtccgcgctttggcgaaacgtaccgccgactcaacggaggaaatcgatcagttgctgacaaatctctcccagcgaacccatcaggtgagcaaacaaatgcacgccagcctggaagcttcgctgatgacacgagagagcatcggggatgcgcgttccagttttgagctgattcgctcctcggtagatgtcgtgcgcgatatgaccgcccaaatcgcgaccgcagccgagcagcaaactcaggtagcagaagatataggcgagcacattgttcggattcactctgatacgcagcttgttgccgacctctcggccaaggcacaggcgaactcacaatcgctcgcaggcttgtcgggtgatctgaaccagtggaccagtcgcttcaaaacctga

SEQ ID NO: 365978 - DNA, 789 bp, Pseudomonas aeruginosa
atgaccgccatcgaaaccccggaacgcgaagccgactaccgcgtgcccgccctacagcgcgggctgaccattctcggcatgttcaatgcacgggagcgcagcctgagcatgaacgacatggccgagcgcctagcggtcagcccctcggctgtctaccgtatcgtgcagaccctggtcgatatggggtacttgcgcaagactgggcgcaataccttcgagttgggcgcacgggtcatatccgatggtttcacctatctggccagccgcgacatagtcgaggtggccatgccccatctcaacgagctgcgggaccgtacttcgttgtcttgccacctcagcatccgggagcagacggatagcctctacgtataccgagccttcgcgccccagcggctgacggtgaacatacccattggcacgcgcctgccctgtcacagcacggccctgggccgggtgctgctaacagcgctggatgaaaccaggctaggccagctctaccagcacgtacgcctggatgactatccgccaccggctccacggacactacctgaactgcaacaactgatcgccctggaccgcgagcgaggctgggttctgcatcgctccgactactccaccgcaatcgccacaggtatccgcgatcacagcggcgaaattgtggcagcaataaacctttccggaccagacgctgtaatggacacgcctttcgcgcaagcgtccttccttgcggccctaatcactgcaagcaagcaggtctcccaggctctgggatatgtgtgccctatttaa

SEQ ID NO: 365979 - DNA, 570 bp, Pseudomonas aeruginosa
atgaccagcctcaaccccatcgagcgctgcgcgctcatcgacctcaccgagctgccgcgtgtgggctttcgcggcatagatgctgctgccttcttgaatcaacggggctaccagctgccagaggcgcccaaccgggcgctgacgcaggaggatggctcgctggtggcacgcctgtcgcagaccgagtacctgctgctgggcagcctcacagaccgcggcgagcgcattgccgccgaagagtccggctggcagctcagcgagcagggcaactacctgctgccgcgccaggacagccatgcctggctgcaactctccggtcgccacgtggccgaggtgatggccaaggtctgcggtgtcgacctgcggcccgataccttcccggtaggggccgtcgcgcagacttcggcggcgcggctcaatgtcatcgtgatcaatgctggtacgggtgagctgccgcgcttccatatcctctgcgaccgggcgtccctggagtatttccacggcgccatgctggatgccatgcacgagtttggcggccagccggtgggccaggaggccctgctctcgtaa

SEQ ID NO: 365980 - DNA, 303 bp, Pseudomonas aeruginosa
atgaaaatcatgaactgcccgctcaacgggccgagaaacatcagcgaattcacctacggcggcgagttcaaggtgatgcccgacccggccacctgcagcgacgccgaatgggctgactacgtgttcaacagcgacaacgccgctggcgtggtccgcgagtggtggatgcacaacgcctccagctactggttcctcgccgagcgccacaccgtcaccgaccagatcattcgcaccttcgacccgaaggaagtcttcacccagcgggtcgagttcgccccgcaaacccaggagatcgccggatga

SEQ ID NO: 365981 - DNA, 924 bp, Pseudomonas aeruginosa
gtgaacacacaagcccccatcaaactgatcgacgggaaggccgccgcaggccgcgtgctgaccgaagtggccgaggaagtgcgcgagatgaaagctgatggcattgccccggctctggcggtagtgctggtcggcgaggatccggccagccaggtctatgtgcgcaacaaggtgctgcgtgccgaggaatgcggcatccgctcccttgagttcaaactcccggcgcagaccgatgaatcccgcctgctcgaactcatcgctgagctaaatgccgacgcctcggtacacggcatcctggttcaactgccgctgccggcgcatatcgacgaaacccgtgtgctccaggccatcaacccgctgaaagacgtcgacggcttccacgccgaaaatgtcggcggtctcagccaagggcgcgaggtgctcaccccctgcaccccggccggctgcctgcgcctcttgcaggacacctgtggcgacctcaccggcaagcatgcggtggtgatcggccgctccaacattgtcggcaagcccatggccgccctgctgctaaaggcccactgctcggtgactgtggtgcattccaggagtaccaatctgcgcgagctgtgccgccaagccgacatcgtggtcgccgccgtcggccgtccccgtctggtggacgccgactggctcaaacccggcgcggtggtcattgatgtcggcatcaaccgcatcgacgaagacggccgctcgaaactggtgggcgatgtcgacttcgaaagcgccctgccccaggtgtcggccatcacgccggtacccggtggcgtcggcccgatgacgatcgccttcctgatgaagaacaccctggccgccgcgcgccgccagcactcagcccccatctcccctgcccagcttccggaggcgccatgcctttcaatctcctga

SEQ ID NO: 365982 - DNA, 1323 bp, Pseudomonas aeruginosa
atggttaatcgtgctcatggattatcccttctcgggctttgcgccctgtccgctgtttctcccctggccctggccgctgacgcaccgctcgataccggcgcaagcgcctggatgattaccgccaccgcactggtgctgttcatgtgcctgccaggcttggcgctgttctacggcggcctggtccgcgccaagaacatgctctcactcttcacccaatgcttcggcattgccgggctcgtgggtgtgctctgggtcatctacggctacagcatggtggtagacaccaccggcatggtggaaggggaggtgaccttcaacagcttcgtgggcagcctgtcccgagccatgctcgccggactgacgccggacagcttggtgctaggtatcccagaaggtgtgtttatcaccttccagatgacctttgccatcatcacgccggcgctgatcgccggtgctttcgccgaacgcatgaagttctctgccgcactgatcttcatggccctgtggttcacgttcgtctacgcgcccctggcacacatggtctggggcggaccgggagcgctgatgcacaattggggcgtgctggacttcgccggcggtaccgcagtgcacatcaacgccggtgttgccgcactggctgcctgcctgatgctgggcaagcgcaaggggtaccctcacgcccccatgccacctcacaacctaagcctgaccatgactggtgcggccatgctgtgggtaggctggtttggcttcaacgtcggctcgggcgtgggcgtcaatggcacttctggcatcacgatgctcaacactcagcttggcgcctgtgcggggattctcgggtggatgttcagcgaatggataaaagcagggcgtcccagcgcacttggcttggccagcggtgctctagccggtctggtgggcattaccccggcctgcgcctatgttggcgcgggtggggcgctggccattgggctattgagcggcgtgtgctgctacttgagcgtgaccgtgatgaagaggcgcctgggttacgacgacagcctggatgtgttcggcttgcacgggatcggcggcatggtgggcgccattcttacgggcgtattctgcgtaccggagctcggtggcttcgtcgagggtagcagcgtcggtatccaggtatgggcgcagaccaagggcgtgttgctgtccattgtctactgcttcgtactgagctgggtgatcctgaaggtcacggatcgtttggtgggattgcgtgctgacgactctgtggaagagcttggtctggacctcggcgagcacaacgagcgggcatacaaccactga

SEQ ID NO: 365983 - DNA, 1032 bp, Pseudomonas aeruginosa
atgaagaacacaatattggcgacccttttgatgggcgcagcgtctggtgcaatggcaggcgatctgacggtagtctcgtttggaggcaccagtaaggatgtgcagaccgaggcattcttcaggcccttcgagaaagcgaagaaccagaagatgatcatcggcgaatacaacggcgagatgggcaagatcaaagcgatggtcgacaccgccagtgtgaactgggacgttgtccagattgaaggtccggaattgttgcgcggctgtgatgagggccttttcgaacacattgacccgactcgcctgggcaatacctccgactacgttccaggcacgctttccgattgcggcgctggtctgctcgtatggtcgatggtcatggcctacgacggaagtcgcctgacgagtgcaccgatgggctgggcggacttttgggatacacagaaattccccggcaagcgctcgctacgtaagggtgccaagtacaccctggagatcgcacttctagccgatggcgtacccaaggaagacttgtacaaggttttggcgacccctgagggagtggagcgtgcttttcgcaagctcgaccagatcaagccgtccatccagtggtgggagtcaggtgcgcagcccatgcagttcctcgccagtggtgacgtggtgatgagcaccgcctacaacggccgagtgttcgccgcgcaagaggaaggcgcaccgatgaaggtggtgtggaacgaaagtctttacgccatcgatttttgggcaatccccaagggcagccccaacaaacaggcggccgaggatttcattgccttctcgctacgcccggagcagcagaagatccacaccacgaaactgggctacggctcaacgaatctcaagaccaccgcgttgcttaatcctgcgttgacagagcgcctgaataccgcgccagaaaacatggagcgggcattaccagtggatgtcgagttctgggtcgatcacggcgaggatcttgagcagcgcttcaattcctgggctgccaaaggtaactaa

SEQ ID NO: 365984 - DNA, 774 bp, Pseudomonas aeruginosa
atgcgcgacaccgcttttagcatcgacccttccaaaattgccgctgaagaatggcggacgcgctgcgacttggcggcactctatcggctgatcgcgcacttccgttggactgaccacatcgacacccacatttcggcgcgcgtgcccggtgagccgggccattacctgattaaccattacggtgtgctgttccatgaaatgcgcgcctccgatttggtcaaggtcgactatgacggcgacgtgatcgatccacgttttggtcctgacagcgtcaatcgtgctggattcaatatccattcggccgtgcacgctgcacgtccggacgtggcatgtgtgatccacacgcacacagctgcaggcatcgctgtgtccgctcaggaagaggggctgttacccatcagccagcatgcgctgaagttctatcggcgtctgggataccacgactacgagggcattgctctggaccccgacgagcgtgctcggctggttcgggaccttgggccacacatggccatgatcttgcgaaaccatggcctgctggcgactggtcgctgtatcgccgaagccttcaaccagattcatttccttgagcgagcctgccaggcacaggttcaagcaatggctggcggccgccaactgcgactcccctcggaagccgtgcgcgaacgcgttgcattgcaggaggaggaagcaatcgccagcggcatgcacctgctcgcttgggagtcggctttgcgattgatcgcccatggcgaaaccaactatcgcagctga

SEQ ID NO: 365985 - DNA, 891 bp, Pseudomonas aeruginosa
atgaccagtcagagggaacatgtggcccctgtaaccaaggccggcgcgacccgcaacggtcgcggaattggaatgtgcctgatggcgatgctggttttcgcatcccaggatgggatcaccaaattcctggttaaggacttctctgtcgcgcaactcctgatggtgcgctattgggtgttcgtcgccgttgcagttggcattctggcctggaaaggaggtgtacgcgaggcagcacgaagcagccttccccggcttcaggttgtccgttcgttgctggcaattggagaagccgcccttttcggttgggggctgaagtatctgggcctagctgagagccatgccctgttcgcggtgtttccgctaatgacgttggcactcgctgggctagtcctcggcgagcaaatcagccttcgccattggatcgccgcgattattggcttcaccggcaccctcgtcattttgcggccgggctttggcatattcaaccaggcagccttgattccgctgctggccgcctcgacattcgccgcatacaacttgctctctcgtcgaatcagtcagaccgattcgttcgccacaaatatgctttacatggcagtagtcggaaccgttgtttcaacctccttcggtatctccgcctggcagtcaccaacctccggggagtgggctttgcttggtatttactcggtcgcagggatggttgggcaccttctcctgatcaaagcattggagtacgcccccgctgcagtgctgcaaccgttcaactacacgcttcttgtcttcgccacgctagtcgggctcctcgtgttcggtgaattccccgatatctacaccattgccggtggcgccctggtacttgctggcgggatgtacgctgtgaggaccaagtaa

SEQ ID NO: 365986 - DNA, 1422 bp, Pseudomonas aeruginosa
atgctgttgctcgatcccacttcggatacacctcttgtcgttcaaatcgtcgagggtgttgcccaagcgatcaccgatcagcgtttgcgccccggcaccaagcttccctcaattcgcaagtttgcccagaccatggaggtcagtcatttcaccgtggttgaggcatacgatcgcttggtggcgcgtggttgcctgaatgccgtacccaatgcaggcttctacgtccgaggcacccaatgtgaagccgaaaccaagggagacgctgagccggagtttgacttcgatgctcagctgttactgcacaaggtgtttcagccgctgggaatggagatccttcctggcatcgggcgactgccagaacactggctggacagcgagggcctgctacgcggattgcgcagcctggcgagaagtgaaacgcgcagtcttggcgactacggtcacagcaggggaaattctcgtctgcgagccaagctcgctgatcgtctgtcggatgcaggggttgccgctagcccagagcagttgttgcttactagtggcgcaagtcaggcactggacatagttagtcgttacctggtgcagcgcggtgacccggtcctggtggatgagcccggctaccacaatttgtttctcaatctgcgtttgcagggggcgcaattgctgggggtaccgcgcagctctgacggcctggaccttgagcttctcgaacgtctcgcccacaaacaccgccccaaggtcttctttactcaggcacgactacagagccctacaggtagccgactgtcctacgccgccagtcaccgcttgctgctgctcgcagagaaatacgatttcctgatcgtcgagaacgacatttacgctgacctcgatccaggtggacagctcttgttgggaactctcgaccagctggcgcgcgtgatctacatcggtagtctgtctaaggtcatcgcccctgctctgcgagttggtttcatagctgcccacccggagctgatcgaggagttggtgccgttgaaaatggctagcggtctgacgagttcggagctcaccgaaagcctggctctcgatattctcttgcaggggcaacaccgaaagcatgtgcgtcagttgcgttaccagctcggggttgcccacgaaattgtcgcgcgtcgccttgaagagatcggctttgagattttccacgagcctcgcgccggactgttcctgtgggctcgacatcgggacttggcagatgccactcaactggcgagacaggcaaaggaagccaagatcctgctgttccccggacagctgttcatgtcggatggccggaacgtgccgtggatgcgtttcaacgtcgcccattcgttggacgagcagctttacaccttccttgcacgtgcagccgactctgcaagccctaaacattctggcccgaggtag

SEQ ID NO: 365987 - DNA, 930 bp, Pseudomonas aeruginosa
atgcaagtcatttcagccaacgaaatttcttcggtcatgaactggagtggcgtgctggattcgcttcgccaggctcacctggggacacgtccggcaggtgaaagtctcttcatcggcgacaccagctacagcctgttcagccgaggggttgtcttgccggggctgggcgcgggtatcaaggtgtgctccatctatcccgcaaacaattccgccacccctcctcttcccaccgagcaggcggtatttctggtcatagacgaaaattcaaagtcgatcgtcgcagcactggacgggcctgaaatcacccgctggaaaaccgctgcagattcggccctggccgcccagaaattgagccgtgaagacagctcggttctgctggtactgggcgccgggccgattgcccaagcgctcacggatgcctacctgcatattcgtccatcgatagatgaagttctgctgtggaaccgtacggcgtcgaagctttccgaagcctacgaaacgttggagctcagaggcatcagcgtgagcatcgtcagcgatctcgacgctgccatcagcaaggccgacatcatcaccagtgccaccagcagttccacccctctcgtccgtggggaactagtccgcccgggtacccatgttgatctcgtgggaggtttccgcgtcgacatgcgggaggcagacgacaacgtagtgaaggaggcacgaatctttgtagatgatcggtcaacgtcggcatgttccggggacattcaagtacccctgcagaacggcgtcattacagaagatcagattgaaggtgacctcttcgatctatgccagcacacctcgttctcgcgtacggcaagtgacaaaaccgtatacaagaacgccggcggcgcgcatctggatttgatcgtctctcaatacgtaattggacgacttaaggcctaa

SEQ ID NO: 365988 - DNA, 1053 bp, Pseudomonas aeruginosa
atggcattcaaaagaacgattcatgcggtagacacccatgccggcacgccgatgcgtgtggtcaccggtgggatccccaacattccgggaaacaccgttcaagaaaagatgaagtggatggaggccaacgacgacggactgcgcaagctcctgctgcgcgagccgaggggctatccgcctcactgctgcaacatcatcgttccgcccacccatccggaggccgacgccggctacatcattctcgagcaaatcgaatatccgatgatgtccggtggaaacaccatctcggtggtaacggtgttgctggaaatgggcatgcttcctatgaaggaacccgtcaccgagctcaccctggaagcacctgccggcctgatccgcatcaaagcggagtgcaaggatggcaaggtcaagggcgtcaccttcaagaacgtcccggcgttcgccgcccatctggatgcgaccatcgatgtcccgcaccttggcaaggtcacggtggatgtgggctggggcgggatgttctacgtgattgccgacgtccgccagttcaaagggctggaactgattcctcagcatggcgctgaaattgcccgcatttcttcgatgatccgccaggccgccattgagcaactgccggtcgcgcaccctgactacccgggtgtgggcatcaccatctcccagctttcggggccgagcgatgaccccaacgccgactggaagaacgctgtgaccatggcttccggtgatttttcctgggatgaccctgcgacctggacaggcgcgctggatcgctgtccgtgcggcaccggcacttgcgccaagatggccacgctccatgcgaagggacagttgccgctcaaccaggacttccgccaccagggcctgctcggcaacatctacaccggtcgactcgtggacgaatccaccgtcggcgacaagaaggccgtggtacccaccatcaccggaaaaagctggatctatggcctcaacaccctggtactggaacacgatgatccgttcccggaaggttttaccatcggcgacatctgggcttaa

SEQ ID NO: 365989 - DNA, 1335 bp, Pseudomonas aeruginosa
atgcccaacaattacaaaatatcgttagaagacgcgccgctgaacagcttccacaagaagctggcagtctattcctccggtgctccatttctggacggttatatcctgagcatcatcggtgtcgtcatggctcagatcagccaggcgctgcagatgaacgcattgcaggaaggcatggttgcagcggcggcattggtgggcatgttcctcggcggcttcgttggcggtctgtttaccgacaggctgggcaggaaaacgctttacgtgctcgtgctggttgcattggccgtgttctccctgggccagttctgggtgacttctgcctgggcgctcatcgtgctgcgactgttactcggcattgcaatcggagcggaccatccgctcgccacctcactgcttgccgaattcttgcccaagaagcatcgcggctccattctggcgagcctggtgctgatgtggttcgtcggcgctgctgtggcttacgtcgccggcgaggtcatcctgaggaccgccgggccggatgcatggcgttgggcgctggcaagtgccgtggtacctgccgttctgttcctgatcatgcgtgcaggcactccagaatcggcccgctggctgttgagcaaggggcgaacccaggaagccgatcaggtcatcaagaaggtctatggcagtgcattctccgtcgcgaatcttccggaagcgcctcggtctcgccatgtttcggtatggtccctgttccactcgagctatggaaagcggatcttcttcgtcagcgtcttctggacctgctcaatcatcccgcaattcgcgatctacgccttcgctccgaagatcctgcatgccatgggcctgaccggcgacctggctgcctggggcgcggtagccatcaccatcatgttcgtgttcggctgcttgctcgccgtgaagctgatcaacccgctgggtcggcgcaacctgctcatgcacagtttcctgtggtctgggctcgccctgctgctgctggggctgttcccggaaggtagcgcgcagatgaccctgatgctcttcggcagctatgccctgttcatcggcggcgcgcaggtcctgcagtacgtgtatcccaacgaactgttcccgaccgagattcgaggctccgccgttggcctgtcgacttcgctgtcgcgaatcggtgcggcagtcggcacctacctggtccccctttctctggattcgatcgggatcgccaacaccatgatcgcagcgtttggtatttcgatggtcggcctgctcgttacctggctcatggcacctgaaacccgttcgatggatctgcaccaggccagcgccgctagctactga

SEQ ID NO: 365990 - DNA, 1644 bp, Pseudomonas aeruginosa
atggccaaggccgccgatgtggttgtgcaatgtctggagaacgaaggtgtcgagtatgtgttcggcattcccggagaagagaacctcgacctgctggaatccctgcgcaagtcgactatcaaactggtgctgacccgtcacgaacagtccgccggattcatggccgccacctatggccgactgaccggcaagaccggggtaagcctgtcgaccctcggtcccggcgccactaacctggtgaccgcgggtgcctatgcctacctgggcggcatgccgatgctgatgatcaccggccagaagccgatcaagaaatccaagcagggccgcttccagatcctagatgtggtcggcatgatgcagccgctgaccaagtacacccaccagctggcctcggccgataacatcccctcgcgggtgcgtgaggcgttccgcctggctgaggaggagaagcccggcgccgtgcacctggaactgccggaggacatcgccgccgaacagaccgatagcctgccgattccgccgagcctgcaccgtcgtccccttgccgagcacaaggccatcgaggccgccgtggagaagctgcaggccgcccgcagcccgatcctggtgatcggcgccggcgccaaccgcaagatgaccgccaaggttctcaagcaactgatcgacaagaccggcatccccttcgtcaccacccagatgggcaagggcgtggtggatgaacgtcatccgcgcttcctcggtaacgccgcgctgtcgtctggcgatttcgtccatcgcgcagtggaggccgccgacctgatcgtcaacatcggccacgatgtcatcgagaaaccgccgttcttcatggtccgcggtggcaccgaggtgatccacgtgaacttccgctcggccgaagtcgacccggtgtacttcccgcagatcgaggtcatcggcgatatcgccaacgccgtctggcagatcggcgaggccctcaccgacacctcgcactgggacttcacccgcctcatggccatccgcgaggcgaacgaggcgcagatcgccgaaggcgccgatgacgatcgcttccccgtctacccccagcgcctggtggccgacgtgcgccgcgcgctaccgtcgcagggcatcgtcgccctcgacaatggcatctacaagatctggttcgcccgcaactacaaagcgcacatgcccaacaccgtcctgctggacaacgcgctggccaccatgggcgccggcctgccctcagcgatggccgcgcacctggtctatccggatcggcccatcgtctcggtgtgcggcgacggcggcttcatgatgaacagccaggagctggaaactgccgtgcgcctgaagatgaacctcacggtcatcatcctgcgcgacgacggctacgggatgatccgctggaagcagtcgaacatgggcttcaccgacttcggcctggactacggcaacccggactttgtgcagtacgcccagtcttatggcgcccagggccatcgcgtggaaagcgccgcgggcttcctgccgttgctgcaggactgcctgagcaccccgggggtgcatgtgatcgattgcccggtcgactactccgagaacgaccagatcctcaacacagaactcagaacgcgcagcgcgcaagtctga

SEQ ID NO: 365991 - DNA, 1317 bp, Pseudomonas aeruginosa
gtgaaaataaaagaaatccctgccgataatgatgcctgtggctggttccacatcagcaagacacgaacccctcgtcctgcccggagtggtgaggttcgcgcccgctgggccgttgtaggtgcagggtttaccgggctggccgtagcgcggcagctaggactgaactttcccgatgatgaagtcgtgctgctggaagcccaggaagtcggttttggtacttcaggcaggaactcgggctttgcgatcgacctgccgcacgatatcggcgcgccggactacatcggcgaccctgccgttgcgcggatgcatctgaagctgaacctgtatgcacaaggcatcctcgcttcgctcgtgtcccaatacggtatcgactgccagctgagtccggtaggcaagtaccaggcggcagtcgaagacaaggggctgaaggtcctggacgcctatagaggagggctggagaagctcggtcaggccttcgagatcatcgatggccaggatcttccgtcccacatcggcacttcgttctaccgcaaggcgttgtacacacccggcacaatgctcctgcagccagccagcctggtcaaagggctcgctgacagtctgcctggcaacgtttcactcttcgagaactgcgcggttaccgaggtcgagtacggcaatcccatagtgctgactcacgcgaggggcaccgtggtcgctgacaagctggtactcagcaataacgcctttgcgacccagttcggcttcctgaaggggcgcctacttccgatcttcacctatgccagcatgacccgcccgcttaccgaggacgagcaggctcgtctgggtggcaaggagcagtggggcatcatcccggccgaccccttcggcagcaccctgcgccgcactccggatcagcgtctgctggtgcggaacagtttcgactatcacccggacggaaagacctccagcagcatgctcgcgaaagccgcggaggcgcagcgggcgtccttcgcgcgccgtttccccatgcttcccgaagttgacttccagtacacctggggtggtgcgctgtgcatgacccgcaaccacgccgggcacttcggcgaactagcgcgcaacgtttacggcgccctcggctgcaatggcctgggtatcacgcgtggtaccggcaccgggacgctgttggccgattggttggccggcaagagccatgagctgatcgatttcctgctgcgctcggaagggccgaatgcgaatccacctgagccgtttctgtcgatgggcatcaatgccagcctgctctggggacagtaccgggctggcttggaaagctga

SEQ ID NO: 365992 - DNA, 351 bp, Pseudomonas aeruginosa
atgtccgtaaagccgaccgtgatcaagaacgctgaacagtcgcccatgggcgacctagccccggccaagctgccaattggcgaggtcgtcgcccagtcccgcctggggcaggacgtcacgctcgaagagtccgccgcgtcggttggcgtctgggaatgcagccccggtgtcttccgtcggcacatcatgaatcgtgagttcagccacatcatcgcaggctggtgcattttcactccggacggtggtgagcccgtcgagctgcgtgccggtgatgccgtgttctttccggccaactgcgagggtgtctgggatatccgcgagcagttccgcaagacctacgtgatcttctga

SEQ ID NO: 365993 - DNA, 345 bp, Pseudomonas aeruginosa
atgattactcgcattgatgcatcgccgcgggccagcaagctggtcatcgctggcgacagaatcgaaacctccggcctggtagccaatgactgctcggtctgtgtcgctggccagacccgcgatgtactggcccagctggacgagctgttgggcaaggctggcgtggggcgggaaggcctgatgcgcgtgcagatctggctggccgacatgaaggacttcgcggcgatgaacgaggtgtacgacgcctgggtggggggtgagcttcaacccgcccgcgcctgtgtcggtgcgcagctcgccagccccgactatctgatcgaaatccaggcttgggcgcagcgttaa

SEQ ID NO: 365994 - DNA, 3060 bp, Pseudomonas aeruginosa
atgattgcccgtctctcgcccaaacatcagcttgcccaggattactgcgcattcctgcagcagttacgcgacgcgggttttcgcggggagattaccccggaatacgcgacgcgtacggtgctagcgactgacaactccatttaccaacgcatgccgcaggcggcggtgtttccgatggatacagcggatgtggcatgtctggctaccctagtggcacgccccgaattccgaagcattgtgctgacgccgcgaggtggtggcacgggcacgaatgggcagtcgctgactgaaggcctgatcgttgacctctcccggcatttgacggagatcctggagatcaacgtcgaacagcgctgggtgcgtgtgcagggtggggtcgtcaaggatcagctcaacgctgcgcttcgtccgcacggccttttcttcgcccccgaactctcgacctccaaccgcgcgaccatcggcggcatgatcaatacggacgcgagcgggcaggggagctgcacctatggaaagacccgtgaccatgtgctcgagttgcacagcgttctgcttggcggcgaacttctgcatggcaaggtcatggacgaccaggaactgcagtcaagcattcagagcagcggacgacgtgcagacgtactgcggtgtgcgcaggagatcgtagacaccaaggcggaactcatcgaggctaagtttcccaagctgaaccggtgcctcactggctatgacctggcgcacctgcgtgaggctgatggccgcttcaacatcaacagcgtgctctgcggggcagaaggtaccctggggttcatcgtcgaagcgaagctgaacgtcctgccgattcccaaacattcggtgctggtcaacgtccgctattcgagtttcatgagcgcattgcgcgacgccaaggcactgatggagctgaagccgctgtccattgaaacggtggactccaaggtgctcctactcgccatgaaggacatcgtctggcacggagtggccgactacttcccggagaacccggaagccccgaccttgggcatcaacctgatcgagttcagcggtgatgactggcccgaactggagaaacgggttcatgatttcgtggaacatctcaaggctgatggcagcagctatcgcttggggcacaccctggccattggcgaagaggcagtaaaacgcgtctatgcgatgcgcaagcgcgctgttggtttgctgggcaatgtcgaggggcaagcccggccgcagcctttcgtcgaggacacggctgttccgcccgagaatctcgccgacttcatcgcagagttccgtgacctgctggatggccacggtctgcaatacgggatgtttggccacgtggatgctggtgtgcttcatgttcgtccgttgctcgacatgaaagatccgcagcaagccgcaatgatcaaacccatttcagatggtgtggccgcactgacccacaagtacggtgggttgctctggggcgagcatggcaaggggctgcgttccgagtacgcaccgaccttcttcggcgagttgtacccctcgctgcagacgttgaaggcggccttcgacccctataaccaattgaaccccggcaagatcgccacgccggcgacgatgcctgacgcccgattgaccgcggtggatgaagtggttctgcgcggtgaacttgatcggaccatcgacgaacgagtctggcaaagctacgacactgccgtgcagtgcaatggcaacggtgcctgctacaacttcgatccgaacgatgccatgtgcccgtcgtggaaagcgaccaaggaccggacgcaatcccccaagggacgtgcatcgctgattcgtgaatggttgcggctgcagggcgaggagggcgtcgatgtactggcgcaaagtgtcaagcttcgcagcagcatcagccttttcgctccggtgcgccggttgcgcaattctgtcgccaagcagttcggtgagaaggatttttcccatgaggtctatgacgccatggctggctgcctggcctgcaagtcctgcgcgggacaatgccccgtgaaggtcaatgtgcccgagttcagatcccgcttcctggagctgtatcacggacgctatctacgtccgctcaaggattatctgatcggttcgctggaattcagcatcccgttcctggcgcgcttcccgggtctctacaacggcctgatcggattcccaccgatacgcacgttcctcgagcgggttgcgggaatggtcgatagcccgacccttagctatctggacttcaaaggcgcatgcaagcgctgggatgtgcagctggccactcccgaacggctagcgcggatgtccactgcagaacgcgagcgaagtgtcgttttcgttcaggatgccttcacgcgatatttcgaaacatcggtggccattgactggatcgagcttgcctcgagactgggctaccgcgtctacctcgcgccattcaaggccaacggaaagccgctgcacgttcaaggcttcctgggggccttcgagaaggctgcgcgtcgaaacggacaatcgctgtcttcgctcgccacttcaggggtggcgcttgttggcctggacccggcaatgaccctggtgtatcggcaggagtattccaaggtacttgacggtgaggcaccccaggtccagctcatccaggaatggctactcgacgtgctaccgcaaatcgaggcgtctgaggccaagaaaatggcctcgtacaagctgcttgcccactgcaccgaaaagaccaatgcgccggccagtgtcagccagtggcaacgagtgtttgaacggatggggctggagctttccgtacttgccaccggttgctgtggcatgtctggcacctatggccacgaaacccggaaccgagagacgtcaaaagccatctacgcgcaatcgtggggacgcctgattgaacgacatggccacgaagggaacctgttggcagatggttactcgtgccggagccaggtcaagcggatggaagggaaggggctgccgcaccctctgcaggcgctgctggatcacctgcgagaggctgaaacggcctga

SEQ ID NO: 365995 - DNA, 900 bp, Pseudomonas aeruginosa
atgaccatcgaggtgcaatcgcaacaaaccaaaggcaacctcctgggcgtcagcgccatcctgctttggagcacgatggcttcgctcatgcgcctgctgagtgaggctttcggcccactgggcggggctgcgttgatgtacacagtcgccaccgccgtgctgattcttgcgatgggctggccatcattgaagcaattccctatgcgctatctggtggtagttggagggttgttcgtcgcctacgaaattgcgctttttcttgcgctggcattcgcccagaaccgggcgcaggcgatcgaagtggcaatgctcaatcacatgtggccgtgcctgacggttgtccttgcggtcctccttgggttgcagcgggccagcctgtggttggcgcctggcatggcactttcattgatcggcgtgagttggattctcagcggtggcgagggtctatcgatcagcaacatgatcgagaacgcgagtgacaatccgctgagctacggtctggggatttcctgtgcgttcctctgggccttctactgctgcatctcgaagcgtttgtcccgaggcaaagatgccatcgtgccgttctttgccatggccagcgttgtcctttggatcaaatacgccttcagcaacgaatcgctggccatgcccgacttcgcaggagtcgggctgctgatcgcaaccgctgtcgtcttagcactggggtatgccgcatggaacaaggcgttgctcaccggaaacctggtgttgctggccgccacgtcatacgtctcgccagtactgtcgtcggtcttcagttcgatcattctcagcacgaccttgcggctcagcttctggcaaggaaccgtgatggtcacggcgggttcgctgttctgctggtgggcatcgcgacgggactag

SEQ ID NO: 365996 - DNA, 588 bp, Pseudomonas aeruginosa
atgccgaaaggtaagcctttcgctcgtgctgtgttcgctcagatggggtcccgcacgtcggtcgacaaggctctctccagactggtgcgattaggtctactggagcgtatcgttcgcggcgtctacatgcgcccaaagttcaacaagtacgttggcagttttgtccgccctagcccgaccagcgtgatgcacgtcatcacaaagtcgaatggggagacgacccagattcacggttctgaggctgttcgcaggttcggcctcagcacccaaatgcaaatgcagccggtctactacaccagcggctcgacccgagtacttaaggtcggtaaagccttagtccacctgaagcacgtctctagcgatcgcttgcaatttgccgggacaaaggtcggactggcccttgtcgctctccactacgtaggaaaagaagggctgtccacccaggtgattgccaaaatcaccaatggcctgagcagcgaagaactgattaagctccgggcctgcagaatgcccaaatggatgcggtcgatgttgactcgtgccacggacgagcgagtagtaccaagcactgctccgcccccacattga

SEQ ID NO: 365997 - DNA, 834 bp, Pseudomonas aeruginosa
atgcaggttgttgatcttagaaccttgtgtgatcgagtcgtggaacgggtgatcgacgcgggccaattgctgattgcggaatggtctcggcctgagggtccgcgtggagctggcgataaggccgacgtagatattgagatcgagcagcagcttcgtcgcgagttgttgcaactgctggattgtgacttctggggcgaggagaccggccatgtgctcaccgggcatcagtgctgctgggtcatcgatcctaacgacggcaccagtgacttcctcaacggcctgaaaggttcggctatctcggtgggtttgctgcgcgatgcggttccggtgttgggcgtggtgtattcgccagtcaatgccgtttccggcccggactgtattgcttgggcagaagggatgccgagcctgtggcgtaacgggcagttggtcgacgtgagtttacggggacggcagctcgacgcgaccagtgtcgtgatggtcagcgccgcggctgccaccaagccagagctgaatgcccaattgtgcgcgcctgcaggcttcctccctatgccgagcattgcctatcgcctagcccgggtagccgccggcgacggtgtctgcgctgtttccctgtttccgctttccgcccatgacgtggttgctgggcatgccctgctgcgagccgtcagtggggtgttgctcgatcaggagggtctgcccgtcacctatgcaacgggcatggccctggtttcgaaacagtgcttcggcggcgctccacaggcctgttcgactttgcagcagcgtaactgggcgagcttgctgagtgccccgctagatggtgctcggcaaacctaa

SEQ ID NO: 365998 - DNA, 450 bp, Pseudomonas aeruginosa
atgttcacgacctaccggcgtgccgagatccagttggatcccgcggaggaaagcaccactacccagctgtggagctatgtcgagcaggagattatctggccctggttctacctacagatcgttcggcgtcacggtcgtcagacctaccgaagcatgctgatgctccatcacgcccatgatctgaaaaagatcattgatgaccagtcgaatctggcctgggtggagcaagtgcagctggtcacccctgcacacgtcaatggccagccaagatggctgatggagccgttggaagaagtttgtattgttcgagatggaccagctggggatccgggctatctctataaggtcgccaatggcgtcagttactccatgcatcaccggcgaaacctggaggcgctgatcgtcaccgacgtcattttttcagctgaactgcaccttcgggctcaatga

SEQ ID NO: 365999 - DNA, 291 bp, Pseudomonas aeruginosa
atggaactgagcacagcattcgggctggcgcttaagcagctacgcaagcagaaaggcctcacgcaggaagatttttccaacgtcagtagccgaacgtacctaagcaccctggaacgcggcatcaaggggcccaccatcgagaagcttgagcagctcgccggtgtgctggatgtccaccccgcgaccatcctggtcgccgcctatctccagaaggagagcggggcagggcggcgcgagcttcttcgacggattgacgcggaactcaagcgtctcgaggatacggaccactga

SEQ ID NO: 366000 - DNA, 303 bp, Pseudomonas aeruginosa
atgaagcacacagtcactcaaccgaccgaagccgtggcggacattatttgtgctgtctgcagccagaacactcgggtggaaggctacgggctgcagtacggtaccctccaggcatgctggggatatggcgctcgccatgatggcgagcgctatgaggttcatttatgtgaagcctgcttcttcggcgtactcagttatctgagacaagaacgaaggatcaatcagctattcgatgagcaaatcgcgtgcggcgaggaagagtttggcttggtaaggcgcgatgattatttccgtgacagctga

SEQ ID NO: 366001 - DNA, 468 bp, Pseudomonas aeruginosa
atggctcagcccttagccgccaaatcgcgtagcagaagcgtaatgaatcccgtgcaggtactccttaacgggcgagtcgaccctggggatccgcttgcagtctatcgtctgatcgaaaacggccttgcactggacgacgtgctgcgtctggtggaaacggtggaacttctaaaaaacaaatccgttcattccaggatcatcggcatgaccgaccgcacactgcggcgccgggctaagactcagcatacggccttaacctccgaacagagcgccaaggtttggcgctttgctgaaatcctggcgaaggccgaggacgtgctgggcagcagagaagccgcagagcgttggctggtaaaaccgctgtttggattcgtaggcaggacgccgcttgatctgctcagtaactcatacggggagcgaatactggaggatgtgttgggccgcatcgaattttgtgtttatcagtga

SEQ ID NO: 366002 - DNA, 408 bp, Pseudomonas aeruginosa
atgagtgctcttgaagactatcgtgcggcactgtaccgattgattgaaaataaaccgcagattgtcccgaaaggctcggcgattaacaaggacacggtggctcttgaagcgggccgcaagcgcggctcaatcaaaaagattcgcgctgcaaacgcgccgctgatcgctgaaatcgaagctgccgccgtagctcagcaggcgcaaccaaagccaacggctgcccaggaagtcgaaaagcaaaaaacacttaagaaagttgcgcaagatcgcctggagagcattagagatgactacgacatagcgctgatgaaaatcgtctcactcgtgcatgaaaaccatgctctacagcaagagatcaagactctgaagcaagagcttcaaagaagaaactttgtaaaaatccgatag

SEQ ID NO: 366003 - DNA, 2007 bp, Pseudomonas aeruginosa
gtgagcattattgccaatcttcagcttaaccagtggcaagagcatcagttgcccgatagctgcgccagtccatcgcactaccttactgttgacggtgactttgtcatttcgcgcactacggatggagcggtcgtttcgcgttatcaagatgactcgtggaatatgaaaccgtacgacgcaaaagggctgtgcgtctataactttgttagttgggccgagggttcgacgagtaatcagctggtgacagtcattatcgaggaaatgaagcgacttcaactggcgagaatgtatttgtatcgcaggccacgcaagcctaattccattaggatgacagtaattaacgatctggcgcgtctagcgctcaacaacaacctgtcactgagccagctattcgaggacgcgaacctcaatcgcctgctgctgccgagctttgccgcgctaggccgagctcagatgcgccttatgctgaagctgatcaaagaactctttgatgtgcgactaaagcaccgggagtttaagtttgcgccggcagaatatgtgcgtatcgaacgcatgcaagccctatacgatgagcatcccaaagcacaaagggatgagccgaaacaaacaaagctcattccgtcgcgcctctacgctgcgcttattgctgcgctcgatgctgagctagatgccttcaatgccaatggcgaggcaatcgttgagttttgccggcggcgaaaggacaacccacatttcggcatgcctacgcgggacaactcccgttataaagacactgttgactggggcaatgcagtttcacagatggggctgggctcgctctttgagaagctttcagttacggactggcgtgaactatttggttatcttggtcaaattcaactcgccgcaaaatactggattcatttgttctcagggatgcgagacaatgaagcccggcatctgcctgccgacacttttacaacaataatcgcagccggcgtggatattacgattttgcgcggctatacatcaaagatcgccggagaaaatcagacagaaacattttggattacgatccccattattgagagaggcgtcatcgcggcccgttatgttggtaaaatagctgcgctgcgacacgggtttgatgaatctgatttgagccagtacccgctcttcccgatgcttggtcggcgaggtgattatcaagtatttaagggcgcccctgttgcggggagcagttcagctttccggctagataagatcatggcccgattgcctgacatggtggttcaggaagcagatattcgtgaactggagcagtttgacggctttcggaattggcgaaatgattctgacgttaaagtcggacaagcgtggccgctggcaactcaccagtgccggcgctcgctggccgtttattcagcgcgctctggaatggtttccgtgggctcgttggggctgcaactcaagcaactgacggaggtcatgacctcctactatcgccggggcaatgcctttgccgtgaatttcctccagaccgaagagtcgcagctttggttggatgaactagagtacgaacgccgcaaagcccagtttatcgacttcgaagcaaatgtcatcaacagcacgagccggctttggggtggcgaaggtaatcgtattcaggcggcacgcgataaaggtcggccgctcattatcacaacagatcgcgctgctacacaaaagaagttcgaaaagggtgagatggtttacaagctcggtccgattggtggctgtacgaatctcgaaccatgcgacaagctttccttcaccagcatcttcgcttgcctggattgcgagaaatccattctcgatgatgaccgcagcctgaagaacatcaagcggggcgtgaacaatctgaaacgggggcaatccctgttcgctccagagaacccgcagtataaacagattgaatccgagatcagtgcgatttatgaaaaactggagaagcgcggtctactggaaaagctggaggacttggcatga

SEQ ID NO: 366004 - DNA, 1956 bp, Pseudomonas aeruginosa
atgagtaattattttattcagcgtcagatcgtgattatcgacgcgaaggacgcaaacgttgaggtcattcaaccgcaactcgctgtgctgatggttgataatccgagtaatgcgggaaagcgatacctcgatgtaggatcgctgtgctacaggcgtaggggcaagtcaggccctcacaaagttggctgcccggtcgatctgtcttcgctcgacaacgcaagaactcctttcgtgcaggcgctaatcgagattttgagagcaaagcgcagcgcgtcgtctgcaattcaggtgcttcagaatatcaccgttgttattaattggattgacgctcaagagcagtcctacgcctttgatgatgtgtcggccgtgaagcaagcctatggcgactacacccgatatttgctgcatcgattgagtaactcgggcatccgtggtcagcgaatcaaacaaagcaccgcatgcggctatcaagctgctgcacgaatagcggtaatgtgcgcaaccggcatgagggaacccgaagccaggggcgtcgccacatatattcctcataaaatcgctcacgcgaaccacgtaaacctgaaattgccgaatgccgatgtgcaggcacggacatttgccgcgcttatctattatattgatgaagcacatcgcctcctgattgggggcgacgcacttccgctgcatttcgtttcacccaacggcgagtcctgttatcagtacgcaatgcatacttttagcgagaaaggtaaagccgcaaattttagcctttcgcccatgctgattcagtcgccggaatttcctgcctgggataaggtaaaagcacactttggcctggtgggtgatagcgtagcgttagaaatcgaaagagccatttacgacaacacaagaaagcgtcttgaaaaaaatgacaaggacttgcgatctgacctaaggcaatggatcggtgctcaggccgtggtagcgggcatgctggtatttatcgctgctacgggttgcaatcttagagtcgctcaaaatcttgaagtcgatacgcttgaatttatacccagcacacagggtaagcgcttttcaggaaccaaggcgcgggctggcgggaaaaccgtcaacccggagttcggagtacggttcgtgcccgtattcaagaaatatcttgagttgcgccgatgggttttgaacggcagcgatagtgcactggtgtttccggttatctcacacgaatatcgagtttcgtcagtgggcaaccagcagattgctcgcttgaaggcatgcttctctaaagcgctacccaagaccgcttgggtcacgccaacgcagtggcggaaaaacgtcagttatcaatatgtgaagctcagtggcggcgacatggcgttgaccgccgaaaagctgggtaataccgaagagacggttcgccaagcgtatagccggccggcactggaagacttcgcagtggaaatggccagtttctttgagttgatgcaccaagcggcgattgatcgcacgcgctctacagagcgcgttccagtgcgtattctcgacgaaaagaggctggaggcctctacgggtacagggttgtgtgaaaaaacgcctgaagcggagcctgagcgcgcacaggggtttaccgcactggcccctgcacccgcttgccgtgacccggaaacctgcctgttttgcgcgcactacgccgttcacgcagacgaagaggatattcgtcgtctgctctcgtttcgctatctaattcatgcgacaaaagcaaaacagccgattgaccgttggcaaaacaaattcagcccgactgtccatcgtattgacgaagtgctttcagccatacaagacgctgatcccggcagcgcgggaactatcaaccgggtgcgcattgaggtcgagtgcggtgagcttgatgatttctgggctattcacttcgatacgttcgttacgctaggagctgtgtcgtga

SEQ ID NO: 366005 - DNA, 1464 bp, Pseudomonas aeruginosa
atgcgaaatcgggtcaggagcaaaacaggccagggacgctatgactccaaagcgcggcgaatcctcattcctgagttccgcctgctcagcctaaaattcctcgaaactgatcaagactggaactctcagagtctccctggtcatgaattcaatccggtcgaacctggttactttccaaactttcccgtactcattcaaagcgacggcgagccctgggccatcggcaacttgtacctgaccacgaagctccagcgtgaagtcggctacgagtcgaggacattccgggggattgccgatcatctgctcgattacctgcgctttctcgaagaagaaagcctcgattatctctatttccctacaaatgaccgtctaaaagtcacgtatcgctaccgtcagcgtttgattgactttgcatcgagcggtcagctttctgcaagcacagccagcgcccgaatcaatgccgtggtcaatttttatcgacggattgtgcattggaatctcgtcgatgatgctcagatcgagaacgtcgcgttcaccgagattaagaaatatatcagcgtcaccacagcctatggcatcccgaaaaacctgaggatcaattcgcataatcttgccattcaaaaccctaagaatcagcgacaggccgaatacatcaatgacggcggtgatctgcgccctctgacctttgatgagcaatcgagcatgttgaaagcgctgcttgcgtcaccgcgcgaatatcaactgatgttctatttctccttgttcacaggtgcgcgagttcagacagtcgggactctcagggttaagcatctagatggagaaatagacagcaacggctatttgcgacttcccataggcgcaggcacacagattgatacgaagcgaggcaagtgcatgacgctgcttgttcccgactggcttgtccaagacctacgaatttatgtcaacagcgaagaggctaaaaagcgccgtgcgcggtctttttaccgtgagtcagccgatagttatgtgttcctgagcaataacggtgtcccctactacacgagcaagcaggagctggctgatcgccgcaatgaaagcgtaaatgagtacgtcggacttgttgcccgcgccgaaggcgttgcaattcaggatggtggctctctgcgcaagcacatcagagagatgctcgtaccgcgcattcgaagagaaagttcagattttcaagattttacattccatgacctgcgcgcaaccttcggcatgaacctactcgaaagccagttgcgccacttaggcgagcaacacattactgccgcattggagtatgttcggcagcgcatggggcacgcaaatataaaaacgaccatgcagtatttacagtacaaatcgcgcctgaaatggaagaacagtgttcagcatgaatttgaaagcaagctattcaagcatgtcagcacatcagcaaatatgggcgggcttgcatga

SEQ ID NO: 366006 - DNA, 489 bp, Pseudomonas aeruginosa; identical to SEQ ID NO: 338207

SEQ ID NO: 366007 - DNA, 615 bp, Pseudomonas aeruginosa
atgacagccagccaattaaaccccgagcaggaagcaagggcccgcacgttcttaggcgtctccttgcagggggatgatccgactgcaatagcccgcacgttccagacttggagcgcgatgctcgagcgctgctacatccctggatccatgagtggaaagcactaccttgggcgcggaataggcgtctgtgagcgctggttcgtcttctccaacttcgtgagagacatggggcttcgcccgaaggggacgactctcgaccgagtcgacaatgatggcgattacctcccagaaaactgccgctgggcaacccgccagcagcaggcgagaaacacccgtagaaacaaaatggttggtgatgtacttcaagtcgacgccgccattgcatcaggtgttctggcgtcgaccatctcccgtcgcatggcttctggctactcagcagaagaagccattgataactcaaagatcaccaaagtgaagctcactgcagagatggcgagagcgatcaaggatcgcctgaaaaccggtgatacccagtccaagattgctgcctgcttcggtgtctctcgccagatgatctccggaatagcctccggtcgatattggaggtctgcatga

SEQ ID NO: 366008 - DNA, 906 bp, Pseudomonas aeruginosa; identical to SEQ ID NO: 356352

SEQ ID NO: 366009 - DNA, 576 bp, Pseudomonas aeruginosa; identical to SEQ ID NO: 338311

SEQ ID NO: 366010 - DNA, 2907 bp, Pseudomonas aeruginosa
gtgcgcggctactcgttcttcggcgactccttcgtctacgtgctgttcgaggacgacaccgacctctactgggcgcgctcgcgggtgctggagtacctcaaccaggcgcaggaacgcctgcccgagggtgttaccaccacccttgggccggatgccaccggcgtgggctggatctaccagtacgccttggtcgaccgcagcggccagcatgatcttgcccagctgcgggcactgcaggactggttcctcaagtacgaactcaagagcctgcccaacgtagccgaagtggccaccctcggcggcatggtcaagcaataccaagtgctgctcgatccgcagaagctggtggcttatggggtaactcagcaggaggtcgaagcggcgctgaagagcgccaatcaggaaaccggcggcgccatcctggagctggcagagcgcgagtacatggtgcgggcttcaggctatctagagagcctggcggatttccgcaatgtgccgctgcgggcttcggccagcggagttccggtgctgctgggtcaggtggccaccattcagctggggccagagatgcgtcgtggcattgccgagctggatggccagggtgaagtggtaggcggcgtggtcatcttgcgctccggaaagaatgcccgcgatgccatcgccgcggtgaagaccaagctggacagcctgaagggcagcttgccggccggcgtcgaggtggtcaccacctatgaccgttcgcaattgatcgaccgcgccatcgataacctcagctacaagctgctggaagagttcgcggtggttgccctggtttgcctgatcttcctctggcacctgcgctcgtcgctggtcgcgatcatcaccctgcccctgggcatcctgatggccttcatcgtcatgcgctaccagggcgtcaatgccaacatcatgtcgctgggcgggatcgcaatcgccatcggcgccatggtcgatgccgccgtggtgatgatcgagaacgcgcacaagcacatcgaggcctggaaggctcgacaccccggtgaaccgcttcagggcgaggcgcactggcgggtgatcggcgaagctgcggccgaggtcgggccggcgctgttcttcagccttttgatcatcaccctgtctttcctcccggtcttcaccctggaggcccaggagggtcgcctgtttggcccgctggcattcaccaagacctatgccatggctgccgctgctggcctctcgatcaccttggtaccggtgctgatgggctactggattcgtgggcatatccccagcgaacaacagaaccccttgaatcgttggctgatcggtgcataccggccggtgctggagtgggtgctggcttggcctaaggtgaccctagcgctggccttgctagtgtttttgtccagtctctggcccctcagcagactcggaggagagtttctgccgccgatggacgagggcgacttgttgtacatgccatcagccctgcccggcttgccggccagcaaggccacccagctgctgcagcaaaccaaccggatgatcctcacggtgcccgaagtggcacgggtattcggcaaggccgggcgagcagagaccgccaccgatccagcaccgctggaaatgttcgagaccacggtgcagttcaaaccacgcgatcaatggcgcgcggggatgacacccgaaaagctgatcgaggaactggatcgcgcggtaaaagttccggggctgtccaatatctgggtgccgcccatccgcaaccgcatcgacatgctggcgacggggatcaagagccccattggggtgaaagtgtccggaacctccttggtcgacatcgagcgcataacgcgcgatatcgaggccgtggccaaagaggtgcctggggtgagttcggccttggcagaacgccttactggcggccgttacgtggacatccagatcgatcgactggccgcggcgcgctatggcctgagcatcgccgatgtgcaggcggtggtatcgggcgccatcggcggcagcaatattggtgagacggttgaaggactggcccgcttcccgatcaacctgcgctatcccaaggagtggcgagatagtccgcaggcactacggcgtatgccgatcctcacgcaagccggccagcagatcaccttgggcaccgtcgcccaggttagtctgaccgaagggccaccaatgctgcgcagcgagaacgggcgtctgtccggttgggtgtatgtcgatgtacgtgggcgcgacctggcatcgaccgtgcgcgagttgcagcaacgcgtcgccgagcgggtacaactcgacgccggcatgaccgtctcctactccggtcagttcgaattcctcgagcgcgccaatgcgcggctggcctgggtggtgccggcgactctgttgattatcttcgtgctgctctacctgactttcagccgcttcggcgaggccctgctgatcatggccaccctgccctttgccctgtcgggcggcatctggctgctctactggttcggcttcaacctgtcggtggccaccggcgtgggcttcatcgccctggccggcgtctcggccgagttcggggtgatcatgctgctgtacctgaagaacgcctggcatgcgcgtgtggataccgggcgcagcggtgatccggccctactggaggcaattcgtgaaggcgcggtgctgcgtgtgcggcccaaggtgatgacggtggccgtgatcatcgccggcctgttgccaatcctctggggcggaggtgccggatctgaggtgatgaagcgcatcgccgcgcccatggtcggcggcatgattaccgcgccgctgatgtccatgttggttttgccggccgcgtactggctgatgcgaaggcagcgtacacagaaggttcgcgcaccgcaggagctatag

SEQ ID NO: 366011 - DNA, 420 bp, Pseudomonas aeruginosa
atgcctgccggccttgacacttaccaggcctggaaattgggcaaagccctcacgccactgcgcgagatgaacgtgttgatcgtggcttccggaagtctgacccataacttgtatgagtttcggggggctgccagccatgaggctgactacgtgaaagagtttgctgcctggacagcccaaaacctgcaggcgggcaacaccgatttgctactggactataggcagcacgccccttcagccgaacgcgcccacccgacggatgaacattttttaccattgctcatcgcccttggtgcggcgggcgaacgatatgaaacgcgtgtcttggaaggcggcgtgagctacggagtgctggcaatggacagctacctgtttacctcgaacgacaatgatggatctgaatccattcaaactagttaa

SEQ ID NO: 366012 - DNA, 603 bp, Pseudomonas aeruginosa
gtgagcccggtatccaccaagatccagcagactcgccaacgtctggccgctctcgagggtgaacatctacctgtcttcgaggaaacagctcttcacgcaatcccggtgcaagtcggcggcctgcacccgattaccgacctctggtacatcgagcggtcgatcgacacctccgaaatcctgcgacagcacatcgctgatctggctgaagagatcgctctgcacgtcggcgccccaggcgagatcgtcaggattcagggcggtgtgggttacacgtatcgcgagcccaatgaagaccgtgagattactgattcagcgctgcacctcatgacgttgcttcaagcgctcagcggccaggtccaagtcgttctgaacactcacgatcaacagacctgccgcgatgcactgggtgaattccagttctcagctggcctagctcagttgctgctgggccaacccaccacaagcgatcagccatccagccaggcaggccgtctcaatgacgaagccctggtgaaactgttccggatcattcgtcttgcccgacgcctggttgaccttgagctgccgccgaccgccttcgagcaagcagctaccgaccagtga

SEQ ID NO: 366013 - DNA, 528 bp, Pseudomonas aeruginosa; identical to SEQ ID NO: 323740

SEQ ID NO: 366014 - DNA, 549 bp, Pseudomonas aeruginosa
atgcggcagctcgataaggaccagcaaggcgctctgcaacaaagtgccttccgcccactgcaacaaactgccttccaggcgctgcaacacagtgcctcactaaaaggccttttaaagccttttaaaggtaagggggagctggcccagttggcggagcaatgcgaagtcctggagcagggattgcttgagcttgcccagggactgctggcccaggttcgtcgcccgcccttcactcttctgcccacccgactcatcgagcagcgcacatccgcccgcaccacctttcttcgctggcagcacattgcaacccggcggatgggcgtcggggtgtgggcggaaatgctgcgccaggacaagaccccggaatacctgctgcaagacctctacgagatggagctgcagcgcatcaccctcaacatgcagatcagcctgatccactccatcggcaagcaggccgccgagtgtgcggaaaagatgggccaggccgaggccgagttcatgggccgactgcagcagagtcagacccgccctggttccgtgggcatgtag

SEQ ID NO: 366015 - DNA, 1041 bp, Pseudomonas aeruginosa
atgcatatgctcggccaggagttggtcaggaggaatgcaatcgggtggccaagtcagtgcaattgcgcaggtgacaacaatgccggcaagtcaacattgctggaagcagtggacctggtgcttggcccagaacgcctcagtcgccgccccgtaatagacgagcacgatttctatgccgggacgtatgtagacccggtcaaaaaagaggtggttccgatccagatcgaggttattgtcgccggcctctccgatgagcagcagcggcatttccgcgaccacatcgaatggtgggatgcgcaggccaaaacgttacttgtgggggctcccccggaaaggacagacgcccctcacgttggtgcagcaatgcgcgtcttcttcaacggctggtatgacgtagaagaggatgacttctctggggatacctattacgccactcctgaaacaccggatggttcctacctgcgcttctctgcacccgacaagcgaaagtgcggttttctctatttgcgcaccctgcgaaccggcacccgtgcactcagcttggagcgaggctctttgttggacgtgatccttcgactgaaggagacacgactgacaatgtgggaggacctgctcgaccagctaagggcactgccagttggagagaccgaagacatcggcgagctgcttgccgcagtccaagatgccgtgcggcactacgtaccatccgactgggcagaagaccctcacatgcgtgtctcggatctcacccgagacacgctccgccgaacactgaccgtcttcatgggtacgggcgcaaagaggccggacggttccgtctactctgcgccatatcagcaccaaggcactggcacgattaacacgctggtgttggctctgctgtccatcatcgccgaactcaagcaaagtgtaatcttcgcgatggaagagccagagatcgcgcttccgccgcacacccagaagcgaatcatcaattctctgcgccagaagtcagcacaagccatcttcacctctcactcaccctacgtgctggaggagtga

SEQ ID NO: 366016 - DNA, 324 bp, Pseudomonas aeruginosa
atgcccttccagcatgtcctgcggcgtcaccaccatggtgatacacagcagcgtatcctcgggcatgcgatcgaacagggcgttcaggccatcacccttgagcgtctcgccggtgaaatgccctgtcagcggcgccttgttcaactggtcgaccacgatcactcggtgtggcatggcatcgaacagccatacgccctgggtggcatcggaaacaggctgccgatagaacaggttctgggagaagtcggtgccgtcggccagcggcaagtcatcctgcaggatcggttcgtccggccggcataccagttcgtagaagcgacgtag

SEQ ID NO: 366017 - DNA, 705 bp, Pseudomonas aeruginosa; identical to SEQ ID NO: 365057

SEQ ID NO: 366018 - DNA, 750 bp, Pseudomonas aeruginosa; identical to SEQ ID NO: 327818

SEQ ID NO: 366019 - DNA, 417 bp, Pseudomonas aeruginosa; identical to SEQ ID NO: 327760

SEQ ID NO: 366020 - DNA, 1737 bp, Pseudomonas aeruginosa; identical to SEQ ID NO: 327759

SEQ ID NO: 366021 - DNA, 948 bp, Pseudomonas aeruginosa; identical to SEQ ID NO: 327758

SEQ ID NO: 366022 - DNA, 1608 bp, Pseudomonas aeruginosa; identical to SEQ ID NO: 327757

SEQ ID NO: 366023 - DNA, 927 bp, Pseudomonas aeruginosa; identical to SEQ ID NO: 327756

SEQ ID NO: 366024 - DNA, 849 bp, Pseudomonas aeruginosa; identical to SEQ ID NO: 327755

SEQ ID NO: 366025 - DNA, 603 bp, Pseudomonas aeruginosa; identical to SEQ ID NO: 327754

SEQ ID NO: 366026 - DNA, 1140 bp, Pseudomonas aeruginosa; identical to SEQ ID NO: 327753

SEQ ID NO: 366027 - DNA, 810 bp, Pseudomonas aeruginosa; identical to SEQ ID NO: 327752

SEQ ID NO: 366028 - DNA, 636 bp, Pseudomonas aeruginosa
atgacctgcaccgttctgctggctatcatcgcctaccccattgcctatggactcaattatgtctttggcaaatggtcatccttagtcagtattctctttgtgtttccgctgtttatctcggaaaacgtcaggctttatggctgggtacagtttttcatcaagggcggggtgatcgatggggcgctgaagtttttcggcatcgactttaaccctgacgtgctctacagccctgaaatcaccctgtttggtatggtctatgtgtacctgcctttcatgctattccccatgaccctgggcctttccatggtgccgcaggatttgatcgatgctgccgccgacttaggcgcaggacgccttttgatctggcgcgaggtgcaattgccgctagcgatgccaggcattttgatcggtctgctgctgacctttgtgctctcagtcggcgcggtggcggaggccaaaattctcggtgggcagtcggtgatcaccgtggtgcatgacatcgagatcgcctttacctacgcacaaaactggcccatgggcgcagcccttgcgctgattctggtgttgatcatcggcagcctgacgctctgggcactgtcgaaagttgatctggaccgcatgctgggaggccgatga

SEQ ID NO: 366029 - DNA, 681 bp, Pseudomonas aeruginosa; identical to SEQ ID NO: 323742

SEQ ID NO: 366030 - DNA, 387 bp, Pseudomonas aeruginosa
atgcccgaagaacatctgtttcaggatggaaccctcagcttcctgccgacccgtttgaaccggcaaccggtggtcatcggcggcctgaccgcagacgaaatgtggatcacggtcttcacctgcggagcagtcgggttcgttcttggcatcccggctgctttggtcgcaggtaacgctgcctgcattccactgggcgcgctgctggtaggcgccctcggcctgggtatcggcagccgcgtcctgcggcggatgaagcgggggcggcctgacacctggttctaccgccaggtggagctggccctctcgctgcgctttcccgtcttcggcaaccgtcgcctggtgacgcgctccggcgcctggaccagtcgacgcacggagtccccatga

SEQ ID NO: 366031 - DNA, 222 bp, Pseudomonas aeruginosa; identical to SEQ ID NO: 346438

SEQ ID NO: 366032 - DNA, 222 bp, Pseudomonas aeruginosa
atgatccggcagctcaacgccctcgaggacaccgcccgccgcagtgcccagagcgccgatgagcccggacagcgcttctacttcgactactcacgcctggccgctgacctgcagcgcatccgccaaggcctgcaggactacatgacccccagccgcgcgcagccgcgtgacccttccgacttatccgggaattacaccctgcgcggagggccgatgccgtga

SEQ ID NO: 366033 - DNA, 1413 bp, Pseudomonas aeruginosa
  misc_feature (866)..(875): n is a, c, g, or t
atgaaaacactgccacaagtcgtaccctctcctgaacaacgggctcttgtgagccagaacaggcttggcgtagaagttatttgcggcgcagccggaagcggaaaaacaacaacggctctccttagactaaagtcgctatctcacatgttcaacggtcgacttgggcgtcaggaggaagatcggccaataaagatcttgatcctcacgtttaacaggacacttgcggggtatgtttcagagttggcgagccagcagcctgatcaaaaattcaaaattgacttagaaatagaaacctttagtcgctgggctttaagcaagctcggctatcatttgggcgaccaaaagaaagcagaaaatgctctttatacttttgccactcaaataaacacactctcccctagttacgtagttaatgagtgcaactacattttagggcgctttgagcccgagagattaaatagttatcttgatgcggagcgaactgggcggggcttgatgcctcgcgtccctcaagccactcggcaacaaatacttgaagaagtcattgagccttatcatgcatggcttcgagaaaacaatatagtagactggaatcaacttgcagtgtgcatggcaagagatatccatccaatcggctatgatattgtaattgtcgatgagtctcaggacttttcagcaactcagcttagggcaattaagcatcacttggctgacgatcacaccgtgacttttgtaatcgacactgttcaacgaatctatgctaggggctggacatgggccgaagcaggatttgacgttcgctctgacagaattacaactcttcgcgataatcatcgtaatactcaagaaattgctgcttttgcggnnnnnnnnnncggaattcttactgggctggctgtggatggtgatggcgccctgcctaatctgcatgcagcaacagagagagggccacttccacttgtactaaaaggaagatatcaacgccaggtcgattgggccattcagcatattaagagaaatattgatcttgataaagaatcggtcgcattccttaagccgctgggtggcaggtggtttgataccatatgcacctccctagatgctgcaagtattccttacgcaagtatcaccagagaaagggaatggccgggcggtcgcgagaatgtggccacatgctccttccactcggccaaggggttagaatttgattacgtcttcattcttggctttaaccaagaaaatacggatttttctgaggaggataaaggtgatcaacttcttgtcctgcgtcgcctgctcgctgtcgcggtagctcgagcgagaaaagctgtcttcattggttataaacctggagaagagtcgagactcgttcagtttttcgcagcaggcacctacgccgaggtaaatgtgtaa

SEQ ID NO: 366034 - DNA, 660 bp, Pseudomonas aeruginosa
atgcttattgatgagattaagaggcgtggcattactgagcttattcactttacaactaatcggggaattgtaggagttcttgactctggctttctcctttcccgtcatcgcgtgaagcaggaagacagcctccgatacattttgcactgcaatgcaacaaaccgcccagaagagaacgatttttttgataagagtgaacactggatcgatttcgtaaatctatcgatatctgaaataaatagaagatatttcgaattctctcagagctggcatctcaatgcggatatatggtgggggatactttcctttgaccctatcgctatggctgatgatggtgtttactttgccaccaccaataatgcctatgatcgctgtatcagaaagaaaggcctggaaggactaaacgatttgtttgcacctgtgataggacgcaagtcaccaggctggaatgctttccgcttaacgcgagctgaaaggcttcctacgtgcgagcaagctgaagtgctctaccctggcgcgctaccagcgcgatatttgcggcgtatatacgtcctaaacgaagcctgtcatgatatagtcgtaggttggctaggcgagtttgggtatactgatgtggatgtccaaataaatccccaaaagttccagggaatgaaaaattga

SEQ ID NO: 366035 - DNA, 1701 bp, Pseudomonas aeruginosa
ttgagcaatcgacaatctgcaagcactgcttctgatcccagactgtctcacacattcacacagaccgttgttgaatcagctctgtgggcagctgcgggcgatgcgctaggttggattacagagctatcgcatgggcctgctggcgttaagaaccggacaggcttaaccgaggtgaggcagccagtagcgtggcgacgcttaatcggaggtcgcaatgggcccagagttgcgctgcctgctggaacgtactctgatgacactcagctccgccttgcggtttctcgctccattcggggaaatggagttttcgatgtcgagacatttgcgaaaattgaactacctgtttggccgacttatgcattgggcgcaggcctaggcacaaaagcagctgctctgaatctttcacgcagaggcgttaattggttctcgaatttttatgtgcgaggctcacagagctatataaaaagtggcgggaacggggcagcaatgagagttcaaccgcacgtctggtcatcgagaggcgatgatcaatacatgctcttgaacgtgttcagggatgctattaccactcatggacatccgcatggattttgcggtgcagttttccatgctcttgccctaagagaagcgttgcaagagggctctatatctggcccttccagttggaaaaaatttgctcaaaaatttattgaattgcctaagcttattcgtgatgacagtcagctagtagatttttggcttgcctcttgggagggcgaaacaaaaactactcttgaagacgccatgtcaatattttatgacgaggcattacatgatatcaaccgagtttctgacgcaataagcgacaacccaattgacgcatataaatcaacgctctcagctatcgggtgtttgacagatcgttttcgcgggtctggttttaaaaccgcactagcagcctctgcactgagctatctttatcgcactaaacctatcgaggaagcgcttgcagcttctgccaatgagcttgaaagtgacacagacactattgcaaccatggccggcgcgcttttggggtcaatagcgcgccgcccccctatatggaatattcaagactcggactacatcacatccgaggcagtgcgccttgccaatattgccatcggaaagcatcaggcaagcttctcttaccctgatattggtagatggaatccacctactaaccaaggcgcagccattggtgtttacgaagatagcctcgcgatctccgggctcggtgcattagaaacttatggtgatgaatatacttttggagattcggtgtggcaatggtccgcactaccctttggccagacaattctggctaaaagaaaatcagtcatcaatgaagttattgccgccgaccaactccctaaaccttatgtgtcatctgatcggccgccaccccggagaacacctgcctctgaatacagtgctcagcagcctgagttcaactttgaagcaggcagcgatccattgcctctggaaagtgcgcgcgacgatgtgtttttagatgatctagatgccgagtctgacatcataatttcttcaaattttgataacgatactataggccgtcttcttaagaaaagaatcgactcgacctcatcgatcgagtcagcgatggctctccttgtgattgttgctaaggctagaattgctagaaacaagcgccgcaaatag

SEQ ID NO: 366036 - DNA, 717 bp, Pseudomonas aeruginosa
atgctagctgtagccctcctagttcttcaaataatatcttcattggtatgcggagaggcggccataagaaaatatccagagggagccgccgcattagataaactttcgaatgccggcctattctttcttagatggcgagcctatgcagattacaaaagcgagctaaagtacctccgcaatttctttggagctatcgccataattttcaccattattttctttataaacggtcaagggagaggcgggccaacactcatcaacgccttacccggactattcatcattctatgggcaacaatgcacttcggaatgaatgtcaagcaaggtataagagagcagctttcagttgcagggctattattcattgcgccatggatattttttatcgccgaatacgctggagtcctccctccaggccagctacaacttatggcagctcccttcagaatatttggaatcttaaaccatgaaagctatgtgatagcgctgacattgagcctgatcggcgtcataactggggttgttatggcactaatttcatcgctagtactttcaattatacctctagccgtactattccttatgatctcaacttctaacttcgcacgcgctatgctgagggtaaatcccaaaaccgcgtaccatttctcgctaatttacttccttctcatcgggccagcgttgatcctcgcggaatccaaaggtgtcttcggataa

SEQ ID NO: 366037 - DNA, 630 bp, Pseudomonas aeruginosa
atgaggccacacgatacgacagaggtctgggcgcaactagttctccgcgaagctgatgccttacgtattcaagacttctttctgaaccagattggtatcaagagacggtgtatcttacgcgggatgcatattaccgtgtaccactgccgccgcccgatgcctaatttggaggctacatgcgagcccgcgtccgtaataattccagcacaagacatgcgttttatggttatggctcccggtggagaaaatccccacccctcacttgagccggcgatgcgtaaaattggcgtacgagttcataagtcaagcaaagccacctcacaaattcgagaatatcgaaaccgcctgataatacatgaaacgccgaaagttttgggcagccgtgctcgcagtaccaatttcaaaaacgcattcggcgccaggcattttcaacctcacatgtcagttttgtacgctggaaatggtgtggaccgcgacctcacgattatcggcgacaagttccgagattcaataggcgacttagtatttgacgagttcgttattgatatcgtgagaaaggccgcagacggaacgatagaaagagcgcctaagacaatatctcctcacgcaccgacttcgcctctagaatag

SEQ ID NO: 366038 - DNA, 993 bp, Pseudomonas aeruginosa
atggatgatctgaacgatcaggggaagaaaaagaacaccgtgtcgtctctggagacgcacaggttagtcttcaaaaccgtcaagcagatgattggttttaacccactccaggactcctttgatagggcgggggttggcagcttactgcgggcaatcgaggattccggtgtcggcagattgcagggccagatgcgccagtttgagttcgaaaactcgcgtgggttgttcaccgtcgcgaattacatcaatgcgaatcctgcgttttggactgtaagcaaggctgcagcgaaggtcacggcccactttgaaacgattaagcgggtttacgactggagccattggagcgactcggatttagccagtttagcgctgtcgaagattgcccccgaagtcaacattcactcgaaactcttccagtatctaactgcagatctcagcaatttccagcaagctgtcgagctgttctacagcgacgggcagatgacggagttcggcacgccctcggtcagacagaccgagccgcatgccgaagaggaagaggcgatagttaaatcgctgcagcaggatcagccgctgcagctcctgaaccttcagtcccagcagctcttgtggcggtacattgtagtgctgttgctcctggcggatatctttgtgaaggttgcagactttggccaggccgtggagtgggtaggccagaagatgtcgcaagtttccacggccgctgaggtcaagcagattgctcaggagctgcctacggagcaccgcgcagctctggaagggcaccgtgttgtcaccagaaaaaatgtgaacatccggtacaagcattcgaccgattcggcagttgtcggccagctgcagctgggccaggtcgtggaagctctggacgagcatgagggatggttgaaaatcgaggccgaagtcgatggcgaggatatcaccggctggatttacaagggctttacggccggtttcccggtggtaaagaacaagtag

SEQ ID NO: 366039 - DNA, 2643 bp, Pseudomonas aeruginosa
atgacgacgacgttcgcccgacagctgtcagaacgcttcgtacagaaccccacgtttaccgccgcattggctgatctacagtcggccggtgccgtgagcacgttagcggcaggccttgagagcctcgagaatgccccagattttgaagagctcactcgcctgctttattgtgcctcggtgtttgctcaagctgacaacgagtcattcctgtccttagctcagaacatcgcattcaacgcgcttctcgtctcgacggaggctggcattctggagcgcagcgcgtacatcctcgccgaaattggcaatttcccggggactcggtatcttagagaccgcttcggggcgccgaattcctcattgatgggtttggttcacgacaaggttagccaagaactcaatacggtggacgtcggcgggaacaagattgctctgaccgactaccaaaagagagtttgggatcgtctcgaacaaggcgatgatctagcaatctccgccccgacttcggccggaaagtcattcttggtaattgaaaacctggcgcgcaagatggagcaggcagctcgctgtgtctgcgtatatatcgccccaactcgcgcgcttctcgctgaagttctcgcaaagataaagcagcgcttggagctctttcccgatatccgaatctcggagattcccaccttcgaggcagcggagaaacaagtttttgtactgacccaggagcgcttccagatgcttctggccaccacggctgaaggctttgacatgatcattgtcgacgaggctcagaacctctccgatggatctagagggatcatcctccaggaagccatcgagcaggcgatccagagaagaacgcacacccacgtggttatgctcgcccctggagccgatggattcaaagaggccgtagagagctttggcctatccggcgttgatgagattactaccgccctctcaccagtgctacaaaaccggatatcggtgagtggcgtaccagagtcgagccgtctggactttcgcctacttggctcgggcaaaggacagtacattgggtcagttacacccgtaaaagctcagacgtccaatgaggcccgactggtgacggtagctctgaattttggctcagagggcggctcattactctatgccaagtctcctagcgaagcagccaagctcgcgaacaccttgcaccgaaggctgaagagcaaacacggtcctcgtcacctgaacactgaactcgctgagttcatcagagaccacattcaccccgagtacaacctcataaccttggtggagcaaggcgtcgcattccactacggccaaatgccagccttgcttcgtgacgctatagaagttgccttcaaaaaacaacatctcaaatttttggtctgtactaccaccctgttccaggggatcaatctgcccgcccgcaatgttttcatcagtacgcctaaacgcggtagaaatgagaagaccacgctcaagcccgcactgctttggaacttcgctggtcgcgccggccggatgacaaaggatatcgtcggcaacgtctttctaattgactatgagcagtgggacgaccggctgatggatgagccggtccccttcaagatcgagccttcgttgggcaaaaccatcacggagcatgcatcgacggtattggatgttctccgtaaaaatccgccccctgggcttcccagagaggagctgcatcaacaagttcaatccgcagcgggtttgctaattaccaaagcgcggcaaggacacctagacgattgggttgctagagttgctccagacttggatggtatggatagtttcagtctacgtcacgcggcccagcaagctgcagcaagtctggctattccaactcccatcatgactgcaaactggtcgctagatctctttgcgctcaacgatctactcgattgctttcaagagcacatcaccaagggaacaatcgataaatatatcccttccaatccgactgaccttggcgccaaagcattcggaagctatcgagacattttcaacctcatgttcaagctgttgaaagggtttgacggaaacttcggtgcctacgtgagccctattgcggtgcgatggatggagggaaccccgtacccagtgatcctgaagcaggcgatcacttttgagcaggagcgcctgagtaatcgcttaaaccaagaggaggcgttacgcaagacgggggcccaaataaagcaatcacgaaggctcaaggtcgataaaaacgcggtgattaacagaaccttcgagacaatcgaaaacatcgtcagattccagctcgtccagatggggaaagcgtatgtggacatcctgactcatgcgcttcgcgacgctggagacagcgagcggatcagccacatttttgatttcgccatggcattagagctcggcatatgctccatcacaggtcgtgcgctgatggagctcggcctttctcggattgccgcgagtgaaatgcaacgcattctggatgaccataacttgtccatgactcaagtgcggggcgcgcttgaaagtctcccattgcaggagctgaacctgaacccattcatcgttgaagagctacgcgccatcggactgcagctcggggtaggtccagacatcagcagtgagcaatag

SEQ ID NO: 366040 - DNA, 1182 bp, Pseudomonas aeruginosa
atgtcccttcgaggccccctaacatcgtgctcgaagtgcgcagaatgtggcaatttgatatctttcgagcacctagggacatttcggtgcgctagagcacctgccaaccattgcctattcgcgctatcaacacaccaatgcagggatcgcattttgacgcagcttcccgagcttcttccctcgctggaagacatcctggccaagctactcgatgagtcggaacttgacagtgttctgaattgcgctgtagatggccagtcggggacagccaccccgccacggttgtctctattgcatttgcgattcagcgaagacaaaccgaaccttcagaacctcgcggactacctttgctctgcagcgatgaactatgcgctcagtcgtaagcggcgagacgctttttttgctgaactgagtaagtctaagaaaagcagcctgtccctgatcccgcggatcaataaagccgtccgagacgctttcatcgagttccgcgaagctcacccgaatcgcgcaagcgaagtgggtgaggtgctcgcattttgcatcgcgacccactacttacaggcggcacaactcatcgcgaaaatgtctctcaagacttcgcccaacatgcctgtgcatggactcgatggcattcacgctgccttcaagaatgggtcgttaaccgtctactttctagaatccaagcttacaaaaactgcagctaagggcctcaaagactttgctgagtccatgaagagctttgacgaaaagcccaagcagtacgcccgcgaatacgagctcgtctgcaaccttggtaatctcgatgtcctaccggagaacgagcgggagcatttactccagtacttggatgtttactcaccagcgagctcgctgaagcgggagcgcgcggttggtgtcgtgtgttactccgaaggaaaacactacgctaattgtctgcctgtcgatgacggcgatgtgctgaagcatgaacatcattttgccgggctgctcgctgctgaccacggagatcaccagaaatacctactcgctcagctgaacaaaaacgaagtcgctcccgaaaaatgctccgtctaccttgtagcggtgccatgcgtagccaccctgaggaaatccttctacacagcattgggcattccaccgatcgtggatgaactggacgatacggacgccaaggaggcttaa

SEQ ID NO: 366041 - DNA, 399 bp, Pseudomonas aeruginosa
atgacgaaccacgccgccatcctttccgatctcttgctccgggcagagatcaagcgccagattgagcgctacgttgaagccatcgcagccagcagcgagccggcctacctcgtctctcatgatcccgctggtaatcctctctatcacccgacatgtcttgccatttcagccgttcagctaaagcagatgcatgacttcatcatggggctcgagggtgacgtggagggcgaggcactaccagcttttcatgatgcctgtcggtgcgtggggctggagttcagccccttggtaggcatggtctgcctcaacgaaagtgaagacggctacctatcgccggaaaagacactgaactggttcgtgaagtgtgttcgagtttgctcacttgccgcacaggagtga

SEQ ID NO: 366042 - DNA, 3435 bp, Pseudomonas aeruginosa
gtggcatggattgaaactaaaacaggattgacaggagaggctcgccagaaaatcgccgcccagctctgggaagcctcccagactggcgggcgggcagctgtcctgatcaccggcgtctccggtgttggcaagtcagatcggttggtgcgtccgctcattgatcgatcgtgcgaacaagggcgcacagctcttcggatcattgttccgcagtcacctctttccatcgatgccgagctttgcgccttgctcatcaatgaattgcgagacatggggcaggaagatctggcacaggcctgtgagaagcttgtcggattttcctcagttgccaagacagttctcaggcagggtgccctgatcgttatcgacgagtttcagcgtctactggagccaatatcgacgcttcctattcccgcctgggccacgtcatttagcaagctggcgacccgaccggtcgatggaggctgcttgtggcttgtttccaatcgtgaggttgcgcctgaatggaccgagcccttctataccgtcaatctgccgccccccaacaacgatagcgatcagattgcgatcatactcgacgcattaggttccgaagatgcagatgcacgcttcccatctgcgcgtagggttgagatcgcaaggcgactgggggccaacccacgtgccctgcgctttctgggcatactgttgcgaacccacgctctggaggacttgatggggccggcgcagccaacgccggaagagccgccagaccaggcattggtctccaagctggagcagcagatggtggcgcgtgctgctgaaggtttgcccgcgctgccactagagttgctcaaactgctgaccgtgttgcccgatcctgccccactgagcttggtagaggctatcgcggcaatgccacgagcagagaccctccagcacgctgcggatctgcagagccgttacctgctggatgcccgtggctcaaggtatgccgtgcatccagtggccagagaggtcattggccctcaactgaggagcgatgaccagaactggaaaaaggcgaatcaacgcgccggccagtggcatgcggatgccttgcaagtgtccgtgaatcgatccccccgagatgccgatcttaccctgggactctcgggtgttcggtatcacttcctgaatgttgatgcacgcatcgagctagccacggccctgcaacatgtccgtgcgcacattaaaacaaagtttggatggagcgccgcgaatccaacctcgaatactgagcgcgatagtgccatcgcgctgcttagcgtcttcctagagtcacccggtgatgcctgtatcgagttcacctacgcgaaaatgctgttcgagcgtgacctgccaggtgatttgaaacgcgcgctcccccatgcacaacgagcgacggtaggtcaggactttgctcatccgtgggttctatggatcaagctggtcggcgaggttgaggggccgaaggctgcagtcgcagcggcacagcattcggcgacggcggttcttccgaccaagaatttgcactcggtataccaatgtctaggggcctgcctcgatcatctggggcaacctgaagatgccattactgccgtgctagatggcgcagagagatcctccgggagcgaggaacggttggtccagcaagccattgcgttcgcagcaccgcttccggatagtcggcttctggagcaagttcgggattggattaaggcccgcgagtcgaagtatcgaccgcaactcgccgttgcagaggtgatgctcttggaacaacagggatgttggcgagaggcagcagcactcgccgcgcaactgcgagcaagcatcccgaattaccttcatctttgtctccacgaagccatttccgaactaggggcagacaatccagacggcgccttgtctgcattgaaccgctttccgattccgatcagagaagcactacgagatggcgcgcaatggttgctctcattgattgcagtccagagaagcgatgcggtgcaggcagctcaccacttgggcatttacctcggccacccacagactcccaatacgttgactgccctaaagtcggcattgcttcgcgaatgggatttgcgcgtcagcacgatcggtgaaagcaatccagcgctaatggcaccggttcttccatcagctgtgacggggctgaaaacagatgtgcgtcgaccgcagtttgggcctcctgttctaccgcagcattcgtcggcacacagcgatattgccggagtgtcgccgcgcctctcagtactggcgatagcaacggagtggcaatcgggccgtggaggattatcgacgctaaatcgcaacctttgccttgcgtttgcccgtcatggcgctacggtgatatgtgtcgtcgagcctagctcaggaactgcgcacgaagagggtggcgtccaagtcgtcgtcgcacgaaacacgccggggatggatccgcacgacgcattggggcgcctgcccgaacttcccggagatttcacgccggacctcatcattggtcatggacgggtgacggggcctgccgccaaggtgctggcggaggatcactttcattccgcccgccgcctgcattttgtccacatggcgcccgacgaaatcgaatggttgaagccaggccgacaagatgacgcagccatgcgcgccgaagaacgcacccgtacggaagttgatttggcacggggtgctagccaggtcgttaccattggtcctcggctgcatgggcggtacttacgagatttgcaggctgaaggactttctcatcctttgcggctcgatccaggcttcgactcggattcgccgcaagatcgccaccctcccgacggccgaccatgggctgtgttgaccatggggcgaatggaggatgccgaactcaaagggctcgacatcgcggcaagggcaatgggccgggttgcagccgacaaaagagtttctgaggccctcgaactgatcgttcgtggagcccccgaaggttccggtgaagcaaccagagaaaaggtgagagactgggcctcgacgccatcgctctccgtattggtgcggccatataccatagaggcagctcggctcgacgccgacctacgacgatcctgtctggtattgatgccttcgcgaactgagggcttcgggctcgttggactggaggccatcttggccgggacacccgtgttggtttctgagaagagtggcctcggcgagcttttgcaagaagcactcaccaaggaggcggcagcgcgtcacgtggtgccggtgacgggcgatgtcgacatcgataccgacgtttggtcacgtgcggttgaagccattctccttgatcgggaggctgccttccgacgcgctatagagttgcgcacgaacctcgccaaacaaagaacgtggacagcagcaatcagtgccctcgtagcggaactcgaaaagtag

SEQ ID NO: 366043 - DNA, 318 bp, Pseudomonas aeruginosa
atgaagaagtacttggctgtcgcgcttctactcgcggccattgcaggatgcggctcagagccgcccgttaccgttgagctcggcagaaactccgtctggggtggaccgcagattcgcatcaccgcccgcgaggacagtgtcaccatcaacaaggtgcagatcaatcgcggcaactgccccgtcaatgtccaagagcgcctgccgtacaagctcgccttcggtgagctattgaaggtagacgcaccgtcctgccaaaaggtagttgaggtgtctctctccaccagcgaaggggattacgacttcagttttgacagctag

SEQ ID NO: 366044 - DNA, 459 bp, Pseudomonas aeruginosa
atgaaaatgatcagagcgatagcgctgctgtccggccttgccgtgggcgtgatcgaaaccagcgccgtagcaggcgcctacgaatggaccaccggttatgcccagggtgtgcaggaacacctggtcgacgatggcaatgggaacgagctgaacatctcctgcccagacgatgatgaaagtggcgtgagcgcctacgccacgattagtggcaagcagtattcgtccaacgacgacggtggattcgatgtcattgtcgatggtacggcctacagcaatcccttcttcaccgactgccacgtgtgcggcaccaacttccctggcttttggaccgcactgcgcaaggcgaacaatctccagctccgcgcggagggcaggactgtgaagctacccaccaagaatctttccaagattctgcagccgctgaacagcaagaaaaacctttgccgttccgcctggtaa

SEQ ID NO: 366045 - DNA, 387 bp, Pseudomonas aeruginosa
atgacgaagcccatgaccgtcaaagcactagaggacttaggccgagtgaggctgtctactcacttctttatgcgcgacttcctctactcagaaattagccagatcgaagggattccgaacgtgccggattatcccgagcgcgctttagaggctggaaagcagctgtgcgaccagttgctcgagccgcttcaggagcgctttggccgagtagtcatacgctctgcctatcgatccccggctgtgaatgccaagggcgcagagaatggcaatcaatacagctgcgcggccaatgaaaagaactatgcctcgcacatttgggattatcccgatgcagagggatatcttagtgctaccgcctgcattgtggttcctgcacttttgccttag

SEQ ID NO: 366046 - DNA, 930 bp, Pseudomonas aeruginosa
atggacttcacgaattggttggatttgctagggaaagcaacgcacgggcaattgactgcgcccgccttcgtggtgagcttagtgatgttgctatgcctttggtacggcgtgcgttacttcctgtattcgttcgttctgagccgccgtatcaaacggctgtcgaaggatgttcgcgccgccggcaagctgccaccggccaagcgtcgcggtgccctgaaacaggtattccagaagcctcctctgcgacatgcgtggcaggaatactcagagacgctgcacgaccaatttgaagtacgcgatggcgagcggcagctgctgcgctcccgggcaacggttggcgctggaaacttcttcacgtctcagacggtggtggaaacgccgcttggcaccgagttctacaagcagttgccgggcattctgaccggcatcgggattgtcggtaccttcttcggtttgatgctgggcctgcaacacttcaatccaggtacgcctgagcaggtcaacgccagcgtcgaccagttgctcaaggacgtactgtttgccttcctgggttccttcttctcgatcttcgcctccatcgccgtcacgctctccgagaagtggcgcttgggacgctgctacaagcacctggaaaaactgaccgaggtcatcgacggcctgttcgatagcggcgtcggcgaggagtacctggccgagctggtgaattcgagcaatgaaagctcgatccagacccgccaacttaaggacagcctggttaccgacctgcgcgagatgctgcagaacctggtggatacccgaccatccgtgaccccagcacgccgacattcgaagccacgctggatgagcttctgcagaagcggcgtgccttggcgcgagacatgttgcacggcgcttcggaaatcaaggcagcggagtttggtgagattttga

SEQ ID NO: 366047 - DNA, 828 bp, Pseudomonas aeruginosa
atggatgaacaactgctcggcgcccttcttgtcctccatgcggatctcgttgaagttggccggcgtgccgcccttgctcgaacggctcttggtgccgctctgggtagcgttcgccggcagctcgtagggcaccgtctgctcggcgttgtagacccgcccggtgatgatcggccggtccgggtcgccttcgaggaagctgacgatcacttcctggccgatccgcgggatctggatcgagccccagttcttcccggcccaggcctgcgagacgcgcatccagcaggagctgttctcgttggactggtcgtggcggtcccagtggaaatgcaccttgacccggccatactggtcggtccagatctcctcgcccttgggcccgaccaccaccgcggtctgcgggccgcgcaccaccggcaccggggtcgacggcaaggggcggaaagcctggccggcgtcgatacagtccagctcgctctcgaactgcgcgccgcccccgccattaccggtctcgtagagttcctggactacccggtactcggcgccaaccaccaggtattcgcggttctggtccaggcgcgggtagttgctcaggtggaacagatggcccgccccgatacccctggcgcatccccgcaggcgaactcgctcgtactgggtctggatcgcctcgatgcgggtccgtgcatagtgttcgccgtcctggctctgcacatactcgccagggtagtcgtagagcgggtagtcggccgcggcatgggcgcgcccgacattggagcgcacttccaggcgggtgccgggacgctggaagtcgtagtcgttgaggcttag

SEQ ID NO: 366048 - DNA, 714 bp, Pseudomonas aeruginosa
atgagtgagccaactaggcttgtgtctacgcacattgggaccaatggacacaccactgctcgtgtgacgatgagtccaactagtaacaaggttcgtgccgaaattactgcccctccggatcaggcgattccggttgtttttgtgccgggcatcatgggtagtccgttattgacgtcaaatgcggaggctggaaggttacttggggaaaacaatcgttgggcttggtttccagacgatggcgtggggtgggtggcggggtttactgcgaaaagagggtaccgtcatctgagcccgacagagcggaaattgttgcttgatcccgacactacacggccagtctcgtctcccgaggatgcagatcgtgaagttgtttccgagcacattactactctgccgttgcaggaggcacttagtcgtggttgggggtcggtgatgatcagctcgtacggcgtacggcggcattctcaatttcctagaagcgcagcttcgcttcatcatcacctcgaagggggaggtgtatccgggggtgcaaggtgcggtgccgcacaacccagaggtgtgggggcagctcaatggctatcaagtactcacaaaggagatgttgcgggaggctgccgagtttcgttatcccgtctatgcagtgggctacaactggctgcagaccaacggcaaagccgccgactatctggcgggaaaaatcgaagccatcattga

SEQ ID NO: 366049 - DNA, 357 bp, Pseudomonas aeruginosa
atggcagatacgctcaccacccgaaagcttctcggtcagctactggtcggagtgctgatcgtcatcggactggcagtggtcggtacgctgctcagcctcttcgccctgaaccacttcggtggcatccagggcctggaggcctggcggcaaagcaactactggagcttgttcgcctggcgggcgctgctgtactgcgccctggccatcgcctggttccggtggttccggctcaagcagcgcaaggaactgagcgcgcatgagcggcagcgcattcggcggatcgagatcctggtgctgttgctggtcctgctcatcgaattcagcaaagcctacttccgcacgggaggcgcagcatga

SEQ ID NO: 366050 - DNA, 348 bp, Pseudomonas aeruginosa
atgctgccccacggcgaggccaacatgctcgacgtctgggagcgaggtgcgaccagctcgataggcaacagccgtggccggctgctcctcgatgccaggcaaacgctgcggcgcccaatcgatccgcagcaggctgcctccgcgaatgaccaggccgactacacccgcacggccagcaacgagatcaacagccagttcaaacgactgcccaatcccgacctggtgatgtatgtgttcccgcacctggccggcagcgatcccgccccggtcccgggctacaccaccgtgttccccttctaccagcgagtccagtacgccatgccgggcgaacgcacggaggactattga

SEQ ID NO: 366051 - DNA, 357 bp, Pseudomonas aeruginosa
atgctgaaattcaccctccagaaactgtccaccctctgccggcgcctggcagccatctctttggcactcccaggtgtcgccttggctgcactccccaaacccgaggcccctagccgtggggaagggtcgggaatcatgcaaaccatccagaacttcggctatgacggagcgatgctcctcgcgctcctcatttgcgcagctgtctttcttggggtcgcttggcatacctacggcacctatcacgccatccatgacgggaagaagaagtggtcggatctcggagcgggcgtagccgtaggtgtcggcctgctgatcttgatcatttatctcgtcaccaaagccaccaccatcatgtaa

SEQ ID NO: 366052 - DNA, 357 bp, Pseudomonas aeruginosa
atgctgaaattcaccctccagaaactgtccgccctctaccggagcctggccgccatcactttggcgctccccggtatcgccttggctgcactccccaaacccgaggcacctacccgtggggagggctcggggatcatgcaaaccatccagaacttcggctatgacggagcgatgttcctcgcggcgctcatctgcgtggctgtctttctgggggtcgcttggcatacctacggcacctatcacgctatccatgacgggaagaagaagtggtcggatctcggagcgggcgtggccgtaggtgtcggcctgctgatcttgatcatttatctcgtcaccaaagcctccaccatcatgtaa

SEQ ID NO: 366053 - DNA, 828 bp, Pseudomonas aeruginosa
atggatgaacaactgctcggcgcccttcttgtcctccatgcggatctcgttgaagttggccggcgtgccgcccttgctcgaacggctcttggtgccgctctgggtagcgttcgccggcagctcgtagggcaccgtctgctcggcgttgtagacccgcccggtgatgatcggccggtccgggtcgccttcgaggaagctgacgatcacttcctggccgatccgcgggatctggatcgagccccagttcttccccgcccaggcctgcgagacgcgcatccagcaggagctgttctcgttggactggtcgtggcggtcccagtggaaatgcaccttgacccggccatactggtcggtccagatctcctcgcccttgggcccgaccaccaccgcggtctgcgggccgcgcaccaccggcaccggggtcgacggcaaggggcggaaagcctggccggcgtcgatacagtccagctcgctctcgaactgcgcgccgcccccgccattaccggtctcgtagagttcctggactacccggtactcggcgccaaccaccaggtattcgcggttctggtccaggcgcgggtagttgctcaggtggaacagatggcccgccccgatacccctggcgcatccccgcaggcgaactcgctcgtactgggtctggatcgcctcgatgcgggtccgtgcatagtgttcgccgtcctggctctgcacatactcgccagggtagtcgtagagcgggtagtcggccgcggcatgggcgcgcccgacattggagcgcacttccaggcgggtgccgggacgctggaagtcgtagtcgttgaggcttag

SEQ ID NO: 366054 - DNA, 783 bp, Pseudomonas aeruginosa
atgactcgtgtggcagtggaggctaccaccataaagcacaatataaccaagaactgggcacctatcgctgccattgcattaataatttgcacaacggcagtagcagcaccttggctctggcaattctctgcatccgggttaagcacaagccctgctgattggggcgtgtttggcgactacttcgggggtgtactgtcaactttaatatccgctcttggattcatcggcatcatagccactataaaaactcaatcagataccatttctactcagctttctggaatcgctcaggaaaaggaaattcgagacgatgagacttatagtaaacaatcgcttgaatgccttaacgaagccttggataagcttaagagccccatagatggcaaactctatagaagccgtcttgcatggctggaatctgcccgcctaatagtcattgcacaggatcttgctggccgcatcaaaagcgatagcatgcagcatacctatcaggcagcagagaaggtgattcgctctaaatttagcactctgctcaaccctgacaacagccctgagacaatgcagcccagttacttctaccacatggattgggatcgctggatcacagggcaacgacaagaaccaatacacgaaacttcagcctatgtagtctataaatttgctagctggcaaagtgatacagttgatgagcttgactctgtggaaaagatagatttcaaaaatatcagtgagcgatactttggcgcccgtcacttccttgaaaatggcaaggatcaaaaatag

SEQ ID NO: 366055 - DNA, 1260 bp, Pseudomonas aeruginosa
atgaatcgaagccgtaatgaagatttgcaattagcaattaaggttcaatttgacaagtacccattgttgccaaagctgctgaaaagtccaactcattccttgtgttcaccctggactcagctcgtaagccaacacctccaatctcaattttctgcctctggcgaaggagatttttatcgggtcgttttcaggccaggagcgtccggtgaattgatgactattcaaaaagggccattagctgggcttaaaacaaccagtgttgttgaaggtggtaaaataacttccatggcggcattggaaaaggtaaacggtcagctagctaaaagtttcatacctatgtttcttacgttaggggctttaaattcgatccatgctcgcctgagttacattacagatatttgtgtcaccataagaaatcggcagatatccggtgacaaagccaagcttgagcgaatctccgaagtaatctcagactgcttcgacagtctgagcgaaggagatgaagtgctcaatgcagagaacctccgtcgtgtgactacaaataccgatgattgctttgaaattctaagtgtgtttttggatgatttagagactcagcacaaggcgcatgagatggattccgagagctgcgatgagcactcgggcgtacaatggtatggtcatagaaaacttgctaatccgacgcaagcaatgcgcacgcttatgcggcatagtgttttttcagcattcgaaaggtatgttgcaggtagggcttgtcaagtgctgcttagtgggaattattcttcgactaatattggccgtcacaaacgagcattggagcgggttcgagattcaattcgaaaaatttttgatgagagaatgaagaggcatcataaaggtgccgatttcttccgcgataaggttaaatcttttaaagaaggatgttatgttcctaactggacgatggagtccgctcagtggtcgttggatcggcagttggctgtcatcaaggagttggagggcgaactatatactctgcttgattccaaaattgcagactttgactctcttgcggaaattttcgcaaggggaagttttgaggcaattgtcatcgacggagggatgatttttagtgagctagatcctccgcaactggcaagtgaaattacgaactctcccgaattgccttttaatacgggccaattcgcccaaagaactggggttttccatggtaaaaatgattcggagtcaaaaaacagtgctgatgagcctgcccagtaa

SEQ ID NO: 366056 - DNA, 1986 bp, Pseudomonas aeruginosa
atgcataaatcagtgaagcaaaaaataagagttagaaaaaacgatcaatatcgcgcaatgctgaccgaaacactcccatatgaagtacctcttttattctcaaacgaaggtttatatagagcagctaagctaggcataactgaagagatagaaaagttattaaaaatatttaaccaagaagtcaccatcccatacaaatacaagataaagaaaaactcctacgaatctcgtgggctagcggttatgcatccagcccaacagctagccgtaagtaatttctacaccaaatatgagcatattttagttgctctctgccaacgcagtccatttacattgagggctccatccaagatagccaactattactacgaacgaggtagagtagaaaagccagcagaaacaaaagcagatcacgttgagttagatactgatggatttcaattagaagcagctaccgcaagctcatacttcacgtataaaaaatatccattcatgtaccacttctatgagtcacatgaatttatagaacttgagaaaaaattcaaaaccctatgccagatagacatttctgactgcttcaatagaatatacacccataccatagcatgggccgttaaagacaaaaactatgccaaaagccatataaggaaatcgaattttgaaaacaattttgacaaacttatgcaaaactcaaaccatggagaaacagcaggaataataatcggcccggaaatctcccgaatttttgccgagatcatactacaaagaaccgacctggatgtaatcaaagcagcaaaagatcaaaacctaaagcataatgaagactatgctgttcgtagatatgttgatgactatttcatctattctaacaacgagccgaccgcagatctaataaagtcattgatctctaattcactttccgagttcaaactcggcataaacccttcgaaaacgaccgtccatacacgcccatatatcaccagcacaacaatagccaagcacaacatttccactagcatttccgagcttttcaacaaatatagaattcaacatatagagcgcgatgaaaacaaaaaaataatttccgtaaaaacagagataaagcccattcaaaatacattcatcacgtctcaacaagtaatcgcagcaattaaaagggccattggcgagaatgggtcatatgacacctcagccaactatttattcggcctaatcaaaaagctactgaaaagccttcccaagaaagggcttcaagcgacagaaggtaatgccgagcaaaatttatactcttttctatccgtcatactggacatagtatttttttactattcaatgacacccagagttcggcaaacctatcaaatctcagagataatattattagtatcaagcatcgcaaaaaattgccatcaagacatttgcgatcaattaacacaaaaaataattcatgaatctagaaccgcaatgattcgtgcaatcagagaaaacccgcatcacaaaatagaagtcttaaacttactagtagcattgcgatggctaggtgaaaagcatctgctagatgaggaattcatctattttatctttgatatctcacagtgcgaaacaggaaaaattgaattcaacggaaccccagactacttcgaaataatgctattaattgcctatataggtggaagtcccaatcactccaaaatagtggaatctgctatcgaagagatccaaactagattcactccgaatgactggcttgaaagttcagaactgtgctgcacttttctagatacaatgtcttgcccatatatatccagcgacgataagattaaattgtgcaaaactgtattaagaaagacatctgacaaagacataaatgctagatctaaaaaactacttagcctgacatccgcgcgtaattggtttttcaactgggatctccaaggagatctcgccactcaactgaggaaaaaagagttgcgctccgcctactaa

SEQ ID NO: 366057 - DNA, 1224 bp, Pseudomonas aeruginosa
atgatcaatcagaacttctcatccagaagctttcttagattaatcaacaagcaagactttgccgtatacaccattggcaaaaccaaagaggaagttcgacagtcaatggacagggtagaaacaacctgccgcatgacaggctataattttcagaacttccaaaaatatagaatgtcacacggcgacgtccattacccaagcaacttagtagacgaacttgttcttagaaagcttgacaacaatataaaaagaattctatcagtatcactcactgacagaaacagagttgtcccccaaattaaaacccttctccaagaagaaggtgatttctgggttcagaaattagacatcagtagattttttgaatcagtagatcgcgagctactcataaaaaaaataagcgatgactatagggtatcttttgaaacaaagcagttccttaagcttttcttttctcatcccagcatatcaggactgaaaggacttcctcgcggagtagctctgagctctacccttgcagatatctacatgcacgacttcgacaatcaatgtaagtcgctcgatggctgctactactacgcaagatatgtagatgacataatattactcttcttcaaagagccgacccaccaagtcagctcattaaaattacctccaggtctaaccttcaataaggataagagcagactgctcttccacccaagtaaaggccctgcaaaaacaaaacaaaatgagaattcaatagtctatttaggttatgaattctcattcattagcaagggtcaaaaccgaccatcatctctctctgtcggaatatccaaaaagaaaataaatagattaaaaagccgtgtaacgctagccctctttgaattttgtaaaacacagaattatcgactattaaaaagcaggctcacctttctggccagcaattataaaatcaaagaaaagcaaaacgctggtaatctatacgcaggaatattcttcaacaaccaactcattgatgacgaccgactccaagacctaaaagaaattgatgagtttataaatagggcgatcttctcaagaaccggctcacttggaaaaaagctatatccattactcacaaatcaaaagcgacgtgaactttgccgcatatctcttctcagtggattcaagaacaagatagtccgtccgttcactcctaatgagttacgtataattaagagcgtctggccccatgcataa

SEQ ID NO: 366058 - DNA, 771 bp, Pseudomonas aeruginosa
atgaccctgaaaggcaagaccgccctggtcaccggttccaccagcggcatcggcctgggcatcgccctgagcctggccgaggccggcgccgacctgctcctcaacggcttcggcgaggtcgacgcggcgctggcgcaggtccgcgcccgcggcgtgcgcgcagagcaccacccggccgacctctccagcccggagcagatcggcgaactgatggccttcgccgagcggaccttcggcggcgtcgacatcctcgtcaacaacgccggcatccagtacgtggcgccggtgcaggaattccccacggaacgctgggacgcgatcatcgcgatcaacctgtcctcagtgttccataccacccgcctggccctgccgggcatgctcgcgcgcggctgggggcggatcgtcaacatcgcctcgacccacggcctggtcgcctcggccgggaagagcgcctacgtcgccgccaagcatggcgtgctcggcctgaccaagagtgtggcgctggaaacggcgcgcacgccggtgacctgcaacgccatctgccccggctgggtgctgaccccgctggtgcagaagcagatcgacgcgcgcaccgccgagggcgtctcgcccgaacaggcggaacatgacctgctggcggaaaagcaaccctcgctggccttcgtcacccccgagcaactcggcggactgacgctgttcctttgcagcgaagccgccgaccaggtgcgcggcgcggcctggaacatggatggcggctgggtggcgcagtag

SEQ ID NO: 366059 - DNA, 333 bp, Pseudomonas aeruginosa
atggctgcgcaggagaagaacaaccaagggaaaggacaggtgtcgccggtggagaaggttcgtctacgggtatcagcgatgatcagtagcccgcgggctcaggcggagcgtcgggcgtcgatctggaaggcgcagggggattcggaagaggcctggcagcaggtgctggaggagttggccgagacggaaggcttggagatgacgcggaacgaggacgggactgtgctgctgacgtggcagccgtcagacgaggaggagttgactccggaggaggaggccagcagcaacgagatggtggtgcagcatctgcatgaggagttcgcaccgttctga

SEQ ID NO: 366060 - DNA, 342 bp, Pseudomonas aeruginosa
atgaaaagcacagaactgtgggaaagcggtgcgctcggtcagtccgaggagcatgccgccgtcgccactggctcgaagcaagaggttgacgaagcccttggaatgcagctcatctccattcgactccagaagcagctgctcggcgacctgaagaagatcgcggagtaccacggcgtcggttatcagccgatgattcgcgacctgctcaacagattcgcccgctcagagatcaagaaaattctctgtcaacgtctgtccgacctagaggcagaggatagtgtagtgagtgagagcagtaccgtccctgtgaaagagtttatggatgagcgccgtcgcgcctaa

SEQ ID NO: 366061 - DNA, 291 bp, Pseudomonas aeruginosa
atgaaaggactcatcatctctaaaggcgtagagaagcacatcgccgaaaagcatgcagtgtctcctcgggaggtagagcaatgcttcgaaaactgcgatggagagcatctgtacgatcagcgagaaaagcacgcctcagaccctcgcacccagtggttcatcgctgagacaaacaccggcaggaagcttaaggttgctttcgttttcgacgatggcaaggtctacctgcgcacggcttacgagccaaatgctgaagaaatccgaatttacgaaaaattcgcatacgtatga

SEQ ID NO: 366062 - DNA, 705 bp, Pseudomonas aeruginosa
atggcaaaggctgatgagcggcggcagttccgcttcgcgctggtgaaggacatcctgcgctgtgagtcggttaggaagctgccccatgaccacaaaaaacagcttttccggctgctggcgaacgggtggggcatcaccgataccccgccggatacatcacgcattcgtgcacttgaaaaagctgcgtccgacgcccgtcggctgcgggctgcgcttggcgccctcaacgagaaggacgcggccagtctggacgtcaactacagccagaccatcccgctatcaacccgcctgctagctttggaggaaatggcccacgatgccgatgcgctggcaagcgtcatcaagggcgaacaggcggacatcatgcggctgcggaaacggcagacagcaaaaaggcttgccaacaccctttcgatgtttggaatcccgtgcagcacgcgcaatgactgggatgtggatgagcgcaacgtgacgaccgccatgcgctgcgtgatgctctcgatggtggaggccggtgcaaagaagctgaactggagcacaaccgcctccatcatcaaactgggctttcggatgctgaccgatccgagtcaagagaaggccgtattttcggcaggacgcatggcagtctcggcggaggaagcggagaccgtccaacttctcatgcgagagatgccaatcttcaatggcatcaagctggtggagtaa

SEQ ID NO: 366063 - DNA, 306 bp, Pseudomonas aeruginosa; identical to SEQ ID NO: 147864

SEQ ID NO: 366064 - DNA, 783 bp, Pseudomonas aeruginosa; identical to SEQ ID NO: 244615

SEQ ID NO: 366065 - DNA, 459 bp, Pseudomonas aeruginosa
gtgatcccggcaacgtccctgcatccgctgcgctacatcggcggaatggcggcgctgaatctgccgtcagcaaccggaacgggcgattggcacttttggcagaccttcgagcgcgagcggcggcaccgttcgcgctctttcatttcgggcgcagggtgcgcgaccgacacaaccgtcctactcggggacgctggtatctacgaggccagcgagcttttgcggacgctgggaatcaggttcgagggcggcaccgcctacgcggccagtcatgcccgcgcatgtgccgatttggtactggcagccgtgatgcgaggcctgtcgccggactttgtgacgctggatgactggatgcccggcgagatcgacaagcaggccgtccatgacctgataggccgtgcccagccccggctggatgcaacgcaggccgaggccgtgaaggcgtggcagggcaggcagtga

SEQ ID NO: 366066 - DNA, 402 bp, Pseudomonas aeruginosa
atggcaatcgacaagcacgcagagtcagtccggctttccggcgatccgctggaatcgttggcgggcatcgacgagatcatcaaccgtggcggccacaaggcatttaccgggctgctgcacgccatcatcgagcagccgggcggccccgtcgcctaccgtgtgcgcgtgctctatgagcgtgtccagcatcgcgcagccgatccagagtttgcggcatggccgcagtatcaggcggcctactggctggccgtggcaatgggccagtttcggcctgccgacgcgacaagccaacgattcgccagcgtctgggatgccatcgaggacgaccccgccgaagtggagaagatgaaacagtggtctgcgcggagaatggaagccgacgacaccgaggacaaggcgtga

SEQ ID NO: 366067 - DNA, 333 bp, Pseudomonas aeruginosa
atgagaatctgggcgtttgacgagaaccgggccgactttgtagaggcgtcgtcggagcggatgagtgctgattcgaccgggtgctacatcatccagcgcggcgacgtgttgatggtgcgcgaggacggccacgagcggcccatgcccgagcggctggaggtggccgggcagatgttcgaccgggagcaatttgacggcaaccatcccctgtctttgcgggcagaaatgaggcgggacggccaatgggcgcgggcgcagttgcaggcccgcgaccgggccgaaatcgccctgccgctggaattgcccatttgggtgacaaggcggtatgactga

SEQ ID NO: 366068 - DNA, 1023 bp, Pseudomonas aeruginosa
atgcgcagcttgggcagcttgctggacgctggcgtggcagaagccacgcccaagcgcgatccgctggagcggatcaggcagaaagccgccgaggtgacaaagcaggcggagcagcacgacgccgcccatgcattgactccacgggtgcgccacctgatcgacgaagccgtggagatggagatcgagcaggcccgcagcgcaggtgcgacaggctacatcgcgcactttctggcgcaggccacgctcccccacacagaccccaagagcaactattttgagcgaggcacgggcaagctgaccctttccatcacagccaaccccaagtatggcgtgccctatggcgggctgccgcgcctgctgctggcgtggatgtgtacagaagccgtccgcacgggcagtccagagctatcgctggggcgctcacaggcggaattcctgcaaaaactcgatctgcacaacgatggccggtacatcgcccgagtgcgtgaccagagcttgcggctagtccgctcgctgatctccgtcagcggcgcggacggggatgcgctgggcatcgaaaacatcctgatcgccaagcgggcgttcctcttctggaacgcccgcgatactgagcagcccggactatgggacagctcaatcaccttgagcaccgatttcttcgagagcctgacccatgctccggtgccgatcaggatggaggcactgcaagcactcaagaagtcgcctctggcgatggatatctacacatggttggtctaccgcatgttcagtctgaacgtggcgacaatcaagggcggcaagcggcttgctcaggtgccgtgggctggcttgatgatgcagttcggctctggctatgcgaatactcccaagggcctggccaacttcaagacgaatttccggctccggttaaacgaagccctgctgttctatcccgatgctcggaaccacatcgaggaaacgaaagagcacctgatcctcacccctgctcgtctgcacatcacggcgaccaagaagaaggtataa

SEQ ID NO: 366069 - DNA, 309 bp, Pseudomonas aeruginosa
atgagcgcctcaatcaccatgctccgccagggtattcgggcagagcgcgacctgacctcgcacctctggacgatcctcaacgaaatgcggttgcaaaggcagcttcccgagtgggccgagcgcgccatcgatggcaccacgcagcagtcagacgaaatcagcgcacatcgcaagcaggtcgacagcatcctgttcgagttggtccctgggctccgcgaggatgtcgaaaggactgatcgcgagagctacctcgaatggagagcccgtgagcgcgaggttaaggacgcgctgggaggtggtcatgtctga

SEQ ID NO: 366070 - DNA, 324 bp, Pseudomonas aeruginosa
atgaacgaccgcgaactactcgagctggcggcgcgggcggcggggattgatccagtcttggctgaaccgatcaatttaagtactggggttgaatattactggaacccgcgtgatgacgacggcgacgcgctgaggctggcagtgaagcttcgcctagacataacgttctacaacggctttcaggaagtggccgccgaaccatcaaatggtgacgggatgaaccctagtcaggaagtgttcatagaagatccgtatgcggcaactcgtagagcaatcactcgcgccgcagccgagatcggaaagtctatgggaggtggggagtga

SEQ ID NO: 366071 - DNA, 507 bp, Pseudomonas aeruginosa
atgagcattgactggagcaaggcaccggagggatgtatcggagcattcgcccgtatcataagtaaaactgcattctttgtattttctaagcgtccatctgactatatgagcagagaaggatacgagggagaaggcgaggatggtccctatcacgtgttctctgagtattgggaatggatagataaaccatgggacggccagggcctgccgccaaccggcctgctggtggaatggaaagccggcttggatcacgagtggaggcgcgtaaccgtgctggcctacgccaatggcgatgcgtggttacagcccgaggacggcggctcattcatcgtcggaaacccggcaaacttcaggcgcatccgcagccccgagcagatcgccgccgaggagcgggaggcaggcatcagcgacatgcagaccatcaccgacggcgcaggaccgactgtctacgccaagttgtccgcgctctacgacgccgcctaccgccgccaggaggaagggaaatga

SEQ ID NO: 366072 - DNA, 207 bp, Pseudomonas aeruginosa; identical to SEQ ID NO: 328529

SEQ ID NO: 366073 - DNA, 237 bp, Pseudomonas aeruginosa
atgaggacgatcagcttccagggagacggcctgtcggccagtcagtaccggtcgatccagcttcgccagcaggtgagggcggcggtgaatcagtccgtgttgcaacagcaggttgcggccactctccaggccctggagcagcacaaagagcagggcggcaagcccgaaaaggtctggtcgacgatctccaacgaaaagggcacgccgtgggtcggcgatgtgttcgggtggccgtga

SEQ ID NO: 366074 - DNA, 231 bp, Pseudomonas aeruginosa; identical to SEQ ID NO: 324727

SEQ ID NO: 366075 - DNA, 294 bp, Pseudomonas aeruginosa
atgctgctgaccattcgcgacgttcccgaagacctggtgcgccaggccaagcttgccaccggcaagggcactggcagtcaggcgttcattgccggcatcgagcttatgatccgtcagcgtgatcggatcgaggcgatggaagatgagattcggtcgctgcgcgagaccctcggtgtgttccagggcgtgcttgctgatgcccatgccgccgctgtgcaactggctgagattgccgggcaacgcgatatgctggtgtccgacaacccgctgcggcctgggtatcgtcgccgctag

SEQ ID NO: 366076 - DNA, 1074 bp, Pseudomonas aeruginosa
gtgccgctgccggacaccgggcgcctgccgatgggcatgtcgatgctcggccgggtgctcgatggcgccggccgcgccctcgacggcaagggcggaatgcgcgccgaagactgggtgccgatggacggcccgacgatcaacccgctcaagcgccacccgatcagcgaacctctcgacgtcggcatccgctcgatcaatggcctgctcacggtcggccgcggccagcgcctcggcctgttcgccggtaccggggtgggcaagtcggtgctgctggggatgatgacccgcttcaccagggccgacatcatcgtcgtcggtctgatcggcgagcggggccgcgaggtgaaggagttcatcgacgagatcctcggcgaggaaggcctcaagcgctccgtggtggtcgcctcgccggccgacgacgcgccgctgatgcgcctgcgtgccgcgcaatactgcacgcggatcgccgagtacttccgcgacaagggcaagaacgtattgctgctgatggactcgctgacccgctacgcccaggcccagcgcgagatcgccctggccatcggcgagccaccggcgaccaaggggtatccgccatcggtgttcgccaagctgccgaagctggtggaacgcgccggcaatgccgaagccggtggcggctcgatcaccgcgttctacaccgtgctctccgagggcgacgaccagcaggacccgatcgccgacgccgctcgcggcgtgctcgacgggcacttcgtattgtcccggcggttggccgaggaaggccactatccggccatcgatatcgaagcttcgatcagccgggtgatgccgcaggtggtcgaggccgagcacctgcgcgacgcccagcgcttcaagcagctctggtcgcgctaccagcagagtcgcgatctgatcagcgtcggtgcctacgtggccggcggcgatcccgagaccgacctggccatcgctcgcttcccggtcatgcgccagttcctgcgccagggcctcgacgaaagcgaaagcctggcggaaagccgtgcgcggctggcgagcctgctcgccggcgggcaggcctga

SEQ ID NO: 366077 - DNA, 5127 bp, Pseudomonas aeruginosa; identical to SEQ ID NO: 333801

SEQ ID NO: 366078 - DNA, 126 bp, Pseudomonas aeruginosa
atgagcctcatcgagaatcacgatcaaagggcgctggcggaacacttcacttctggctcgctgcaggagcactcgccctattgcgtttgcaattacttcccgagcattaaattcatagccgattga

SEQ ID NO: 366079 - DNA, 924 bp, Pseudomonas aeruginosa
atggagaataaaaaatacatcgccaaatggggttttggtatggcgccaatctctaggactatgaggaagcgctacgatgaagctgttcagtctgtattggactatattctaggcaatattgcattaggcgaaatgtctccagaagaaatcagtgaactaaaaggaatgtttaatcgctgtgtgagagaggatcagtgggattggtttaccgtccatgccgagctaggcagtccgtcaaagcgggacatgcgagccattgcaaatggcttaaaactgttacgattgcacgccttggaaaacaatgagctagctgctgaaaaagcagtccaatatttggttagaaatgggcttcttaatgggttgttgcactatcaaggcgagtatggtggtgaagcgcagcaagatggtagtggttgggtgtatattctctctgttagagagtcacctaaggtacttaaaatagggatgacaactcgatctgtttctcaacgtgtcaaggagattaattctgccactgctgtgctgtatccattatctgcgagagctgtttttcgtgtaaggaatgcatcggtagcagagtctgaaatatttaagatacttgctgcccaccggattcgccgagatcgcgagttttttgatattccttttgataaagcagttgaaaatattcgagaatacataaaaaaagaagatctctcgtacatgagaagtggagagattatctggtttgacgaaaaaaagcagttcggtttcataagtgatggtacagggagtgacgtctttgttcatgcctcgcaggttaagagagaggacatgcccgcaatgaacccaggtgctagagttgagtattcagtgctgatcaggatacaaggaaagctagcgcttgatgttcgacttgcccatagctgcgctaagcgtcaatga

SEQ ID NO: 366080 - DNA, 330 bp, Pseudomonas aeruginosa
gtgcagatcggcaagttccagcgtgccggcgagcgcacctggcaggtccgctacggctacgacttcgccaccgtcggcgtgccgggcctgaccttcaacaccatttacctgagcggcgacaagatcaagaccgcccgcggcgaccagagcgagtgggaacgcgatatctccctggcctacgtgatcccggacggcaccttcaagggcctgggcttcacctggaagaacgcctccttccgcagcggcctgccggctgccggttcgagcaacaaccagcgcgaccaggacgagaaccgcctgatcgtcagctacaccctgccgctgctgtaa

SEQ ID NO: 366081 - DNA, 195 bp, Pseudomonas aeruginosa
atgccgccgcaggagcggccgccgcgcaaccacaacgacctgacgcgggcattggagtgcatcgaatcactgcgtccccggcgggccgtgttgactcacgtcgggcatgcgctggacgcctggctgctggaccaccccgctgcgttgcccgagggggtggaactggcacacgacggcatgtgcctgccgctgtag

SEQ ID NO: 366082 - DNA, 216 bp, Pseudomonas aeruginosa
atgaataattcgaatcttgctgctgcgcgtaatttgatacaagttgttaccggggaatggaagtcccgttgcgtctacgtcgctacgcgcctcgggctggccgatctgatcgagagcgggatcgacagcgacgagacgctggccgccgcggtcggttccgatgccgagcgcatccatcgactgatgcgcctgctggtggccttcgagatcttttag

SEQ ID NO: 366083 - DNA, 843 bp, Pseudomonas aeruginosa
atgacccagccctcgaaacggaatgggcaggttccgctggacgacgccctggagcgccatcgcgacgcgctgaaggacctgttcccgctgccgccctcccggccgaaatcgcgcaaggcaagcaaggcggccggcgtcgcgctattgctggcgctggccatcggcgccctggcctggctggacccggcctacaagcgcgagcgcttcgccaccgccatcggtgagcggcgcgacgtgaccctggccgacggcagccagctcctgctcgacagcggcagccagatcgaggtcagttggcacccgctcagccgccgggtcgcgttgcgcgcggggcaggtgcttttcgaggtatccccggcgcgctatcggcccttcgtggtgtccgcgggttcgaccgacatccgcgtgctcggcacccggttcaacgtgcgccgcctggacgacgacgtccgcgtgaccctggagcgtggccgggtggaggtcggcacctcggctacggcgcaagcgccagtcgtgctcctgccgggccagcaggtcgatgccattggcgggcaactgatgccgctggccaaggtcgatgccgccacggcgatggcctggaaagacgaccgcctggtcttcgagcgcacgcccctgggcgaagccgtcgcgctgctgcgccattaccgcaaggcgcccattctcctggacgaccccagcctggcctccctccggctgaccggcgtcttcgccgcgcacaacgtcgaccggctgctcgacctgctgccgagtatccttcccgtggccgtgtcgcggcaggaggacggcagcgtcgagatccaacgcaaatcgacgcgaaaataa

SEQ ID NO: 366084 - DNA, 1134 bp, Pseudomonas aeruginosa
atgataccgttgaaagtcagctcccttcaccgacacaccgttacgaccctatcacttggctcagaagaaaagcgagactcgggagatgcaccgaagcctgtagaggatggatttgggccggccagaattgctctggcgcagatggattgcgatcttttgattcatgctggcggcatcagctttggccaagaaaatcactatgtacagatattcgaacagcaagcgcagcgctccgatcacgtgattctatggctgacatctccgggaggagatcctgacacggcataccagatttctcggctgctccagaagcgctatgccaaggtttccgtcttcatcaacggatggtgcaagagctctggcacactgatttgcctgggtgccaacgaactgatcatggatgatcttggccagcttggccccttggacattcagattcttaatcgcgaggagtttggagagcgcctgtctggactcaaccccattgaagccctgaagtcgattagctcacaatcgttggagctgcttaagcaacagtttctgaatgtcaggtttggtggcggtttgagcaccaagcaagcgcttgaggtagcaacaaacctcaccggtcagctcatgagcccgatcactgcccagctcgacatcatgaagtatggtgagtttacccgctcgatgcgcatcgccgtcgagtatgggcagcgcctagcaaaaagctgccgcgggaacaacctaaagccagatgctatcaaccttctgacaaccggctatccatcccatggcttcgtcatcgactatgaagaagcccgcgaaagcttgttcaacgatgtcagcgaaccctctcagaatttgaaggtgatagcgaaaaaccttcagccgtacgttgacacctgggcgagaggggccaacaattccgccatgatcatcgacgctaggcacgcgctcggtgtgccctttgtggctgactcttcgtctgatgtaaacgctcaggaagaagcagtgaacgctgaggccccctcggcgtccaagaagaaaggcaaatctgccaaggatcgagctaatggctcgaaacaaccggaggctaatagtgatgacacggaatcaaatgaacatgcagttaacgaagaaaggccttga

SEQ ID NO: 366085 - DNA, 180 bp, Pseudomonas aeruginosa
atgacacggaatcaaatgaacatgcagttaacgaagaaaggccttgagaccgttcgcggcagcaaggtcactcgtgatctggttaaaaatgcttttgacgccatcaagctaccgtgcaacgtgtcgagcaacaacaagactcccctgatcatcggcgaagaggctctccaaatcgcttga

SEQ ID NO: 366086 - DNA, 204 bp, Pseudomonas aeruginosa
atgcaagtgcatatctggaagcgcaaggaaggcgatatcgtcactctcaagctggccgagcgcggcaacgaacaacagttgctccagcaattgcgcgacgaaggcatcgagctgatcttcgggccgaacgacagccaggtcaccgaagtctgcgtgcgggcaccggcgtcgctggaggcacgagtagactcggatgcgacttga

SEQ ID NO: 366087 - DNA, 1020 bp, Pseudomonas aeruginosa
atgtgtataagagacagtctggatatagcggtccagtcgctcggcctcgtcgcgggtgctttccagcagttcgcgacgatccgccggcgggatcgcctcgcccagcgccaacaggctgtcgatggagccgcgcatggccgtcagcggcgtgcgcaggtcgtgggagaccgaggcgagcaaggcgctgcgcagttgctcggtttcgccgtgcaggcgcgcggcctccaggtcctcggccaggcgagcccgcgccagggcctgggccaggggctggccgagggcggcgagcaggcgccggcgctgcgggctcagcggctggccgtccagcggcgcgacaccgagcagtgccagcggtccctcttccgccgacagcggccaccaccaccagcgtcctccgggcagcgtgccagtaccgaggccggccggctggtcgtgggcccaggcccagtccgcggcgacccgttcctggtcggcgagttgccgctgcacgccggcctcggtcttccactcgccattgacctgaccgagcaggcagacctcgacgtccttccagtcgtcgaactgctgggcggcggcggccagcaccgcctggcggtcggtggcggcggtgagcttgcgcgacagctccagcagcaggctggtttcctcctgggtatcgcgcagcgcctccagctggcgccgctggcgtgccgccaggttgccggtgaggccggccatgaacaggaagaacgccaggctcagcaggtcttcgtggcgatggatggcgaaggaaaaatgcggcgggatgaacaggaagtcataggccaggaacgacgccaccgcgcacagcagtgccggcatcaggctgctgcgcactgccaccagcagcaccgccatcaggaacaccagggagatgttcggcagctccagcaggtgcgccacgatccaggccaggccgctggccagggcggtcgccagcagcgccagcagatagtcgttccacaccaccggatagcgtggccgcggttccgccgggcgtag

SEQ ID NO: 366088 - DNA, 834 bp, Pseudomonas aeruginosa
atgaagcttcagcaattgcgctatatctgggaggttgcgcaccacgacctcaacgtctccgccacggcgcagagcctctatacttcgcagccgggcatcagcaagcagatccgcctgctggaggacgaactgggcgtcgaggtgttcgctcgcagcggcaagcacctgacccgggtgacgccggcgggggagcggatcatccataccgccggcgagatcctgcgcaaggtcgagagcatcaagcagatcgcccaggaattctccaacgagaagaagggcacgctgtccatcgccactacccacacccaggcgcgctatgcgctgcccaacgtgatcagcggcttcatcaagcagtacccggacgtctccctgcacatgcacgggcatccgctgaccaagctgccgaaactgaccctggaagccctggccgagcagccgatcgtcacctacgtgttcggcttcaccggccgctccaagctcgacgaagccttcagccagcgcggcctggtgcccaaggtggtattcaccgcggccgatgccgacgtgatcaagacctacgtgcggttgggcctgggggtcggcatcgtggcgcacatggcggtcgatccgaagctcgacaacgacctggtgatcctcgacgccagccacctgttcgagtccagcgtgaccaagatcggcttccgccgcggcaccttcctgcgcggcttcatgtgcgacttcatcgagaaattcgctccgcacctgacccgcgagctgctggccaaggccgtgcaatgccacaacaaggccgagctggacgagttgttcgacggcatcgaactgccggtctactga

SEQ ID NO: 366089 - DNA, 969 bp, Pseudomonas aeruginosa
atgaaagcttctctgctgaaaaagctggatgtcctcagcgatcgctacgaagaactgacggcgctgctcggcgacgccgaggtgatcagtgaccagacccgcttccgcgcctattcccgcgagtacgccgaggtcgaaccggtgatcctggcgttccgcgactaccgcaaggtgcaggccgacctcgagggcgcccaggcgttgctcaaggacagcgacccggagttgcgcgacctcgccgaggaggaggtcgccgaagcgcgcggccgcctcgccgccctcggcgacagcctgcagcgcatgctgctgccgaaggatcccaacgacagccgcaacgtgttcctggagatccgtgccggcaccggtggcgacgaggcggcgatcttctccggcgacctgttccgcatgtattcgcgctacgccgagcgccagggctggcggatcgagacgctgtcggagaacgagggcgagcacggtggctacaaggaagtgattgcccgggtcgagggcgacaacgtctacgccaagctcaagttcgagatcaacccggccgacctgcgggtggacacctaccgttcctccggcgccggcggccagcacgtcaacaagaccgactcggcggtgcgcatcacccacattcccagcggcatcgtggtcgagtgccaggaagagcgctcgcagcacaagaaccgcgccaaggccatggcctggctggcggccaagctcaacgaccagcagcaggccgcggcgcagcaggcgatcgccagcacgcgcaagctgctggtgggctcgggcgaccgctcggagcgcatccgtacctacaacttcccgcaagggcgggtcaccgaccatcgcatcaacctcaccctgtactccctgggcgaggtgatggagggcgcggtggaacaggtgatcgagccgctgctgcaggaataccaggccgatcaactggcggccctgggcgactga

SEQ ID NO: 366090 - DNA, 153 bp, Pseudomonas aeruginosa
atgccggagttgccggcggagaggatcgccgagaggatcactgcgttcatcaccccggccgccgcggcgaagccggcgcgctcgaagagcagggtgaagggcgacacgctgatgtcgctggcatcgttcttcagcaggttcgggtcggtgtag

SEQ ID NO: 366091 - DNA, 285 bp, Pseudomonas aeruginosa
atgccgatcagttcggtgccctggaacgagaagccggcgatcatcgccaccccgaccatcgcctggaagccgccgacgaagggcgcgtcgcccatggtgaagttgctgaagccgggcgactccacgccatgcatgatgccgaagatggtcgccaggccgacgccgatgaagatcaccaccgtgactaccttgatcagggcgaaccagaattcgctctcgccgaagccgcgcgcggaaatcacgttgaggccgaacatgatgcccaggaagatcgcgctccagtag

SEQ ID NO: 366092 - DNA, 999 bp, Pseudomonas aeruginosa
atggtggccatcgtcgttccactgtgcgtcgtagccctggcgcagcaggctggcgcggttgtcgtcgttctccaggaccaggtgcacatggcgctcggggccggcggcgccgcgcaggcggcgggccatctcgacgaggaacgcgctatcgggaatcgcgtgcacggcatcgaagcgcaggccgtcgacgcgatagtcgagcagccacatcagggcgttctcatagaagaactcgcggacttcgccgcgacggaaatcgatggcctggccccagggcgtctgccggtcgtcgcggaagaacgcggcggcgtactgcgcgaggtagttgccgtccggcccgaagtggttgtagatcacgtcgacgaagaccatcaggcccatgccgtgagcgctgtcgatcagatgcttgagttgctcgggcgtgccgtaggccgacgccggggcgaacggcagcacgccgtcgtagccccagttgcggcgaccgggaaactcgcccagcggcatcagctccacggcggtcacgcccagttccaccaggcgcggaaggaagcgctcgacctcggcgtaggagccgaacaggccgacgtgcagctcgtagatcaccgcttcgtgccagggccgcccgcgccactcgtcgacgcgccaggcgtaggtgccatggtccagcacctggctgtggccatgcacgccgtcgggctggaactgcgaggccgggtccggcaccccggggcgaccatcgatgcgataacggtagcgggtgccgggcggacagggcagggtcgcctcgaaccagccgctgtcgctgccttccagcggccagtcgcggccgtcggcggtctcgacccggacctcacgggcgtccggagcccagaggccgaagcaggtccggccgttgccttggaactgggcgccgaagcggcgccggatcgccatcactggcgtaccccgcgcagggccggagcggtattcctcaacaggcgccggtacaggcggttgtaa

SEQ ID NO: 366093 - DNA, 1596 bp, Pseudomonas aeruginosa
atgaaacgcacggtcgccatcggcttcatcggcgccaccctcgaccgtctcggcaagggcgcggcgcgctggcaaaagtggcggccgagcatcggcctgtgccagcagccggacctgctgatcgaccgcctcgaactgatccacggcaacgacgcccgcgacctcggcctggccgagcggattcgcgccgacatcgccgcggtgtcgccgcataccgaggtccgcctgcagcagatggaactgcgcaacccctgggacttcgaggaggtctatggcgccctgcacgatttcgtcagcgcctaccccttcgacaccgagcgcgaggactacctggtgcatatcaccaccgggacccatgtcgcgcagatctgctggttcctccttaccgaggcgcgctacttgccggcccggctggtgcagacctcgccgtcgcggcgcaaggacgaggcgcgccatcccgagggctcggcgacgctgatcgacctcgacctgtcccgctacgaccgcatcgcctcgcggttccgccgcgaacaggaggaaagcctggctttgctcaagtcgggaatcgccacgcgcaatgccgctttcaaccgctccatcgagcagatcgagcgggtcgccgtgcgttcgcgggcacccatgctgctggtggggccgaccggtgccggcaaatcgttcctcgcccggcgcatctatgaactcaagcgcagccggcaccagctcgacgggcgtttcgtcgaggtcaactgcgccaccttgcgcggcgacggcgcgatgtcggcactgttcggtcacgtcaagggcgccttcaccggcgcgcagaatgcgcgcgaaggcctgctgcgcgcagccgacggtggcatgctgttcctcgacgagatcggcgagctgggcgccgacgaacaggcgatgctgctcaaggctatcgaagagaagcgcttcttcccgctgggttcggaccgtgaggtggagagcgacttccagcttatcgccgggacccaccgcgacttgcgcggacgagtggccgaaggcctgttccgcgaggacctgttcgcccgcatcaacctgtggaccttcgagctgccgggcctggctggacgccgcgaggacatcgagccgaacatcgacttcgaactggagcggcacgcccgcgagcaagggcggcaggtgcgtttcaacctggaggccaagcgtcgctacctggccttcgccggttccagcgaagcgcgctgggccggcaacttccgcgagctgtcggcttccatcacacggatggcgaccctggccgacagcgggcggatcgacgaggcgctggtcgaggaggagatcctccgcctgcgccaggcctgggggctcgatgcgggccgggagccactggccgatctgctggggcagcgggtggaggccctggatctgttcgaccgcctgcaactgcaggcggtgctggaggtgtgccgcggggctaagaccctttccgaggcgggacgccggctgttcgccgtttcgcgccaggacaagcgcaaccccaacgacgccgaccggctgcgcaagtacctggcgcgtttcggcctggactgggcgcagatacgcgcctga

SEQ ID NO: 366094 - DNA, 822 bp, Pseudomonas aeruginosa
gtgggcattgccgtagcggtcgccgtcccagccggcggtgacgaagcgctgccaatgctcgccgagcaggaagtactcgaggaagcccggcgtcttcaactccgccagcaggtaccagggcgcggccaccaggagcatcagcaggcttccgcggatccatggcaggccccgccagagcgcgcgccagcgccactccagcaaggcccacaggccgatcggcagtccggcgaggatcagcgtcagcggccccttcgccagcagcccgaggccgaggccgaggaacatcagccagccctcgcggcgccggattccctccgcgccatgcaggcccagccagaagccgcgcatggccaggaccagcgccagggccagggccatgtcggtcattaccgccccggaggcgacgaagaacagcgccgaactgcccagcaggacgcaggcgatccgcgcctgccgacgatcttcgcgagcctgccagtcccataccagccacagcaccagcacgcccagcaaccagtgcggcaggcggctggcgaactcgttggcgccgagcagaagctggccgccggcgctgagccagaaggccagcggcggcttgccccagaacggcacgccgacgtcgtaccagggcgtgatccagtcgcccagttcggccatcttccgcgccacctcgccatagcgggcctcggtggtgtccatcagcggatagctgcccaggctcagcaggcggatggcgaaggccagggcgagcaggagccaggccagcggccagccgcgcagcgccctcacggattggccccgccgacctgcgccggcaggtag

SEQ ID NO: 366095 - DNA, 1110 bp, Pseudomonas aeruginosa
gtggaagcggccgttccaggcctccagccagaactggttggcgccgccctggctgatggtgatggaggcgtcgacccggcgcgggcctgggcggaaccaggggcccagggtgtcttcctgcatgccgcggttgaacgggtcgtagctgaccggcaacaggtaggcctcgatacgcagcaggctgccgtcggccagcctgaactcgcggccgtccagcgcaagggcggtggcgcccgaggggttgccgttgcgcaggccggtgttcgccgtcccgggagtgcccagggtgaagacgtcgaagccgctgatgatcatccgccggtagcgcgagccgtcggcggcgtagcggcgcggcaggtcgatgtccagctgtccgcgcgaggcgcgttcgaagcgccattgcagcgcctgggcctgggccttgccgaggtggaaggatggcgcccaccggcgcagggtgcgggtcatgtagaggcgcgtccagtagagcatgcggtcatcgctggccggcagcgcgccggcgggaatggcgcggcgaccctgggcccggtcgacggcggcgcgccacagcgcgcggccctcttcggtgaccagcttcagtgccttggcgtagctggtgaccggggtgcggccgtcggcggcgcacaggcgcttggcgaaggccggttcgaagccgtcgaagccggcgcccttgacgatgcgctcggccagcggcgtctggtcatgggtgacgacgttggcgccgctgaacggcagcggcgtgtcgagccggcgctcctcgtaggacaacgctgcctcgcggttccaggagcaggcgacgctgggcggcttgcgggcgccggcgaggtcgccgttggcggcccagccggcgccgggcagcagggctgccgagacggccagggcgaagagggagtatcggcttgcgtgaggggcgtagcgcatcgggtggactcctgttcttgttcggttcatgggtcgatcggtgcggcgggcggagcgcgggcgagcggcgcccgccggcggcgggggccgggaccgacgcaaggtgcgtcgcgggttgctgcggtggcggacgggagggcggtgctagggggcgcgtgtcgccggtag

SEQ ID NO: 366096 - DNA, 870 bp, Pseudomonas aeruginosa
atgagcgacccgacgtcttccgctaccgccgccgcagcgccaaccctgcgacgcggcaactatttcggcctgggcacctacctcggcctggccggcgcgctgctggcgatgatcgcgctgttctcggcgctgagcagccacttcctcagctatggcaccttcctcgccatcgccaaccagatccccgatctggtggtgctggcggtgggcatgaccttcattctgatcgccggctgcgtcaccggttcgatcacggtggcctggcggattccctcgttcatcgtgtccctcggggtgctggagatggcccgtgggctggcctaccagatgaccgactcgcgcacggcctatatcggcgacgcctatgcctggctgtccaatccgctggcgttcggcatctcgccggccttcgtgatcgccctgctggtgatgttcgccgcccaggcggtgctcacccgcacggtgttcggccgctacctgatcggcatcggcaccaacgaagaagcggtgcgattggccggtgtgaacccgaaaccctataagattgcagtattcgccctgatggggctgctcgccgggttggccgcgctgttccagatctcgcgtctggaagcggccgatcccaacgccggggtcggcctggaactccaggtcatcgccgcggtggtgatcggcggcaccagcctgatgggcgggcgaggttcggtggtcagcaccttcttcggcgtgctgatcatttccgtattggcggcggggctggcgcagatcggtgcgtcggagccgaccaaacgaatcattaccggggcggtgatcgtggtagcggtggtgctggatacctatcgcagccatcgcgcccgcagacagggctga

SEQ ID NO: 366097 - DNA, 621 bp, Pseudomonas aeruginosa
atgctgctgaccgtgctctacatcatcgccatcaccgccgaagccatgaccggtgcgctgtcggccggccggcgcagcatggacctgttcggcgtggtgctgatcgcctgcgtcaccgccctgggcggcggctcggtacgcgacatgctgctgggccattacccgctgacctgggtccgtcacccggaatacctggcgctgaccgcagtcgccgcgctggtgacagtgttcatcgcgccgctgatgcgccacctgcgctcgctgttcctggtactcgacgcggttggcctggtggccttcaccctgatcggctgccaggtcagcctggaaatgggccacagcctgctgatcgcggcgatcagcggggtgatcaccggggtgttcggcggcattctccgcgacatcctgtgcaacgacgtacccttgatattccgccgcgaactctatgccagcgtgtccttcgccagcgcctggtgctacctgatctgcgtggagctggaactgccttccgagcaggcgatgctgatcaccctgttcagcggcttcctgttccgcctgctggccatccgcttccactgggaaatgcccaagttcgtctaccaggacgatttcgaccactga

SEQ ID NO: 366098 - DNA, 321 bp, Pseudomonas aeruginosa
atggatgagcgcttccgtggttccgtctcgcatgcctatcaggcgttccatggcgagttgctgcgcttcctgcgcaagcacctgggcagttcggcggacgccgccgacctcgcccaggatactttcgcccagtggctgaaatggccgggccggcaatcggtcgagcagccgcgcgcatttcttttccagatcgcccgcaacctgttgcgcgaccattggcgccggcagcagagccgccgcggcggcgcgaagcgttcgtcctgcacaagttcgacggcctgtcccaggtcgaagtggccgagcgcatgggaatctccctga

SEQ ID NO: 366099 - DNA, 858 bp, Pseudomonas aeruginosa
atgcgtgcatcgcttcgcgtcgtcgtcaccctgctggtggtcgctgccgctgtcctcgccggcatctggctctggcgctactacatgctctcgccctggacccgcgatgcccgggtgcgggccgacgtggtggtggtggcgccggacgtgtccggctgggtgaccgacctggaggtcaaggacaaccaggtggtcaaggtcggcgacgtgctgatgcgcatcgaccaggaacgctaccaggccaacctggagcaggcccgcgccgtcgccgagacccgtcaccagcaatacctgttgcgccagaacgaggcggcccggcgcagccgcctgggcatcggcgcgatcagcgccgaggacaaggaaaacgcccagatcaatgccgccatcgctcgcagcgagtaccaggaggcgctggcccaggtgaagatcgccgaactcaacctcaagcgcagcgagctgcgcgccgcgcgcaacggccaggtaaccaacctgcgcctggcccagggcaactacgccacggcgggccaggcggtgatggcgttggtcgaccagcagtccttctatgtggtcgcctacttcgaggaaaccaagctgcccggcatccgcgtcggcatgcgcgcccaggtccgcctgatgagcggcgatcagccgatcgacggcacggtggagagcatcagcagcggtatcaccgaccgcaactcgacgccggacggccagttgctggccaatgtcgagccgaccttcaactgggtgcgcctggcgcagcgtattccggtgcgcatccgcctcgaccaggtgccggcggatgtccacctgagcgccgggatgaccgccagcgtcaccgtgcagggggactga

SEQ ID NO: 366100 - DNA, 1188 bp, Pseudomonas aeruginosa
ttgccagggggtcaggcgcaggctgccgtcgccatggcgttcgaccagctcggccaggccttccaggcaagcgctgtcgagccggccgagcggcgccgccgcgccgaccatcaccaggcccggctggcgttgcggctggacgccgagatgactccacggacgccccggcgaacgccgccaggccgccacccgctcgtcacgccgcagagggaaatccaggcgcgcctgcaaggcctccagcaagggttctccgtccagctcctgcaacaggtggcgcatccgcgtctgttgcggctgggcgcgctcgaggaacaggtcgagcaacgccagcaccagggactcgccccgctccgccggcaacgccgccagggggcggtcgcgggccgggcagccggcgagtccgaagaccagcgtcgcggtcggcgccgcgggcatcggcgagagccagatgtcatggggatgttcgagcatcgccaggtcttcgccgccgtccagctggatggcgaacttggccgacagcgcgtggtagcggctgtccgcctggagccgcagcaacagccgagcggccagcgggcgcacgtccagcgacaggtgcggatcgagcccggcggccgggctgagcatcaggttgcgcacgtcgtcggcgccggccagggacccatgccggggaccgaggccggcgtccagcaggcggcggacaagccgctcttcctcgccgcgacggacgccgcgcaattgcaggttggaacggttggtcgcctcgatcacgccgctggcgcaatcccgcgccgcggccgccacggcgcgtgcctgggcggcgtccaggcggccggcgtcgagcttgatgcggcagatgccgccgtccagcgcctggacgatacgcagcaggccgggacagggcgacggacgtggtacgggcaggggcgccggggtctggtcgtcgttcaaaaacgctactcgaatcggcgtcgcggcgaccgcaccgctgtcccccagggacagaccacggcatcggtacaccccgcccgatgttggcactcgcgactggtttcggcggcaggtctcctggctcgcagcccggcgttccacccgggggaggaacctccgcttcgcgccgccttcccggtaatccagtggcgaatggcgcgaatacaggctgcatacagttgcgggggcagccacggctag

SEQ ID NO: 366101 - DNA, 231 bp, Pseudomonas aeruginosa
atgccggcgaacaccagaccgatcgctcggccgcgccgttccggcgcgacaatggccaccgccagggtgatcgccaccaccacgatgaccgaggcgctggccgccaccagcagccggctcgccagcaacagggcgaagctcggcgcggcggcgctggccaggttggcgccgatgaacgccagcagcgcgccggccagcaggcggcggcgctcgataccggcgctgaggtag

SEQ ID NO: 366102 - DNA, 1548 bp, Pseudomonas aeruginosa
atgggcgaccagggcctggcgcaggcgcaggcaggccaggcggacggcggaaccgaccgacgagacggtgaacgagccgccctgcaatggagccttgggcaacgcactgtcgccaagctggaagcgcacctcttccggcgccatgccagcggcgtcggcggcgatctgggtcatcaccgtgtaggtgccggtgccgatatccgtggtcgcgctggccacccgcagcaggccgtccgcctccagccgcgccctcgcgctggccttgctctgcatggcctcccagacgccgccggccatgccccagccgagcaactggcgcccttcgctcatgctccgtggccgtgggtcgcgggcctgccaaccgaagcgccgggcgccctcctcgtagcaggccagcagcgccttgctggagtacggcttgtcctcgttgccgttgcgctcggcgaagttgaaccggcgcagcgcgatggggtccatgccgagccgcaccgccagttcgtccatcgcgcattccagcccgatcagccccagcgccgcgccgggggcgcgcatgtccagcggggtatagacgtccagcggcaccagacggtaggccagggaaaggttctcgcagcgatagagcatgccgctccactccaccacgtgctcggtgaagtcttcgaagcgcgaggtctgcgctgtcgcctggtggcccagcgcaaggaggcgcccctcggcatcggcgcccagttgcaggcgctgcagggtgcgcggccggtagccgaaggtgaacatctgctggcgggtcagcactacgcgcaccgaccgccgcagttgcagcgccgccatcaccgccagggccaactggtattgcggacgcaggccggagccgaaggcgccgccgacgtaggcggcacagacccttaccttgtcggcgggcaggccgaagaccttttgcaggtaggcctggctgttctgcgtcccctgggtcttgtcgtgcaccagcaggctgccgtcgggctggacgatgaccgtggacgcgtgcggttccatgggattgtggtgctcgatcggcgtgctgtagctggcctcgacccgaatcggcgcggcgcggtaggcggtgtagaaatcgccgcgctcggcgggcagttgggcgggagcctcatgggcctggtcgagggcggccagcaggtcggtctggtgcggctcgggctcgatatcgatgcgcagcagcgagcccgcgtagcgggccagttccaggctccgtgccaggaccagggcaaggggctggccgctgtacaggacgcggtcgtcgaacagcgggcggaagggttcgccttcggcggcctcggcgtccttgtagggctcgtcgtcgcccgccatcggcggccggttcaggtgatgcagtacttgcccggtgctgtggggcaggctgctcattggccgatccctcccgagtgggcttcttccagtgcgcgaacgatggcgttgcgcgccaatccgatcttgaaggcgttgtgggccagcggcctggcgtcacgcagcagcgcttcggcgaagcggacatag

SEQ ID NO: 366103 - DNA, 330 bp, Pseudomonas aeruginosa
gtgatcaactacttctggttcgtcctcgcggcgttctgcgagatcgccggctgctacgctttctatctctggctgcggctgggcaagagcgccctgtgggtgctgcccggcctgctcagcctgaccctgttcgccttgctgctgacccgcgtggaggccagctacgccggccgcgcctatgccgcctatggcggcatctacgtcgccgcgtcgctgttctggctggctttcgtcgagcgctcgcggccgctatggagcgactggctgggcgtggccttgtgcgtggtcggtgccagcgtcgtgctgttcggcccgcgcctgtctcagtga

SEQ ID NO: 366104 - DNA, 1425 bp, Pseudomonas aeruginosa
gtggtagccctcggcaagcatccgcaggacttcgtcgaagcgctcgcgctccagcccggcgtagggttcggcgcggatcaccagccgatagaggtcgtcctcgcgccactcctggcaggccacttcggcgacgatctgctgcgccagcacgtccagcggctggcgtggcagcaccaggctgtccagctcgccacggcgcacgctgtcgagcagcgccgcgcattccaccaggtcgtcgcgggaggtcgggaacaaccggcccttgggggtgccgccgacactgtgcccggaacgcccgacccgttgcaggaaggcggcgatggagcgcggcgacgacaactggcagaccagctcgacgtcgccgatatcgatgcccagctccagcgaggcggtcgccaccagtaccttcaattgcccggccttgaggcgctgctcggcatccaggcgcagctccttggccaggctgccgtggtgggccgccacctggcggctgccgaggcgttcggcgaggaagcgggtgacccgctcggccatgcgccgggtgttgacgaacaccagggtggtgcggtgctcgccggccaggtgcgccaggcggtcgtagaccagctcccaggtgtcgttggacatcaccgcttccagcgccaccggcggtacctcgatgcccaggtcgcgggggcgcgtatagccgatgtcgacgatccggcaggccggatcgcgcggattgccgctggcgccgacgaggaagcgcgcgaccttctcgatcggtttctgcgtggcggacagcccgatccgcagcagcggtcgcggacacagcgcctgcaggcgctccagcgacagcgccaggtggctgccgcgcttgctgccggccagggcatggatctcgtcgacgatcacgctgcgcaccccggcaagcatctgccggcccgactccgagccgagcaggatgtacagcgattcgggcgtggtgaccaggatgtgcggcgggcgcttgcgcatcgctccgcgttcgacctgcggcgtatcgccggtgcgcaccgcgctacggatatcgacgtcgggcaggccgagacgcgccagttcctcgcggatgccagccagcggttgctccaggttgatgcggatgtcgttggacagcgctttcagcggcgagacatagaccacctgggtggcatccgccaactcgccgccggcggccagcccctccaccaccagggcatcgatggcggcgaggaaggcggtcagggtcttgcccgaaccggtgggcgcggcgaccagggtcgaaagcccctcgcggatcgccggccaggcctcgacctgggccggcgtgggcgcggcgaagtggcgttcgaaccactggcggacggcgggatggaactccgccaggggccgcggagccggctcggcgcggcgggcggaagaggatga

SEQ ID NO: 366105 - DNA, 1497 bp, Pseudomonas aeruginosa
atgcaccaggcgcatcgccggcaggcgctccgccgccagccagagagtgctgcctgcgcagtccaggcgtccggcgcggcgttgctccgacagttgcgcaagccattccccccagcccggattggcctcggcctcgcccgaggtgaggaagcccaggctgttcagcgcctcatgcatctcgtcggcgttgcgcgcttccggccaggcctcgccacgcaccgcctcgatcgcctcaaggtccagggcgccgaggtcgtcggcggactcgggatcgctccagcggcgattctgtaccgcctgggtacgccgctcctccagcggcgcatcgtcgagataggcgtagggacgcgcggtcagtatctccgccgccaacgccgaaggcgccggcaggtcgcgcgccagcaagtccaccgcgccgctctccatgtcgcgcagcagggccagccagccctcgcaatccatcgcctcgtgcaggcagtcgtcgagggtctgcgccaccagcgggtgatcgggcacctcgcgctcgccgacgatattctccaggcacgccacctggtcggggaacacgctggccagcagatcctcgctcttcatccgcagcagttgcggcggcaccttgcgaccgccggcatagcgcggcaaaccgagcgaggtggtcaggttccagcgccagcgcacgccgaacagcggcgcgtcgagcacggcctgtaccaacaggtgctcggcgctcgccgaatgcaggtagcgccagacctcgtcgaggggaaagctgtggctggtggacagcgagaggatgatcgcgtcctcggtggccgccgcctgcagctcgaagttgaagctgcggcagaaacgcttgcgcagcgccaggccccaggcgcggttgaggcggctgccgtggggactgtggatgatcagttgcatgccgccggattcgtcgaagaagcgttccagcaccagccgccggctcccgggcaggccacccagggcctggcgggcgcgggccaggtactcgacgatctgccgcgcggcgccatcgtccagcccgagggtggcgccgagccaggcgatggctggctccagccgccgcccttccggcaatgcctggccttcgccgagcagctcgtcgagggtgtcgcgcaggcgcgccacgctggccgacagctcgtcgctgcgccccggcgcctcacccagccagaacggaatgttcggcggctggccctgggcgtcctcgacccgtacccgtcccggctcgatgcggatgatccggtacgaggtgttgcccagctggaacacatcgccggccaggctctccaccgcgaaatcttcgttgaccgtccccaccagcaggccctgcggctccagcagcacgctgtagtcgccggtatcgggaatggtcccgcccgaggtcagcgcggtcagccgcgcgccacggcggccacggagcaggccgttgagcgcatcgcgatggagataggcgccgcgcacgccgaggcgtga

SEQ ID NO: 366106 - DNA, 534 bp, Pseudomonas aeruginosa
atgaccgaaccgacgattcgccgcctggctggcgaggagatcctggcgcgcctggacgaactggccgaggtactgctggactgcgtggaaggcggggcttcggtcagcttcatgtggccgttgccgcgggagcgggcgctggccttctggcgcggcgtcggcgagagcgtggcgggtgacgaacgcctgctgctggtggcggaagcggaggggcggatcgtcggtaccgtgcaactgctcctcgaccaaccgccgaaccagccgcaccgcgccgacgtggcgaagatgctggtgcaccggcgtgcgcgtcggcgcggcatcggcgaggcgctgatgggcgagctggaccggctcgcccgggcctgcggcaagtccctgctggtgctggacacggtcagcggcagcgccgccgaacggctgtacctgaagaccggctggacacgggtcggggaaatcccggactacgccctgatgccggacggcacgccctgtcccaccacctatttctacaagcgcctggctgctgccggctga

SEQ ID NO: 366107 - DNA, 1554 bp, Pseudomonas aeruginosa
atgttgccagccgaccagcttgccgtcggcgtcgagcccggcttcgagccggtggtagtacatcggccggtagaaaccgccgtggatgtcgtcctcgcgggtccattgcagcttcaccggcacgccgttggcgcccagcgccttggcgatcgataccgcctcgacgatatagtccgaccaggcgttggcgcgccggccgaagctgccgccggcgtagagcgtattgatcttcacctgctccggcttcagcccggcggtgcgcgccgcgttgccctggtcgacggtctggaactggtcgccggcccagatctcgcagctgtcggcggtcagcctgaccaccgcgtccagcggctccatcggcgcatgggcgaggaacgggaactcgtagctggcggcgatcctgcgggtcgccccggccaccgccttggcggcgtcgccgtccctgcgcgcgggcttgccgggttgctcggcgagcttgcggtactccgccatcagcgcctcggaaccacgcttctcggccttgctctcgtcccactcgaccttgagcgcgtcgcggccttgcttcgccgcccagaagcccttggcgaccaccgccacgccgtgcggcacctggaccacctcgaccacccccggaatcgccctggtcgccgtggcgtcgaacgatttcaccgtggcgccgaacagcggcgggcgctggagcagggcgaccagcatgccgggcaggctgacgtcgagggtgaattgcgcactgccgtcggtcttgccgggaacgtcgacgcgcggcgcctggtgaccgatcaggcggaagtccttgggatccttcaattgcacgttttccggcaccggcagttccgccgccgcagcggccagcgaaccgtagctggccttgcgctggctggccggatgttcgacgaagccgtcgcgggtgcgcagttcggtggccggcactcgccactggcgggcggcggcctcgaccagcatcgcgcgcgccttggccccggcctcgcgcaattgcatccaggagttggccatcgccgaactgccgccggtgccctgcatggtgccgaaggccaggttggcgtagcgcttggcgtcggcgggcgcgctttccacgcggaccttgctccagtccgcgtcgagttcctcggcgacgatggtggcgataccggtataggcaccctggcccatctccacgtgcttggcgatcaccgtgacactgtcgtccggagcgatccgcaggaaggcgttgggcgcgaagccggcgtccggcagggccgcggcgagggcacgccgggctccgctccactggaagccgatggtcaggccgaccaccgcggcgcctttgaggaagccgcggcgcgagccgggcagggcgttgctcagatcgatcttgctgttcatggcgtcaggccttcagggtgtcggcggcttcgtggatggcggcgcggatccgcacataggcggcgcagcggcagatgttgccgttcatcgcggcatcgatgtcggcgtcgctggggctggcgttctgctccagcagcgcggtggcggacatga

SEQ ID NO: 366108 - DNA, 393 bp, Pseudomonas aeruginosa
atgggcgtcgacccgcagcaggccgggagcgatgtcgtgcagttccggctcggcgtcggcggataccttgccagccttcagggtggcgatgcagccgagcaaccgccagataccgtgggacgcacattcgtcacgctcccccgccaccagggtatcggccaccgcctgtacatgggcttcgctgaaagcgtgccggcgcaggatgcgcacggccagctcacggacctcgtccagcgtcattcggatcacgggcttctccttgttcgaccaatccctagggtggcctgccgcgacagccttctcttgacctcaatcgacccggagcatgccgaaaacggcacaaccggctcgagcacatcgaaaacttacagaaaattcctagcaatcatgtaa

SEQ ID NO: 366109 - DNA, 591 bp, Pseudomonas aeruginosa
gtgccggcgaccctgaacagcgacggcagcgcgcagaaggtcaccatcgcccgcctggaaatgccggccaagctgcgctatctggcggccccggccctgcgcgaaaccgcctacctggaggcggagacccgcaacgacagcgactacccgctgctccccggcaccctgaatacctttctcggcaacagcttcgtcgccagcggccatctgcgcggggtgatgcccggcgagagcttcgaactggcactgggcgccgacgagggcatcggcatcgaacgcaagctggtcaagcgctataccgacagcagcggcctgatcggcaaccgcacgcgggtcaactacgaattccgcatcgacgtgcgcaacaaccacaagaacgccgaacgcgtgcagttcgaggaccagttgccggtctcgcgcaacgagcagatccaggtcaccttgctggaacccaaggcgcaggaagtcaagcgcgaggacgacggcaagctgaagtgggactggaccctgcaacccggcgagaaacgcagcgccaccctgaagttcagcgtggagtatcccaaggacctggcggtcagcggcctcgactag

SEQ ID NO: 366110 - DNA, 240 bp, Pseudomonas aeruginosa
  misc_feature (177)..(186): n is a, c, g, or t
atgaagtctggtgacggaaccggcaaagggttgggcacttgcgaggaagccttggagcgcatcctgactgggaagcctgttgtgcccgcacatgtcggtttagacctgtccaaactcaccgccagtattgtcagtcgggaggcaggatttgatcgtggctaccttaaaaaatcgcgnnnnnnnnnngtgcgcagcgtgaccgagtgctttcgcaaaatctacagttatgggagcgcgtga

SEQ ID NO: 366111 - DNA, 2055 bp, Pseudomonas aeruginosa
atgagtgacgcacgcctggccgaactggccgccgccgtgggcctgcaactcgactggcaggacgccaacggacggccgcagcgggtcgacccggaggtccagcgcggcctgctggaagcactcggctatccggcgcagagtccgcaacagatcgaacagagcctggccgcgctggcccggctgcgcgaggacagcgccaacctcggactgctggtcggcgaatgcggccagccgctggagcaagcgctcggccccgccggcaccccgggcgagctggtctacgaggacggcacgcggatcgccctgcgcctggacgccgaaggccgcctgccggcgcaggcccgcagcggctatgcgcagctgtcgctggagcagcgggaatgggcggtggcgatggcgccgccgagctgcccgtccctggccagcctcgccccgggtcgctcgcgtcgctggggtctggccgcccaggtctatgccctgcgccgccccggcgacggcggcctgggcgacagcgccgccctcgaggacctgctgcgcagcgccgcgcggcatggcgccgacgcgctggcgatcagcccgctgcacgccctggccgaggccaacggacatgcctacagcccctactcgccgtccagccggctgttcttcaatgtcctgcacgccgcgccggcgaccattctcggcgcggcggcggtggaacaggcgatccgtcgcgccggcctggccgcggagatggcccgcctggagagcctggagctgatcgactggacagcggcggcggacctgcgcatgcgcctgctgcgccaactccaccgcgacttcaccgagcgcgccagtcccttgcgccacgacctcgccgaattccgccgcgaagccggcgaggccctgctgcaccactgccgcttcgagaccctgcaggcgcacctgggcgccggccccgactggagacgctggccggagccgctgcgccgccccggcgagccggcggtggccgcgttctgcgccgatcacgccgaggaagtggacttccgtgccttcggccagtggctgacccaacgttgcctgcaacatgcccagcgccaggcgcgcgaggccgggatggccatcggtctggtcgccgacctggcggtgggcgccgatggcggcggcagccaggcctggtcgcggcaggaagagctgctcgccgaagtgaatgtcggcgcgccgccggacatcctcaaccagtccggacaggactggggcgtttccgcgttcaatcccgaaggcctgcgccgccacggctaccgggcattccgcgagatgctgcgggccaacctggcctggcccggagggctacgcatcgaccatgtgatgggcctgcaacgtctctggctgatcccgcgcggccagccgccccacgccggcgcctacctgcgctacccgcaacgcgagctgctgcgcctgctggcgctggaggccagtcgcgcctcggcgctggtcatcggcgaggacctcggcaccgtgcccgaaggcctgcgcgaggaactggcacgccgccaagtgctgggtacccgcgtgctgctcttcgagcggcgcggcgaacgcttcgtgcccccggcgcaatggccggcggacgccatggccaccaccagcacccacgacctgccgagcctgtccggctggtggcggggccgggacatccactggcgcggccgcgccggacaccgcagcgccgaggaatgcgcggccgacctggaactgcgcgccgaggagcgccgggcgctggccgccagcctcgaaccgccggtcgatcccgaccccgccgccgaagtaccgctggacgcctgcatcggctatgtcggggcaacccccgcgccgttggtgctactgcccctggaggacgccctgggcagcctggagcagccgaacctgcccggccccggcgacgcccacccgaactggcggcggcgctggccggaaaacgccgcgcagatgctcggaacgccgcaggtcgaccggcgcctgcgcctgctcgaacgcagccgccgggatgccgaggaggccgcccatgattga

SEQ ID NO: 366112 - DNA, 306 bp, Pseudomonas aeruginosa; identical to SEQ ID NO: 318892

SEQ ID NO: 366113 - DNA, 321 bp, Pseudomonas aeruginosa
atgggcgcggacgagggcgaacggctcgaccttccgcgacaggttcgcctgctcttcggagccctgccgctggacggcctgcccgacgccgagcgcgagcgtctccaggcgcagcgccaggccctcggcctgtgcgaccggcgcgccagcgtcagccgctaccgcgtggccggcaccgaggtctatcgcctgcgcggcagccaggccggcaagccctaccacgcgctctacctgctcgacggtccccaggtgcactacctcgacagctccggcagcgacgccttcgtcgagcagttgctcgccagcctgcgacgccgctga

SEQ ID NO: 366114 - DNA, 1071 bp, Pseudomonas aeruginosa
atgtgtataagagacagcagcaagggttggctcgcaaggttccgcgcagtgggcgcacaacctgcgcaccagtcgctgggcctggacaccgcgcaccggcgaagccaccaggaagggttccacgcccatgtcgatcaaacgcgtgaaggcgctcaccgcatcgttggtatgcagggtcgaaagcaccaggtgaccggtgagcgaggactgtacggcgatctccgccgtctccaggtcgcgtatctccccgatcatgatcacatcgggatcctgccgcaggatcgagcgcaaggcggcagcgaaggtcaggccgatgtcggcatggacctggacctgggtgatattgggcacctggtattccacgggatcttccacgctgatgagcttgcgcacgccatcattgatttcctccagcgcgccatagagcgtggtggacttgcccgatccggtggggccggtcaccaggatgatgccgtggggttccgctacccatgcacgcatcctccgcaagtggtccgggagcatcccgagccggtccaggcgcaacccctcgcgctccttcggcaacaggcgcatgaccaccgattcgccatgcacccctggcaaggtggagacccgcacgtcgagctccgtaccgctgacccggatgctcatgcgtccatcctgcggcaaccgtcgctccgcgatgtcgatggcggagatcagcttgatccgcgagacgaccgccgcgaatcgctcgcggggaaggctcagttggtcgtgcaggacgccgtcgacgcggaagcggatacggaagtcgaactcccggggttcgatgtgaatatccgaagaacgcttttccatggcctggctcatcacgttgttgacgagttcgactaccggcgcctcctccgccaactcccgcaggtaacggatgtcttcgctgccgtaggcgtgccgatccgcaccttgccgggccaggtccagggagtgctccaaccagccgtccagatcctgggagcggcacagcactgcttgaatcgagcgctccggatagaaatagcccagggtttcgcgtatcgaaggagataa

SEQ ID NO: 366115 - DNA, 240 bp, Pseudomonas aeruginosa
atgaagtccgcgccgcgggccccggcgttcgccgcctcgctgaacatctccgcctgcaacgccgggatcggcatcggcgccctcgccggcagccgggtgatcgacggcagcggcctggcgccgctcggcgaggtcggcgcgctggtctgcctggcggcgatggccgtggccctgctgctgatgctggcgccacgccaagctgccaccgagccgtccctcggcggccaaatccctcactga

SEQ ID NO: 366116 - DNA, 894 bp, Pseudomonas aeruginosa
atggatcgtctggacagcatgcgcgtgttcctgcgcgttgccgaaaccggcagcttcaccaaggccgcggacctgctggacatgccgcgggcgacggtctcggcggcggtccagcagctcgaagcgcaactcggcagccggctgctgcatcgcaccacccggcaggtccagctgacccacgacggcagcgtggtgctggagcgttgccgccacctgctggaagacatggaggagctggagagcctgttccacgacggcagccgcgccagcggccggctcaaggtcgacgtgccgagccgggtggcgcgactgctgatcgccccggcgctgccggaattcttccgccagcatccggacatcgaactggaactgggctccagcgaccgttcggtggacctggtgcaggagggcgtcgactgcgtcctgcgggtcggccagttgggcaacagcagcctggtggcgcgacgcctcggcgagatgcaactgatcaattgcgccagtcccgcctacctggaagagcatggcgagccacggacgccagccgacctcgaccggcactgggcggtcaactatgcctcgcccagcagcggccgggtgttgccctgggagtaccgcgaggatgggcgcaccctgacccgcgcgttgcgcagccgggtcacggtgaacaacgcggaaagctacatcgcctgctgcctgtccggactgggcctgatccagatccctgcctacgacgtgcgcgagtacctccaacgcggcgagctgcgcgaggtgctgccgcagtggcgggccgaagcgatgccggcgtacgccctgtatccgcaccggcggcatctgtcgcggcgggtcagggcattcgtcgactggctggagcaactgctccgcgcccgcctctag

SEQ ID NO: 366117 - DNA, 519 bp, Pseudomonas aeruginosa
atggggaaagcgcccgaagcggcggatgatctcgcgatgctcacgagcgtgggcgaggaagggctggccgagtccgtggttcagcgctaccgagcgatcctggtcggcaaggttctcggcatgggcgaacggcaggtagaagaacagccgcagcgcgtccccgacctggcggtcgaggccttgtcccagagcccgctccgcccagcgccgcgcttgggcgtcgctggcgtacatgcgcggggttccacggaaggcgttgcgcgggtactggtcgagcagcaacagcaggccgagatggtcctcggcttcatcggcagccgggcgcagcgcgtcggcgcaggcaagctcgtagaggtgggcgaagcgctcgcggaagcgccggtcgaaatcggcgttcctggcgaaccagagggtagggccggcatcgcgccagaaaccgaccacttccggcagcggggacgcgctgggaggaagcaaaagcgctgcatggggcatctgcggatccaggaagtagagtag

SEQ ID NO: 366118 - DNA, 1056 bp, Pseudomonas aeruginosa
  misc_feature (926)..(935): n is a, c, g, or t
atgacccgagccctgcccctgctcctgcttgccctgtcccttcccgccgcggcgacggacagcgagtcgttcgcccgccgctacctggcctatgtccatgccgtcggccagcacagcgaacgactctggcccggctggcggatggccgacaaggccttcctctacagcgatggccgcagtacctgggtcgccgatgccgaaggccgcgcgcagcgcaccacggcggcgggcgacagcgacccggatctcgacctgagctatgcctttccgcgttaccggggccgtccggcggtgctgctgcagatcagcgccgcgcacctgcggagcaataccggcaatagcgagacgctggccgccatcggcccgcacgaagccttccatcgctacgcccaggaagactggccgggcctgcgcaagcccggtggctatcgcggcgacctggccacgctcgacccgcgcccgcgggaataccgctatgccctgttccagtcgctgctccaggccctgcgcacgcccgggcagcgcgacagctacctgagcgacgcccagggctggctgcgccgctggcgcgaagcggctcccgaggaaagccggctggcggcgcaggtcgatctcagcgaaggcaccgcgcgctacatcgagatggccgccgccgcgcgctaccgcaccgatttcgccgaggatccgcaacgctatcggcaggcgctgcgggagtacgccctggccttctacgatgccaacgagatcggcgtcggcgtcgacagcgaagcctacgagatcggcgcgctggccggagtgctgctggacctgcgcgacgacgacgcggactggaaggaagccgcgacggccggcacctggccgctggactacctgctgcgcgaccagcctcctgtctcttatacacatctgacgctgccgacgagcgnnnnnnnnnnaaactccccgacgacgcgcgggcgcgcggcgagcgctaccggcgcgagatgggcgccacccgccagcgcctggtcgagttgcaggaggccttcgccgacccacggcgaccgctgctggtga

SEQ ID NO: 366119 - DNA, 933 bp, Pseudomonas aeruginosa
atgttcatcccccgactaagcgatgcggatattgacgagtgccttcaagccccgacgcgattcacactacgctggatcgctattgacgaagacaaagtccaaattctagagggcatttccactctcctagaggaggtcggggagaaaatcgactctgcagaccctctcgaggccgcacgcggactcgttgcattgattttcagcctgccagaatgggcacgacgcacacaacgcttaggtgaagtggcaaaagctatacgcgacatgttgttgaaagccagcgatccacacaaagtgctgttcatcgacttaccctcactgcttggtgctgatgacggtacaacttatgtagaaacactgcgtgctccacttcatgaaatcgcagcagcctatcccaagatgctctctgaagttgaaagcaagatgcttgaagcgctcgatgcgcctctcgacaacttggattcgctccgtaaaagagcaaaggctgtggcaggggttgctggcgacttcaggctcgacgcattctcgacacgactggcgtcatacgatggtagtcgcccggcactggagggcattctgagcctggcagccgaaaagccgccacgcgactgggttgatcgccatatcgatgcggccgtgcttgaacttgctcagttcgcacgtcgcttccgagaagcagaggcctttgtctcagtcaaagacaggccagcacgtagcgaggcgatcgctgtcgtcatcggcgccggagcggaaaccacaacgatctctagatcattctcgatttcggaccgccatcgtaaaaccgtagacgacaaggccgctgaactcacgtcgatgctacaaggccaaggccttgaaacggacatcttgctggcgatccttgccaaagcaggaatgagtctggcgagtgaaaaggagaaaatggatggctga

SEQ ID NO: 366120 - DNA, 1773 bp, Pseudomonas aeruginosa
gtggaggtgcgggatcgcccgccgcagcaccgagggtcgccagatttcccgggcgcgggcgcgttccagcagcgggtggcagggggcgtcgcattcgatgccgatggcgtagaggccggtggccgggttctcgatggcgaagtcgaggccgaaggcgtcgccttcgctggcgggtgcggcggaccagcccagcgagcggatgtactcgccgacgatctcgctgaagccgtcgtgccgctggtagtgctggcggcgctggtcgctgcggtcggtgtgcaggcgctcgagcagctggccggtgccggcgaattcgccggcggacagtgcgcgggcgtattccaggtagccttgcaggtagtcgcgcgggctgctcggcgagcgctgggtgccgagcatgtcggagatgtcgccgatcggcatcgaggtgatcatcaccaccttgcgccgcgcgcgggtcaccgccacgttgaggcggcgctcgccgccggtctgcccgagcacgccgaagttgcgccggaagctgccctggccgttgcggccgaaggtggaggagaagacgatcacgtcgcgctcgtcgccctgcacgttctccacgttcttcacgaacacgcccatgtcctcgccgtcttcgctgcgctcgcgctcctcgctgtaggcggcgcggaacgtctcgtcctgctcggcgcgcagttccaggcgctcctcgatgaggtcggcctgcttgcggttgaaggtgaccacgcccaccgacggccgcgccgcgtaggggtggcgccagagttcggcgaggtagtcgacgactcgctcggcctcgcgctcgttgctctggttctggtacaggccgttcacctggatcagttccagcggcttgatgcgcaggatgttggcctgcggatggcgtaccggcacgctcaggcggttgccgtagaacgaggcgttggaaaagccgatcagctcgcggtaggccgagcggtagtggatctgcaaggtggtgctgggcagggcgttgcgcgccagttgcaggaggtccgggcagtccttgatctcgcggcggttccaggtgtcctcgtaggcttcgcgctgctcctcgtcggcgtcctcgtcgggcgcttcgccgtcgaacagctcggcctcgtcgctttccacgcggctggagaagaacgcggtcggcggcatctgcttctcgtcgccgctgaccaccgtgacccgcccgcgatagagggtcggcagggcgaactccaccggcatctgcgaggcttcgtcgtagatcaccatgtcgaacagcccggccttgagcggcagcacgcggctggccaggtcggggttcatcagccagaccgggcgcaggctcatcaggccgagttcggcgcccagctcgatgaactcgcgcaggcgccgcgagcgcttgccggtcaggcgggtgacgtcttcccattgcttgcggctgcccaggcgcgcggcgtcgatgcccttgccgagcagttcgcggttcagcgcgcgcatctgcacatcggcttcggcgaggctggcgaccctggccctggcttcgtcctggctgaacagcagttccggattgtcttgttccaggcgctgcttccagcccagccgcgcttcgcggttgagcatgcggcgcaccgtggcttcgagttcttcggcgggaatcgcgtcgagtcgttcctggcgctggcgcagcagggccaggaattccagctcggtggcttcgagctggccggcgcggccacggaagcgctggtaggcgaccagttgcggtag

SEQ ID NO: 366121 - DNA, 999 bp, Pseudomonas aeruginosa
ttggaactcgccgcaccagagggtttcgatgtcgcggtcgcgctggctgtcgcggttggcgttgagggcgacggcgcgcagttgcaggcggccgttgtcggccttgccgccgacttccaggccgtagccgggggtggcgggtttgcgcaggacgaccctgccggtctgcgcccaggcggtggccatgccttcgcggacttcgtagccgaggctggcgaggccctggagcacggcctggcggcgggcgagggcggcctgttgctggaggtgggcggtgaggatggcgttgcatcgctcggtgagttcggcgagttgctgcggatcgctgtcgggctggcaggcggcggcgcgctggagcagttcggcgtgttcggcggcgcccagggcggcgacttcgctggcgaggtcttgcaggtgttccaggcgctggcgttgctgctggtgttcgcgggcggcctgggcgaggtcgaggaccaggctgtcgagcagcaggttgcggcgctccgggcgctgttcggcttcggcgcgtgccagtcgctcgaggaacgcttgggcgctggcctcgccttgcagcagttgcagttcggcgatgtgccggtcgatgcgcgccaggcgctgttcgtgcggggcgtcctgttgctggcgggcgcgccactgttccagggacatgggcgtttcgtcggtcttcaggcgctgggcgagttcgcgctgggcttcgctgaggcgttcttcggcgggggcgctggcgagggcggcgaagccttgggcgagcagggcttccgcgtcgtcgcggaggacgccgtcggccagcgtatgcagggtttgccggagtgtcgcgctggcggcatcgggcctggcgtcgagggcctggagcagggctctggcgttttcctggaggcggcggtgttgctggcgcgtttccgcggcctggcgaatggcgcgctcttcgcgttcggcgaggtcgcgcttgaggaattcgctttcgatcttcacctgtag

SEQ ID NO: 366122 - DNA, 1485 bp, Pseudomonas aeruginosa
atgcaccagtacgcggctggcggtgctgcgcaccagcgtcggcacgtcggcgctgcggtaggtcgccgccagcgctgccgcgtcgtcgagagcgatgcggtagacgatgcgcacgtccatgttgacgatctggaagctctgccggtggtcggccaggctggcgatgacctgcgatttctcgctgacgtgggaggcgtcccacaagcggttggcgctatccggggccggaccttcggcgggcgcgagcggctcggctccgccgtcgccggcggcgacgctggtggccaactcgtggaccaccccgttctccaccgccaacacccgccccagcggccagggcagccccaggtgcaggccggggccgagcaccgcgaccggcttgccgaagcgctcgtagacaccccgtgcatccatgccgatctcgcgtacgccgctgagcagccagccgctcagcaacaccaccgccagcaccggcaggaacgcccgccgcatgaaaccgaaggcccagacctggcgcaggtcgatgccgaagcgctggtgcaactcatgctgcagacgctgcaggggacgcggcggccagcgcaacaggtcggccagcaggctggtggcgaccaggcgcggttcgaggccggcacgctgcggcgcgaacatcgccaggatcgccctgcccagcaactccaacgccagcgccgccggcaacaggccgagcagtaccgccaggcgcggggcccaggggtgtccctggcgagccaggaacagacagagggcggccagcaccagggtaccgatcagcgcccgcgccagttgcccgagggccggggcttccggccactgcgccggcccttggctggcgaagcgacgttccagcaccagcaccgcgaaggccagcagcaggcagatcccgatggcgaggtcggccgcttgcccggaactggccggcggcaggtcgagacgccagccggcggctaccaggcacaacgccagcgccgcgctcgccgccagccacagcgcagcgtgcccgagctgggccaggccgtgggcgatggcctggcccaggcgctccagcagccgttcataggcgctgtcggcggcggcgtcgggttcgccccgctgccagcgcagccaggcaggccgcgcgctggcctccgcgccgaggaccacgcaacgccaggccgcgacccggtaggccgcgtgcagaccggcgaacaggaccagccaggccgcgccgaggttgtacagcagcggcggccagagcgagtcggcggcgaacaggccgatgaagaaccccagcacggcgcaggcggcggccaatgcgacgctggccgctgcccatcgccacaactggcgcaactgccggggcgcctgctggaaacgcggcagcgattcggcggcgacgccctcggcgtccaggtcgactctcatcttcactccaggcaaaactcgaaggtaccggccaggccggcgcaaacgcccgcaactttataa

SEQ ID NO: 366123 - DNA, 1053 bp, Pseudomonas aeruginosa
atggtggaagctgaacaccaggtccaggccgtcctcgcggacgaacgcggcgaacaggaacagcccgggctgttgcagcgaatagcgatggaagcggcgttggcggatgtgctcgtcgagcaccgtcccggcctccgggttgccgcgcaggtccaggatcagcggttcgctgcgcgcctgggtatgcaccagttgcagcggttcggatgcaccgctgaggtcgaacgacgaacgcagcgcgggataggcggcgaccacccggtccagcgcgtggcggaacgcggcttcgtcccaggccaggtcgaagcggtagtggaacacgtcgtggtagaccgacgagtcggggcgctggcggctatggaagagcaggccgagactcagccggctggtcgggaaggcgtcctccagcccttccaggcgcggcttgtcgacttcggaaaccagttcgaagggctggtagcttcgctccgcgagcggacgcaccaggcgctcggcgaggcccgccaccgtcgggttgcgcatcaggtcggcgagttcgaagcccaggccgcgccgctgtgcggcggcgcggatgcgcagcatcaggatcgagtcgccgccgagggcgtagaagtcgtcgtgcacgccgacctccgccacgccgaggacatcggcccacaccgccgccagttcggcctcggtcgccgtgcgcggcgcaaccgccgccacctgttccggcggtgccggcagttgccggcggtcgagcttgccgttggcgctgagcgggaggctgtcgatgcgcacgaagaaggctggcagcatgaagtccggcagcgtcgccgaaagtccggcgcgcaagcgtacttcgtcgggttcgacccggttgccgcggatcttcacctggtcgtcggcgcggccgaggtattcgaggttgccgtcggccagccagcgggccaggtcgccggtacggtagagacggccgccggcgacgaaggggtcggcgaggaagcgctcggcgttcaactccggccggttcaggtagccgcgggcgacgccgacgcctcctatatatag

SEQ ID NO: 366124 - DNA, 624 bp, Pseudomonas aeruginosa
atggctgaacaagcagtgcatgttcccgccgggtaccgcatggacgccaaggggcgcctggtacctgaagaaatgatcaagcccattgacctggagcgcgaccgccttgtgcaggagatcgttgccaaggggaaggctctgaacaaggcgttgctagatttcaaactggcaacattcggcgatatcgaagccttcatcaccctgtcggccgagcagtaccaggcgaaggtaggaggcaagaagggcaacgcttctctggtcagcttcgacggtcgctacaaggtcattcgggccatggccgacaacatcgccttcgacgagcgcctgcaggcggccaaggcgctgatcgacgagtgcctccacgaatggacggaaggtgctcgcgcggaggtcatcacgctgatcaacgatgcgttccgcgtggaccaagctgggaacatccgtaccggcagcgtgcttgccctgcgccgcctgcagatcgatgacgaacgttggcagcgtgcaatgcaggccatcggcgaggctgtccaggtcgtgagcaccaaggcgtacgtgcgtatccaggagcgggtcggggacaccgaccagtaccgctccattcctcttgatatcgcgggggtgtga

SEQ ID NO: 366125 - DNA, 720 bp, Pseudomonas aeruginosa
atgccggtgaagaccagcagcgacagcaacaggtggccgagcaccagcggttggcgcaacacgctcgcctggctgcgcagcgagatacccggccgtccgggaatgcgcggcagccaggcggccagcagcagcgccttggccagggccagcgcggcgagtgcggcgaatgccaggcgccaaccccaggcgtcggcgatcagcgtgccgatgggaatgccaagcacggtggcggcgacgatgccgaagaacaccagcgccacggcgcgcccttcgcgcgaggggccggccaggtgcgcggcggtttcgctggccatggcccagaacaccgggagcgccagggccgggacgaagcgcgccacggccatcgtccagatatcgccggccacggcggccagcgcattggccgcggcgaacagcagcaggcaggcgacgaacagccgcttgcgttcgacgcccgccagcgcggcggtgaggaacggaccgaaggcggcgacgctgaaggcgaacaggctgaccagcaggccggcctgggcgacgctgacctggaggtctgcggcaagtgccgggagcaggccgacgatgacgaactcggtggtcaggatggtgaagccggcggcggccagcaggaggatcggcaatagcacggcaagactcctccgcgagcgcagccgtggccgcgcccgggaacgatgcatgggagggaagggaatcaggccgtag

SEQ ID NO: 366126 - DNA, 996 bp, Pseudomonas aeruginosa
gtggcggcgcaccaggcgcgcgctgcaccaggtggcgagcatcacgccgaggatgttcaggccgaagaaccagccgaagcgctccgcgcgcacgccgaaatgctcgatgaacacgaagggcgcggcgctgatgtaggcgaacatcccggcgaacgccagccccatgcacagcacgtagcccagcgcgcgacggtcgccgagcagccgcccataggcgagaaaggcctgggccaggctgccgccgcggcgctccggcgggtggctttcggcgacccgccagaccgccagcaggcagagcccggcgaacagcgccaggaccacgaacaacgcgcgccagccggcccagagcatcaggtagccgccgagcagcggcgcggccagcggtgccagcatggtcaccatgtgcatcaatgccagcatccgggcggcctcgcccaacggatagaggtcgcgcaccatggcccgcgccagcaccgacgcggcgccgccgccgagggcctggagcaccctcagcaggaccagttgccccgcgctgtcggccagcgcgcaggccaggctgctgaacaggtacaaggcgataccggccagcagcaccgggcgccggccgaaacggtcggacaaggggccgtagaacagcatgccgacgcagaagccgaccaggaagccgctgatgctccgctgcacctgggcatcgctggcgccgagatcggcggcgatcgccggcaggctcggcaggtacatgtcgatcgacagcgggccgaacgccaccagcgccgacaacagcagcaacaggcgtcgttcgccgcttccgacctgaatcctcgatgcactcgcaggcacgctcgccctcctcttcttcgcctttcggtccagacgacaccgccgtgcacgcggatgcaagttcgccgtccgggaaatcctcgcgccgcgacctcgttcaccctggcagcgcgcgggcctggctcctttcgcgggccgacaacgttaacagattaa

SEQ ID NO: 366127 - DNA, 1416 bp, Pseudomonas aeruginosa
atgctctgggcttgcattctcctgccgcaactggccatggacagcgcgctgcgtcaacggagcaatcccgacgcaccgctggcgctgctcggcggcccagcgcagcgccggcagttgcaggcggtcaacccagcggcacgcgcgctcggcctgaagcccggtcaatcgctgatcgccgcccaggccctgagccgggacttcgccacggcggaatacgacctcgccgccgtggagcgctggcaggccttcctcgccgcctgggcctacggtttcagctcgcaggtcagcctgcactatccgcgtgcgctgctgctggaagtgcagtccagccttgccctgttcggcccctggccacgcttcgaggcccgcttgcgcaaggaactcacggcgctgggcttccgccatcgcctgtgcctggcgccgaacccggtggcggcgagggtcctggcgaacagccacgacggcctggccatcgaggacgagacagcgctgcaacgccagttgtccgcccttccgctggaccgcctgggactctcgcgggagctggccgtcgccctcggacgcatgggactgcgccatctgcgccaggtcctcgagttgccgcgcgccgccctggcccgtcgcttcccggccgaactgctattgcacatcgaccgcctctgcggccgcagcccgctggcgctggagcactaccggccgccggacaccttcgacctgcgcatcgaactcaatttcgacgtggagtcgcaccaggccctgctcttccccctgcgacggctgagcgccgatctcgccgcctttctcgccggacgcgacagcggcgtgcagcgcttcaccctgcatctggagcatcacgggcgcgccgacagccaggtcacggtcggcctgctcagcgccgaacgcgaggcggccatgctcttcgaactgacccgcggccgtctcgaacagctgcaactgcccgcccccgtgcatgccgtgcgcctggaggcccgcgagctgcctcctttcacgccgcagcaccgcgaactgttcgacgagcgcccacagcagtatctcggctgggaacagttgcgggaacgcctgcgcgcgcggctgggcgacgaggcggtacagggcctgagcgccgtcgccgaacaccgtccggagcgaagctggcggccgcacagctgctacagggcgcaatcgccggcagcctgcggcctccgccccggctggctgctggcggagccacgccccctcggcgaggccttgcccaccgtgctggccggcccggagcggatcgagtcgggctggtgggatggcgaagacatccgccgcgactattacctggtggaaacccgcagcggacaacgtgcctgggtctatcgcgaggccggcagcgaagggccgctgtggctgcatggctggttcgcatga

SEQ ID NO: 366128 - DNA, 1917 bp, Pseudomonas aeruginosa
atgcgggccgagggtggtgccgaggagagcgtaatcgctcagcagttcctcgccgcgcgaaggcagcggcaggctgaccgtggtttcttcgatgacggtcccttcggcgaacagtggcaattgcggctcgacgctggcgacggcccagcgcgccttgtgccggtgtccggcgagaccgcgcagggcgccggcatcggccagcaactccagggcccgggcgtcgagcctggcgcgtcggccgagatcgtgcacgtcgaggaacggctcggcctcccggacctgctcgatacgcctggcatcctcctcgcgaaagcctcggatcatccgcaggccgaggcgtatggccggttgcgcctggccgaacggctccaggctgcaatcccaaccgctgtggcggacatccaccgggcgtgtctgcagggtgtggcggcgggcgtcctggagcaactggtcggggctgtagaagcccatcggccaactgttgatcaaggcgcaggcgaaggccgccggctcgtgacgtttcagccaactgctggcgtaggtgagcagggcgaagctggcggcgtgggattcagggaaaccgtagctgccgaagcctttgatctgctcgaagatgcgcgctgcgaagtcggcctcgtagctcttggcgagcatgccccgggtcagccgctcgcggtggtgttccaggccgccatgacgcttccaggcggccatcgaacgacgcagttcgtccgcctcgcccggcgtgtagtcggcggcgacgatcgccagttccatgacctgttcctggaacaacgggacgcccagggtacgttcgaagaccttctccagttcggccgatggataggccaccggctcttcaccgtttcgccggcgcaggtaaggatgcaccatgtcgccctggatcggccccggccggacgatggcgacctggatcaccagatcgtagaacttctgcgggcgcaggcgtggcagcatggccatctgtgcgcgcgattcgatctggaacacaccgatggtatcggcgcggctgatcatttcgtaggtggccgggtcttcgctcgggatactggcgatgctcaaccgcttgccgccgcgcagcgcgtggatcaggtcgaagctgcggcgcagggcgctgagcatgcccagggcgaggacgtcgaccttgagcaggccgaccgcgtcgagatcgtccttgtcccactggatcaccgtgcgctcggccatgctggcattctccaccgggaccagggtgtccaatggctgttcggagatgacgaagccgccggggtgctgcgagaggtggcgcggaaaaccgatcaactcgtcggtcagggccagcacccggcgcaggatcggactctgcggatcgaagccggcctcttccaggcgttcggcgctgggggcctggtcgctccagcggccgcagcagttggccaggacgtcgacctgctcgggcggcagacccagggccttggctacgtcgcgcaccgcgccggcgccgtggtaggtgctgaccaccgcggtcagcgccgcgcgctggcgtccgtagcgtgtgaaaacgtactggatgacctcctcgcggcgctcgtgttcgaaatccacgtcgatgtccggtggttcgttgcgctcgcgggaaaggaagcgctcgaacagcaggttggtccggtccgggtccaactcggtgatgccgagggcgaagcacactgccgagttggccgccgagccgcggccctggcaaaggattttccggccccgggcgaaggcgacgatgtcctgcacggtgaggaaatagctttcatagcccagttcggcgatcagctcgagttctctcccgatctgcttgcggaccttggcgctcgcgccgttcggccagcgcctggcgatgccctgttcggtgagatggcggagccatga

SEQ ID NO: 366129 - DNA, 930 bp, Pseudomonas aeruginosa
gtggatgatcggcagcacgccggcgccgagcaggacgatcttccagtgcttgcccagcacctcggcgagcggcagcttcaccgtgcgcttctgcgccagcacacgcttcatgtcttccgactcctccagcttcaggcggatcaccatgccgacgatgaccagcaccgcagagagcaggaacggcgcgcgccagccccagagaatgaagtccgaggcgggcagggcgctgagggcgaagaacgccagggtcgccagcaggttgccggtgggcgagccctgctgggcgaaggcggcgtacaggatgcctttgcccttgggcgcgctttcgctggcgatcaggatcgcgccgccccactcgccgccgaccgcgatgccctggacgatacgcagcgccaccagggagatcggcgcccagatgccgatctgcgtatagaccggcaacaggccgatgcaggtcgtggcgatgcccatcatgatcagggtgatcaccagggtggtcttgcggccgatgcggtcgccgagatggccgaagatgatcccgcccagcgggcgagcgatgaagcccgaccagagggtgacgaaggacagcagggtggccaggcccggatccatgtcggcggggaagaataccttgccgaacaccagggcggcggccaggccgtagatgtagaagtcgtaccactcgatggtggtgccgatgaaggaggcgataccggccctgcgggccttcttgtgcaggtcggcgtcttcgggagagggcgtgcgcggcatgggtcgagtcctgtttattgttgttctcgccgacacgccgctccctaccgcccttcgctgaaaggcggggcggaaacgctggtttccgtggagggagagcgtgcgtcggtgttgacccgggtgcctcggagtctaggtggcacccccgcaaatcaatag

SEQ ID NO: 366130 - DNA, 888 bp, Pseudomonas aeruginosa
atggatctcagacagcttcgctacttcatcgcggtcgccgaggaactgcatttcggtcgcgccgcggctcgcctgttcatctcccagccggcgctgagcttcgacatcaagaagctggaggaacagctcggaacccaattgctgctgcgcaacaacaagtcggtgaagctcaccggcgccggccaggtcctgctggtggaagcgcgcaacctgctgctgcaggcagagaaggtgaaacgcctgacccagctatccgccgagggcgacgtcggccaactgcgcgtcggcttcgtcaactccatgctctaccgcggcctgcccagggccatgtcccgtttcgaacgggagcacccgaacatggaggtggtgctcggcgaaatgaacagcgcggagcaggcccaggcgttgcagcgcgggcagatcgacctgggcttcgtgcactggggcaggctgccggcggaaatcgtctccgaacccttgatcagcgacccgttcctctgctgcctgcccgccgggcaccgcctggctggccaggcgcgtctggacctcgccgaactgcgcgacgaagacttcatcctcttcccgcgccatgtctccccgcactaccacgacctgatcatcgcccgctgcgtggaggccggcttcagcccgcgcatccgccacgaggcgcgcctgtggcagaccgtcgccgccatggtcggtctcggcatgggcgtcgcgctgatcccggagaccctctgcctggcctggcggaacgaggtgcgctacctggagatcgagccggccggcgcgcgttcggagatccacgcgatccttccggccagcgaaccttcccgggcggcgcaggcgttcctggcgacgctgaagagcggcctggacgacgcctga

SEQ ID NO: 366131 - DNA, 1335 bp, Pseudomonas aeruginosa
atgattttttttgtattggatgcttatcgaagcactcgcctagtctcggcgcaagacaagcaggagccgcgccatgaccgccatgcccgaagtacttcgcgaagatacgctgaacatccccgacagccgtgggctgaatctctacacctgcgatccggccctggagcggctgctggaggtatacctgccgccggcgttgctcgccgaatggcggccgctcctcgaacggctcggcgcccgtgccggcggcgagctggacgtgctggcgctggcggcggacaagaacccgccggtgctggcgccgcgcacccgccgcggcgaggatttgcagagcattcgcaagcatccggactacgtcgccctcgaacgggtggcctatgccgaacttggcctggcttccatgagccatcgcccggacggcccgccgccgctggtgaagtatgcgctcacccacctgttcgtacaggccgagttcggcctttgctgcccggtcagcatgaccgactcgctgacccgcaccctgcgcaggttcggcgcgccagaactggtcgagcgctacctgccgtccctcgcctcgcgggatttcgacgagctgttccagggcgccatgttcatgaccgagcaggccgccggctccgacgtggcgcggacccgtaccgtggcgcgggagcagggcggcgagtggaagctctacggcgacaagtggttctgctccaacccggacgccgacctggcgatggtcctggcccgccccgaaggcgcgccggaaggaatgaagggcgtgaccctgttcctgttgccgaaggtccgcgaggacggcacgcgcaacgcctatcgcatcgtccgcctgaaggacaagctgggcagccgctccatggccagcggcgaagtccgcctggaaggcgccagcgcctacctgatcggcgagatcggccgcggcttccagcagatggccgacatggtcaacatgtcgcgcctgtccaacggcgtgcgcgccgccgggctgatgcgccgggcgctgagcgaggcgctgttcgtcgcccgccatcggcgcgccttcggcaagcacctgatcgacatgccgctgatgcagaagcagttgctgaagatgatgctgcccaccgaacaggcgcgctcgatgttcatgcagatcgccacgctgctgccgcgcgccgatggcggcgaggtcgaggcgcagaaatgcgtgcggatcctcaccccgctgatcaagttccgcgcctgccgcgatgcgcgacgggtcaccggcgacgccatggaggtgcgcggcggggtcggctacatcgaggagtggagcgacccgcggctggtgcgtga

SEQ ID NO: 366132 - DNA, 393 bp, Pseudomonas aeruginosa; identical to SEQ ID NO: 332450

SEQ ID NO: 366133 - DNA, 420 bp, Pseudomonas aeruginosa
gtgaagatcgtcgaggcgagccggggcgagctgccgctgccggtcttgctgggactcaacgccgaggccgagctgcacatcgacggccggccgacccaccacgaccacgaaggccacgaggaccacgaccacgacgagttcgactccttccacgtcgatctccccgaggtggaggaagctgcgctgctcgaggccctcggcgagctggtggagcgtcacgacatacttcgcatcaagggtttcgccgccattccgggcaagcccctgcgcctgttggtacagggcgtcggcaagcgcttcgacaggcatttcgaccgcaagtggctggccgacgaagtccgcagcacccggctggtggtgatcggccaggagctggaccaggccgccattgccaaccagctgcgcacagcgcttgcctga

SEQ ID NO: 366134 - DNA, 1443 bp, Pseudomonas aeruginosa
atgcccagcaccgtctcgtcgtcgcggctcggcctcgccgggctctgcatcctgctggcggggcaactgttgccgatgatcgatttctccatcgtcaacgtcgccctcgacgccctcgcccattccctcggcgccagcgaaaccgaactggaactgatcgtcgccgtctacggcgtggccttcgccgtgtgcctggcgatgggcggccggcttggcgacaactacggccgtcgccgcctgttcgttctcggcgtcgccctgttcgccgtcgcctcgttgctttgcgggctggccggttcggtctggctgctgctggtggcgcgcgccctacagggcgtcggcgcggcgctggtcgtgccgcagattctcgccaccctgcatgtcagcctcagcggccacgcgcattcccgcgcgctggccgcctacggcgccatcggcggcctggccttcgtcgtcggccaggtgctcggcggcttcctggtctccgccgacatcggcggcctcggctggcgcagcgtgttcctgatcaacctgccgatctgcctcggcattctcctttgcagccgccgctgggtaccggagacccgcgccgagcatgccgcccgcgtcgacgcgccgggcaccctgctgctcgccgcgctgatcctctgcctgctgctgccgctggctctcggcccatcgctgcactggtcctggccctgcgccctgctgctggcggcggcggtgccgctgctggcctggctgtggcgcaccgagctgcgccaggaacgccgccaggcctggccgttgctgccgccgtcgctgctgcgcctgccgagcatccgcttcggcctgttactggcgatcctgttcttcgcctgctggagcggcttcatgttcgccctcgccctggccctgcaggccggcgccggtctctcgccggtacaggccggcaatgccttcatcgccctcggcgcctcctacttcgtctcggcgctgctcaccgcccgggtggcggcgcggatcggcccggtacgcctgctgctgctcggctgcgtcatccagatgtgcggcctgctcggcctgatgctgaccctgcaacgggtctggccgcagccgggcatcctcaacctggcgccggcgaccctggtgatcggcttcggccaggcgttcatcgtcagcagcttcttccgcatcggcctctcggaggtgccggccgcccaggccggcgccggcagcgccatgctcgccaccgtccagcaggcctccctcggcctcggctcggcgctgctcggcgcggtgttcgcgcacaggctggagcgccatggcgactacctggaagcgacgcagacgaccctggccgtcgagttcgtcctgatgacgctgctgctcggcgccacctgcctcttctacctgcgccgcgtgcgcacggtgccattgcgctgcgactcgccgggcaactga

SEQ ID NO: 366135 - DNA, 936 bp, Pseudomonas aeruginosa
atgtgtataagagacagcacctgggccagcgacgtgctggagctggtcgagccgggcggacgcctggcggcggcgctgccggagctgatcgagcccggcgcctgcatcggcaacctgcgccccgaagcggccgccgccctcggcctggctccccacacgcgggtcgccggcggcggcggcgacaacatgctcgccgccatcggcaccggcaacatccgccccggcctgctcaccgccagcctgggcacctccggcaccctgagcgcctatgccgagcggccgctggtcagtccgcacggcgagctggcgaccttctgcgcctcgtccggcggttggctgccgctggcctgcacgatgaacctcaccggcgcctgcggcctggtacaggacctgctgcacctcgacctcgacgaattctcccggctggccgcccaggcgccggtcggcgccgagggtctgctgatgctgccgttcttcgacggcgagcgggttccggcgctaccgcacgccagcgccagcctgcatggcatgaccgcggccaacctgagccgcgccaatctttgccgggcggtgctcgaaggcaccgccttcggcctgcgctacggcctcgacctgctgcgcgccagcggcctgccgggcgaggaaatccgcctggtcggcggcgcggcgaagaacccgctgtggcggcggacgctcgccgacctgctcggcctgccgctggtctgtccgcggcagaccgaggccgccgcccttggcgcggcgctccaggcggcctggagcctgggccgcgaaagcggcgccggtgaaagcctggaagccctgtgccggcgctgcgtggcgctcgacgagtcgacccgcacccagccccaggcgcgacaacaggcggcctacgaacaggcctaccggcgttacctggagcacctgcctccgcgataa

SEQ ID NO: 366136 - DNA, 186 bp, Pseudomonas aeruginosa; identical to SEQ ID NO: 322823

SEQ ID NO: 366137 - DNA, 594 bp, Pseudomonas aeruginosa
gtgtataagagacagctgctgctctggctgggctggcgccagcgcggggaggtggtcgatggcgtcgcctcgcgcaggcgctactggctgttctggggactggcgccgtgcctgttcttcaccttcgccggcaacgtcctctggacctacgtgctgcccggcctgccggccctggcgttgctcgccgccgacctgctgcgcgcgccggtggcgcgcagcgcctggctgcggcgtggcgggttggcttgcctggcactgaccccattgctgttcgcgctgttcctcggctccctgttgctgggctcgcgcgccgagcagaagtccaccgccgcgctgctggccagcgacgccggctggcgcgagcggccgctggtgttctggccgaagcggccgtactcggcagtgttctacagcggcgggcgggcgcaacgggcggaggacagcgagctggccggctggttgcgtcgcgacgccctgctggcgatccgctcgcgttcgttcggcgccttgcccgacgaggtgcgccagcgcttgcgctgccggccgccggtgggacagtaccagttatgccagggcgtggcgccgcctggctga

SEQ ID NO: 366138 - DNA, 1044 bp, Pseudomonas aeruginosa
atgggcatgtcgatgctcggccgggtgctcgatggcgccggccgcgccctcgacggcaagggcggaatgcgcgccgaagactgggtgccgatggacggcccgacgatcaacccgctcaagcgccacccgatcagcgaacctctcgacgtcggcatccgctcgatcaatggcctgctcacggtcggccgcggccagcgcctcggcctgttcgccggtaccggggtgggcaagtcggtgctgctggggatgatgacccgcttcaccagggccgacatcatcgtcgtcggtctgatcggcgagcggggccgcgaggtgaaggagttcatcgacgagatcctcggcgaggaaggcctcaagcgctccgtggtggtcgcctcgccggccgacgacgcgccgctgatgcgcctgcgtgccgcgcagtactgcacgcggatcgccgagtacttccgcgacaagggcaagaacgtattgctgctgatggactcgctgacccgctacgcccaggcccagcgcgagatcgccctggccatcggcgagccaccggcgaccaaggggtatccgccatcggtgttcgccaagctgccgaagctggtggaacgcgccggcaatgccgaagccggtggcggctcgatcaccgcgttctacaccgtgctctccgagggcgacgatcagcaggacccgatcgccgacgccgctcgcggcgtgctcgacgggcacttcgtattgtcccggcggctggccgaggaaggccactatccggccatcgatatcgaagcttcgatcagccgggtgatgccgcaggtggtcgaggccgagcacctgcgcgacgcccagcgcttcaagcagctctggtcgcgctaccagcagagtcgcgacctgatcagcgtcggtgcctacgtggccggcggcgatcccgagaccgacctggccatcgctcgcttcccggtcatgcgccagttcctgcgccagggcctcgacgaaagcgaaagcctggcggaaagccgtgcgcggctggcgagcctgctcgccggcgggcaggcctga

SEQ ID NO: 366139 - DNA, 186 bp, Pseudomonas aeruginosa
atgagcctggatctcgttcgtagcctcattagcttcctgcaggcgctctcgcaactgagcttggacagcctccagatcttgggccttctgctcggccattttccgttcggcctcgagatcagcgatctgcttggcggaggtgtcccgcagaccttctacggcagaacgggccgcccgctcctctag

SEQ ID NO: 366140 - DNA, 147 bp, Pseudomonas aeruginosa
atgccgcgggtgccgggcatggccgaccaggacagcctcggcgcgccacccgaggcggtcgcggccaacctgccgccgcggcaaccggtctgcgaagagtgcctgctacaggcgaagaaaagaggccaggcgctcgccgagcgctga

SEQ ID NO: 366141 - DNA, 279 bp, Pseudomonas aeruginosa
gtgcgccaggccgatgccgcggcgccgcaggcgcagatcgacccggcggcgctgcagggcatggtcacggcttcggcggcccaggccggactgagtgtcgagcgcctcgacaacgaaggcgagggcgccgtgcaggtggccctgcagccggcgccattcgccaagctgctgccctggctggagcagttgaacgggcagggcgtgcaggtggcggaggccggcctggaccgccaggtcgacggccgggtctcggcgcgcctgagcctgcgggtcgagtga

SEQ ID NO: 366142 - DNA, 387 bp, Pseudomonas aeruginosa
atggaattcgcgcagggcccgctggaacgcatcgttctccagggccaggctgtcgcggcgcccggcagcgaaacgccgcagggggtgtccggcgggcaggccgagggccagcgccgcgtcgatcagggtctgctcgtcggccgagcgcgccaggtattcggcctcgagtacttcgcgctcgcgccgttgcgcatcgatgtccagcaaggggcgggcgagcatgtcgatcagccgtgccagaccggcgccaaggtgctccgccgtcacctcgaagaaatagtcggtggtcctgccccgggtgctggcgttgacctggccgccgcgcacctgcaaccacggcatcaggcgctcgtcgccgggaaacgccgcgccaccgagaaacgatag

SEQ ID NO: 366143 - DNA, 318 bp, Pseudomonas aeruginosa
atgtgtataagagacagggtggtgctgtataccgtgctggtcgacgtggacaacggcgaccaccaactgatggcggaaatgaccgcccaggtgttcttcgtcgccgccaccgcagaaaacatcctcaccgcgccggtcgccgccatccacgacgacggcaagggcggccaggtcgcctgggtggtcggcagcaacggcaagccgcagagccgccagatcaggaccggcatcagcgaccgcctgcgggtacaggtgcttgccggcctggaggaaggcgaccgcctgttgatggccgctcccgacggcagcgacagctga

SEQ ID NO: 366144 - DNA, 1533 bp, Pseudomonas aeruginosa
atgtctgaactttcgtacgctcaacataaagcaggcgatcagagtgatcatcaactggatggcgactttgacttccaagacattgaggagcttagcggcaccagggcaaacgcctttgatactggtgtcgaactttcgagtaatgaactgaacctcgatcttcatgaagaagagcatgaggaaaaacctcggcgaccatcagcacctggtttcaatgatgatgaagatgtggtcgaggagaagccgaagaaaacaaatacgactcggtggataattctcatcagtgctggcgtgtcgattccgcttgtatgcggccttttatacttcggaatgaaggtgttttctcctgctccttcacaacaagtagcggccattccagccctttcacaagcggcaccatcggttgatgaggttcagatcgatgcaggcgctgtaggtttcgcgcagcctggcaaggtggacagcgtagcccctgaggcaaagctccagggccaactacccagccagcatgcagatcagcctcttcacgccggggatggagttgatcaggcgatcatgggctcgaatatgcccagtggccacgttcctccaaatgacttggttgtgacccaaggaatccagcaaggcagccaacctgcacctgcaactccaggaagcgaacctgtccagggtgtggttacaggtgaagaggcggagtacgacaaagcgctcgactctctgaacggagtaaacgtgccggtcggtgccgttcgaattgaccccacagctattcagcgtcagttgacggagcagcaggttggcaagctggagagcaaccttcaaggcgttcagcaggaccttggtgcaatgaaaagcctggtccgcgacatgcaaaacaacatggcctctctgcatcaaagcattgaggcaaatcaaggtaagcaggctgccattgaagggcagctcgccaagctggctgaagcaatgactgcggcaaacaatcagcaggcagcggccgacgctcaacgtacgaaggaaatggaatcgctgcgtgcagcaatcgccggcatcgaggatcgcgctgcaaaggctgaggttgcagcccgcgcatccacccgcgccgaagccaattcgcgttcctctgttcaagctgcccccgagaaacccgcgcctgtacccgcgaagaagcccgcaccccaggttgcagatgttcggccacagcagagcgctcctgtcccgaacgtagcgagcgcaaaaccgggatataccatgccggtgacagcgccgcagccttcccaggtggccgtgcaaagccggcaacctgctcctgaaacctcatcggttccagaccagtgctcaggttctaaggcagtcgtatctggtatctggcgcgtaaaaggcgtcaacggtacctctgcctatatcgttcgtagtgaggacaatactgggctttatcttcgatcaaacactcctgtccctggtttcggggttgttgttggattcgatccaagtagccgttcggtttgcacaacctctggcctgatcaggaggtaa

SEQ ID NO: 366145 - DNA, 1131 bp, Pseudomonas aeruginosa
atgagtgagaatgtggtgaccaaaggggctggcttcagcggcaaggcagtagggttcgtcgtcctggccggaatcgcgggtgctcttgtcgggattttcaaggacggacttcccaacatgatgtcgagcagcgctgatagtgggtgcgttgccctggcaaccgaacagcaagccaagacgctcctaggtcgcctcttcccggagtcgaacatgttcagctttgagcccttaaagctgggtggaggctcttgtcttcttgaagtggacatggaggcagtaaaggggcgcaaagatactcgcggctttgtctacgtgctcccggacggtgagcggttcctgaatggcccgctcatggacaaacgaagcaagctggggcttcagacggatgcggctctacagctaagccccgaggaaatccgggcagctattcaggcctcagcccaacaactggcatacaaaaccaccgccaaagaaatcaataccgttaccagcgctagctcggacatcgcgcaggacagcgccatttcccaacctcagcccgtgaagagcgttggtgaatatcggcaagaggcgctgacaacgatcaagtccctgccacaactggttaccggtgttggccagcacgacgtttatgcactggttgatccgctctgttcgcagtgctctgctctcttcaagcaaagtgaagacctgacaagccagtatgggattcgctggcactggattcccgtgcacaccagcgaaagcggctgggtaatgtcagctcatctgctccagatggcagccacgaacccggcgcaagccattgccgacatgcgaagcatgttcaatggtgaatggactgccgccaagcaggaggcagctcttcacgctctcacccccgatgactattcgaagtcccagcaggcactcgcattcctgatcaagtacggcacatccggtgggcaaaccaggactcctttcgtggcgttcctgaagcccaacaacgaactcgaactgatcggtggaaaacccctgatggaagactgggcggcgcttgaacccgccgcagcaccaccaatcagctccccggttgagtccgcccccagccaggcgaagatcaacctgccggagataccagcagcacaatga

SEQ ID NO: 366146 - DNA, 153 bp, Pseudomonas aeruginosa
atggaaggtctcttctggcgactccgatgcttcatcgcccatcacatcagccagcgactcggcaatatccggagcaacgccgtcaaccgccgggccggggttctcgttcaatttcgccgcttcttcggcatccaattcaacgaagtcacctaa

SEQ ID NO: 366147 - DNA, 249 bp, Pseudomonas aeruginosa
atgccgggtcgattcaacccgatgccgtggaaggtgattccccttaactggggctgcctgccgggtaggccaatgccaacgaatggactgatgcgggtatggggtatgcgccagctcaaggttcaccaggtccagccgctgatcctgcgcagggactcccggatacgcgaaggttggaataaccgacagcgggtactgctgctcgatggcgggcagagcgtcattcacgttgccgggcaactcccgtga

SEQ ID NO: 366148 - DNA, 273 bp, Pseudomonas aeruginosa
atgagcaacaaatcgctgagtgctggccacgctgtcgccgtcggttcgccaactggtgaaaccaatcctcaaaggggcacgtggcgcaaggtcaagaagtacggggtcctctgcggggccgggctgagcttcatcttgatcgtgctcctcttcatggatatggctccatccttcaagggtatgcccggcgtgcatgtcgccggtctgtacttctggttagtcctgtcgagctgcttgctcgtctcgaaaatgaacgagacggacaaatggtga

SEQ ID NO: 366149 - DNA, 687 bp, Pseudomonas aeruginosa
atgttcgatatccccgcctacagaaactctggtgcccagcggctgctgaggaaatttgagcgtcctgttcacatgctcaggctcgatacccacagcatcaatgacgacagtggggaggtatctctcagaaaccacctctggaaccccaccgagggcttccacttcaagtactccttgcggttgcagccggcgatgaagcctcacgaggcaaaggaggcccacggcctgggtcgcatgtcgttggagctgacgctcggggacttccgcgcgctgcactccatgctcctgcgagtgaagggcctgcacgagaagtacctctcgggagagctggcggagaaggggcatttcaagatcgacagcgtgggggacaggttcactttcagcaccaactacgcattggacaacttgtatggcggattggtggaggaaggcaggctagtgccgatggtgaaaccctccatgagcccgcgttgtaccggattcgaggtttcggtacccgtcggcgaggacttcatcagctgtgggcgtttctcgatgcctgatgccatcaaagggatgctgggcttagtcctggaggcagagcgattgatgtgcctgatcgacggccatggggagagcgagcttcagtgcttggatgctctaccagccatgcgggactcgcgcccccggcttaggttggttcagtaa

SEQ ID NO: 366150 - DNA, 219 bp, Pseudomonas aeruginosa
atgagcctgatggaaaacgtttcccccgtttacgaagaagaagatggctacctcgtcgaagctgtcgctagcaccctcatggccgagtttcttcacctggaacagatggaagagggcgtaagcatccgcgacctggccgagcgtggcgatccgcgcgcggtgaaatgcgtagccatcgctggcgtcatggtgaacttcatgcgggaggagctggcgtga

SEQ ID NO: 366151 - DNA, 177 bp, Pseudomonas aeruginosa
atgacctacaccatgctcttgaacatctacgaagaggccaaggcgcgggtggacgacgcatctcttcccgcagacgtgcgcgcgcgcagccaggaaaccgtagacctctgctgtctgcgcatcgcgcaggaaggccacactttccagaaactgcgcgaactcgccgctgccgagtaa

SEQ ID NO: 366152 - DNA, 159 bp, Pseudomonas aeruginosa
atgaacggacgctattacaagatttccctcgacgggcgtgagctgatgcaggtgtgggccgactcggaacgcaaggccaaagaaaaggctcgcgcgaccctgagcgaagaaggtcgtcgcgacctgtcccttaccaacctggaagtctcccgcgcgtaa

SEQ ID NO: 366153 - DNA, 171 bp, Pseudomonas aeruginosa
atgacgcacgctcaggcactccaattcaaggacaagccttggttcgtaaaaatcacttgccctgaagtcggtcattacatcgtccacgtcgagagcgccacggtgatggactgcgtgctgacctttgagagctttggtgaccttgttagctggtcgaggatttgggaatga

SEQ ID NO: 366154 - DNA, 378 bp, Pseudomonas aeruginosa
atgaattaccggggctttcgcatcgaaaacgagcccgcctacatctggcgaatctactgctggggctcccacgcagggcacaaccatgttgcatgctggtacgtgtacgacgccgaaggcaagcgcgtagcgggtgggtatcaatcgggcaacaacacccgtagcggctcagtcaacctggcgcgccggaaagacgccaaggcatgggtggacggttttcacgcgttcaccgatgagccggataaccgcaaggtcattggcaacggctacatcgttcatgggccgacctactgcaatcctcgccctggccgcgacgattcgcagcaggcttggttcgagcatggctacgagtgcgcacaaaagcggcccaagtcctaa

SEQ ID NO: 366155 - DNA, 558 bp, Pseudomonas aeruginosa
atggataaggaagtgcacgatctgctcgcgacagccgccgccgactatcgcgcccgaggtgatctgaaaacagccgcacgcttcgatgctgcctgcgtgtcctcggtgcagaccggcgttgtgctggagcaaccctctgaaagtgagcgctatgaagagtttgagcgcgccttggtgctattgcagaaccgggcggctattgagccgaagcgcgtcgcgtgggagttgtggcagcttgtcagaagccagcatgaccttgcagttggggcgctgacttctgcacaccgcaagcacgccgccgagctgatcacttctcgcggcctgctgcgggacgaactcgaaagcagcaaagcgagggtcgcggagcttgaagccgatctgctccgctccgccgaaggcaccgacatccttggcggcctgatctccagcattgagaagcacggcaactactcggccgagagcactgtcgtcttcctgcgccaggcgctcggatgcttcaaccgcttttccccagtctctgatgaacctgcgaaaggcgaggtctcgcgcgatgaataa

SEQ ID NO: 366156 - DNA, 168 bp, Pseudomonas aeruginosa
atgctcgtgatgctgctgggcaaactcgctggcgaaccccctggtcccctctgtccatgcaagagcagcaaagaccccggcgaacaacaagaaaaggaccgctacgttataacgccgatcaagctgttgctctttcatcactatgtcatccacggtccgtttccttga

SEQ ID NO: 366157 - DNA, 912 bp, Pseudomonas aeruginosa
atgcaaaagcccgttgttgaatcccctgcggtttccgctctcgttgatctgctggacggcctgaaacgggtgaccgtcgatttcgccgaccagctgccagcagccatctccacacgcgttcaacagctgatcgataacggcctgtacgaggccgccaaggctcgtttcgaagcccatgtgcgtgcggcgggggatgttcctgaaggtgcggttatcgactgggaagcacctgaggtgcttgcgcaggttggtaccctgaggagggtgttggcaggctatttgggtgccaagcccataatcgttaccggcaacgtctggaagttcacgcccgaggcaaacgaggctggcgcgaagacctccaactcggttgtcgtcaccggtttccagctcgtcgaagccctcaacttcatcgcgccggacagcactcgtgaacagctggcccgtgatgtcgtgatcgagtaccgcgacaagagcctcgacaatcccgagggcggcctctacgcgtacgacctggaatacccggaagagggcagcatcccgctggagggtaccgaggtggatgtcttcatccccgaaggtcaattcgactggggtatttacatcgggtacctgctcgacaagtgcgagggccaggaagtcagcgaggaaagcctcatgcactggctggcggacatggtgaaagaccccaactacgggcctcaattccgccgcgaggtcgggccgcataaatgcccgctgcccatgcccttcgaagctgcctttgaagaaggccgcaagctgatcgaagagatcgcggagcattttgccgcgtgcgagtacgacgaatggtgcgcgcgcctcgacgtgtacctgaaggccaatccggtgcccggcgatactgtccaagcagctgagggcggtgatgatgagtaa

SEQ ID NO: 366158 - DNA, 279 bp, Pseudomonas aeruginosa
gtgaatgcgatgagccccgtcattgctcctgcgtacctcgcctggctgttgctgctaccggcgaccttcctgctggcgcgagcgcttgtaaccgggcaccgtgcgctgaagcgcttccagtaccgcaacactcctttccgcgatcccaagcttcaggccgcactggagcaattgaagccagcttcgtggtgggctgatgcgctcggcgctgggttatgtgccgccgccggcatcgcccttgtgcttgcagcgatcttccaggacaggtggttgtcctga

SEQ ID NO: 366159 - DNA, 612 bp, Pseudomonas aeruginosa
atggttgagatcatagaagtccctccccaggagctgcctaagcagatcaccgcgaagcatgttgctcacagccttggcgaacacctcgaagcctttctcgccgcgaacaacatgaccggctggcagcatgaggaagactatgtgctgcgggacgacagactcggcgaccagctgctgcttatcagccaatctacaggcctgtccgttgcgctcatcaagcgcatggccaaacgcctgaagaagcttggccaggcgaacggagcagagctgaagctttcggccgtccaggaaatgcttgcacacgcactgggctacaggaacttcaagctggcgttggtctgccgcacggtagacgacttcattgaaaatatctggcccatgggcgcggcaatgagcctcgaatcgctcaacaaggaaggggaagacattcagatgaaccctgcccttcgccagcttttgaaggagcgcatccgcttcaaccggcaacgcgattctgctctgaatgatgtcatcgctgaagacccaaagcgcggtcggcagatgaagaaggagcgcttgaagcggcagaagaaattggtccggcaagttgtgactccccgaaacagcgagtaa

SEQ ID NO: 366160 - DNA, 336 bp, Pseudomonas aeruginosa
atgcccacctgccaagttctgcaattccaggaagtcatcgagcactatcgccgcctgctggttgcaaaccccggcaaagcacttgtgattctcgcgggtggcaacgctgccgtgcttcaggatgatgtggtctacggggcgtcgatctttgtggacggctccgtggatatggagaacctgtacgagtttgagatcgacgtgttcgacgttgagcagggctgctggtgcgacgacgagactcctgaagaaggctggtctcgaatcaagaaccccaccttcatcgccctgaccatgccagcgccagtgatgatcgactcgccccgctgctgccgatga

SEQ ID NO: 366161 - DNA, 243 bp, Pseudomonas aeruginosa
atgaagaccattttgctctacaccgcgctgatgaccactactgacggcgcagcagtgagcaagctcagtcaagaattcgcgaccaagagtgcttgcactgatgcgatcaccgctgactctggtcgccaggtagacgttaacgctgcaatccctacgttgcagctggacatcacaacccgctattcgcgatacaaccctgagtccaactaccaacgctgggtatgcgtacccaaaggcgagtaa

SEQ ID NO: 366162 - DNA, 366 bp, Pseudomonas aeruginosa
atgctccaagaagagcacaaagcgaaatggaacgggcggctcatgtttgccgggctacttggcgtcgctgtttacgcggcggtatttggcaccgcaagcatgcgcgagaggaaacaagcagagagtgcgcacgtagcgtcgaacgttccgcagccttttgatctggacaaagaccaggtggtgaagctcggcctgtatggagccgagtgcgtggatggcaagctcagctatcgcgagccacaacccgatggcagcaactcactgaagacctacaccatattccgcgacagcgtggatcgaggaatgcacttcggcgtgactgagcacattcgctgtacgactggtagccagggtaaccccatctga

SEQ ID NO: 366163 - DNA, 264 bp, Pseudomonas aeruginosa
atgaagatcgagcacgagaagctgaaggagatcggcgaatacctgcgtggcacccccaagagcattggccttgccgcagagaactgtgggcttagcgacgacgttgatgaaacgtcgctccaggatcagctgctggatgtagagatcgaaatctgcgcgcactgcgactggtggtacgacgtgtgcgatctacaagccagcgaagagcatggagggggtctctgccaggaatgttgcaacgagttgggtgtcgagttcgattga

SEQ ID NO: 366164 - DNA, 519 bp, Pseudomonas aeruginosa
atgatccgtcgcatggcactgactatcgcgctacccctggtgagcctcgcggttggcgtgggaatcggctgcttgatctggcgcacctccccagtcgaaaccattgttctccctcctgaatcccttggcgcatacacacagcagcggctgagggagggctgcgcccacaacgcagttttcggcgagttcaccatgcctgacagcatcctgaatggcgttcgggtgcaacgacgtgtggagcgcctgagcgtcgaagctgttccgctttcggatagaggcatcatctgccggctcagcgccagcgtacgaacgaggaaatcccagctaggcggggtatccctggaacgcacggcggacgaacacatgacctacatcgtcgccatcaatggcgactccgaagtagtcactgaggactttgcgaaggccttgctgacctccaagacagtgcatgtcatggcgtcgaacttggggaatgacggcacggtgattcccaagcccaaagtcgccactttcaactga

SEQ ID NO: 366165 - DNA, 222 bp, Pseudomonas aeruginosa
atgagcaccaccacgaccacgcccggcaccaaagaacgcgccatccagcgcatcgagcagattttcgcagcgaaatccgaacgagacgccgaccattacgagtccgatgcaatgggctatttggcggcgttgcgtgatgagcgcttgctgtcggagttggactactcgcagttgatcaccacgctgcatagcacgcgcctgctctggcgaaagccagcatga

SEQ ID NO: 366166 - DNA, 237 bp, Pseudomonas aeruginosa
atgccatccgtagttatcgacggcatcgtgtacgtgccgcgagccgaggttccgcccctgacggatgagcgccttcagcacgccctggaagagctggtttctattcagtatttcagggagcagcacaaggcaattgctcaggcttggaacgtgctgcacgcgctagcgcctgagcttgccgatctggcagctcaagacccagaggcagcgttcgaccgtatccatggcaaacgctaa

SEQ ID NO: 366167 - DNA, 255 bp, Pseudomonas aeruginosa
atggccgttaccctcccgatcccggagccgagcagcttccagagctggaaccgctctttgcagggcgtttaccgcaaaggggtgttggcgtttctggccggccaggaaatctcagcctgcccctacgaggacaagcgcaaggatgatggtcgcctttcctggtcccgcagctatatcacggcgtggagagatgggtaccgagatgcgaagcgccacctactaacccagcctgccgacgctgaagagatcgcctga

SEQ ID NO: 366168 - DNA, 486 bp, Pseudomonas aeruginosa
atgaaactgatctacaccgcagcccttctgctgatcgccaccttcgcccaggccgccgataaatccggcgtccttcccatcgacgtttacccgcccaagggcgatggtgacggctcgctctggaaggtgtccttcacgccaagctacttggatgaagctggcgaaagcgtcacccagccgacggtatcgctcagcgtcaggtcgggcagctgcgggtacggcgctaccaacatcgtgaaaatgcgcagcggcttcagcgtcaaggtttcgcagaaggtgtgcgtcggcagcgtgaacgggaagaacgtcatcgtcggctggctggtcgcgccgggggcgacgccgaaacccatgatcggcgccgatgcaaccgagtacggcaccggcatccgctacgtgttccaaggcgactaccttgaggctggtcagtcgatctacaccttcaaggccgaaaagcagccgtccccgtccctgagtaagcgctga

SEQ ID NO: 366169 - DNA, 513 bp, Pseudomonas aeruginosa
atgagcttcttcgaattcatgaatcagtactggctgatcgttgccgtcctcggtgcgatggtaacggcactggtgcccagcatgcgcgtgatcggcgttgtatgccttgtcctcaacttcggcctatttggctatctgtattgggttggttctgacaagcagcgggtggccgagttgaacgcctcagccgaacaggtagctcagataccagccgctgtggcgtgggtgatcacatcgccgaaatgtgttgtgcagggtgtgtgcctgactgttgaccagaacaacgttgatgccgggaagatcattgcgctcaaccctggttcggatcgccttttcggtcagcgctattcggttgtcgttacggataagggcacctatcacgtggaaggggagatcagctcggcggtgtccgggcaggcggtcactctgtggaaggcgcgcggggacctcaagaacgtcctgtgcatcgaagcaaactgctaccgccttccgatggctccgccctctgcgtga

SEQ ID NO: 366170 - DNA, 792 bp, Pseudomonas aeruginosa
atgacgcttgatgacctggtggaagacgggctagtgcgggggatttctctcgtgctgcctgggcatgagtcgaagttcggaccagccgcagtacatccagaaattcagttggcttacgtaaatgccgctggtgccatagagacgattttctcagttgtgtggatatacagcttggaagaagcttatggtcgtgtgatcgataatctggcgaatgttgtaatgccctctctgagtgtcgagcttaaagaagagttgcggtgcacctttaaaaggtttcgcgagtattactctttagagcagattgttcacctggatgtcgtaccccgaaaggtcctaaaggtaagggctaagccgtcattgtcgcgcgagtttcttgcgaccttgcgtgaatggaagctgaagtttggcgtggactatttcaatgaactggtggggccttatggctacttcagggggctttcattccacggtgacggcgagggcggctgtggagcgctcaaatataaaaggcacggtaaggttgcgcaggccacaatggctgatgggctctacctggcgtacatggaaattgcccatcaagtctgcttgcttgacggcatcgacccagagtccgtgctggctcaggcgatgaaagatggagcatatccgtttaaggagttcggcatccacgccgagcaaacggatttcaaaaacctctatcggtacgtcatttctacaaccaatcccaatggcatgcctccagctccgcaatggaaggctctcctaagagaagagcccagcactacaggctaa

SEQ ID NO: 366171 - DNA, 480 bp, Pseudomonas aeruginosa
atgaaaaaggttttgatcctcgccctcaccctgatcggctgtgtactccaggcgaatggtgctccaaaagcgcttgagccgctgccagtcccgcgcattccggtgcccgagagcatctcgaaacttgagcccggcgacctcattaccgcgacattcgtttcgaaggatgcgcttcgaggcatccgagctggcgggcccgaagtcatgaatgtgcagggcgatggtggatgtaagctcatcgtctcgactgaggtcacagctgatggtttcgaggagattgctggggcgatgtcctcttcgaagaaccccgccgccaacgtctcgccgcgactgctttcgtgcaagggcttcgagaaggctctagcggtcgaagacaacctggcgcgcgcccgagccaacgtcggttcatcggctcaaaccactttggagttcattgtggtcaagcccatctgggtagcttcaggcttggccagtaactga

SEQ ID NO: 366172 - DNA, 279 bp, Pseudomonas aeruginosa
gtgaccctggaagaacagcgcctggaagtgatggcgaagtatcgcgaactcgtggggcgcaggaacgcaatcaacgatgagatcgccgagaccttgaacggctttttcaaaggcaaagaagtggtggtcgggcactctcgtggggccattgaagcgaaggtccttcacatgtatgcggatggcactatggccgttgaaaatgtccatacccacaagcgctccacacgacttcttgcagagctggttgaaatgatgccggaagtcgatggcgaggagtga

SEQ ID NO: 366173 - DNA, 324 bp, Pseudomonas aeruginosa
atgaccaacatcgtttcaacctggctacagtgcctggaaggttccgggaagggcccaacggaggcctccagagagctgcaagaggcggtgggtatggctgtcaccgtttcgcgcttacgcgagtgggaggacgggcggaggggcctgccggataaggcgtacaaccacatgctgaaaggtgtgttgcctcgctgcctggccttccttcaagaggccagcggagatgcctcgcctcaggagcaggcggcaaagcttttcacgctgattcgccagccagtgaaaacccaagccccgccgctaagaaagcagcagaaggcagaataa

SEQ ID NO: 366174 - DNA, 237 bp, Pseudomonas aeruginosa
atgatccatgacttcggccgggccttcgaaacccaggcgcaccgagccgtcctttgctttctctaccatcgtgagccgtatgccagagggaagcctgtcatccaggatgagcagcacttcgccggggcttcgatcaagcttgagcatcagttctcctggacctcgttcaccagtctcaatgggtcatcgggccacttgaaggaatccagtgcgccgcagcgccgaaaggcgtcgtag

SEQ ID NO: 366175 - DNA, 339 bp, Pseudomonas aeruginosa
atgcctgacacctccccgaaacctgaaagcccggcttacgcggcgggtggcacctacgacctgtggggctgttttcctgacggccagccacacgaagcgccagcctacacgctgatcgggcgcgatctcttccgtgcaaatgaccgccgacctgacggaaagtaccatggcccgcccgccggtcgcatgcaggaaggcgtcaatggcacctacagggtcctggccggctccgcgctgcttggccacatccagggtgactacttcacggacacacttggccgacggttccagctacgctacgcggccgaaaatgcctccaatgaacgtgaccggacctga

SEQ ID NO: 366176 - DNA, 225 bp, Pseudomonas aeruginosa
atgatgcgcgcccgaaagaccttgcactggatcgtgaccacactgcgcatcctgatcgacaagggacgcactggctggggcctgatagagagcaccgccgggcgattcagcgtccgctacagcaacggccagcactcgcgccctctctactacaagactgcgtgtggctacgccgaactgttcggcggtcgcgtcgttcacagagccactggccgcgtgctgtag

SEQ ID NO: 366177 - DNA, 201 bp, Pseudomonas aeruginosa
atgatctcgattgtgacgatgtttctgctggttgtagccgcactgctcggtgtaatcggtggtctggccggtctctccctgaccccggcagtgctcgtcctcgctgtcgcggccctctacgaaatcctgcgccagtggtacatggccctcggtccgaaagagccaccggttggttaccagaagcgcgagggcgatcaatga

SEQ ID NO: 366178 - DNA, 483 bp, Pseudomonas aeruginosa
atgatcgcccctgaggttctgcgtaaggcagtggatgctctgcaacatttcagggggagtagcgccacccgcctcacggaggttgactggcgcgacggccaccagatcaaggtctcctggtacggtaacgattccttggcgtgctatttggactttggcaaggacagggcgaagcgccgagctgtgatggcggcgtgttatcgcctcttcggcgggtttgatcgcgagcctgaagtgcttcctcggtcgggcggcgtggtggatgccgacttcaccaccttgtcccgcgagttcatcagcatcaacgaagttgccgatctggccgccagcatgggcggtcagttcagcgtcctgtacgtgcaggattgcaaccgctcggtcttcgacctgttgggtatgcagttgcagcccggcgagctgggcgtcgagtggctgaacggtcagttcatcccctacacctgccaaccaggcaagtgcctgtag

SEQ ID NO: 366179 - DNA, 192 bp, Pseudomonas aeruginosa
atgcgtacccttgtgctgtcaatgctgctgagcaccgtcactttcacagtgatcgccctctttgggcgcatcgccactggccatttgctgagccctgaagtggcggtcggcatcggtgcgctcaatggcgtggtagtctccctgatcgtgcatcagcacctgcgtcgcaaaagtaaggcgcagggggtttag

SEQ ID NO: 366180 - DNA, 258 bp, Pseudomonas aeruginosa
gtgatccagattgcgttgtccccggccctgatcggcacctttatcgtcgtgagcattgcagcatccatcgtgcatgctgtggctcgaagccctcagaaaatccccctcaccttcgtcgcggccggagcagcctccatctggggcggcatgcagcccattgatctagccaaattcatgggcacatccctcgccgcgtggatggtcttccaggggctggtcgcagccgctgcgttctgggttcgggacgcgaaaacctga

SEQ ID NO: 366181 - DNA, 267 bp, Pseudomonas aeruginosa
atgcgatatgtgaagaaaccgggccgcttggccaactcgaaagaagcggatagcggcgtaatcgtgcacgtggtggatagcgacaagagtgtcttcgatggctacactccggcgctctgtggcgctaagccagctggtcgccgggcgggctggacagactacgagtacatgaacctcaaaatccccgaagtaacctgcccgcgctgcctgaagaagcttgcccttcaccacgctgccgctacccctgaagaaggcgtatcgtcgtga

SEQ ID NO: 366182 - DNA, 495 bp, Pseudomonas aeruginosa
atgagtcaggatcgacctgtattccagaaagccaacagccagagcctggagctgcatggttcgaatggcgaatggtggttcctcgacggtaagggtatacacgtcgaagggaagtacttctctgactccatgcaggctttccagtgggctcatacccaaggttatcgcctcgttgaggctgagccggccacggtgcccaagctcttcaccgccatcacctactcgaaggaagggcaggggtacgaaccgactgctttctacgtcgcggcgatggacagtcaggacgccgagcgcgtccttctcgccacccatgaaagcgttgagcaatccctcgaacggttcatcatcaccgatgagttgatggccgagcatccgacctccgtccacctggtgctgaaccatgatcgcgctcgcgaagtcctgagcgaggctgatttcctcaattgggtcgaggtgatgaccagtggcgaaacgccgacgtaccgtcgcttctaa

SEQ ID NO: 366183 - DNA, 222 bp, Pseudomonas aeruginosa
atgccaatcaaacagaacccggtagattgccctttccacgctccccgcgaatggctgttcgatgagggctatccgaccgccgatatccagacgccggatcagatgcgcaaggcagccaaagagctgttggagcgtgggaaagagctgattgaggtagctcgggacgccctggaagagatcgagcgcatagagcgcgccggaggagtccccagtgtcagctga

SEQ ID NO: 366184 - DNA, 198 bp, Pseudomonas aeruginosa
gtgtcagctgaacgcaccacgcgtaagccgcagatgcacgcgctgaagatgacgctggcacagctgtggcagctcaaggagcagctggaggcggccagttggccggaagctcggaatgacgccgacaatgcgctgcttggtatcgtgaacgctgcctatcaagaggcggcaaagaaagaaggtaagcctctggcctaa

SEQ ID NO: 366185 - DNA, 369 bp, Pseudomonas aeruginosa
atggatgatttgagtactctgtttcaggccaatgacggcaacctgtacgtcattgaagtggatgaagacggaagcgagatcactgtctcgcgtggcgtgaagcggctgggtgaaatccggctggaccggcgcgaagacgactttggtcgaggcgaagttgattacttccacatcacgcacctggcgctggagcgctgcaaggggctcggtatcggccgcgcctgtctgaagcaccatatcgaaatgtttggccttccgatcaccgcagggagcgcgcacttgggccatgcgcaggacggtagccaccttaccggagatggcgtgcccttcatcgcaagaatgcgcgaagaaggcattgtagagccgtag

SEQ ID NO: 366186 - DNA, 477 bp, Pseudomonas aeruginosa
atggcacgcagaaccaccaaacttcccacccttgcagacggtcgctacctggcgaagtgtcggcaggcgacgttcgcctcggcggtgctgaacggccattcacttgtctggcctgaagccgagttggtgattcttggcgaagacgctgagttcttcatcgacgggaagcgcgtgtggagctgctcgatgcagtacgccgccaaccagtttgacgtgacgttgctccaactggctgatgatgcagccgggggcgcgctcgatgtcaccaaggagggtatcaaggtggtgccggggcaggtctggaaggacctggacaagcgtcaacatggcaggcgttgtcaggttgttgccgttgcgaacgggaaggccgagatgaggttttattcacccggccggcttggcacaaagagcacggtgtccatcgctcgcatgcacaagcattcgactggttgggtgttggagcgacagccctcgtga

SEQ ID NO: 366187 - DNA, 426 bp, Pseudomonas aeruginosa
atgggctaccgcgacacgcgctccgattggccgaacactccccgcgaagtcatggcggatgagatcgacaaccttcagtacgaagtcgatagcctccagaaggcccaaaagactctttccgccgtgcttggtctgtgccacgccgccggcttcgctggcgacaccactctgctggagttcctccaaaacagcttggacctgcctggatacacggtcgcccagaaccttcgcaaacaccgcgaggcgcgcggctggcaccccaacgacgcggccgaccaactcggcaagctgtgcggccttcaggtcggtggcgctgactggtcgtcctgggagggcggggcagaatatcccggcgcgagcttcgcagagcatctggccgaactgtttgaagctgaccctcaagagttcctggtcaagcgcaagtaa

SEQ ID NO: 366188 - DNA, 228 bp, Pseudomonas aeruginosa
atgagcaagtcccccaatactgtcgcccccgacattctgtgcatcctggcggcagttctgttggccgcaacaatcggctttggtatcgcagcggcgttcatgtcatctgatggcagcgttttgatgggcttctttgcggcggtggcgtttatcctttcctttgccctgaagaactttgaatccatcatgctgcgcaaagtgctggccgagtcccgtcagcgacggtag

SEQ ID NO: 366189 - DNA, 528 bp, Pseudomonas aeruginosa
atgaccattcacataacgatccatagccctcagggcggcagcggcaaaacgatgctggcaactgcgattgcagttcgtggctttgggtatcgcagttatgacccgctcaacttggttgaaggccaggagaagagcggagttttggtgatagacacgccgccccattgggaggccttctctgaagccgcagtgacaactgctgatctcttgatccttcctgtgtcgagcatcgctgactacctggaaaaagacatgggcgtccgcatcacgcagatcatgaaagctcgtgccggtcgcaagactctcgttgtgcaaactcatgcctgcccgagcgtcgtaaagctggtcgaggagttgtccagcctgccgggtgtcaccgtcttccccgatgtaatcacctacgaagaggtcgaggcgggctcacctgtgatccagaagcttctgctcgccgtgctggcgcagattcagccggtaccggaaataacctccaaggccttcggtaacgcttcgtctggagtggaaatatga

SEQ ID NO: 366190 - DNA, 363 bp, Pseudomonas aeruginosa
atgaaatcgtttgtcgcttgtttcactgtccttctgacggtgatttcctactgccctttggccacctcgtccccggctcgtaacgtcctgcttcctcaatgtgcaaaggatgctgcgcgtgaggctggcgctgagcagcgtctctttgatgcagtcatggcttacgaagttggaacgatgactgacaaggtttcctgcgacgtttaccgtatctccgctgagcgcttggctctgttggttaaccaaagctcgggggaccggtggaaggcggtagctctttggctcggcaagcctgagggcagtatgaccgtgctgaaggtgcgttctctctatgagtccggcgacgacatctaccgggagtga

SEQ ID NO: 366191 - DNA, 495 bp, Pseudomonas aeruginosa
atggaagccgtctcgaatactgcacgcgagcatgtagcgttgagcccggccgacattgaggcgctggcggagctgcctgcaaccggctggtttggtgtcgcacacctgccgatcaaccgtcccggttaccgctgtgagcgcctggagcaagctggttgtttggtcacacgcgtggtcggtgtctatcccttcttctcgcgtgaatatcgagtgattcctgaggcggtaaccgctgccgcgctgaaggctcgctcggtcaagctttcggccggagaagcggccctgctcgataccatcatcgagcactattacccagagccgcaggcaggcaccttctactacgtcgagccgcaagagctgcgtgccgcgcgcggactctgccagaagttgctcgccaccctggagcagggtgacgacggggcaaagctgaccttcacctcgctcggcgcagacctgttcttcgcctacaaggctcagcgaggctcgctgaaatga

SEQ ID NO: 366192 - DNA, 213 bp, Pseudomonas aeruginosa
atgagcaaggtaatggcaccctttcgcaatgttgtgaagcgtcggaaagccgagacgcgcagcaacaccagcatcgctggggttctgtatctccagtgcggacatagcatccgcgttactggctgggacgcctatcacgccgagaagaaacgttgccaaaagtgcctggaactggggcagcttggcccgattaacgacggtgctggcgcgtag

SEQ ID NO: 366193 - DNA, 213 bp, Pseudomonas aeruginosa
atgatgactaccacccgccagcagccgctggccatgccaatccctggcgactgtaccgacagctatgcagctggttgggcggtcgcggacgcccatgttgctggcgggggtgacctgaacgccgatgccccttccggttggaacgatgaagctcgcgtaaacggcttctgggaccggctctccgctgagcgcgctaagcaggctgacctctag

SEQ ID NO: 366194 - DNA, 150 bp, Pseudomonas aeruginosa
atggtttacgatcaagcgtgggaaatcgtcgaggcagtcgagaagcagcacgacgtcaccccatatttgtcggcttacagcgcctgcaagaaagctggctacaccatggccgagtacaagcaagctcgcgacctggtgagctggggttaa

SEQ ID NO: 366195 - DNA, 270 bp, Pseudomonas aeruginosa
atgagcccgaattcgaacttccagctgttccagcattcgcgcctcgcggaaaccgtgcgcgacctcgaagctcgcaacgaggagctgaaccagtccctggagtggtgcagggatgccgttgacgccgcgccgctggagcaagagcgccgcatcatctttgccactctcgccgccatcaaggccgagtttgcgcctggctacttcgggtcgcctgcgctgcacgtcgtagtgcctgctcatgaggtcttcgagccggccggggcaatctga

SEQ ID NO: 366196 - DNA, 312 bp, Pseudomonas aeruginosa
atggctcagcgcctcttgcatgtgtccgtaatcaccaagtacttcgtggggatgagggaccgctcgaagctcgccgagtaccggctacagaacgactactggcgcaagcgactcgtgggccgcgaatacgactacatcgtggtggccagggggtaccccaagcggggtgatatggaaaaccggttggtgttcccgtggaggggctacaccgagttgaccttgctgcatgagcacttcggccccgatccggtcgaggttttcgcaatcgacgtaagcggtgatcctgtcgatcccgcaagcgtactcggctga

SEQ ID NO: 366197 - DNA, 540 bp, Pseudomonas aeruginosa
atgagtaccgagcagagcatccagcgtgaagaagtccaaatcatcatccagcgtggcagcggtggcgctctatcgcgcccccttgacctgctggagcccgctgcaatgggctacgcggtctgggcaggtgtggatcagccggagctgcaaggcgtcagcctggagcaggcgcacgccatgaagtgggtgctgctggcgagcggcaggctcgcagcgatcctggacgctgacggttacctggtgcaggagactgatcccggcctcatcgagcgcgagcacctttgccacatcctcgacgttctgcgcgagtacgacctcatctaccatctcgacgacgatccggctgacttgatcgttgtcggcagtggcgcgccggtattcactgactcggaagctgattacctgtgggaagagattcagcgcatccgaaatgtgatcggcaacgatgctctctgggaggcggcatcgccattccttgggctcaacgatgaggagccggagccggaagaaccgacaaagcctcgcccgcgcctcgggtag

SEQ ID NO: 366198 - DNA, 327 bp, Pseudomonas aeruginosa
atgcacaacgactcgaatcatcgccgcgaacatcaggccaccggcatcgacccaatctgggagattctcgcagagatcatcgccactgtgtttgctgctttcggactgtccacggcgtttctgttcctggtgggcgttatcagttggtgcccgtttgacctgattattacttcgattgaaacgtcggttcgctttgccttcgtgctgaacttcgcccgtacaatcatgggtggactgctctggttactgtcggggctcatcccagcgatgctggtggttgtgtggttgctggccatgaaacgagctggccgtcgaacacaagcctga

SEQ ID NO: 366199 - DNA, 699 bp, Pseudomonas aeruginosa
atgaagtacttgcgcttgacggatggcatcgacatcaacctgatgcgctccatcctggagctggctcaagcgaatgtgccggaactggcttggtacccgataggcgaggatagcccgctgtggggcctggcccttgctgaaatcaccgagcagctgggcgactcgctccagtatgtcggcaaccctatcaacatccctgtgtcgcccagcaaggtataccgtggtttcgtcgaggtgatcgtcgccgtggatgatacgaacgatgatcgtctcgctggattcatccagtacaagcctcggttgcctgtaggcaactcctgctccatcggctacctgaccgtggatgcagaataccgtggtcgcggtgtgcttcgcggaatggtggaactgctgactcagcattacccggcggtaggcctggactgcgccttgcagctcgtggggctgtacgagaaccttggcttcaaagtcgtcaaggcccaaggctgccatgtggccatggaaacccttccgctcaccggttccagctggaacatgggggaggaaatcctcaatgcacgtccgtccatccagcgggccaaggaagcgatccgcgacaagctcggcaaaaacactcggcaggcctacgaaaagcgcgatgctgacatgcgtgctgcgactgccgaagtggcggagttcttgaagctgcgcgcgctgtaa

SEQ ID NO: 366200 - DNA, 459 bp, Pseudomonas aeruginosa
atgactgaccttgactccaccgccggctctgcgcaaaggtcgcgcagccacttttcctttgtcatctggctggtagggaccggactgctttgctggtacgtagtcatgcccatggcaagccgctacgtcatgacaggggaggccaccgcaggggggtacgcaattctcgcggaggcgtacccgactgtgacgcctgccacccaagggctgatcgctgctcgtttctcgaaagggtacctgacccgccaggacgtttcggacctcattgaccctatcgttgatgagaaaggctcggtacaggtctcgcctgcaccggacttcggcgatggcgacgccaccgaagcattcgaagacatgggcttgcagtcctattggaagcgctacaagggtgagcgcgcctcctacaagtcgaagaccgcattggcgcagctgatcgccggccgccagccaggaaagtaa

SEQ ID NO: 366201 - DNA, 1425 bp, Pseudomonas aeruginosa
atgcttcgcgacgatcttcacttccgtggtcaataccaaccagtagtgccgggtcagttccgcgtgatgcggagcgatcacggcgtgctgcttgtggatcgtgcgggctatgatccccggaccacactcaggtgggaagccgaggcctacgattcagccgtcgcggatgtcgttctcacggccttccggcaggccgccgcctacctggcacaacgccctgaattcaatcttgggtgcttgctgcctgagcaattcaagcaagttgccgcagaccgagctgggcgcgcattcagcaatggacgggaagccccatccgcagttgagcatggtctggcctacgccggctggatggcctgtctgccggcacagatggccgtcgccgccatgattgaagacgaactggtcccggattgtgagggcgccctccaggcgcaactcttcttgcaggcctgcgctctcaacggcaattcgcgcctgttgcctgccgcgctcgatctacgcgatggcgcggcaacatccttctctcttgaatcgctggattcgcaaccggatcaggctcgccgagcccagctcgcttcgaggcgttatatcggtcttgcggtgacggctctgctgggcagtcacggcagtaccgatcacacggctgtttcgcgcctgcaagacagcctgaactacccggttggctccattgctgacaaaccagctgtggacctggtgctcgataccaacactggtcacgtccgggcatacgttgccaccccgagcggtgaccgcagcaggattgaagcggggagtccgttgggtgtgatcgtcaatcaggcgtacgccacgggccagaaagctgtcgaaggactctcgaaagagcgggcgcatgagatcggtcttttcgctgccactgtggcatacgagcgcgccaaagctggctccgttgaacctgtcgcggaggccctggcggagacctgtgcgcacttcacggccttcaacccagtcacgttggtgaaagcgaatctggccttggatgaagtccaagacccagatgatcctccggtaattcactccatcggccgcgagttcagcatgaatttgaaccgcgccggactgaaacagttggctgctgtgatcgcggatatggggcctgtgctcgctcagagtatccctatgggcgaatccattgcgcgagccttcggcgcggaactcttgcccaagcacggggtgcagtacaggaacaaccccgtggtctacatggcgctggagcctggctatgcaagcagagactgggtgcctgatggatacccaaagcctgtagtcggcggcccactcaagttcgcccaacaagatgatcagcagtacggcatccccgtacaggaaaacacgtggcctgaggcggaagctgtccgggtgaaatccggcccgaccatgcgatga

SEQ ID NO: 366202 - DNA, 675 bp, Pseudomonas aeruginosa
gtggagagagtgtcagcgcttagccttgctgatcacatggcggctggatcgctagccccgcttaaccgtgcgcgcgtgcgggctgcgcttgctggttgtgatgagttggacgggctggcgcgtcggcttgcctgcgaaatgctcctggacagagcgcagcaatatctgtgcgccatcgactactgcggtcctggatacaccatggctggcgctgagtatccggcagctctgtcaaaggttgagacctacgaccggcaaagggatgggtggtaccggcagggcatgaacgtaatgagcggccgtgagagcgctctgttcgccggggcctccgcgatgtgcatgcactctctcttctcggttgctgaatgggagctgagcgcagtggtggtcgaggcgagtaccgcattgcgctcggcccgtcacgcgttgacggctgcgatgtgggcccctcagttttctgggtgcaactggagagccagccagcgccgcgtcggcacacctggtgcgcgccgcatgctccggcacttgcgtatgcagcttgatcgggcttcggttggagtgaagagcagctaccaatcggtgatcgtagacgctggtcgcgagcaccaggtgcgcggcgtaatgatttggagctggcccttgccagatcgccgcgtgcgagcagaagcggcctga

SEQ ID NO: 366203 - DNA, 330 bp, Pseudomonas aeruginosa
atgaacggttttaacagcgtccaggaaggattaaacgagagcctgcgctcattggctccgtgggcagtggtagacggggaggtgaacctgattttgcttctggccaccgcagcgtttgccttcgtggtgatggcgacgatgcctgtattggtcgcatgcctcacggggcagcgccgtgaggcccaggcatacgcctctttggggctgctcagcacactggccatgtgctcggtgatcggcaccccggttggactcatcgggttcatcgcgttgatgatgtgcgctggcataccgcctcttggtaaggccgccttcggcagtggttgttga

SEQ ID NO: 366204 - DNA, 1131 bp, Pseudomonas aeruginosa
atgacgaccaacaacatgctgctcgcagaagccctcgaccaataccagtcgcgggtctcaatcctgaaaaagggctatctccaagagacgttcaggatcgcccagctaaagcggtcattcctcggaggcattgttgcgcgggagatcacctcggtggacatcgccacctaccgcgatgagcgcttgcagcagatcaatcccaaaactggacagctgatatcacctgcgacggtacgcttggagatgtccctgctttccaacctgtttgaactggggcggattgagtggggaatctgcgacgacaatccggtgctgaaggttcgcaagcccaagctgccgcccggccgggagcgccggctcacgcctcgtgaggaccgacagattctccggtacgccttcggttacgagaacccggagctgtacacgatcatcgtagtcgcactggagagcgccatgcgacaaggcgagattctgaagctgacctgggaaaatctgaacctgaagtctcggatcgcccacctccctgagaccaagaacggcagccggcgcgatgtccccctgtccctcaaagctcgtgacgcgctgattcgcctgggagtgaaatcgaaggggagggtattcagctacagcccccaaggtctcaagtccgtatggagactcatgctgctgcgtcttgggatcgaggacctccacttccatgacctccgccatgaagcgatctcgcgccttttcgagttgggcacgctcgatcttatggaggtcgcggcgatcagcgggcacaaatcgctctcgatgctgaagaggtatacgcacctcaaggcccaaaggttggttagaaagctggaaggggccaagggcaaggggcggcaagtcgtgatcaaccacctggtgccgtacccggcttcggtcaccatcgacgggccggcggcggtcacggtcaggcttcttgatttcgaagggttggccgcatcttcaaccaccatcgagacggcggttatcgccgcgaggaacttgctgctacgccggctgatgacctctatccgcgattctgagccgattcccccgccagatcagtacctagagccagttgatgaagcgcaactgctcatgatcgatccactggcagcttga

SEQ ID NO: 366205 - DNA, 519 bp, Pseudomonas aeruginosa
atgcgccggtcggccagaatctcgcttgcccttgctctcattgctacccccgtgtcgcaattcctgatggcgggcgacgcaacgagcattgcgaacccggcgctcagcgccaacatcaaggccgcacggtccgtctgtgcacagccgggcgaaatagcggtgaaccctgccggaaagatcatgaagtgccagggagggtattggacgatccaagggatatcagacgtggagtacatccaggtcaatgccacccctcaagcctatgaaatcggtcaagtcaaaatcctctccgcgctttgccctgccgggaagcgtgtcattgggggaggctgcggctatttcagcggcaacacgttcgagactgcacagaacctggtgcaggactttcccacgctgggaatggagggctggcagtgtggctacggcccattgaacaatcatgcaaccgacgcctaccagagcggcggggcttggtatcccgccgctatgtcggcccatgcttattgcgggtacttctga

SEQ ID NO: 366206 - DNA, 333 bp, Pseudomonas aeruginosa
atggatacaccaaagcgcagtaagcgattgcctcacatcaaagcgccgtgccgcgactgccccttccgtaaggacacactggaaggctggctcggtgagccgcgaatgcgtgaaattctggctgccgactcgttcgtttgccacaagaagaccacaatgcagtgcgccgggcatatgctgatcaacgccaacgcaaatggctttgtgcgcctggctgagcgccttggaattgagcttgatttgaccggaagagagctggtgtttgacagccaagccgactgtatcaagcatcacagtcaccacagaaccttcagcagcaagacgaacgagtga

SEQ ID NO: 366207 - DNA, 801 bp, Pseudomonas aeruginosa
atgcccactgttcgacgctgcaatctgtgcctacggcgcgcagtcatgactcaggatcatctcttccccaaggctctggcgaggcctggccagcgcaaggtcacgaaaattctgcatccggttgatccaagccgtagggggcgtcaaggaacattcctcgcgcagaatggggtcacaaaggcgacgctttgtgctgactgcaataatcgggtgctggggaccgagctggacccatcactcattgaaacgtacaaggctgccttgtcggctctagaactctgccgctttccagtcatccccgatcttcacctgataggcgtcaacctcaacaaagttgcgcgatcagttgctgggcatttgctcgcccttgacgacacaccgagccctcgccatgtcatggcgagacaactacggcgatttgtcctcgatccgaaagcaggccttcacccgtcactgcgatttcagatgtggttctatccgttcatgcgccaaggaatgctgaaagacctcaaccatgttgagttcggacgcgactatggccccatgtggatttcggcaatgaagacgtacccgctcgcatttgccttcagcacggcagctgagaatccacggttccgcttagccggggtgactgacctcaccccttacgtgaccactgatgttgaggggcgcttcaaaattcgggttcgtacccggccaatcgtgagcatcaactggccgtttgcagctctgccaaatggcgcaattttcacaggcgataatgccagcttgacgaccgtgcctttccggaaaaaaccatag

SEQ ID NO: 366208 - DNA, 627 bp, Pseudomonas aeruginosa
atgcccccttttctcgccccacgcaccgccctaccttcgccggcaatgcaagtgcgacttggcctgagtcgcttcccgaagctcgacgctcgcctctcccacatcgaagtacatagcgaccagcacaccaaccggcatgtcatcacctcaattccggtccgcgactatccaggcgctgctgtttacgaccatgagcatcctctttttcaccagtaccatgcggagtgtgcggaccaagccgcgaagctgtggcgggagaaatacggaacagaaattccagctgacgatgatcttgatgtctcatgggcggagactctgcttgccggcatgactccctatgaaggcccgacagaactcaccgatgcagagctaagcgtcgtgtctcgtgcggacgaattcggcgacttcaccctggacatgctttggctcatcgtcgaatgcttgggctggcgacctggcgtgccggtaccggaggatgaccagggttggatttccgtctgggcggaagacgaggaagtccgtggctatcttgatatcgtccgtgcggtgctagggatgcccgaagtaccatacggctatgtaccgccagcagttgtcgagctacagcgcgccagcccttcaatttga

SEQ ID NO: 366209 - DNA, 189 bp, Pseudomonas aeruginosa
atgggcatgtggttcctacgccttgccaggccgatctcgcggatgttcagcatcctgcgcgcggtcgcgcggttcgcctcctggagcccagtgaaggccgccccagcctgggcggtatctccgatcccggcgcgcgacatccgccgccgtaccggcaagagcgccaagatgtacgagcgatgtaggtag

SEQ ID NO: 366210 - DNA, 1092 bp, Pseudomonas aeruginosa
atgactgtgggggacatccactacgacgcagaatgctatgacttccctgacgatgagcttcctccgctcagctcaaacgagctgcacgctgagatcgagaaatgtcgatccttagctctcgacatggtggacgggacgttggaggggcccacgcctgtccagatcgactacgcgcaggatcgaattcaacaatgccgcgacctactgcttgatcggggtgttgagttcgaccaggcgttcagagatggtctgccattcctacgttggccaaaaacaccagaagagctggctgaagaggaggtcgtacgtcagcgcgagcggagtgaagctgctgagctgcgcgctgcggcctctatcgtgagcagcaggatgcgcctggttgtgaaggctgcattcgatggtttgcttgagttggattcaaccgccgcacatgggatcaagctcaagctgggaaggggctcaaaatgcactggtgacccagagggcccaaccggtgcggaggttctctccctcgttgaggacctacaggccctgggggagtcctcggccgaagtgtggaagccgtacgaagggttcgcgtgcgaccctagccccttttggtcgttctcggtcgatctcccgacgaagccaaaatcctgggaggtcctggtcagttggtatgcccggcattctcatatcggtatgccgaccttcgaatattcctgggagtacaaatcgcggccgatgagcagctgggattacctccacgggattttgccccagcagaacgagctgaaccttcttgatcagttgcttggcgtccgtgatcaaaccgagcaggtcgccgaggacgctatcggcgctgccgacggtcaagcaagccaggtcccgcaagccgaaattcttgatggctcgataactcgccagttccggctgaaacgatccgtgaagatagccctcgtgcttgtcgccgcagcagcagggttgctttcagttctcttgcccgagtcgccacctcttaaggcgattggatttggcgcggcttgcttctgcgtgggagtccttcttgcggagcacgctgcaatttgggcgagagcacctctcgatcaatag

SEQ ID NO: 366211 - DNA, 246 bp, Pseudomonas aeruginosa
atgcgctcgactctggaaaccttcggcaacccggaagagatgatcgctcgcttgctgaacaacgagccgagcgtgttcaacggcgatgtacgcgctgaacgctaccggatcaccatcgagcgaatcgaagaaccggccgaagacctgaaggctcgacttcagcatctgctcaccgtgcctggccacatcgacaagaacaagcacgtgcgcagcgccgcgaaacgtctcggcatcgtgctggactga

SEQ ID NO: 366212 - DNA, 303 bp, Pseudomonas aeruginosa
atgtgcgctgcaccccgcttcagcaacgtgatcagtaccaccccgcttggggtggtctccaccatcgctgcccagatggtcatcccgtccatcaccctctgcgaacgagttgagggaaccagctgggtgaccagcgagcgcaacgtcaaggcattcggcagcgcaggtctcgtagtctgggactaccgggtgtccttcgcagacgacgtggtgctgctggtaagcgcatgcgatgcctccagggcagcagaaagcgcaagcgccgtacgtgcccgccttgatgccatgagcatcgcggcgtag

SEQ ID NO: 366213 - DNA, 1026 bp, Pseudomonas aeruginosa
atgaccgcagctgaacagaaaatcgctacttccttccgcgcctacgaagaacaacaaagcgcccttaaaaaggctggtgacgccgccgctgttctggttggtcgtggccgtattcactccgtacgcgctctggatatcgttgtttacccggaacgcaacattcgccccatcaaccaagaaaaggttgaatcctacaagcagaaattccgcgacggtaatactccgccgccggtagacgcgcacatggaaaagggtcgcgtcacgctggaccatggctaccatcgcaccattgccgcccagcagctggcgactgaggaccctgaggcctacggcaacctgatgctcgacctgcgcgagttccgtgggaacacggctgatcgctacttcttgatgatcgatgcgcaagacagcttggccctggacccggtttcgcgcgcaaaggcttacttcgatctgcacaatcagctcaagctcagcctgagccagatcgcagaacgcctgccgatgatcaacggcaaacgcccgagtgccgagcacgtgcgcattcagctgttcctggtcaaagccgaggaagaggtcaagcaggccatccgcgaagaccgtatctctgcctcgaccgtgatcgacctgatcaaggaagaagaacaaggtgggcgcaaccatgttgaggtggtgcgtgaaatgctggccaacgccgaagccgtcggcaagaccaaggcgagtaacaagcaccgcaccccggccgctccgcgtacttccagcgcgccgcgcctgaagatgcgcgaagtgtccaccgctctgacctccctgcgcggcgtctccagcaccatccgtgattcgctgaaggctgccaaggtcgaagacggcgcaagcgaagtcatggtcccggtcaatctgcctgcgtccaagctcatcgagctgctggaccttctggacaaggccgccccggttgagccggaaaccaaggacgagaaccagaccgacatgttccaggaaggcaaaggcaagggtccgggcagcaagtaa

SEQ ID NO: 366214 - DNA, 693 bp, Pseudomonas aeruginosa
atgtgcaaccgacttgtattccgcatcaaccaatccggggcagtgctcgttgttgcagccccctcccgccggcacgcagcgatcctgctgggcatttcgtcgcacctgctcaagaagcatggctctgaggtctgctacggagcagagtacgaccaagccatgagcgagcccggagcagtgttcatgcgacccgaggaaggcgaatggatgcgcaaactgtcttcgaagaagtcgatgacgctgcccacgcggggaggctatcgacaagccgccgggggcaggcagctgctgggcgagtcggtggcgcagcagatgaccattcggctctccgatcagcatcatgaggactactgcgctctcggtgggaccaagtggcttcgcggcctactggccagtcccgaacaagagggcccgcatccaaccacccaggagcggccgaatcagccaatgcgagcgcgctcaatccgcctgagcgatgaggatcgggaacgttacaaggcgcgaggcggcgcggtctggctcagaaaacaaatcgaccaggcggttgcagaacggaacaagcttaagagcggaaccacgcccgatcacaaggattcgggtaagccgttcacatctgccaggggctcgcaagagaagaattttcgcgaggatgagcctggcgagaatgccaaaaggcttggtgtcgcagcctaa

SEQ ID NO: 366215 - DNA, 444 bp, Pseudomonas aeruginosa
atgatcacactgaacgagcaagacgccggcttggtgcgtgacggcaagaagtggcagctccgcctgccaatccatccgcagcccctgcacatcgcgtcggaagacctattcggtaacgctacgggcgaatcggtgatctgggacccggcggggagttctccgatttcgccagaggaactcacctccctctgcccacatgcgcaggcgggtcagcgattcgtcgcccaggtaaccctgccctaccagaagcaggaaagcctcggccttctctgcaaatccatccgggtcgagcgtcttgaggcgatcagcgaccgtgatttgttggcagagggcggacggaactggacggtattcgcttccaactggggcgaccttcatggcagagcgggctaccccgtagtcgccaacccatccgtatgggtcatcgaattcgccttggcctga

SEQ ID NO: 366216 - DNA, 321 bp, Pseudomonas aeruginosa
atgagcgatttacgggtgaataaggaccaatgggactcgctgtccaaagaggagcaggacagcatcaccaaagggctggtggaggccggtgctatcaaggccgaggatcgggtagttgctgattcagcagtaccgccattcgatgaaaacacagtgcttcaaccgatgtggaatcccatcaaggacctcgggcctgtagtctgcgacgttgccgctgcggccggggctgcttggtgtacggcgaacacggcgggtatcggcctggccgcttgcatggcactagctgaagccggccgcaagaagtgcaaagaagctttctag

SEQ ID NO: 366217 - DNA, 423 bp, Pseudomonas aeruginosa
atgagtgccacagccaatgaatgtccttctcctgatctcggggctttggcgggcctgaaagccagcctggcgaagtcctcacagctcagcgaatgcggctgctctctgcgccgctgggatgtgtcgtgctacatcatgggcgcgccggggcatgtcagcccgtcactgccttacgatatcgaggatgccaacctctgtgcggcctgggaggcatttctggccgagcattcgcccactgtcgcaaagagcccgaagcatgccctggagcttctcaaaggcgcagagtggcgtagtggtctttggctgaacgatggtgcacgcgcccgtcagcaaggtgatgagtcgttggccacgtactgctatgagcgctgcaagtactggctggaacgggccaaccggattgcgaaagcaatctcccaatga

SEQ ID NO: 366218 - DNA, 312 bp, Pseudomonas aeruginosa
atgatgcaaccgattaagctggggcgtggactgatttttggggtcctgctcgcggggtatcttggatacgtctaccaggatattgagaagtgggataaggcgacggtcgggatgatcggttccggccacgttgacctggagcctcaggttgctgcgcactgcaaggacaccgtgttggtagaggttgcccccaatgctgatggcacagccatgcggtaccgctgcgggagcaagttctggccgttctacagggaaggtgagtctgccgagatgatgcggttctggcagacgctccacgtacgggaggggtga

SEQ ID NO: 366219 - DNA, 315 bp, Pseudomonas aeruginosa
atgacgaaagctcgggtttacttcgaaattcggacgttaagctacgccggcttcgtggcgttcttggcgtggtcctttccgcacatgctcggcgcggctagcgatactgcgatgtatgtaggcggctttgcgttcatgctcactgctttcagcttcgattttgagactgatcaaaaagcccgaaagcaaaaccctgagcgaatcggtctactggaagttttgcttattgcggccacgggtattgttctggccttggtggtctgccttctcatcggggatgtcctcatgccagctgtagggtcgctgaagaaatag

SEQ ID NO: 366220 - DNA, 258 bp, Pseudomonas aeruginosa
atggctttcaacgataggttttacttcgtcgcccacccgagaggtgaccgctcggctgtgaaggtaatagacctggctgagtgcgtgagatacgagcgctctgagtttgcgcccgtcaacgatgaggacttctacgagcgtgacgaagccattgagcacgcccaagcgctggctgccaaataccgcctacgttacgagcctttcgaatcacggtacgacaaggaattgaatgagtcgtacaacctcaccctggattaa

SEQ ID NO: 366221 - DNA, 126 bp, Pseudomonas aeruginosa
atgaagcgccaggctggcctcaccctcatcgagtgcctcgttttgataggaggcctaaccacaatcgcagtgggtctctggttctttggcccgcgcgggtatgcgccgactccgtggattttctag

SEQ ID NO: 366222 - DNA, 201 bp, Pseudomonas aeruginosa
atgctgacccacgcccagatgaaggaccgcgcactggacgcctatcgcgacaaggttgctgagatgacccgagcgccagatcaccttcgcgatgctctgcaacacaccgccatcggcatgctcatcgcgctgttcaagtgcgagttgatcgacaagggcgagtttgacgaactggcgctggacgctggttactgcgcctga

SEQ ID NO: 366223 - DNA, 1029 bp, Pseudomonas aeruginosa
atgcaacttcgtccagccagcatcgccacggcaaaaagcctcgcgaagcgcttgttccgcgcgctgtccaacctgaatctcgaaccgcaaacgactcttcagcaagcccacgaggtctatgcccgctgtattgggtattcatcgtggtttgagctagccaacacgatttcacgcggcgcgggcgattcgcgctaccttgaagaccttcctttcgcgaccagatcggatgagtggagcgccatctgtatgcggctggcccagcagctcaacggtaggctcacacttcaacaggtagcagacgttgccagcgatgcagggattggcttctctccggcggtgattgccaggctacgtgaggaatccagtccatggggagagattcagcaggccaaggtcgttgctccaggtataacgagggtgaccacggccgggcatggcggctatcgccttggacgtgaacgaatcgaacgcatgcgccagaggatcggcttcacccaggagtggtacgaagaggatgaagaggcggcccttgttgaggcggcattccctgatgccttcgatgccgcgcttgccggccggcggctataccagacctatcctcacctaatgcccgagcttctcggctgtacagccgatcagtacgctcaaaagtggctcgacgatcagctccagcagttcctggatcacccggtacgttggttcgttgctgacacgctcgggcagatcgatgaactacccggcttgccgctctgctacttcgcactcagcgggcaagatgcctatgcgtggttcacagtacacgaccatggcgcggcgcgacggggccggtacatgctgagcgggccgcaggaagtgaacacgaccggcttgcgcgtgggtcagcttctcccgaacagctacaaggaggcccctgcgggcatcgagaaggctccgaccgctctctcggtactgctgggcacagccacaccgaggcactgcatggcagcgttcctagagcgccggaagggcctatccttcccttcccactga

SEQ ID NO: 366224 - DNA, 312 bp, Pseudomonas aeruginosa
atgaaagacgaatacggctgggcagccaaagcgctgaacgtctacctcaagacgacaagctatgtcggaggactgggccgcaaagggcttgtcgcccgcttacatccgcccatcgacagtggcctatggagaggtcttcgcagacgcttcgctggtaatccagccctcactgcgattgatcacttcaggacaatccgcagcatccgaacccccgaaagctacaccaccatcatcaacggcatgcgccagctggcccaagctgaaaactgcctgctgatcgagcttgagcagtattggctcgatgccctgtag

SEQ ID NO: 366225 - DNA, 627 bp, Pseudomonas aeruginosa
atgaagaaagtcaccgccctcgctctcatcctggtcacccaggctggtctctgccatgcagcttcggaagaactcctgcccctaacgacgaagacggtgagcgtgaaggtccctggtaagcccaaagaagatcgcgtagtcgatgaccgcttcctgatcacctacaccagccgcctagtcgagttcgaaggcaacctccccgatgcttcggtaaaagcgctcgccgccgacggcagcggctacgaggtgctctcccggccgtcgttcagcgcaggtgacaaccggcctgtctgggtaactgaccagcaggagatcagcattccgaaggaaagcgtctccggcaacaccaggaccctcagctcggtacctgtctcgctgggcatcgtgatcgttgtcgatccggtagttcctgatcgcagccgaccggataccgtgctgactcggctctatctcaatcacaccgagatggcggacaacaaagacggcggagagccgatcaccgccagcccccacgcagcggacaagctgaaggtgggcgacaaacagctcatcacctggtccatgaaaggtcacaactacggcctggagcttcagctcacctcgatcaccgacaacagcaagtcgtga

SEQ ID NO: 366226 - DNA, 927 bp, Pseudomonas aeruginosa
atggcgctgccccatattcatcacccaattcgctactgctatggccctgacgagcccgcgtttcaggcaatgctgcacgcttggtaccaggtagccgaccagctcaagacccagccccccggcactgtggctaaaacacagggcgactggctggtgatgggcgacgttggtggcgaactgctcatgctcagcagtccggacctatgcccaggttcgacatcaaccaaccgcgatctcatggcaccgcaatacttcaacggcattggagctgaggagtttgacgagattcgagcccagctcgaagagtggctaaaagcacctgcctacgcgggcactgtcgatccgcaggttgtcgccgagaacatcgcgtacaacttcggaccaaatgcagatgctgtagccgattggcagtgggaccgagttcagcaccccgattaccaccgcgcgaccatcgatgagcttcccttcgccggggtgtctgccagcttggcgggcaatgggtcacaccatgctcagttcagcgcgctactacccaaacttgaggccgcagcaaccgtgttgctgctgcgtgagccgggcagtttcctccacgttggcgactctctctcgctcgccctggtgcctcacgagggccatctccacctcaccgcattcaagggcagcgccgagcaaggctacatctcattcagcgtgaatgatctcgatcatgcggaggctcaccaccttcaagagttcaccgaccctatggacttccgccaagcctctcccaaggtgaacacgccctactcgccagtcgagtacctgaacttcatggatgagctttttggcgcgaatgacgatcaacgccctgttgtctggtccggccgcgaagcagctgcgcagcagcgcgccgcgcaaaccttgttccgtactccaggagcgcgctga

SEQ ID NO: 366227 - DNA, 402 bp, Pseudomonas aeruginosa
atgacctgcatgactggcgaacccaagcccgccctggagtccggcgaaagtggaaatggggcggtgaaggaactgctctacgtgcagttctccggacggttcgaaatactcgtcccgaaagtccgtggtactggctacctgaagacgccgctcggtcatcacgcgaatgacctttctgcgctgggcagtgatctgggcttcgacctgatggggctggacggggcgctggaggtatatgctcccggtatgtcgagcctgtcccgtcgcgatgtggaaagggtgatgctggagctgatcccggcgctggtaaggcactacaagatgccggcgcgcatggtctgccccgccgagttctggcgactccacccgatcaaatccacggacgccaattacggtggctga

SEQ ID NO: 366228 - DNA, 384 bp, Pseudomonas aeruginosa
atgaaattcttcaggcagttccggaccgaagtgatgagcctgccaaactgggtacgtcgcctcatcatcgtgatcgccgccttcccgtcgatcctgctggctttcctggtcgttgccctggataaagcgctgatttcagaaggcccgcacctttctgtgttgcggatgctggctgaacagcccggcgaccacaagaaactgatcctggatgtgatgacaaccagtgcagatgccagcagctggagcctgattctggcggtggccatcattgttgtggtcatcgtctcgaacgcgttggtcttcaccatgatcaagtggacgaagggcccgttcgtacctgctcgcaagagcgttgataacaccgtcaccctgtctgcgcagtga

SEQ ID NO: 366229 - DNA, 381 bp, Pseudomonas aeruginosa
atgatctggctctacaacggttcactggtctccggcatggttctcttcctcatcgccggagttatggtggtgaaccgcatcttcccagtgtttgccttagctcttttggcggttgcaacggtgctcatgctctttgcggctttcgcaacccgctcgcacaacacctacgcttacaactcgacggaagaagacctgctccgccttcgctgcggcggcgacctgagcaacgcaatcctggcgtacatccaccgtgtagataccctcggccggcggcttaccgaatccgaagcgaaggcgattctctcgattaccaacaaggagattcggatgagggagcgacaacaactgtatgccgcgcccagtgaacagacgaaggattga

SEQ ID NO: 366230 - DNA, 429 bp, Pseudomonas aeruginosa
ttggccgtccatggcgataagcgagcctgggaggcgcgctacggcaagcagatcgatctggtggtgctgctcatggctgaagtgggggagccttataggcggccggaggagcgcgagaagccagttcgaaaaccacgggcggcccgcgccaagcctgcggccgaaaaggcaggcgaacgacccaaagccgcatggccgaagcgggaaaagcttcctttcactccgcagcagttggagtggattgagagccagaagcagctgaagaaagaccgcgcggcagcgtccaaggctgagtacgaagacgcgaaccgagagcgcatcgaagcagcgaaggaccgcgcaaagaaatatgcccgcgacgttcgccagcgtctctccaatgaacgcaaggcgaagcgcaaagaacagaagcggagcaaggccgcgtaa

SEQ ID NO: 366231 - DNA, 375 bp, Pseudomonas aeruginosa
atgatgaagtgcatcgtgggtgtgctggttgcgatccttggggcgaccctggccgacatctcatcggctgacccggtggtgctcaatcacaagggctacaccagttacgtcgaggaccctcttcgggtggagactggaccggatatcgagtgccgcaagctcggcaatatggtcacggtacgtcctggaggaagtccgatcatccaaggcggcaaagtcgttcgcggcgaggatggatgcaagcctggccgtgacgcagacgacgatgaagatgatgggggagaggatgataatcagggcgacgcgcctgtatcgcaagacgcaaagtcatccctcccggcataccaaacaggaccctcgcagatatggaagtga

SEQ ID NO: 366232 - DNA, 366 bp, Pseudomonas aeruginosa
atgaaggacgaagacccaatcgccgaagcggtcgcagcagcggctaaatcgcacccgccattgatgaaggtagcagcccaggacctggccgcgctgaaaatcgcccaggcagcagagttcttgcctttcgatgtgcggaaggcgagcgcggggtttcccgagggttgggattcgtcggatggaaaatattcatcgcagttcgaggtgagtgaattcctcaagggcaagcgaatcatcgctgtcgagttcaccaaccacaacaccatcaagttcgtgcttgatgatggcctggctgtatccctcacgccatcgggtatcgaaggtgatgacctcgatctgatggtggaaaagaccgcttcgacttaa

SEQ ID NO: 366233 - DNA, 240 bp, Pseudomonas aeruginosa
atggacccaatcgtattggcactgtcagttgcgctcggtctgtcgctgatttgcggcgtaagccttgcagtcctgtactggagcgagcgaaccaaacaccatgccgccaaggagtgggccgagcaggtggagaagagtttcagtgcctacaaagagcttgttgcacacgagcgaaacgaccgggttgtgcagacgtgcctcacgtacaaggcattccgcagcagtcctgctatacggtga

SEQ ID NO: 366234 - DNA, 294 bp, Pseudomonas aeruginosa
atgccagcaggcaacgtgaacctgttcgtcatgaacgcccacagccactactttgaggtgcatcaggaggttccggtcggcaagggattgctgcgcaattgcagcctctacgacaacgagccggcgctactggaggccgtttgccgagaaaccggatgtgagctggatgaggtggcgggcagcacgttctacatcacccttcgcaatggcgagcccaccctgatcgacgaccgtggctttgcacatgccatcgaagggcctgtcgaagacttcgttgcagactttgaactctga

SEQ ID NO: 366235 - DNA, 225 bp, Pseudomonas aeruginosa
atggcgatgaagggtgagcagtacgacgccctggtgaagctcatgcgcggggatgcagatagtgccggcaaccgcgctgcgcggcgtgtgctcgttgacgggatcacgcaggctgaggctatgcgcgagactggcgcttcgcgatccgccgtgagtaatgcggtgggccggtatgtcgaagccgacgagctggtgaggcgcgtgtacggagtcaagaaaaagtag

SEQ ID NO: 366236 - DNA, 390 bp, Pseudomonas aeruginosa
atggcacgactaccccaagagatgttcgccgacgcactagagcgcatccggcttgatccccaacaagctgcaatgccgttggatcagcaagcacgccttgcggccgaactgctcctcgcagaagctggtcagccccaccagccagccccgctttctctggtgacccacgcgcaggcgaagaagctgctcaatgatgccgagcgcctgaatttttggcaggcgcatcactggtacaaggccgaatgcacccaagagggcgtatggcgcttttcggatggcaagggccgcgactgcgagggggaaactcttcgcgacgccctggaccaactcagggccatacaaccggacgaacgcgacaagctgatcgagcaggactcatgggatggttga

SEQ ID NO: 366237 - DNA, 303 bp, Pseudomonas aeruginosa
atgagcaccaacgtaattcagacactccacctctggacgaatggcgattcgagcgtcggcatatccggcgaatccgcagaggtttctgctcccggctggctcatcaactccgaagactatgagccgcaggaattcagagaaacgctggaagcgttccgggcgaagatgatcgatgctttccaggtcgtctggcccggtgagcaggtgcacgcgaaatacgactttgagctgcgcgacgagaacgccatgatcgacgcggcgttgggcattcacaccagcatctcgaacgccgctcaaggatga

SEQ ID NO: 366238 - DNA, 567 bp, Pseudomonas aeruginosa
atgcacaagtccttcaacaccctcatgacccgactctgcggccacgaagacagcgtatccaccgggtacggcaagcgcactcgcagcctcaatcacaccgaggcccgcagcaccctgtgcatcgcttgcgctgagcgcgtccgctcgctgagcaccactccgcaagaaggcttctaccgtgtcgatccggtgatcatgcgcggctccgcgtccaaagcctcgtgggctacttccatccgcctgaagcagcttcggcagtacggccccgtcatggcgcaactggccaagctggaaagcgatccgctcgccaaggtcgccctcaaggtctacgaaatgctcttctgcatcccctcggccgatttctggatcgactcccgcaaccataagttcgatggttactggctggtcttcgaagtccagcacctcatgcagcgtttcgaattgatcggccagaaatacagcgctcagtcctgctacggctactggcgcagcgcaaatccgcattcgatcaccgacgcccgcctggcgctcggcgcagtcgaactgccggctgttgctcaggcgtag

SEQ ID NO: 366239 - DNA, 237 bp, Pseudomonas aeruginosa
atggtcgaaattacttccgttgctgagctgggcaagatcgtccgacaggctagaaaggaagtcgggattagccaggagcatttggctacggtagctggcgtcggcgcgaggttcttgggagagctggagaacgggaaagagaccgtccagcttggattggttttcaaggttcttgacgtgcttgggcttacgctcgcgttcccctataccaacctcagcttgtcggacgataaatga

SEQ ID NO: 366240 - DNA, 1269 bp, Pseudomonas aeruginosa
atgagcaaagcactacaggtcagtttctatgatgtgccggtgggggagctgaccttcgaaggcggacatcttcagttcgcttactcgcaagcttggctggatgatcccaaggccgtaccgctttctgtttcccttcccctgcggcccgaaccgttcatggaaaaggcgtgccgccctttttttgctgggcttttgcctgaaggcgcgatccggaaagctctcgctcagcagctgcgcgtctcagagggaaatgacttcgccgtactggagtcgatcggtggcgagtgcgccggggccgtatccctcgccgcaatgggggacgttgctgagcctattccggttccggagccagccgtacggtggctgtccgaagctgagcttgaaaaggtgataagcgatctgcctatgcgcccgatgctggctggtgaggacggaatccggctctctcttgctggtgcgcagaacaagctgccggttgtacttgagcacggcaagattggcgtgcccgaaaatggccacccgagtacgcatatcctcaagcctgctatcagctccttggaaggcagcgtgatcaatgaggccttctgcctcgatctcgcggctgcctgcggtatcagggcagcgaaggtgcagatggggcgggcaggggaggctgagtaccttctcgtcgagcgttacgaccgtgagattctggaaaatggacaggtgcgccgcctccaccaggaggacttctgccaggcgatgggggtatcaagtgagttgaagtaccagaacgaaggaggtcccggtttgcgtgcctgctttgatttggtgagaaaacacactcgccccagtgcgatccatctgctggcgctgctcaactacgtttcgttcagcgtgatggtcggcaacaacgatgcccatgggaaaaactacagcctactgcaaacttcccgtgaccccgttcttgccccgctctacgacgttctttgcacatcagtttatgagcgtctgagcgacaagatggcgatgaagatcggcagcaagtacaagttcacggaggtccaggatcggcattgggccacctttgtcagcgatgccgggcttagcttcgcaaacgcgaggaaaatcgtcattgcgcttgcggatagaatcgacgttgaagccgcgaagcttgctgctcaaccaccctacgcaggcaacgatctgatcgagagaatcatgctcaagattggcaggaatacccgccttgtgcgtgagcggttcaacccgccgaagatgaacgcatga

SEQ ID NO: 366241 - DNA, 162 bp, Pseudomonas aeruginosa
atgccagccctctccgaggacaccgctgttaaaccaaccaagtcgtacgctgccaactggcagatagacgagaccacagtaggtgcagcgcttcgctccaccagcgttctggatcgtatcctggatcgctgggggcagacgctgaactacggcatcaggtag

SEQ ID NO: 366242 - DNA, 1023 bp, Pseudomonas aeruginosa
atggagcaggtggcgaggcggtctggccttacctctgtcgcgacggcaaaaacgacccgtttcccggcggcgcaggaagctattgcgtctgtgctgggcgtttccccggccgctcttttcccagagcgctacagcgttgaatggagcgtggcgctccagcttgaagttgaacgcgcgctgcctggccttcgcggcgagaacgtggccaatcgcatccgcgcggatcgcgaggctgcatcattcgaatactggcggtccatacctgttgctctgggggatgttccctacgaccaggctgaacgcttgcggtgggtaaaggagcagctcagggcgagaggtttccgaatcgttgacctggcccaagggctcgctgtgaagcggtcggcgattaacaacctggcggtggtctggtacagcgacattcaggctcggcttgctgagtgcctcggcgtgccgccgcaggcgatctggccagagaggtacagcacgaccggcgagccgctggcaaccggcaaggctgctttggccatgcccaacactcaggctgttccttaccagctggacctcacggcgggcctctggctgcccgccacggccttggaaggattgcccggcctgccggtcacgaaagacatgatcatggcgcgtgcgcgcgcatcgggctggcggacgcggcaacatgccggtgtcgatgaggtcgcatttgcctcgttgccggcagtaaccaagttgttcctcacaggtactgaggtcggccagccagggtcagaccctgctggagatcggcagcgaaggctcggcatgaatgctcagattgcctgcaacgatcatccggtccagaatttcgatcagaccgtgcaagtcagtgtatgcggtgcgagcgcgcatctcagtctcgtgaaggtcgatccgcgtgtgaaccgtattgaagacctgacttcagtcgagatgtcgcccagtgagttgcgggcggcagcaaccgccctgatcgaggccgcccagatgcttgaagtcggacggtag

SEQ ID NO: 366243 - DNA, 492 bp, Pseudomonas aeruginosa
atgcccgtcttcagcaaatcgctcaccaggaccgtattctttctggacagtccgatagagatcgagacctaccaggagaagcacagtccgcaagctcagcagcatgtcggccggggttacccgctcaacccgacactgcgcatccacttcgatcaaacacccaacgatgatcgagaagcgcaggaagtcgaagactggtgggacctgccatttgtcttgacgcagacgtgggatgagcgggaacagcatacccgcgatcatcaggaacgcctgcgcgccgagaaaagcgaacacgccgtttctgacgatgaactggaggcgatgatcgagcgccaaaagcagtcctggttcaaagagtacccagagggcacgcagtacagcgtgcgctgccttgatggaggcgcatgggaccgctcaacgttctggggatcgttctcgactctggacgaggcattggcgtgctgcgatgcaggcccggtttggaggcattga

SEQ ID NO: 366244 - DNA, 144 bp, Pseudomonas aeruginosa
atgcgcgagtggtgcgctgggccacaattggcgcatcgcttcgagcacttcgtggatgcgcacgcccttgtgcgcaaccgcgacgaaatagtggtgggcctgttcgagacggagactcagttctttgtcgccgaggtcctgtag

SEQ ID NO: 366245 - DNA, 954 bp, Pseudomonas aeruginosa
atggcgcggaagaaggccaccttccctcaggcgatcaagccccagcttgtccagccggcggctcggccgccggctggtgactggcagtacgagatcaagctcgatgggtaccgcatgctcgcacgcatcgaaggcgctgcgcgcttgttcactcgcaaccagtatgactggacgcaccgaatgccattgctcgccaaagagcttggagccctgcgagtgcactccgcttggatcgacggagaggtggttgtccaggatgaagacggcagaccctcgttctccaggcttcagtcagcattcagcactggcaagactgccggtatcgtctacttcgcgttcgacctgctgttcctcaacggtgaggacttacgccagtaccctgttgaaacgcgtcgagaagcgttagctgagctgctttcgcaccacgaactggaccgggttcgtctctccgaaacgcttgaagctgaccctcatcagttgctcatgaatgtttgctcgatgcagctggaagggctggttggcaaacgcattggcagccagtacaggtcagaacgcaacggggattggatcaagctgaaatgtggcaaccgtcaggagttcgttatcgtcgggtacacgcgtgccggcggaggcattggctcactgctcattggcatccatgacgatgcgggcaagctgacctccgccggtagggtccgatcaggcttcagcggtaagacgttaaccctgaagtcccgcctctctggtctacagtgccctaccacccccctcagcagggaacccgacctacgcagcagcctggccgttgtatgggtaaagcctgaagtagtgtgcgaagtgaagttcgcggagatcacgccaaaaggcaaagtcaggcatgcggtatttgtcgcccttcgagaggacaagccagccgccggcatcagcttggaaagcgacaacccagagccctag

SEQ ID NO: 366246 - DNA, 1662 bp, Pseudomonas aeruginosa
atggatgacattcagtttgctctgggcgcgcacccggagatcggcaggctgtaccgcgacggcaagtcatccagcggcgatgcgcccggccaagccttgacggcactacgcggccttgccagttccttctgcaacatccttgaccgcgatctcgatcagcaagagcccttggccggcaagattcgcagtatcgccggcatgctcaaacgaccaaccctccgccacctcaatctgctgaaggatcacgggaacaaggccgcacacccggaaagcttcgcgcacgagcagctcgatcttcaatgcatggccaccgaggctcttgcttccgcgcgcgagcttatcggggaactgtaccggctacgcggagagaccccacccgaatatgaagttggcgagaccgccgatagcagcctacgagaggtttgctatcgcgcgatgttcgaaggcgacgtagaagcaatgcaccaggttggcagcatgctgaaggagaaagcggacagtgtgcccaaaagtggcctgttcatcggggccgatggttacgctgacgcagctcgcgcgaacattgatcaagccatgttttggttcaagcaaggcgctgccaaggctcatcccgactgccagtaccagtacggcctctacacggcacagctgcgaggtgcgaccgaggaagacaccagctccggcgaacacatgatcatctccgccgccgaagcaggacataccgaagcccaagtctatgtcgctgaaggccacctgaacggctcaggtattttcattgaggatgtcgtcgctgctcgggagatgtacgaaagggctgctgctcaggaccacccggttgcgctgagtcagctgggggcgatctatgagaaaggccttggctgtgaacctaaccccactgccgctgctcactgtaccctccgggccgccgaggcaggttacccgcaggcgcagttcaacgcattcgttctgttcagccatggtactggcgttcaacaagacttctgcaaagcacacgaatggttgggcaaggcagttgagcagggttatccagcagccgtttacaacatggcatgccttgtccagcagggccttatcgaaggcaagggcatctccgacgctatcgggtactaccagcagagccaacgatccagggtgtaccgcgcccgagcctgcatggcagttgcggaaatgagcctcgcacataacagcacccgagacgggtggttgctggctgcggtgaacctccaggagtgcttccattgcatctcccaagacggagacgagcacgaactgttagcgccttgcctcagcgcgtcgaaaaaggcaatcagcgccctgcgtgcacatatcagcgctcacgggccatcagccgcagcagccgggaacgacatactcgcgtgcttcatgttcgaccacagcggcaagccgtatgccgacaagaaggcacgactaagggcgtacagcgaccttctcaacatgaaagcctccaaagacgccatcgcggtagcgatagcacgggaggccggaattgcgcaccgttcatccacggcagccaaggttcacaggactccggccgtggcgggcccactccccggccggaacgaaccatgttcctgcggatcagggcagaagtacaaaaagtgctgcggccttcatacctga

SEQ ID NO: 366247 - DNA, 498 bp, Pseudomonas aeruginosa
atgccggcaatggcaaaccccttcctcgcgctcgcgagtttccagcaggcctatctgagcggcgacatcaagcccctacgatgcaaaggtcacgacgagctgcacgtctttcaagacacaccagagcccggagtactgcgccttacctatgccctgatcactcagagcggcaaggtgcgcggctatacgatattcatcccagcggaaccaatcgaaggatgtccatgcttcggggttggttacgccgtagctgaggatgagcgtggaaaaggtatcgcccaggcgatgcttgagagcagtatccaggaactgcgaaatggtatccgtcctggcctcgccggccaggttcctggtttctatgttgaagcccttgtgggcgtggacaacatagcttccaacaaggttgcctcgaacgtcttgaacgacgcccccgaacagaccacagaagacatctctggcgaaagtgcgatgcactacaagcgtttcgtgaactggtga

SEQ ID NO: 366248 - DNA, 369 bp, Pseudomonas aeruginosa
atgaatctgctcgaacagaacatcatcaaagaggtgaaggctcagcagagcaacgtgcatgcctttggcgaaaagcttatggcccgcacagcaacgcttgacgaccgctttgagtacgaccgggcatggggagcgttcaccgccctgctctcccttgcgcacattcacgacagtggcctgagtgatgaagccgcgaacgctcttcgcgagatcgagcgcgccgaggctcaaaaggcgtggactccacaagggcatccgctcgcgaagcttctcggcgcaactcccaacgccgacggcagcgccgaagttggtggcggcagcctggcctaccgcctcgcctccaaatccggtagcgaccaacagccttga

SEQ ID NO: 366249 - DNA, 324 bp, Pseudomonas aeruginosa
atgggaattcgtaaaattgaaagcctcgaaaaccgctttgaacgataccgtagagagcgcaccgagtatctgagaagtgacttgccgatgattgtagggatcgcattcgtcgtctgctttgccctgatgtacggggtccagtacctcaccgttcttcgcaccggcaaggactatgaagactggcagactgtcgctgggattcttgccctcatcctgagcattccaccgatttacttcaccctgcccaagcgaccgactgagcgagacattctcgatgaccaggagcttcgccggctccatggcttagacgacaccgtagagtga

SEQ ID NO: 366250 - DNA, 243 bp, Pseudomonas aeruginosa
atgaccacgcctgccccctccttctcagaggaattcgtaaccgagcgcctggaagtttcatacgctcagctgcggacgctcatgcttgaaaacgaggatgacctgcgccggcaattccatggcatggctcaaggcatcttggtggcgatgcattccatcggcctcctcaatgacgaggcattcgacgcacgtaccgaagagctgaatgccgatctgctggctcggcaactacaaactggctaa

SEQ ID NO: 366251 - DNA, 756 bp, Pseudomonas aeruginosa
atgaaggcgactgggaatattcgctcagccgtacccgccgacctgccgctgatccatgaatggttgaagcaggagggaagcagcagcggtggtttcatcaataactggggcatgatccaggatgcctgcgccgagcaggaaatgattgtcttcgccggcgcagaaggcccagtaggcttcatcacccgtggcctatcgctcagcaccatcatccagacgaaaagcacctaccaacggaaagggatcggccgggccctcgtagaacatgccttggcagaagaagaagccaagggcaacgcggtggtcgttctccagtgtgcgcccgaaagctccgtcgaattctggctggcaatgggctttgaggcccacagatacggcaaccacacccattccgtgtacatgcaaaggctttcaaaagcgaaacgagcacacgtgcagggagatgatctgagccttgtgacgatcactgtctatccccaggcagtgctgtactccaacgacataaagccagaccgtgttcattacgtgatgggcaagtttgattacgacacgcggactctcgacttggctcaccgcgtctctatcgcgagcgaatcgaaactgggagatcaggtgatagagatagatttcggtgggttcgaaatctacagaggaaaggcaaagcgtacagaagcagccgccgttggcgtgaaatcaacacccaactattgcggttggtacttggatgtcatttatcttgatggtaatgcccaatga

SEQ ID NO: 366252 - DNA, 834 bp, Pseudomonas aeruginosa
atggactttgcagcactactcgaacagtcagggcttcgggtgacgaccggggatcgccgaatccaagctgcccttagcatcgggcagatcgttcacgcacgcactatctcaggcactgtgttccgcatcgctatcgaaggtaattcgctcgtagttgaagagcttccggatcaccagccagaccccgcaatggtcttggtcgaaaccgttgaaccttccggaaaccgtcaggacgcaaaggacttccctatctacatctctgacccgacgcccacctccccgtggctacatcgcctcatggccgaaactattggcttgaacctggtggactttgcggggcggtatcgcagtgcgcttgcttctgccttgcgccgcgatcctcggcttctggttatctgctccaaatcggccggggccgccgaattggagcttgtgaaacttgccttcgaagctggcctggaaatcctgttggtccgtttcaccgatcaagctccacccggaacgaactggctcgacaaggaagttgtagcgcttgatcacgacatccagccccagcagggtgaggcgcgcgcagacgataatcacgcggtgcacagacgcccaagcgaagacctccagcagcagttggccgctgcgcgagaggaaggcgcacgggatgaacaagaccgcctggcgatgactctctttgagcgcggtgggtatggcactctccagctcagccgcgaccccgattacatccccagaatgcgtttcgtcgatcccagcgaggttcagcctgttgacgcagtacgtctgggcgactcgaccctgctcacccgcactcccaagcagtga

SEQ ID NO: 366253 - DNA, 312 bp, Pseudomonas aeruginosa
atgggtttcgcatttggcattggtgccgtgctcgcgctcagtgttttctggggcggatttgctgccatgactttgtggggctggtttgccgtgccgctgggcgtaaaagcgatcacctactggcaagcaattgggctgaagtgtctcgttgatgctttcgtaggggtgcaggccgactctgtgatcaaaggctcggctacgcgtggtgaagctatccagaagggtcttctgtggggagctttgacacctactgcccttctcgccgttggctgggcggctcactggctgatggtgcaagagatcattcgatga

SEQ ID NO: 366254 - DNA, 138 bp, Pseudomonas aeruginosa
atgaagcactgggacgtgtaccaaggcggtaaatgggtcactggcgtccaggcgcgcaatcatagcgatgccgtaatggaggcattgatggcccttgatctggacgatgatgtgggcctccacattcgcctcgcctga

SEQ ID NO: 366255 - DNA, 288 bp, Pseudomonas aeruginosa
atgactgacttacccgtgaactcccacggcgtccccctgtaccccaaaggccacgccggtaggcttctggtcacgctagccgccatcgaccaactggaccatccaacttctcagacagtggccgatctaaccggcctcagcaaaggcaacatcgacaggtacgttgccaccctgaacgctgagttcggcacgcagatcgtgaagaacggcccggtatttcatatcgaatcctggggtgaagtcttgaaaaaggcgggcgtcaagaaaaccctttatagttctgtttaa

SEQ ID NO: 366256 - DNA, 930 bp, Pseudomonas aeruginosa
atggctacgtgcgaattgtttcgtgcggctttcgggtccgacaaagacgcgcgccgcgaggcatggaaagtactgaatcgagaggggatcgaccgtctcatcatcgcattgagtggccagcaagaatgcggtacacggctctccttgcagcaggcagctgacgatgtgtatttccccctggcggatgcgcaggacatggagcgtctcgctgccgcttttgtaaagagcgaggccttggaccgtcggagagttgccgccagtatttcggcgagattctggcctggcactgaatttgacggaatagacaaagcccgtctcattgccaaggcgagcgggtgccgaattccaacatggtttggtgttggcgaccgcatcacggatgaggcgatcagctacctcatcgagaattgggctgactttgaagtcgttgatccagattacggcctgctggacttcaactgggagcatctatcgctggagcaatttgcgcgcctcgccgtcgctatgttccgcgatcctgagattgcagaatccctcggacgggaggtgtccatactcgcgtccgataataaatctattgcgggtgcgtgcgctctcgggtttgcgtgtctgatgaactcaatcgagccgggggctctcccgaatttgatccgttccttggcggtctccaggtgggtgctaagaaacctgcgcgaggacactcccacggccttaaggaggatcgagatggttgggtttgatcggcttcaagttgagttggagcccagccgtgggaacatcctggttgataatgttcaaggcatcatccgacggttcatcgcgggagaggacatccgagatgagttgcgtcgtgtgattcccctccgggctcgcgacaagttgcccactctcgccgaacagcagagggccgagatggaggcttaccaatga

SEQ ID NO: 366257 - DNA, 297 bp, Pseudomonas aeruginosa
atggagaggattgagctaactgactacgtgatccaccgaggcgataccggagacggcggtggcgacggtgtggcgctgatctggttggggcctacctgcgagataccgcgagacgccgtagtgactgccgcaggcgggaggctcgccagcctctgtatccagggcaaagaactggagattgcactgctcggctttgaccccgagtgctacgcgctggcgcgggagaaggggctgcacatcatctggcagagcccctctggtggcgtcgagaacttcctgttacccgcgaggttctga

SEQ ID NO: 366258 - DNA, 381 bp, Pseudomonas aeruginosa
atgtggcctcatatttttttggagaacgggatgaccgtagtagctaagaccttgggctctctcgcaagttgggaactctcgattcgggtaagcaccctgatcgctctggttgtcggcgcggttgggggattctcgcttggagtctcacagctgggcggtggtttcggggtgttcactgccgacgcatcggttgggagtgagcattgcctcaacggctacctgtaccgcttcgagcagcgtgagggcgaaaagcggccgacgttggagttggtcgtggaagggagagcgccggacggtgaggtttcgaagcctgacgttatttacctagccaggccagccctatgcgagtcaaaaggtattaaccggcttcccggtaactga

SEQ ID NO: 366259 - DNA, 1269 bp, Pseudomonas aeruginosa
gtgggtgtgaatcgggtagtggggatgctccgaaattcggtgctgatgcggatggcccttgctgtagccatcggtgtcttcgtgatcgtgcttgctgccagggggctgggcattcaatccaacatgctcacgagcgtgttcgtgacgatgccaatctatctggtcctggacttcctgttggcgagtggaccggtacgcgctgagcgcgttcagcaggcacgccgcatgcttcgcgagagcttgccgagagctggctatttcgctgtgctattggcgctcactgtgctggccatcatggcgcgcacggagcccggagcaccgttcccgcgttacgtccaatccttggtcgagtacattggactgccgatggttttggcgatgccgttgttgcgggccttcttcggtgcgggaagcggttacgtctctttcagctccatgatggggcaggtaatccttgggttggcggcgctgtcggtagcgctgtttttcatcggcgtgtcaggggacacagtgtaccttgcgatcatccagaaccccgatgaagcctccgtcgctggtgtcgccctcctcatctgtctgctggtggtcaagctcgcagcacctcgcgtgccggtgccgcgtgatgacctgagctacggcgcaggaggtacagcgttggccctcgctatgggcgcgccaactgagcgtgacggccaatacatcgcggcgcacgaagctgggcatgctctggtttatgcagctctcggcgcgctccctgctgatatcaaactggtgctgaacgagaaagcagatgcgcggggtgcgctcgggttcattacgaatgtgaaagtgccgcatcgcctgcacgaggcgcgcttcgttgggtggtacctgcatatgctcttggctggtaaggcaggggaagcggccctacacggcaccgcaactctcggcggcgcgagagaccatcagaggtggctgagagaggcgactacattcctcgctagccaggaaaacggtgtcttctatgtgagcccgcagtccaagcttgagctggagcacaacgaagccaaactggatgcgctgaagacccagcagctggagactttgcgccgtttcttcgccgtgaacgctgatatccatcaggcgcttgcgcaagaattgcgcgaacagcgcaccatggaccgtgaggcactgctcccgttcctgtctcgcgtgaaaatggtagccggcatgccattgccctatggtgagttcactgccttcggaggggaagtgctgatgctctga

SEQ ID NO: 366260 - DNA, 858 bp, Pseudomonas aeruginosa
atggtgggcaacctcctgctcggcgcacggcgcgccgtgatagagcaccggataaaaactgcaccgccactggactccacctacaggctcgacattgccatcctcggcgacccggcgattcgaaatgagctgctgctcggcgcggtggagatcgagcacaagcactcctttgacgggcgcaaagccctcgcgggcaaaagtggcggctacccgctcatcagcgtggacgtgagcgacatgcagctcgaagagatcacgccggcatgggcggctcgggtgctcagcgagacaagccgtaccgtgcagagtggaggacgtagcaccttcgtgtacctcaaccccctgctctacccgctttacgcgcaaatacctcccgaaattgcgcgtcacgctgcgcgccaccagttcataatcttcgccccagacaaggacctcgtgaacgcgcgcgacaagatcaccacagcagcccatgcccttgggcttgctcaggatgtgaacgtccaattgatcaaagccgtgaacgaacagtgcgccatccgaatcaggaatttgggcaggatcgtgggccgtgattggcaggaccataacccagaggcctgcctgctggtttcgctcgaccgccctcactcactgttggacttgagccgccacaagatgcaccacttcctggcgttgttcctcgctggatggggaaacgccttggtgggttacaggtggagggaaggcgttttaccgaacgaagacgacacgagtgacgtatgggtggaacgcctgggcggaaagtcctatacgaccttgccaaagcgccttgcgatgccgcttcgtcgctatatcgaagccctgtcttcgctcagctga

SEQ ID NO: 366261 - DNA, 504 bp, Pseudomonas aeruginosa
atgaaaaagcttcagcctgaagagcgcgcacagctcgtcgaggagatcgtcaaacggaacgcggcggggctcgacaccatcgggacctccatccgccgactgcggctcgaagtcacggggcttgatcaagagacgttcgccagcatgtgcaagatgtccacgaagagcctgtacgagctggagagcgggaagtcgaatccgaagctcagcaccctggaagccgtgctgcgactctttggcgtgcggatgggcatggtgatgatagggaaaagtaatgccttcacgactggcggtgggggtggccccatcatgagcgtcgttaggactggtgggcctattgcagagacagcgaagccgctggcgaatttatccccgctggctggagcctataaatcgaatgggccgaagcgtgggaaaagccctgcggcagccaaagcgaagaaggtggtatcgaagccggcatctccaagagcgcagaagatcaaccaagaaaagcaaaaatga

SEQ ID NO: 366262 - DNA, 537 bp, Pseudomonas aeruginosa
atgagagccaacgattcaatgcccaactccttacgtctcttctcctacacctcgcccacagaaatccgctgcgctgtggcagcgcccaatagggctagcgcggcgaagctgctcggcaccacagcagaaacgctcaaagttcgaggcaaggagcacgaacgagtagaccaggccccaggcgaagacgttgccgggctccagctcgccgaggcgaaccctcagaaggttttcatcaagaagaaaggccaatgggaggagctgcctgagaagaagctccacctgctactgtctcagcgccagctcacggccaagggcaattcgaaccgtcagctgctggatgcgcccatgaacacgcactccatccgcaccgatgacgagacgtggattcgattcattgcaattggcggtggcgttaccttccgcgactgggtgaacgaagagttcgccagacgctcggcgaaggaccccgcagagatggagaagaggctgaaggaggcgcgaaggcagtccgattcaaaagcgcgttcaaaacgctga

SEQ ID NO: 366263 - DNA, 1392 bp, Pseudomonas aeruginosa
atgtcggaaaagcagaaatttctccgcaagagaactgtaaccccaagtccgggacagaatcctgggcttgcggctgtcagtgcgcagacatcggcggcgtctgtggcgtggacgaacgcggagccggacacgctgatggagcgggtgcttgcacccgccaacctcaagcgtgcgtatcaacgcgtagtcagcaacaagggtgcaccgggtgccgatggcatgacggtcgaccaattggcaggctacgtgaaacagtattggccgatcctcaagactcggttgctggctggcgaatatcacccgcaaggtgtacgcgccgtcgacatccccaaatccaaaggcggaacacggcagctgggtattccctgcgtcgtggatcgcctgatccagcaggctttgctgcaacagctcacgccgatcttcgaccccttgttttcggactacagctacggctttcgtccgggcagaagcgctcaccaagccatcgaaaccgcccgcggccatgtggtggcgggtcaccgttggtgcgtggaactcgatctggagaagttctttgatcgggtgaatcacgatgtcctgatggcccatgttgcgcgtcagatcgaggacaaacgcgttcttacgctgatccgtcgttatcttgaagcgggaacgatgtcaggtggactcgtcagccgacggcaggaagggacgccgcaaggcggcccgctctcgccgttgctgtcgaacatcctgctcaacgaactcgatcgcgaactggaacggcggggccatcgcttcgtgcgctatgccgacgatgcgaacatttatgtgcgtagtcatcgtgcaggcgaacgggtcatggccagtgttgagcgtttcctgatccagcgcctgaaactgacactgaatcgggaaaagagccgtgtggcacggccttgggcctgtgattacttgggttatgggatgagctggcataaacagccgaagctgagggtagcgagcataagcctgcaccgcctgcgcgaccgactcagggaactcttgcgtcggatacgggcccgctcaatgagatttatcgttgagcaaatgactcccgtgctgcgtggttgggctggctacttcaagctgagtcagagcaagcggccacttgaggagcttgatggctgggtgcgtcacaaacttcgttgcgtcatatggcgtcaatggaagcggccctctacgagggcgcgcaacctgatgcgtttgggaatcgacgaggcgcgggcgtggaaatcggcggtcaatggccgaggcccatggtggaactcgggagcgtcacatatgaatcaggcgctaccgaagaagctgtgggatcgactcgggctggtctcaatactggatacgataaaccggcttaatcgcataacctga

SEQ ID NO: 366264 - DNA, 654 bp, Pseudomonas aeruginosa
atgctcatcgatttcagcgaaatcctggacagtactgactgggaagagttctctaaggctttcctcgacctaagcggctacagaattgatatacgcccaggtgttggtccggatggtggtaaggacattatcgcgtcccaagacgttggcaatcgaggggtgcaccgctggttagtgagctgcaagtaccatcgagctggaaccatcggagtgggtgttgacgaagcgaatgcaaacaagctctttgagcacaagtgtcatagctttcttttcgtctattcgaggccgccgacccaagcactcatcgactccttcgaacgcgtctctgcaaatgcaaacgcaacctactacatcttcagcaaccgtgagattgaacaggttcttgtctctcaccccacctactacatcctcattcgccaatatttcccaaggtcctacgaacgcctagtccgtgacctggaaaggttagaatgtgagtgcgagcacacagtgggtaatgtctacctgatcccctacgaagacaccaaaactaggcaggttacacagtggtgctgctgtgactactgcgtatcgtacaaaatctcatccctccaagaagccggcataaacttcggcacccctgtcatgatccatccggaagaagacattgactag

SEQ ID NO: 366265 - DNA, 597 bp, Pseudomonas aeruginosa
atgctgctcatcattgataattacgactccttcacgttcaacctggcgcagtacttcgccgagttgaaagccgacatccgcgtcatacgcaatgacgagctgagcgtcgaggagatcgccgcgctcaatcccgaacgcatcgtcctgtcccccggtccgtgcacgccgaacgaggcgggcgtgtccctggcggtcatcgagcgctttgctggcaagttgccgctgctgggagtgtgtcttggccatcagtccatcggacaggccttcggcggaaaagtggttcgcgcccggcaggtgatgcacggaaaggtcagcccggtattccacaaggggctgggcgtcttcgcaggcctgaacaaccctcttacgcagacccgctaccactctctggtggttgagcgcgagacgcttcccgactgcctcgaagtaaccgcgtggaccgttctgggcaatggggaactggatgaaatcatgggcgtgcgccacaagaccttgaacgtcgagggcgtgcagttccaccccgagtcgatcctttccgaacatggccacgagatgctggccaacttcctaaagcagaccggcggggtgcgggcatga

SEQ ID NO: 366266 - DNA, 1050 bp, Pseudomonas aeruginosa
atgaacatcaaagaagccctcggccgcgtggtcaaccagctcgacttgagtaccgaggaaatgcaggacgtgatgcgcgagatcatgaccgggcaatgcaccgacgctcaggttggtgccttcctcatggggatgcgcatgaagagcgagacgattgacgaaatcgttggtgcagtggcggtgatgcgcgaactcgcgcagggagtggagctggaatcgctcgatcatgttgttgatgtggtcggtaccgggggcgacggcgcgaatatcttcaacgtttcctcggcggcagccttcgtggttgcagcagctggcgggaaggtcgccaaacacggaaaccgtgcggtctccggcaagagtggcagtgcggacctgctggaagctgccggcatctatctggacctgaagcctgctcaggtgaagcgctgcattgagacggtaggcgttggcttcatgttcgcgcaggtgcaccacaaggccatgaagcacgccgccggcccgcgccgggagttgggtctgcgtaccctgttcaacatgctcggcccgctgaccaacccggctggcgtaaagcaccaggtggtcggcgtgttcagccaagcgctatgccggccgctggccgaggtgctcaagcgtctcggaagcgaacacatcctggtagtgcactcacgcgacgggttggatgagttcagcctggccgcgccgactcacgtggccgaattgaagagcggcgtggtcaccgaatacgaagtgctgcccgaagacttcggcatcaagagccagagcctgatcggattgaccgtggacagcccggagcagtcgctggagctgatccgtgatgccctcggtcggcgcaagaccgaagccgggcagaaggccgctgagttgatcgtgctcaacgcaggtgctgccctctacgctgctgatttggcgggcagcatgaaggagggagtcaagttggctcacgactcactgcataccggcttggcgcgcgagaaaatggatgagctggcggcattcaccgccgtgtacaggcaggagaacgagcagtga

SEQ ID NO: 366267 - DNA, 810 bp, Pseudomonas aeruginosa
gtgagtgtcccgacggttctacaaaaaatcttggcacgcaaggcagaagaggtcgccgaccgccgcgctcgtgttccgttgatggagatcgagcagctggcgcgagtggccgatgccccgcgtggtttcgccaacgccctgctggatcgcgcaaagcgccgcgagccggcggtcatcgcagaggtgaagaaggcatcgccgagcaagggcatcctgcgcgaacccttcgtgccgggtgagatcgcccggagctacgaagagggtggtgctgcctgcctctcggtgctgactgacatcgacttcttccttggcagcgatgcctacctcaaggaagctcgtgcggcctgcaagctcccggtgatccgcaaggacttcatgattgacccgtatcaggtggttgaggcgcgtgctatcggcgcagactgcatcctgctgatcgtttcggcgctcgatgatgtgcggatggctgagctagcggcggtggccaaggacgttggcctggatgtgctggtggaagtgcacgattcgagggagctggagcgcgccctgacgatcttggacacccgattggtgggcatcaacaatcggaaccttcacaccttcgaggtcagcctcgaaacaacacttgccctgctgccggaaattccaagtgaccgcatggtggtcacggaaagcggcatcatgaatcgtgctgacgtggagttgatgatcgcaaatgaggtgtacgggtacctggttggcgagattttcatgcggtctgaatcaccggggcgggagcttaagcggctgttccgccctgaggtgatttag

SEQ ID NO: 366268 - DNA, 240 bp, Pseudomonas aeruginosa
atgcaaatgcttaagaagttggcccaggtcgtggtcttcccgatgctcaccctgatgggcattggtgctgcaatcctcgtcaacaactggggctgctcggtcgaggtggaagttgtgaacctggtccacgcggcatccatcctgctggtcatgggcggagctttcggcagcggtgtcctttccaccgaagtgctgtctacgacgactgtgcagaagaccctggagcccgccaaacaatga

SEQ ID NO: 366269 - DNA, 513 bp, Pseudomonas aeruginosa
atgcgccgggcatgcgttaagcctgcctttctggccttcctatggctctgcctggtagcgaacgcttgggccagtacgttcaaggttcctctgactgcaacgtgcttgtccgaagttgccgcagcgtaccaagttcacccggacatactgcttgcgatcctactggtcgagggcggcacggtcggccaggtcagcaggatgaactcgaatggcacttacgatatcggcccattccagatcaactctacacaccggtcagccctggctgcgatgcacatttccgaggacgaactccggaataacggctgcacaaatgcggcggtagccgggtggctcctgcgtcgagccgtgtcagtagaagaagagcagcaaatcaaaacccccgatgaatatctgcgggctatcgcccgctatcattccactaccccaaagtacaaccagatatatgcagaacgcctgaaaaaagcgttctcgttgttgtacgcctatgattcgagtgaacacgatgagtag

SEQ ID NO: 366270 - DNA, 240 bp, Pseudomonas aeruginosa
atgatcgattggagcaaggtaaagaccgccgaacagcaggcgcaagaacgcaggcaggctgagtacgatgccgcaaccgcggcgcgggcaaatgcctaccgactggaaagtgacccgctcaagaccgaggctgaattcgatgcgatcaaggccggcaccgagccggactaccgcgcctgggtcgcgaaggtcgaggagatcaaggccaggtatcctctgccggatcagctaccagcctga

SEQ ID NO: 366271 - DNA, 990 bp, Pseudomonas aeruginosa
atgaagatagaaaatgataggtttgaagtttcaaaagctgttgcagaatgtaggcggtctgggaactttgaagaggctatggcgttatgcatcggagctattgctcgttggagtgatgatgtttattttagaagaattctcgctgatttgtattttagtaaagggaggtataaagagtcatttttggctttaatggattttcttggtaatattaattcggaaagagtattgatagggcaatttactaaaaggtactatcgattccgcaaggtacttccagcagaggaaatgcgacggtatgccaaggcgttgttggacgttttggataaggttgctctcgacttcagagtttctaaggttgtcaggcagttggcaaattttgacgccgctaaccctctctctcagaaagagcttgatcttcatgcaaagttcgttaagttattaaataacgatgcaaattttagtatgtttgtaaagttggaaaagcaaatagaagagaatagtcctacacatttggagccaattcttgatgctgaaatcttaaatcgtgagcggcacgcgaaagtatataggattgatgcttattgtgtttcaatttatgaaaagcttggaagtttagataaggcattaaaaattgtaaaggagcttttggctgtgcggtctgatatgactgcggtcagacttctatttagagtgtgtcggttaatgaaagactactctgcggttgattttcttttagaggagcagcctgggctcctgcgagctcgtgactttaatgtgctttatgagcttgtttattatttcgagtctaaggatgattttcactcagtacagggtgttcttcgctcgatggataaaggatttgccacaaatctacctgtactgaaaacagtgcgtaacttctacattagatttggtttggtagatgaggcaaagagggtagaggtaacgatatcttcgctttatagaaaacaggggggcgcaggctga

SEQ ID NO: 366272 - DNA, 432 bp, Pseudomonas aeruginosa
atgaataatagcttgcttttggttgaagacgaagtcaagacggctgagatgttgaagatggcgctggagtcccagtccatagatgtcacttgggttacagaggggcaagccgctctcgatgtaatgaagaagaagagctttgatcttgttatattggacctaaagcttccagggatgactggagacgaaaccctggagggtataagaaaatttgataagtttgttgatgttgttgtgtatacaaactatcaagagccgccagttatgcagaagttaattaatttgggggtcgagggttatattagcaagggggccgatgcgagtttgtgggagacagttgagaagataaagatgatacttgacccaatgacagaagaggaaaggagtgcgttattggaaaagttgccgtcagatgtgtttaaggggatgtga

SEQ ID NO: 366273 - DNA, 264 bp, Pseudomonas aeruginosa
atgctggtcattcgattcaagggctggtcggtgaaactcgatcaccaggtgggcagcgctgggaagttcggcatctggtcgttccacggttcggagagcagctacgtgccggacatggagacgattctccggcatgcagctatccggcctgcggagccgaaagaaggtggggaggtcgaggtattcatctgtgatgcacggatggcgcaggacgaatggcgggcggtagggaccggcgttgcggattacgagccggagcgctga

SEQ ID NO: 366274 - DNA, 411 bp, Pseudomonas aeruginosa
gtggtgggcacggcggtcaacgtggccgatgtcacccaggtggacaagctgctgcacggcgaagagaacctggtcagcggcgatgccggctataccggcgtcgagaagcgtgccgagcatgcaggccgctcggtcatctggcagattgcggcgcggcgcagcacttaccagcaactgagcaagcgcagcccgctgtacaaggccaagcgcaaaatcgagaaggccaaggcgcaggtacgtgccaaggtcgaacatccattccgggtgatcaagcgccagtttggttacaccaaggtgcgcttccgtggcctggccaagaacaccgcacaactgattacgctgtttgcgctgtcgaatctgtggatggcgcggcggcatttactcgcgaacacaggagaggtgcgcctgtaa

SEQ ID NO: 366275 - DNA, 417 bp, Pseudomonas aeruginosa
atgagaatcgctcccatctcccgctcaccgctgctgcagtggctgagcttcgccctctgtgcctgcgtgctggtcaacgcgctggcttgcggcgtcctgcacctgcaggcgctgggagtgggcagcgacaaagggcagaaggccagcgtcgggctgttctgcgtcgccggtgccagccaatggctatccctggatcccgacgacgggtccgccggcgatccggtaccggtcaatccccagttgccggtgagctgcccgatgtgcagcgccctggtgctgttcgtcgcgctcggggtgatctggtcctggcgcttgcaacggcgacgccaggcgcgtttccgcccgcccgccacgcgcgagccggtgccgccccggtacgtctggccgccggccaacccgcgcgcttcccccgcctga

SEQ ID NO: 366276 - DNA, 240 bp, Pseudomonas aeruginosa
atgagcgagtggatcaaatgcagcgaccagatgcctgacgacgatacctgcgtgatcgcatccggcttcatcttcaacgacaaggtacaggggcgttgggtagagccatgcttttacgctgagggcgacttctacgctgttggcactaacgaggatgggggagcatcccccaacttcgatatcgtcatgcacccaccgacccactggatgcccctacccgaaccaccgcaagacgcctga

SEQ ID NO: 366277 - DNA, 1926 bp, Pseudomonas aeruginosa
gtgagcaaggaactgaacaaggcaccggtagagcaggcaggcggggatgagcgcgacttccaggcagagggcgcacaggaggttccatcgccagtctcacaagagtatgaccgacatttgatcagtcttttgcgtaaaggtgaggcacttcctggccaccaggaggaggccgctgacgagatcgagcgcctgcgcgattggaatgatcacctgaacaacaccgttctacccaacatactcaatccaaatttcctgatgctcatgaagggtggcgagaggctgcttgacctgtgcacgaaggacggcaagttcattggcgtatcgctgaatgacatgaaggacgtgtttgattggatggtcacgcacgctcgaattgcacctgatcacgccgccctggcgcaaccctcccagtctcagtatgaagccagcttcgaagagtggcttgccaacgaactcgagggcgaggacggccagcctgttccggctgcggtatgcgacattaccctcgcccgccgagcattcaaccactggcccaagctggaacagccagccaaggtcggtggcgtccgcttcagcgccggcgtgtcgtcgcggctggtagtcgaagccgcccagcggctgtacgagttcgagtccactccggagaaagaggcggagcggccggaggtggtggcctatgccgatccggtagcgttcgccaggttcaaggaacgcggccatgagggcggcgtggcaggacgagagtggatgtgggcggaaccgactcccggtctcgttgcgatgagtcgaactgatgagtgcgagcgcatcgtcggggcgctgcggttcgaacgtcagcagatggaccgcgcgttcaccgcgtgcatcaacgagcgcgacgccgccatggccgaagtcgaagcactgcgggcggagcttcaatctcagcgagagcgcaacaccgagctgatcttcaagctcggtagcgcaacgaacggctgggggcgatgcgaaaaagaacgagacgccgccctggccagggtcgcagatatgaaaactatggcagacaactattgcgcgctgctgatggacgccaacgccaaactggcggagcttgagaagcaggagccggtggcgaccgttgcgaaggtaccgggtgaagactggaacggccttcatttctatcgcgacctgcaaggcatgcagccgggcacgaagctctacgccgcccctgtagcccaggctcagcaactccacgacctggacaaacagtgtcgcgatgacgtggcacgtgcgcttggtttgcgcccgaatcaggagcgcggcttcgcctggtcctacctgttggcgtcgatcaagtcatgcgtgaaggcctccggggatagcgcccaggctcagcacagcgcgggctatgccgaagctcgccagtgcgtgaactgccggcacatcggtatcaacgacgccgccgactacgccgcttgccacgattgtcgatggactggaccggaacccgatgaggacaagtgcccaggttgcgcgggcgagaactgcatggcggcagcttgcccagagtgtgggggccgttacgagctggtcgctgaggcgaaaatctccaccccagccgcccaggctgggcagatgccgcaggcatggctcgacgtgcaggcagagcgccgccgccagatcaccgccgagggatggacgccggagcacgacgacgagcacagccacggccagattgcccgcgccgccgcctgctacgccctggccggctccagcgctccgaacgatggaaccgccgccctgctggtgtcgctggcatggccttgggatgagcagtggtggaagccaaccacggtgcgacgagatatggtcaaggcctgcgccctggcgctggctgagatcgagcgcctggaccgcgccgcgcccggcaaggagggggtgtga

SEQ ID NO: 366278 - DNA, 477 bp, Pseudomonas aeruginosa
atgcaacaagacaaacaaagtcaacaaaacaaaagctttgcatccaacgttttagcagttgcgctattgattatatgtgccgcgattggcatgttgttttatggccaacatatcatggccactgctactcaaggcatgggtaaactggctgcgaagcatctgacttatgaaattcccaatgccttgattttgcttgaggcccgtcgcggcccctgcgccactatcccaatcacttctgaagagctaatgaaaaggggagcgcctaagcaaacagcgaacggctcgccctggactgcaagcttcaccggagagtctgtcgaggtcatatacccctacagtgacgaggacgactatcgaatgacgaaacacgatttgttgaaggtcattcaagagagttcaaatgttcaaaaggctgaaatagctgttgaaggcgtcaaggtcacttactcctgccagcatccggtaactaaatcatga

SEQ ID NO: 366279 - DNA, 573 bp, Pseudomonas aeruginosa
atgactgacaatgaaaaaattctagaagggcaattgcgtgagtgctacggacgcgtggtttactcccataaaacacatgagaaatgtgcggacatattatttgagcgacacaagcaaataaagctctgccaaattattctttcggctctagttacgggcggtttgatagctgctctttttgatttcagtgcgctagctgagtacaagaagtgtggaacatttgttgccgttgtactttccacggtattgctcgtccttaattcctataccaaggactatgatcttggtgaaattgcccaaaaacatagacaagcaggggctgatctatggattatccgtgagaagtatctttcccttttgacggatctccgcttagcagtggcatcgcttgatgaaattcgctcgcaaagagaccagcttgccgaagatttgcatgctgtttataccggtgcgcccagtacaaattataaagcttacatcgaagctcaaaaggccctaaaagagcttgaggatatgactttctctgatgaggaaatagatgcctttcttccaagagagcttaagaggaagtaa

SEQ ID NO: 366280 - DNA, 786 bp, Pseudomonas aeruginosa
gtgtggctgcctggctatcgggttgagctggatgctaaggcggttcccggtgtggacaacaacctttcgggcctgaccttcgatcctgacctaaatctgctgtgggcggttaccaatggcccgaacgagctgctggccctcagtcgtgacggtgacgtggagcgacgttacagcctggatggcttccacgacgtggaagcggtgtcctatgccggcaacggtcaactggtcattgccgaagagcggcggcagagcctggttatcgtggatatccccatcgacgaatacggtaagctttctcctgatcgaccattgagcctagaccagtattcagcgctaaccttggcgcttggcaaggaggacaacaaaggccttgaagggctcgcctacgacctaaaaggtgatcgtttgtttgtgaccaaggagcgtgacccccggcaattactggaagtgagcggccttcgtgccagcctggaaggaggcgtttccctgcacgtccgcgacatgtccaacctagtaaaagacaaggtgtttgccactgacttgtcttcggttgtattcgatcaacagagcggccatctgatcctgctcagcgacgagtcgaaactgctgattgaaatgaccgacgagggcaaggtggtgagtttccgctccttggcgagggggtttgctggtttgctgaaaggtataccccaagccgaaggcgtaaccatcgacgatgaagggtatttgtacgtggtcagcgagccgaacttgttctatcgctttacccgcgagacagattga

SEQ ID NO: 366281 - DNA, 588 bp, Pseudomonas aeruginosa
atggagcctggggttgcctggatgacgatcgtcagtcccatattgcaagatcgccaaccattccccgatcggtcacaaaccttttgccacccactagagcttgccccactacggatgggcttccaagagtccgccgagactggcgttgttaccgcagtgagaatgaaagccgcggctacggccacggccttaaggtttgcaaacatagagattccccgcactggcgaacgccaaagagcctttcggaaagctggcacacgattgacctgtgcttacgatcgccgggctccagataaccgacttcacccacttgcccccttggcaggtgagttgcgcaccggtggatgtcgtagcgacgagccccgctttcgcgcagccccctccctctgcagccgtgccggtgaactcgacgtagccagcggtgctgatatttccggtagcagcgactgtttgagcgttgaccgcgccggcagcgttgagggtttgagcgttgaccgcattgacctcgttggggagcccgcagaattcggaaaaaatcgtacgctaacagttcaagcgtcccggccacgcctgactgtagcttgttga

SEQ ID NO: 366282 - DNA, 450 bp, Pseudomonas aeruginosa
atgagcaccacccttactccctacctcagcttcaacggcaacactcgcgaggcctttgcattctacgaaaaggcgctcggcgcgaagatcgaaaccatgatgagctacgccgacatgcctgcgtccgccaaccccggcgaaggctgtgatagcggcagcgcacccagtggggatggcatcatgcacggctgcctggcgctgcccggtggcgcgatgctgtttgccggcgacaccccgcccggcatgccatacgaaggcgtcaagggcgtgatgctcgcgcttcagtacgacacgatcgacaaggcccacagcaccttccacgtgctgtcgcaaggtggccaggtgacgatgccgctggcacccgcgttctgggccaagaccttcggcatgctgaccgaccgcttcggcgtgagctgggccgtcaacggcgaaccggtcgcgtttaagtaa

SEQ ID NO: 366283 - DNA, 258 bp, Pseudomonas aeruginosa
atggtcgctctgaacatgatggaagagatggacgccctaggggggatgaatgagcaatacttcgatcatcgcgggaggccatattttgaaaccctagtttccagcgagatgcttcccgagcaaaaaacagaagctctatcgaaggtgactggaccagacgaggactggggggaaaatccctttgttgtgatcacttacgatccgaacaaaaactggaagaaagtcatgatcgtgaataccgacatcgctacctgctga

SEQ ID NO: 366284 - DNA, 765 bp, Pseudomonas aeruginosa
gtgcttaacccgcggaccctggccctgcgcctgaccgcgctgactcaatggcaccgctatcagggctttcccgacccagcagccagcgccaccgtgcgtaagaccttgcgcggtattgagcgagtgaacgggcgccctcgacaaaaagccaaggccctgctgctggaggatctcgaactcatcgtgtcgcacttggacacgctcgaagggctcgccgcgctgcgtgacagcgcgctgctacagctggggtacttcggcgccttccgccgcagtgagctggtcacgctggaggtccgcgatctgcagtgggaacgggaaggtctacggatcacgctcccgcgctccaaaaccgatcaagagggcgagggactggagcgcgtgatcccctatggcgacggcctctgctgtccaacgaaggtgttacggggctggttggaagccgctcagattgagcaaggaccattgtttcgacgcgtcagtcgttggggcgtgatcggcgaggtggcgctgcacgagggtagcgtcaataccatcctggcgacacgtgccgaagccgcgggactgttgtatgtgccacagatgagcagccacagcctgcgccgaggcttggccaccagcgcttaccgtgccggggcggactttctggaaatcaagcgccagggtgggtggcggcacgatgacaccgtacatggctatatcgaggaggctagagccttcgaagacaatgccgccggctcgttgttacggcgaaaaccattaatgtag

SEQ ID NO: 366285 - DNA, 780 bp, Pseudomonas aeruginosa
atgatcttcatgaacttccgccccgatcgggcgcgagaattgacccaggcattgatcaaacctgacttcgacgcgtttgagcggccttttgtgttgcccaaggatcgactgctgacgttgacccggtattccgaagagctggactgcccctgtgcgttcgctccagaggcgatcagcaacagcttgggcgaacacctggcgaatcttgggaagaagcaattacgtattgccgaaaccgagaagtatgcccacgtcacgttcttcttcaacggtggccgagagcagccttttgccggtgaagagcgaatcctgattccttcgcctgatgtggcttcctacgatctccagcctgagatgagtgcaccgctgctgacggatcatctggtcaacgccatcgccggcggcacattcgaccttatcgtttgcaactacgccaatggtgacatggtgggccacaccggctcttttgacgccgcagtaaaggccgtagaagtactggatgactgtctgcgccgagtggtcgaagcgacgctcgcagcaggaggcgaatgtctgattactgccgaccacggcaacgtcgaacaaatgctcgacgtcaagtctggtcaggcacacacggctcacaccttgaatcctgttcccctgattctggtcagtgagcagcctgatcgtttgggactgaaaaacggccggctgtgcgatatcgctccaactttgttgcagatgctgagtttgcctattccgtcagagatggatggcaagtcgcttcttaccgtctga

SEQ ID NO: 366286 - DNA, 300 bp, Pseudomonas aeruginosa
atgcacatagattttttcgacaccctgctcaaccaggcaaccgcatgccgcgacaatctgatcgatgtggccatgaacaccgccaggagaaagcagacccatgacgtgcacagcaccctcgcgcgtctttattccctggatcaattccagcaacgcggggttgcgggagaactcgccatcggcgagcgctttatcaacccgggtcaggctttgataaaccacccggcccgctcccaggttcatatgcccaacttcggagttccccatctggccttgaggaagcccaaccgccaaacctga

SEQ ID NO: 366287 - DNA, 1626 bp, Pseudomonas aeruginosa
atgactttgaataatcgacttgaagcactgttcccaagcgctgacgaaatccctgcggctttccgtccaggaccggccattgagcagcgagagtatctggtcaatggggaactgcggttgtgggacggcccattagcgccggtccgtagccctgtgtgcctgaaaaaagaatcgggacacgaggccgtgattctgggcagtactccgctactggatgcgcaaaccgcgatgacggcattggatgcggcggtgcaggcctatgaccgtggtcagggcacctggcccaccctgcgtgtggtcgaacgtattcgccacgtcgaggttttcctcaagcgtatgcgcgaacaacgggaagccgtggtgaagttgttgatgtgggagatcggcaagaacctcaaggactcagagaaagagttcgatcgcacctgcgactacattgtcgacaccatcaatgccctcaaggaactggatcgtcgttccagccgtttcgagctggagcaggacacgctgggacaaatccgccgcgtgcctctgggcgtgaccctgtgcatggggccttacaactacccgctaaacgagacgttcaccacgttgatcccggcgttgatcatgggcaacaccgtggtgttcaaacccgccaagttcggtgtgttgctgatcaggccattgctggaagcgttccgcgacagcttcccggcaggggttatcaacatcatctacggcagcggccgggaaaccgtcagcgctttgatggccagtggcaagatcgatgtcttcgcattcatcggcaccaacaaggcggccagtgatctgaaaaagctgcaccccaagccacatcgcctgcgtgcagccctcggtctggatgccaagaatcccggcatcgtcctgcctgatgttgatctggataacgccgtttcagaggccgtgaccggttctctgtcgtttaatgggcaacgttgcacggcgctgaaaattctctttgttcatgaaaacgtagttgacgcctttctggataagtttcagtcgaagcttgcccagctgaaaccgggcatgccttgggaagcgggagtggccttaactccgctgccggagcctggcaagactgatttccttaccggacttgtggccgatgctgtcagcaaaggcgcccaagtggtcaatgccggaggcggggaagtctgcgaaaccttcttctacccggcgttgctgtacccggtgactagcgaaatgcgggtgtaccacgaagagcaattcggacccgtcgtaccagtggtggtttaccgcgatctggaaacagtcatcaactacgtcctcgactccgatttcggccaacaactgagcattttcggcacgaactccgcagaagtggggcgtctggtcgatgcgttcgccaaccaggtagggcgcatcaacatcaacgcgcaatgccagcgtggtccggacagctttcccttcaacggccgcaaaaactctgccgaaggcacgctctcggtcgatgacgcgttgcgggtgttttccatccggacactggtcgccaccaagttccaggagagcaacaaggatctggtcagcgacatcatccgtcatcgtgagtcgagcttcttgaccaccgactacatcttttag

SEQ ID NO: 366288 - DNA, 798 bp, Pseudomonas aeruginosa
atgcagacctcttcgaacaaaaaacaactggtgatcggcaactggaaaatgaatggcagcagtgctgaaaacgcgtcgttgctgcttagtttgctgccggtgatttcacgctttgaaagcgttgaagttgcgctttgcccgccgtatccctacctgacgaccgtagccgatttgcttgatgattcagatgttgcactgggtgcgcagaatctcagcgcccagctctcaggcgctcataccggtgaggtcagcgcttcgatgctccacgatatcggctgtcgctttgtgttggtcgggcattcggagcgccgtgcactttatgccgaggacgatgatctcgtggcaaagaaatttgctacggcgctgcgtgccgggctcattccggtgttgtgtgtgggcgaaacactcgctcagcgtcagagcggcgaaacggaagtggtcgtcaccaatcagctgaatgcggtactgaaggctgttggcattcaggatctggttaaaggcgtgattgcctacgagccggtctgggccattggtactggcgaaacggcgacgcccgagcaggcgcaagcggtgcatcgacacatccgccaatatttggctgaccaagatcgcgcagcggccgccgattgccggattttgtacggtggcagtgtgaaggccgacaacgcagaacaattgttcaatcaacccgatatcgatggcggcttgatcggcggagcgtctctggatgcgatgtctttcgctgccatttgctgggcggctcaaaccgggccgatcaccgactctatcgcgatctga

SEQ ID NO: 366289 - DNA, 1302 bp, Pseudomonas aeruginosa
atgcttaacaagaccagccagattcaacacatcagcgctcgggaaatcctcgactcgcgaggcaacccgacggttgaagccgtggtgacactcgccaatggcgtcagtgctaccgccagcgtgccctctggtgcttcgacggggtcacgcgaagcgcttgaattgcgggacaacgcagcgcgctacatgggcaaaggcgttatgcgagcggtcgagaacgtgaacaacccgatccgcgagtgcctgatcggactggatgctttgaaccagcgcgaaatcgacaacgtcatgattgcgctggatggcaccgagagtaagagcatcctgggggccaatgcgattctcgccgtgtcactggcgaccgccaaagcggcggccaaggttcagaacattcctttgtatgaacacttggcggcgctgtacggctcgcctggccagttcagcatgccggttcccatgatgaacatcatcaacgggggtgagcatgccgataacaacatcgacatccaggaattcatgatccagcccgtcggcgcatcgtcgttccgtgaaggcctgcgcatgggcgccgaggtgttccattccttgaagaaggttttgtcggagcgtggcttgagcacggcggtgggggatgagggtgggttcgcgccttcgctggcctccaacgaagaagcactggttgttatcaaggaagcggtgagtcgagcgggttatgagctgggcaaggacattaccctggcactcgattgcgcggcatccgagttctacgagggcggtcaatatgtgctcgccggtgaaggccagtcgttcaattcggcaggctttgccgattacctggcgatgctgtgcgacaagtacccgattatctccattgaagacgggatggacgaaagtgactgggacggctgggcaggcctgacccaaaagctgggtcacgtgcaattggtgggtgacgacttgttcgtgaccaacaccaagatactgcgtgagggcattcagaaagggatcggtaattcgatcctgatcaagttcaaccagatcggcacgctcagcgaaacgctggacgccattcgcatggcgcaagatgccggttacaccgccgtcatctcccatcgttcgggtgagaccgaggacaccaccatcgccgacctcgccgtcgccacttgcgcgggacagatcaagacaggctccctcagccggtcggatcgcgtcggtaaatacaaccgcttgttgcgcatcgaagaggccttgcaggagcgggcgccttacaacacggccgcgcttgtgaacaggaaagcctga

SEQ ID NO: 366290 - DNA, 171 bp, Pseudomonas aeruginosa
atgagtaagacccattcagcagatcacgacgcaacgaataaccatgatcgtgaatcgtggccaagagatttcgattttcgtgagcagtacgcggagcagcaggaattactgaagtcgccgagcgacggcacgcaagctccgaaccatccgaagggggaaaaccatgcttaa

SEQ ID NO: 366291 - DNA, 1356 bp, Pseudomonas aeruginosa
gtgcgtctgaatttttctcacggcaaggcggaggatcacattgcccgggcgaggttggtccgtgagctggctgccaagcatggccgcttcgtggcggtgttggctgatttgcaaggtccgaaaattcgaattgcgcgattcgcgcaaggaaaggtgatcctggaaaagggtcagcagttcgttctcgacgcttccctggacaagaatgcaggggaccagcagcgagtcggtattgactacgaagcgctgatcaccgatagccgtccgtacgacattttgctgcttgatgatgggcgaatcgagcttagggtcctgaaggtcgaggcgacgcgattgatctgcgaagtcctggtcagcgggccgctttcgaacaacaaagggatcaaccgcaaaggtgggggattgtctgcgtcggcactgaccgagaaggacttcgccgatatcaagactgccgcagaaatgcaggtggactacctggctgtgtcgttcccacgcgatgcttcggatatggaattggcgcgtcggttgctgcatgaagctggagggcaggcaggcttgatcgcgaagatcgagcgcgcagaaaccgtcaacgatctacgtattctggacgcgatcattgaagcatcggaaggtgtaatggtcgctcgtggcgatctgggcgttgagattggcgatgcagaattggtggccgtgcaaaagctgattattgaccgtgctcgcacactgaatcgcgtggtaatcacggcgacgcagatgatggagtcgatgatcactcaatctatgccgacccgtgctgaagtgttcgacgtggccaatgcggtgctggatggtaccgatgcggtgatgctctccgctgaaaccgcggccggtgcctatccgatcgagacggttgaggccatgcaccggatcattatcggtgcggaaaaacaccctcaatcccatcgctccaagcaccgtgtcgatcaagtgttccacaagatcgacgaatccatcgcgatgtcagcgatgtatgcagccaaccatctgcatggcgtcaaagccatcatctgcatgacggagagcggcgatacccctcgtttgatgtcgcgcattcgctcgcacctgcccatttttgcattctctcgcaatctggctactcagaaccgggtcacgctgttccgtggtgtcaccaccattccgttcgacagcgatgatttcgaccctgagttggtgaacgagaaggccgttgcggagctgacccggcgtggcgtcgtcaaggctggcgatcacgtgctgattaccaaaggcgactacgccaacgcccaaggtggcacgaactcccttcgagtcgtgtgcgtcggtgaagccattcgctga

SEQ ID NO: 366292 - DNA, 1539 bp, Pseudomonas aeruginosa
atgctcacttctaccttgcctacgccccctctcgctgaggtctacgatatcgccgtcatcggtggtgggatcaatggcgtggggatcgcagcggatgccgccggtcgcggtctttcggtgttcctttgcgaaaaggacgacctggccagccacacgtcgtcggccagcagcaaactgatccacggcggcctgcgctacctcgaacattacgaattccgcctggttcgagaagccctggccgagcgcgaggtgctgctggccaaggcgccgcacatcgtcaagcagatgcgcttcgtgttgccacaccgcccgcacctgcgacctgcatggatgatccgcgccggtctgttcctttatgaccacctgggcaaacgggaaaaacttgaaggttcgaaaagcctgaagttcggtccggacagcccgctgaaaagcgaaatcaccaaaggcttcgaatattccgattgctgggtcgatgacgctcgcctcgtcgtattgaatgccatggccgcccgcgagaaaggcgctcatgttcacacccaaacccgctgcgtcagcgcccggcgcagcaacggtttgtggcacctgcacctggaacgcgctgacggcaacctgttttcgattcgcgccaaggcgctagtgaatgcggccggcccctgggtcgccaagttcattcgcgatgacctgatgttggaatcaccgtatggcatccgcctgatccagggcagccacctgatcgtgccgaaactctacgacgcgccgaatgctttcattctgcagaacgaagaccagcgcatcgtgttcgctattccgtatctgaaccacttcaccctgatcggtaccaccgaccgcgaatacaccggcgacccggccaaagtgacgatcaccgaaggcgaaaccgattacctgctcaaggtggtcaacgcgcacttcaagaagcgactgagccgcgaggacatcctgcacagctactctggcgttcgcccactgtgcaatgacgaatccgacaacccttcggccgtgactcgcgactacaccctggccctgtccggcagtgcggcagaggcgccattgttgtcggtgttcgggggcaagctgacgacttatcgcaaactggccgaatcggccctggcgcaactggcgccgttctttaaaggcatcaagccgagctggaccgcgcaatcgactctgcccggcggcgaagacatgaccaccccgcaggcattgagctcgctgatttgcgacaagttcgactggatgccaagcgaaatcgcaagccgttgggccaccacttatggcagccgcacctggcgcatgctggaaggcgtgcagaacctgagcgatctgggcgaacacatcggcggcgggctctacacccgtgaagtcgattacctgtgcagtgaagagtgggccaccaccgcgcacgacattctgtggcgccgcagcaagctcggtttgtttatcacaccggcggaacaggaaaacctcaaggactacctgaataaggtcgagcagaaccgcagcaagatcgaaacggcctga

SEQ ID NO: 366293 - DNA, 756 bp, Pseudomonas aeruginosa
atgaatctgcctccccgtcagcagcaaatcctcgagctggtccgcgaacgcggttacgtcagcatcgaggaaatggctcagctgttcgtcgttacaccgcagaccatccgccgcgatatcaatcaattggcggaagtaaatttgttgcgtcgctatcacggcggcgctgcttacgattcaagcgtagaaaacactgcctacgccatgcgtgccgatcaaatgcgcgatgagaaacaacgcatcgccgaagctatcgccgcccagattcccgatcacgcctcgctgttcatcaacatcggcaccaccaccgaatccatcgcccgggcgctgctcaatcacacccagctcaaggtgatcaccaacaacctgcacgtcgcctcgatcctcagcgccaaggatgatttcgaagtcctgctcgctggcggcaatgtgcgccgcgacagcggtgtcgtcggccaggccagcgtcgatttcatcaaccagttcaaggtcgacttcgccctggtcggtatcagcgggatcgacgaagacggcagcctgctggatttcgactatcaggaagtgcgggtatcccaggcaatcatcgccaatgcccgacaagtaatactggcggccgactccagtaaatttggtcgtaacgccatggttcgactgggaccgatcagcctgatcgattgcctggtcaccgatcagccgccagtgccggcgctggcgcagctactgagtcaacacaagattcgcctcgaggttgtttaa

SEQ ID NO: 366294 - DNA, 1506 bp, Pseudomonas aeruginosa
atgaccgacattcagaataagaactacatcattgccctcgatcagggtacgaccagctcccgggcgatcattttcgaccgcgacgccaatgtggtctgtaccgctcagcgcgaattcgcccagcattacccgcaagccggttgggtcgaacacgacccgatggaaatcttcgccacccaaagtgcggtgatggtcgaggccctggctcaagccggcctgcatcacgatcaggttgccgccatcggcatcaccaaccaacgcgaaaccaccgtagtctgggacaagaccaccggccgcccgatctacaacgcaatcgtctggcagtgccgacgtagcaccgagatctgccagcagctcaaacgcgatggccatgaacagtacatccgcgaaaccacgggcctggttaccgacccgtacttctccggcaccaagctgaagtggattctcgacaacgtcgaaggtagccgcgaacgcgcccgcaacggcgagttgctgttcggcaccatcgacagctggctgatctggaaatttaccggcggcaagatccacgttaccgactacaccaacgcttcgcggaccatgctcttcaacatccacaccctggagtgggatgcgaagatgcttgagatactggatatcccgcgggaaatgctgccagaggtaaagtcgtcctcggaaatctacggccataccaaaagcggtatcgccatcggcggcattgccggcgaccaacaggctgctctgttcggtcagatgtgcgtcgagccaggccaggcgaaaaacacctacggcaccggctgcttcttgctgatgaacaccggcgacaaggccgtgaaatccaagcacggcatgctcaccaccatcgcgtgtggcccacgcggcgaagtcgcttacgcgctggaaggcgcggtgttcaacggcggttccaccgtgcagtggctgcgtgacgagctgaaaatcatcaacgacgctcacgacaccgaatactttgccggcaaggtcaaagacagcaacggcgtgtacctggtcccggccttcaccggtctaggcgcaccgtactgggacccgtatgcccgtggtgcgctgttcggcctgacccgtggcgtacgcgtggatcacatcattcgcgcggccctggaatcgattgcctaccagacccgcgacgtgctcgacgccatgcaacaggattcgggcgaacgcctcaaagccctgcgcgtcgacggcggtgcagtcgcgaacaacttcttgatgcaattccaggcggacattctcggcactcacgtcgaacgcccacaaatgcgtgaaaccactgccctgggcgctgcctatctggcaggtctggcctgtggcttctggggcagcctggacgaactgcgtggcaaagccgtgatcaagcgcgaattcgaacctcacttggccgaagcagagaaggaaaaactctacgccggctggctaaaagccgtgagccgcacccgcgattgggaaccgcacgaagaggctaagtaa

SEQ ID NO: 366295 - DNA, 843 bp, Pseudomonas aeruginosa
atgacgactgcattacaacaaccttcgctctcgagccaatgcatggccgagttcctgggtactgctttactgatcttctttggtacgggctgtgttgccgcgctcaaggtcgcgggtgccagctttggcctttgggaaatcagcatcatctgggggatcggcgtgagcatggcgatctacctgaccgccggtgtttccggcgcccacctcaatccggcagtcagtattgcgctgtgcatttttgccgactttgaaaagcgcaaactaccgttctacatcttctcccaggtcgctggcgccttctgcgcagcgttgttggtttacacgctttacagcaacctgttcttcgatttcgaacaaacgcaccatatggttcgcggcacacaagccagcctggaactggcctcggtgttctcgaccttcccgaaccctgccttgtcgacgggccaagcatttctggttgaagtgatcatcaccgccattctaatgggcgtgatcatgtccctgaccgacgacaacaatggtctaccaaagggcccactggcgccgttgctgatcggtctgctgattgccgtgatcggcagctcgatgggcccgctgaccggttttgcgatgaacccggcgcgcgatttcggtcctaaattgatgaccttcttcgccggctggggtgaaatatcttttaccggcgggcgcgatattccgtacttcctgattccgatttttgcaccgatcatcggtgcctgcctcggcgctgccgcctatcgcgggctgattgcccgccatctacccagcgtcatacctgctacaaaggatgcagaacacgcctgcagaacacgccattga

SEQ ID NO: 366296 - DNA, 477 bp, Pseudomonas aeruginosa
atgaagcgcttactcgctgcactgacactggcaaccctcgtcaaccctgtcctggcgacagatgcggaagtgccgtacccgaccggctaccgcgactggcaccacgtcaagagtatggtcattgaccagggacatccgctttacgaagccttcggcggcatccatcacctgtatgccaataagcaagcgatggaaggttaccgatcaggtaagtttccggatggcgcggtcatcgtgttcgatttgctggacgcgaagcgggccgacaatgctgtgaccgaaggagcgcgcaaggttgtgggcgtcatgcacaaggatgcgaagcagttcagtgcgacggggggctgggggttcgaaggcttcggcagcggtgactcagccaatcgcgtcgtgcgtgccaaggcgacgaccgcctgctttgcctgccataccccgcaaaaagatcacgactacgtgttcagccgcttgcgtgactga

SEQ ID NO: 366297 - DNA, 408 bp, Pseudomonas aeruginosa
atgacgatcaaacgcaagccctcggacgcccgcgagcgggatttgcaactcgcgctcgcgcgcatccagcgtggtcggacgcacaccggagaatccaaggtcaccatcgccgcggtggcgcgtgaggccggtgtttcgacggcgctgatccacaatcactacccaaatatcgccgaagcgatccgtgaagctcagggacgttcgagtcgtgctcagcgggatgtgaaacaccaggatctcttggctgaacgcgagaaaaatcgaatgctccgccaagagaatgaggagctacgcgtgaagattgccaacctcgcctcgattaacgaggtattgatagccgagacccgtgttctaaaggcaaagcagagcgaccccaaggtagtagatctaccctcgggcaagttgtaa

SEQ ID NO: 366298 - DNA, 1890 bp, Pseudomonas aeruginosa
atgagcaaaagcaatgtggccatgttgccttgggcaagcatcgaactacaaccaggggatatacgtgagttgcccgagggcgaccgcgaagcactcattgtcagcgccatccatgttgatggccactgggtcatcctcagtcgctatcgcgacaacatttggcagctcgaagggttgactagcaatgtaccggacaacatgaggaatttggacttcaatcgagtacccgctgcgtttgtaacggtgatgaagtccctcttgtaccgctacctacggcgcggtcgcgcagggcagaagcgtcccgtggcaagtactttgcgcaatgtttttgaaaatgtattgccctttctacggtatctaagcgcgcttaagctcggtcacttcggcgctgtaacgcccatgatctgtgcaaattacgtcgccgagtgcaaggagatccgacagacgcgtcgcaatcgggggcaggcgctgtctccggcggcccttgaacgtcgttttatgtcagtcgaggcgcttcatgaactcagtcagtacaccaacgacccaatcccaagacatccctggcctgatacatcggcgagagccctggccggtagagcctccctcaacagtgaggccggcaaaacgccgttgataccagatgaggtgttttgtactttgttcgagaaggcctatgaacaggttcagcgcggtgagcgtctgctcgatctgcgcgacgccctcgatagcgtcgcagtagcgcgcaagggacaggtgatcagatcagttcaggagcataaggttcgccagctgacggctcttgggtgggaaggcgggcttgagacattcaaccaagcgattaaagatttgagaactgcctcctatatcgttctggccagcacctccggttgccggaatcatgagttggccaacgtaaaatctggcgcgcaccaccgtacggaagacgatgaaggcacggtcttccactggctgcgctccacatcggaaaaaaccgataccggcgtgcacgactggatgattccagaaattgctgtgcacgtgttgcgcctaatggagcgttgggccgagccgtaccaggcgatgatcgacgctgagatcgccgagcgaagaatgcttaactcgagtgatccgcaaatcgccacggcgcagaagcatcagcaggctctctttctcggggtggctgccacgaagcgtaatcaagttcgtaccctctcgggttcggcatggaacatgtgcctcaaagcgttcgcgaagagctgtggtctgatctggatcttagccagccatcaatttcgccgtaaattcgccaactacgcagcgcatagccagtttggcgacctgcgttacctgcgtgagcatttcgcgcactggtccatggacatgaccttgggctacgccatggatcaagattgggggcagcatctcgatatcgaactgtacgaagacatccagtcagaactcgaagacatcaagtccgaggtcgtcggtacttggctgggggacacaccactgactggcggctacggtcgatcgatcaagcattggcagcgcgattcggcgaacctcgcgatcttcaagaaccacgcctcgatggtgacctcgattgctgagagcaccgcgattcgaagtaatggtcatgcctggtgtaccgccgccgatgatcgttgcgtcggcaacaccatggagcgaacgcgctgcggcgactgcaacaacgccgtgattggaggtgcccatgttggtatctaccagcgtctttatggcaacttgaaggggttgttggattgcaacgatattggtgacggtggtcgacagcgcgtattgcgtgatttggatcgctgtcgtgacgtgcttatgcagcttggatacgacccggaggcgaacgtagtatga

SEQ ID NO: 366299 - DNA, 1677 bp, Pseudomonas aeruginosa
atggggaagcgcaaggtcttcttaaagaccgacctcaatatcccgcaagtcgagcatagtcacgacgcgaacgggtctgtcattgttctgcccgaagtgattccacctgtccacacaaaggtcaatttcggaaggaatgccacgcgttcccgaggcatcgacttcgctttctggtacggcgtgggtatcgattcaatcacgtatgcctgtcagcgacagactgaacgctttctggcccagcaggacactggggtcgaagcgagtaccgtagcaagcttctgtaaaggcggtttacgccacttccttaacttcatgattttgcgtgcaaccgcgctcagccgtgagttgaccctgaacgccatcgatcgcgcattgattgacgattttcttggctaccttgctggattgggcattaccacgcttagccagagtactcactacaccggtatgaagtgcgtccttcacgcgttgggccgcagagggataatttcgttggtcaccacaggggacgatgcgacgtttccgcgaaacccgttcccaaacagtggcaagagtaagggggaaacgccactaccgaaacgtcagcgacaagcgttcacctcagcattaaaacaggcgaccctgccaatctggaatgaagacgccgttgtgacaggtgagctactggcttatgccttgttgaccgttgcgctgcacaccgggcgtaacgccacgccgctgctggagatggggcacgattgcctgcgcgctcaccccaaagacaacagtgtctttttggtcctctggaaacgtcgcggacacagcagcagtaaagtggctctgcgcgcagagagcgccactgagcgtcgtctggagtcgaccccaaccatcaaaaccaacattgaacgcctgatccgccgtgtccttgctcacagtgaaacgctgcgtgcggaggctccgaacgacatcaaggattgcgtttggctgtatcgcgtgcaccgtggtccaggcgtcggcacggtcattgtcctgacggattcagcgttgaaactagcggccaaaaaattggtgactgattatggactcgtcgatacggatggtcggccgctgcgcatcaacatctctcgactacgtaaaacgtttgccaaccgaatattcgaattgctcgcgggtgacctgatgaccacggccatcgcgcttggtaacacaccacaggtggccggacgaaattacttggcacctagcgcagacgcgaggcgcaactggcagtttatgggcgagataatggttcaggaactgctcagccggaccattggcgctacttacaaaactaccccaatggggcgctgtggtgatccggtgaacggccaatatgcaccaaaacgtgagggggaagcgtgcttctcattcctcaactgtctgcgatgcaaacattacgcggtcacgggagacgatttgcaccggctatttagtttttacttccgtgtgtttgcggagcgtacccgcatgaacaagcggcgttgggcgcaggaatacgcgcatattcctcgattgattgacgactatatcgtggctgaagggctgcggcgtggaaccttcaaatcggccgtcgttgaagctgctcgcgagcaggctcgccgcgatccgcacccgttttggtcgtccgatgtagtggaaagtctggagatgtttgcatga

SEQ ID NO: 366300 - DNA, 687 bp, Pseudomonas aeruginosa
atggtgaacgacgtcatgccgcgtcagcatcgggtgctgccgaagttcctcagcatggatgagattaaggagttgctggagaaggcggaaaatccgcatcaccgaatgatgattcgacttggacttcagactggcctgcggcgagcggaaatcgcctcttttccgttggcgtatgtcttcgatccggacaaagccggtaggcacgagcgcaacatccggattcgccttgatccacacgatggtcacggaatgcgaacgaagggaagcaagccgcgtgacatctatatcagtcgacgctttctcgcggatctgtaccggtatgtagtgcaggttcgtggtgagcgggcttcactgagtcgtactcaacacaaatcgctgttcttgaatcagttcggtgagccctacgccgatgatggtaaacgcatcgaacgcattgtccgagaaattggcaagcgtgcggatatcaaggttcatacgcacatgcttcgccacacctacgcgacccatactctggtcgcccttcagcgcaatggcagcagcctggaaccgctcgtgtttgtgcagcggcagctcggtcatagttcgatccagacgacgatggtgtacctgcacttggtcaacgaactggccgacaacgcggtgctggcttacgacgatgaactgtctgacgacttgggagctgtttaa

SEQ ID NO: 366301 - DNA, 567 bp, Pseudomonas aeruginosa
atgttgccgcgaaaaatccgtccgaaggtttatcagagggggggaaaatccgatggcaatccgatagtatccgggatgaaaaatgctcaaaagccgctccctacgatgtggcgcggctttatgctgcctgacgaaaaccatagtgaagggcacaaggacggtatgctccagcagacgccaaagccaatgatcgatcgctctcaagttgagcaaaatcgctacctcgactactgcctgaagcacaaggtagagatttccatcattctcatttcaggaacccattttataggctttgtactgcagcatgatcgcaagggcttgctgcttggaggaaagcgagaggataagcccgtgcgcttcatttcaaaagggtacatcgcgctcgtgcgaccgaacaaggaccaagatctcgagctatttttggaatatcgcgggatgggcacgttcctgcaacggaaacggcaaaaacaggccttgaagaagctggagaaaaagaatgctggtaagcctctccccccttcagggcctgctaggaaaaaattgacactccggccggccgtcgattga

SEQ ID NO: 366302 - DNA, 834 bp, Pseudomonas aeruginosa
atgtcctccggcgacgttcttcaggaaaccggtgtatggatcaaggcactgcatagcgacgccgaccagaaccgtcgcaatcagatcgagggcttcaacgccgataccgatggcatcatcatcggcgccgacggcaagctgaacgaccagaccaccctcggtctggcctacagctacgccaccagcgatgtcgactccgacgacggcaacagcaccaatgtgaagagccaggctctgatcgcctacggcagctggaaacaaggtccggtcttcgtcgacgccagcctgacctacggcaagaacgacaacgagtccaagcgttacatcgctggcaccactgcgaagggcgactacgactccgacctgttcggcctgaacgtcctgggcggctacggcttcaacgtgggtgacggctacatcgtcgagcctcgtgcagccctgcgctacagcaacctgaagatcgacagttacaccgagaagggctcctccgcggcactgtcggtaggtggccagcgcatcgaagttgctgagctgggcgcaggtgtgcgcttcgccaaggacttcaacgtcggcaacggcactctgaagccggaagtcaccctgatgacctaccacgacttcgccgccgaccaggctgacaccacaagcgcattcgtcctgggtggcaacgcctttgtcagcaacgccgccaagccgactcgcaacagctatgaggctggcgtaggcgcggagtacagcgtcggcgcgatgaccttcggtgcctcgtacaactacctgcgcaaagccgacttcaacgccgataccttctcgctgaaagctcgctacgacttctaa

SEQ ID NO: 366303 - DNA, 189 bp, Pseudomonas aeruginosa
atggccctatcggagtccgccgggcagcgcccggcactgctcaggcccgcgcagggacgcgacgaccgtgcctattggcacgagctgttcggttctctggaggtggtgcatttcttcctggtcaccgcccgttgcggctgtttcagagaagattgcccgtgccttgcagctgtccaagggcgtggttag

SEQ ID NO: 366304 - DNA, 639 bp, Pseudomonas aeruginosa
atgaaaatctttatcactgaccaacaaaaagctgaacttgagcgtcttcatgactccagtcgtgataagcgcgtttgcgatcgcattaaagccattcttctggcctccgagggctggagttcggccatgatcgctcaggctttacgcctgcatcagactactgttgaccaccatatcagcgagtttctgaacaaaggcaagctgaagcccgaaaatggcggctcagacagcaaactcagcgctgaacaaacggcttttttaatcagccacttatccgacaatttattttaccatacccgtgatattgtcgcgtttgtcgcgcggacatggaacatcgttttcagcattccgggaatgaataagtggctgcaccggaacggcttcacctataaaaaaccgtcaggcgtcccgcataaattcagtgaagagaaacaaaagcaattcattgaatattatgaggaactcaaagccaccgcaggtgatgaaccggttctttttattgatgctgtccatccgactcaggccaccaaaaggcactgttgcaaagttagcgatgaggcagccttttgtcttattcaaaggccttacatttcaaaaactctgcttaccaggcgcatttcgcccaggggatcaccataa

SEQ ID NO: 366305 - DNA, 1896 bp, Pseudomonas aeruginosa
atgattcccaccaccgtgcacgttggggcaggggcgattgttacctgcgaaggacgaaccttttgtatcaagcgctttatttcgctggatgaggtcctggcgagagatgttgttgccggcgtggaccgcaagctccgcttgagtgacatcacttcgagctacggcaaggcagtcgacgacgagggaacgagtcgcgacctgacatcaatctccgaggatgattgggatcttgccgtagagcgatacaaggcaatgaggcccttgattcacaatcgagatcgcactgcccgcttggtgggagaggttgcggacgagctcctggtcactgtttcgaccgtttacagatggcttgagcgggttgagcgtttcggaacggttagttgtttgctgcgcaagcgaaggtcggacgcgggaggcaaacgcctcgatcaaagagttgaggaaattatcaaggaagtaattcttaacgagtatttgacggatcttaagaagagcccgacagcaacactcagggagatacgaaggcgttgcaagaatctaagtttgccgctgcctagtaaagttgcgctgttgtctaggatttcggaaatacttccagaagagcgcgcacgcaaaagagaggggcgaaatgctgcgctcgctcttagagccaaaaaaggttcactgccgaatgttgataccctctattcaaaatggcagatcgaccatacgcctgttgaccttatgttggtcgatgagcgcgatcgtattccaatcggtaggccttggattaccctggcgatggacgtgttttcgcggatggtggtgggatggtacatatcgttcgaccctcctggctccttgtcgacaggcctctgtattgcgagtgctatcctccccaaggatcttttactctcgcaactaaatgtagattttccgtggccctgtcagggtaaacctggcgtcataatggcggacaacgcgaaagaatttcacggaaccatgctccaagatgccagccaagagcatgggtttcagatgcaatttaggaagcgcaggacgccaaactatggcggtcacattgaaagtatattaggtacttttgctgagcgaattcacgaactggaaggaacgactttctcgaacacccaagagcgcggcgagtatgattcagaagggaacgctatcatgactcttgatgaattcgagagatggttggcgaacctgatccttggtgaatatcaccaccagttgcactccgcccttgattgctcgcctcttaagcgttatgaggagggtatttttggtacggatgagtttccgggtattggaatgctgcctctcgctgcagatccttacaagctcaaaattgattttatgccgatcgtcacccgtactatccaagcatacggggtgttgtcggatggcatttattatcatgatcctgtactggataagtggatcggctcgcgtgatccgcgcactaataagaaggcgcgggagtttgtatttcgtcaagaccctagagatataagctacttaatcttctgggaccctgatgtgcagcagtactataggattccttatcggaatacgaaatatcctccgatcagtttgtgggaattgaggtccattaaggcctatatgaaagcccgacgtatctcaattgaagacgaggagcagatattcaaggcctggaatgagatgcggcgcattgaagacgaggcccgaagcaagactcggaagcagcgtttgaatcaggagcgctcacgccgccataggaaagtaactcctgccgttattcctcgggttgagcagcaagctttagctgggccagaggctaaggttaaagtatcgaatgccgttgaggatgtagtcgatgaattcgctcatcttactccttacgatgaacgttga

SEQ ID NO: 366306 - DNA, 705 bp, Pseudomonas aeruginosa
atgactgcaaggaaaattcgccctagtagcttcagcgtgacgggctacgtccctacctccaaaggccccaaggttcagggcgcagagtccaccctggagcaggacttcatcacgctgctcgagtttgacctgcgtgttggcaactacatcgtccagccattcaagatccgctggcgggactccgatggaaagcagcgacggtttacccccgacgttgccgtgcgatacacctcgcacgcacgtgaactcgatccttccttacgaacgaccatttttgaggtgaagtcgcggaagttcttaaaggagcgatgggcagtggagaagcctcgcctgcgtgctggcatctcctgggcaaaggaatacggctgcagattcgcgatcgtgacggaaacggaaattcggactccctatctgactaatgctcggttcctgatgaactaccgatcgattacgggcgatcccatcgttcgtcgagcaagggaacaacaccttgcggagacgcttgtgagattggggccgacgactccacgcgatcttatcctcgcgatatcgaccaatcgggaccgtcaggctgaatacatcccttatctgtggggcttgattatccagaccctcatcggggtcgatctcaattcggttcttaccatggcctcgccgatctggccaacggacggtacccgctggatgtcggagcgtttcgtatga

SEQ ID NO: 366307 - DNA, 1548 bp, Pseudomonas aeruginosa
atgaatttcaaaaaacccaaaaaaccggtgctgatcgaggccgcgctattccttctggagcatcaatctcgggaggacgtgattctcgagccgtggcgggaggccctgcgccggctacaggcaggggacgtggagtctgccgcagaggtcgctgccagggcctaccacaatggggcctcattggaggaccgccgcgtggtgatcgacttgatctcccaggtggccatcgaaaacaagactcatggtcactggtttgagtcgcttctgctgttggctgcagaaggtgggctcagcagttgcgcatacaacgttgggctcctgatcctcgaacgtgccaagacggcaaacgaccatgctttggcccatcgttattttacccaggcagctacaaacgcgaccgacgcggcgacgaaagcctccgccctggtcaactcatgcgaaccaatccgcgacggcctgatcaccgggaggccggactggcaacgagcagtcgatatctacgagcaggccgctgagttgaacctcgcggtcggcatgttcaacgcgggcaacgtttcctgctggctaaaggacaaaggccagttcgcctatgcggcccgggcagtgaaatggttcactcatctgatcaacagggtggataccggtggcaccttcgtcgatctcggaggggatgccgaggttcaccaggtctaccaaatggccaagagccgactggctgaactgcacgcattgaatcaggttgaggttgtcgatgttgatctcatccttgccgcggccaaggccgaacctgactcggaacgtgcagcatggctgcttagccgcgcctacgaattccgactccgcagtaccgcggtgcaggcaaaacctgccgcctgggagaactggctgtcagtgctttcgctgttggggtgggagctagatgccgaacccgttcctatggacctcggccctggcagcggtgactcccgcgtgcttacgttcaagcgtgatcaaggtgctccccttgcccttgcggtggttgacctagacgaaatcgagaacaacggtggcgtctataggctggtcaaactggcgaataatgttaaggctgtacacccgggcccatgcctcaccattggagcaaaagggcttttcgtgcagatcgataaggctgatggccacagctcctacacagtgttcgtgtcgacaaactctgaaggagttatctcgctgatccccatctggccaggagccacaaccgatgacgttgccaagctagtcgatgtgcagggccccaagtacgcagcgaataacacggatgagggaaacaccatcgcgatactggtcaatgcccttggcacgggcacacttgtagacgggaaatcctttccagaggcgatctacgtgaatgtcggaggcttcttcaactcgcccgtcttaacggtggagcaagcaaggagcctgggctgcgagttgccagctaaagacctagccgacgccctggcaggcgtgaaagcctacttccgagaaaacgcacaacgtcagcgcaggtacctgggccatcagtaa

SEQ ID NO: 366308 - DNA, 186 bp, Pseudomonas aeruginosa
ttggatcgtggcgatggcatctgccgacatttcgatgttgatctcaagcgctgccggatctacctgcagcgcccggatatatgccgagtcgacaagcagtacgatttgcattaccagtacgccatgacttgggaagctttcgtcgaactgaaccagattgcttgcaagaccctgcaatcaagctga

SEQ ID NO: 366309 - DNA, 510 bp, Pseudomonas aeruginosa
gtgagctggagatcggaaagcccctttacggtgggattcagagcttacgttggtttttggttccattgctccccaaaccccggctacgagcaaggcaacttcgttggcccgaccctgctctcgggcgtgaccaccgacatgcaggtgtacacccaggagatcttcggcccggtgctggtgacccttgaagtcgacaccctcgatgaggccatcgccttggtcaacgccaacccgttcggcaacggcactggcctgttcacccaaagcggcgctgcggcgcgcaaattccaaagcgaaatcgacatcggccaggtgggtatcaacattccgatccccgtgccggtgccgttcttcagcttcacaggttcgcgcggctccaagctcggcgacctcggcccttacggcaagcaggtggtgcagttctacactcagaccaagaccgtcaccgcccgctggttcgacgacgacagcgttaacgatggcgtgaacaccaccatcagcctgcgctaa

SEQ ID NO: 366310 - DNA, 891 bp, Pseudomonas aeruginosa
atgcgaatcgcattcatcggcctgggcaacatgggcgcgcccatggctcgcaacctgataaaggccggtcaccaactgaacctgttcgacctgaacaaaaccgtgctggccgagcttgccgaactgggcgggcagatcagcacctcgccaagggatgcagcagccaacagcgagctggtcatcaccatgttgccggcggctgcccatgtgcgtggcgtgtacctgaacgaggaagacggtgtgctggctggcattcgccctggcaccccgaccgtggattgcagcaccatcgacccgcagaccgcccgtgaagtgtccaaggctgctgcagccaagggcgtggacatgggcgatgcgccggtgtccggtggtaccggcggcgcggcggcaggcaccctgaccttcatggtcggtgccagtgccgagctgttcgcggcgttgaagccggtgctggaacagatgggccgtaacatcgtgcattgcggggacgtggggactgggcagatcgccaagatctgcaacaacctgctgttggggatttcgatgatcggtgtgtccgaggccatggccctgggtaatgcgctgggcatcgacaccaaggtgctggcgggcatcatcaacagttctactgggcgttgctggagttcggatacctacaacccgtggccgggcattatcgaaacggctccggcgtcacggggttataccggtggctttggtgccgagctgatgctcaaggatctggggttggctaccgaggcggcgcgtcaggcgcaccagccggtgattcttggcgcggtggcgcagcagttgtaccaggccatgagcctgcgcggtgatggcggcaaggatttctcggcgatcgtcgaggggtatcgcaagcaggattga

SEQ ID NO: 366311 - DNA, 345 bp, Pseudomonas aeruginosa
atgtccgatttcatcaccgtcctgcgcgaaacctgcccaaccccagtggtcgatgcaaccaagtggaagcgcatcggcggcgacccgcacacggtcaacctcaatgcttatctgtcggctgacggtagcaagatcatgggtacgtggatctgcacgccgggtaagttcgaggtgaattacgagaagtgggagttctgccacttcctggagggctactgcatcatcaccccggaaggcgaagaaccgaagcacctgaagggtggcgatgtgttcgtgatcgagccgggcatgaaaggcacctgggaagtggtggagacggtgcgtaagtattttgtgtttgcctga

SEQ ID NO: 366312 - DNA, 939 bp, Pseudomonas aeruginosa
atgacagccgccacccctgagaaatggctgcacagccacgaattccataccagcaacctgggtgcagaacgcaagacacgcctggctgtcctgctcactgcggtgatgatggtggcggagatcgcgggcggctggttctacaactcgatggccttgctcgccgacggctggcacatgagctcccatgcactggcgctgggcctgtcgctgctggcctacgccaccgcacggcgctacgcgcaggatcgtcgcttcgccttcggcacctggaaagtcgagatcctcggtggttactcgagtgccttgctgttgctcggcgtcgccgggctcatggccttccagtcggtacagaggctgctgacacctggaccgatccactatgacgaggccattctcatcgccgtgatcggccttgcggtaaacctcgtctgcgcccggctgctgcgcggcgaacacacgcacgatcacggccactcccatggtcacgcacatggccacgaccacgcccaccaccaggatctgaacctgcgctcggcctacctgcacgtgctcgccgacgccgcgacatcgttgctggcgatcgtcgccctggtcgcgggcaaggtgtggggcgcagactggctcgacccagtcatgggcctgcttggcgcattgctggtggcgatctgggccaagggcctgctgcgcgacaccagccgcgtgttgctggacgccgaaatggacgcgccagtggtcgaggaaatccgcgaggtggtagcgcaactgccagtgtcggctgaaatcaccgacctgcacgtgtggcgcgtcggcaaggaccagtacgcctgcatcctcagcctcgccaccaccgcagagctgagcgccgaccatgtgcgccaggcgctggcggtgcatgaggaattggcccatgtgaccgtggaggtgaatggcctggcatag

SEQ ID NO: 366313 - DNA, 276 bp, Pseudomonas aeruginosa
atggctcataccctgaaaaacaagaaaccgctgctgacccgggtacgcaagatcaagggccaggccgctgcactggagaccgcgctggagcaggaaaaggactgcctggcgattcttcagcagattgccgccgtgcgtggagcggttaacgggctgatggctgaggtgatggaagggcacgtgcgcgagcacctgattgctgatggcctgagccttgaagagcggcaggaagaggcggacaaggtggcggcgttgttgcgctcttacctgaagtag

SEQ ID NO: 366314 - DNA, 408 bp, Pseudomonas aeruginosa
atgaaatttcccgttgtgttgcataaagacgccgactcggactacggcgtgaccgttcctgatgtaccggggtgtttctccgccggcgcaagcgtcagtcaggcgctggagagcgtacaggaggccttggcgctgcatttcgaggggctagtggctgattgcgaagcattgccgcaggcacaggaagtggatgtgcatgtggccaacccggatttcgcaggtgggatttgggccgtggtggaattcgacgtgacgccctacctcggtaaggctgtgcggttcaatgccacattgccggagaacttgctgcagcgcattgatgagaaggtgaagcgcgaccaccgctacgcctctcgttccgggtttctggcgtcggcggcgttgcgtgagttggcaattgcgcattga

SEQ ID NO: 366315 - DNA, 288 bp, Pseudomonas aeruginosa
atgaaaaagcacgtccccgacccacctcacaccacgccaaacacacctgcccccactccctggacaacaacaggcgtcgccacctgcatggaccttttccgtgtacagccgggcattccttttgatcgggctctagaagaggtttcggtgctgctgggctgcatcagcgatctgaatttcgaaggcgacgaggaaagtgcgcaagcccaggggcgggcggtgcagtacttgagtgcgctggccaatgcattgataagtgatctggagtttgttccgaatcgtgggtag

SEQ ID NO: 366316 - DNA, 969 bp, Pseudomonas aeruginosa
atgcggcacctggatctgcaagtgatcgacaaggcgctggaatgggctactgccgggcaagccatttggctgtgcacggtgctgtccacctatggctcggcgccgcgctcgccgggggcgatgctggtcagccggggtagcgaagggtatgtcggttcgttgtcggggggctgtgtggaggaggagtttctggagagcctcgcccgtggcgaattcgccgaggctgcgcaggtggtgcgctatggcgacgggcaggaacagagccgacgcctgcgcctgccgtgtggcggggtgttagtggtgctggtggagcaccggcaaccgagcgctgcctggcttgagcacctgcaggcgctgcgcggcgccctgctcggccagcagcgggtaacccgccgggtatgcctgcacagcggtgcattggccgtgcacgacagcgcccaaggcagcgcccgcgtgcgccagcgggacgacatggtacacatcgacatcggcccggccctgcgcctgttgctggccgggttgtcgcccgtggccgaagcctgcgccgacatcgcccgcaccctgggttgcgaagtgatcgcctgcgaccctcgcgatgagatggcgcacatcagcctcgacggcgtgcagatgcaccgcgtgctgccctcgatgttcatcgccgccggtggctgtcacgcggcgacggcggtggtggcgttgacccacgaccccaagatcgacgacctggcgttgatggaagccgtgcacaccccggcgttctacatcggcgcgatgggctcgaccgccacctcggcccggcgtgcggagcggttacggcgcattggtgggctgaacgatgcgcagatcgaacggctgcacatgcccatcgggctggacctgggcagcaagtcgccagcggagattgcactggcggtgatggcggatgtgctgagggtgtaccgagcaaaggcgcggcatgcgttgtga

SEQ ID NO: 366317 - DNA, 639 bp, Pseudomonas aeruginosa
atgcaaactcgcaaaaccggcgtgcgcgcccagcaggccgaccgcaccaaggacaacatcctcaaggcggcggtgaagatcttcgccaagcacggcttcagcggcgggcgggtggagcagatctccaagctggccaaatccaacgaccggatgatctattactacttcggtagcaaagagaagctgttcatcagcgtgctggagcacatctacgcaagcttcaaccaggccgagagcaagctgcgcctggacctggccgaccctgaagctgcgctgcgccacttggtggcgttcatctgggactactacgtgcgccacccagaattcgtcaccctgctgtctaccgaaaacctgcaccagggccagcacgccaagaagtcgctgaacctgcaggcgctgtcgggcgaggcggttggcgtgctgcggccgatcatcgaggcgggccaggcccagggcctgttccgcgacgacatcgatatcaagcacgcctatttgatgatcgcctcgctctgctacttctataactccaaccgctacaccctaagttcgttccttgccgaagacctgggcaaccagcgcgccaaggacgactggctgcacttcatcagcgacctggtgctgcgcggcctgcgccgctga

SEQ ID NO: 366318 - DNA, 3558 bp, Pseudomonas aeruginosa
atgaaccactctcagcaggttcccacccgcgaccagttgctggccaagaccggcgtgctgcttatcgtcgacgacatcaccccgccctccggccccgtggccaagggcgtaaccccggtggtgaaagacaaggagctggcgttgttcctggccatcgacgacgacggccaggtgtatgccttcaacggccatgtcgacctgggcaccggcattcgtacctcgctggcgcagatcgtcgccgaagagctggacctgcgcatggaccaggtgcacatggtgctgggcgacaccgagcgcgccccaaaccagggcgccaccatcgccagtgccaccttgcagatctccgccgtgcccctgcgcaacgccgccgccgaagcgcgccgcttcctgctgcaacaggcggcgcaacgcctgggcagcgacgagctgcatatagaagaaggcattgtgcgcagcaacgatggccgcgccctgcccttcgccgaactggtacgcggccagcgctaccaactgcgcatttccggtgatgccccgctcaagcgcgtcgaagactaccgcctggtgggccgcagcgccgcacgggtggacattcctggcaaggccactggcgagctcacctacgtgcacgacatgcgcctgcccgacatgctgcatggccgggtgatccgcccgccttacgcgggctacgacagcggcgagttcgtcggcaacagcctgctggcggtggacgaaagctccatctcgcacattcctggcatcgtcgctgtggtggtgatccgcgatttcgtcggcgtggtggcccagcgcgaagagcaggccattcgcgcggcccatgagctgaaaatttcctggaagccctggaccgcgaagcttcccgacctcaccgacgtagcccaggccattcgcgacaacccgcgcatccagcgcaccgtgctcgaccaaggcgacgtcgacgccggtatcgccaatgccaaccagcgcctgagccgcagttacctgtggccgtaccaattgcacgcgtccatcggcccttcgtgcgcgctggccgactacaccgacgggcctatccgcatctggtccggcacgcagaacccgcacctgctgcgcgccgaccttgcctggctgctcgaatgcccggaagaacgcatcgagatcatccgcatggaagcggccggctgctacggccgcaactgcgccgacgacgtatgcgccgacgcgctgctgctgtcacgcgccgtacagcgcccggtgcgcgtgcaactgacacgcgaacaggagcacgtgtgggagcccaagggcaccgcgcaactgatggagatcgacggcgggctgaacgccgatggcaccgtggccgcctacgacttccaaaccagctacccgtccaacggcgcgccgaccctggcactgctgctgaccggcgcagtggagccggtgcccgccctgttcgagatgggcgaccgcacatccattccgccctacgactacgaacacatgcgcgtcaccatcaacgacatgaccccgctggtgcgggcctcgtggatgcgtggcgtatcggccctgcccaacagcttcgcccacgagtcttacatcgacgaactggccttcgcggcaggcgtggaccccgtggaataccgcctcaagcacctcagcgacccacgggccatcgacctggtcaaagccaccgccgagcgcgctggctggcagccccacaatgagcccatgcaaacgcccgccgagggcgatgtgctgcgtggacggggctttgcctatgcgcgctacattcacagcaagttccccggcttcggcgctgcctgggccgcgtgggtggccgatgtggcagtggaccgacgcaccggtgaggtggccgttacccgtgtggtgatcggccacgacgcgggcatgatggtgaaccccgaaggcgtgcgccaccagatccacggcaatgtgatccagtccaccagccgcgtgctcaaggaacaggtgagcttcgaggaatccaaggtggccagccaggaatggggcggctaccccatcctcaccttccccgaggtgccggatatcgacgtgctgatgctgccgcgccagcaagagccgccgatgggcagtggcgaatcggcctcggtgcccagcgcagcggcgatcgccaacgccattttcgacgccaccggcatacgctttcgcgagttgccgattaccgccgagcgggtgcgcgaggcactcggtggcaacggttcgaacggcggcacgacgccgccggaagacgccaagcccaagcgctcgaaatggtggttcggctcgctggccggagtgttcggtgcggcgttgggcatggccgctaccgccctgccctggcgcgccgaaatcgccccggtgacgccacccggtgcgggcagttggtcggcagcgatgctcgagcgtgggcggcaggtggcggcggcaggcgattgcgcggtgtgccacaccgtcagcggtggcaaggtgaacgcgggcggcctggcaatggagacgccattcggcacgctgtacagcaccaacatcacccccgacccggaaaccggcatcggccgctggtcgttcgccgcgttcgagcgcgccatgcgccagggcatcagccgcgacggcaagcacctgtacccggcgtttccctacacctcgtttcgcaatatcaacgatggcgatatgcaggcgctgtacgcctacctgatctcgcaaaccccggtgcgccaggaggccccggccaaccaaatgagcttcccgttcaaccagcgcccgctgatggccggttggaacgcgctgtttctcaagcagggcgagtaccagcccaacccacagcgtagcgaacagtggaaccgtggcgcctacctggtcgatggcctcggccactgcaccgcctgccactcgccgcgcaacttgatgggcgccgaaaaagccggcaagagctacctggccggcggcatggtggatggctgggaagcgccagcgctcaatgccctgggtaaatccgccacgccctggaccgagagcgagctgttcacctacctgagcaccggtttctccgacaagcacggcgtcgctgctggccccatgggcccggtagtcagcgagctggccacgctaccggaaagcgacgtacgcgccatcgctcattacctcacttccctcgacggccagccgcaaacgctcgccgccaagcctgcaccgcaggtggatacccaagtgtcgatcagtaatggcgagcgagtgttcaagggcgcttgcatggcctgccacagcgatggccaggggccgaagctgttcggcgtgagcccatcgatggcggtgaacagcaacgtgcacagcgacctgccggataacctgctgcgcgtggtgctgcatggcattcccaccccagctacccgcgacctgggctacatgcccggcttcaaggacagcctgtcggaccgccaagtggcagacctcgccgcctacctgcgccagcgcttcgccagcgaccagccggcctggcaagggctacaggccaaggccgcccaggtgcgcgccaacccaggcagccactga

SEQ ID NO: 366319 - DNA, 468 bp, Pseudomonas aeruginosa
atgcaagaaaacctcgccctgcgaatcaacggccagaccgtcacggtcgatgccgaacccgacaccccactgctgctggtgctgcgcaacgacctgtgcctgaacggcccgaaatacggctgtggcctgggcgaatgcggcgcctgcaccgtcatcatcgatggcgtggccgcccgctcttgcgtaatccccctggccggcgccctgggccgcgaggtgaccaccctcgaaggcctgggctgcaaggccgcgccgcacccggtgcaacaggccttcatcgacgaacaggcagcgcagtgcggctactgcatgaacggcatgatcatgaccgccaaggccctgctcgaccgcatccccaaccccagcgacgaacagatccgcaacgaactgtcgggcaacctgtgccgctgcggcacccacgtcgaaattctgcgcgccgtgcgccgcgccgccggccgccaggcctga

SEQ ID NO: 366320 - DNA, 471 bp, Pseudomonas aeruginosa
atgccgaaaaaacctacccccgcaccactgcaaaccacgccatacgacgttaccgaacagatcggccacttgctgcgcaaggcctaccagcggcatacggcgattttccagcagcaggcctgcgacccgcagctcacctccatccagttcgttaccttgtgcgccctgcgcgaccatgggcctagctcccaggccgagttgatcaaggccacggcggtggaccaagcgaccattcgcggcattgtcgaacgcctcaaggcgccaggtttgatccagctttcgcccgacccggatgaccggcgcaaggtgatcgtcgagctcaccgcgcaaggcagtgaattgctcgatgcgatgattccctgcgcccggcagatcagcgaactgagcatgggtagcctgaatgccggggagcgcgtggcgattctgtttctgctgcgcaagatgatcgacagcgacgaaaacgctggctga

SEQ ID NO: 366321 - DNA, 1053 bp, Pseudomonas aeruginosa
atgccggttagcaacgcagaactgacccagatgttcgagcacgtgctcaagctgtcccgcgtggacgaaacccagagcgtggccgtgctcaagagccactattccgacccgcgcacggtaagcgccgcgatggaagccgcgcagcgcctgaaggccaaggtttatgccgtggagctgccgtcgttcaaccaccccaccgccatgggcaacgacatgaccgcctactgtggcgacacggcgctcaccggcaacctcgcggcccagcgcgccctggaggcggcagacctggtggtcgacaccatgatgctgctgcactcccccgagcaggagcagatcctcaagaccggcacgcgcatcctgctggccgtggaacccccagaagtgctggcgcgcatgctgccaaccgaggacgacaagcgccgcgtgctggccagcgaagtgctgctcaagcaggcccgcagcatgcacgtgcgctccaaggccggcagcgacttccacgccccgctgggccagtacccggccgtgaccgagtacggctacgccgacgagccaggccgctgggaccactggcccagtggcttcctgttcacctggccgaacgaagacagcgccgaaggcacgctggtgctggatgtgggcgatatcgtgctgccgttcaaaacctactgccgcgagcgcatcaccctggagatcgagaagggcttcatcaccggcattcacggcggcttcgaagccgagtacctgcgcgattacatgaagtatttcaacgaccctgaggtgtacggcatctcgcacatcggctggggcctgcaaccgcgtgcacagtggactgccatgggcctgcacgaccgcaacgacggcatgtgcatggatgcccgtgcgttctacggcaacttcctgttctccaccggccccaataccgaggttggcggcaagcgcaaaaccccgtgccacctggacattccgctgcgcaactgcgacatctacctcgacgaccaggccgtggtaatggctggcgacgtggtcttccccgaggcttccaaagctcgctag

SEQ ID NO: 366322 - DNA, 1149 bp, Pseudomonas aeruginosa
atgcggggtaagcagaaaatcgcgatcgtcggtgcagggctcggtggcgcagccgccgcgacgttgttgcagcaggcaggtttcgatgtagaggtgttcgaacaggcgccggagttcacccggctgggcgcgggtattcacatcggcccgaacgtgatgaagatcttccggcgcatgggccttgagcagaagctggagctgatgagctcgcacccagacttctggttcagccgcgacggcaagaccggcgactacctgtcgcgtattccgctgggtgagttcgcccgtcgcgagtacggcgcctcgtacatcaccatccaccgtggcgacctgcatgcattgcagatcgaggcgatcaagccgggcaccgtgcacttcggcaagcgcctggagaaaatcgtcgacgagggcgaccaggtgcgcctggacttcgccgacggcacccacaccgtggccgatatcgttatcggcgccgacggcatccattcgaaaattcgcgaagagctgctgggcgtcgaagcgccgatctacagcggttgggtagcccaccgcgcactgattcgcggcgagcagttgaggcagcacgccgatgtgttcgaggactgcgtgaagtggtggaccgacgaccgccacatgatggtctactacaccaccggcaagcgcgacgaatactacttcgtcaccggcgtaccccacgaagcctgggacttccaaggcccgtacgtggacagcaaccaggaagaaatgctggccgccttcgagggctaccaccccaccgtgcagaagctgattcgcgctaccgaatccatcaccaagtggccgctgcgcaaccgcaacccactgccgctgtggagccgtggccgcctggtgctgctgggcgatgcctgccacccgatgaagccgcacatggcccagggcgcgtgcatggccatcgaagacgccgccatgctcacccgctgcttgcaggaggtagggctgtccgaccaccgcaccgccttcgcgctgtatgaagccaaccgcaaggaacgcgcctcgcgagtgcaggccgtgtccaacgccaacaccttcctctacacccaggaagacccagcctgggtctacggctacgacctgtacggtcaggagctcaaaagcggggaggcggcatga

SEQ ID NO: 366323 - DNA, 807 bp, Pseudomonas aeruginosa
atgagcaccttcgtcgagggtggcaacgtcaacgccaatggcattcgccagcactacctgcgctatggcggcaaaggcccggcgctgatcctggtgccaggcatcaccagcccggcgatcacctggggtttcgttgccgagcgcctgggccgccacttcgacacctatgtgctggatgtgcgtggccgtggcctgtcgtccagcggccctgacctggactacggcaccgacgcctgcgccgcagacattccggcgttcgcccaggccctgggccttgaggcctatgacctggtcggccactcgatgggcgcgcgcttcgccattcgcgcggcggcccaaggcgctccaggcttgaaacgcctggtgctggtggacccgccggtatccggcccgggccgccgcgaatacccaagcaagctgccgtggtacgtcgactcgatccgccaggccaccgttggcatgaccggcgacgacatgcgcgccttctgcgcgacctggaccgacgagcaactgcaactgcgcgccgagtggctgcacacctgctatgagcccgccatcgtgcgtgccttcgaggacttccacacggtagacatccaccagtacctgcctgccgtaagccagcctgcgctgctgatggtggccgggcgcggtggggtgatccaggcccaggacgtggccgagatccgcgagctgaagccggatattcaggtcgttcacgtcgacgacgccggccacatgattccctgggatgaccttgaaggtttcttcgccgcgttcggcgatttcctcggccaacccctcgtttga

SEQ ID NO: 366324 - DNA, 753 bp, Pseudomonas aeruginosa
atgaccaagctgtaccgcatcggccagatcgtgccgagctcgaacaccaccatggaaaccgagatcccggcgatgctcaccgcacgccaggccattcgccctgaacgcttcaccttccactccgcccgcatgcgcatgaagcaggtgaagaaggaagaactggcggccatggacgccgagtccgaccgctgcgccgtggagttgtccgacgccaaggtcgatgtacttggctacgcctgcctggtggcgatcatggccatggggttgggctaccaccgccaatcggaaaaacgcctgcagaaggccgccgccgacaacgatggcctggccccggtcatcaccagcgccggtgccctggtagaggccctgcacgtgatgaaggccaagcgcatcgccatcgtcgcgccttacatgaagccgctgactgaactggtggtgaactacatccgtgaggaaggcttcgaggtgcaggactggcgcgccctggaaattcccgacaacctcgccgtggcccgccatgacccggccaacctgccaggcatcgtcgctggcatgaaccttgagggcgtcgatgtgatcgtgctgtcggcctgtgtgcaaatgcagtcgctgccagcggtcgccaaggtcgaagcactgaccggcaagcccgtggtcaccgctgccattgccaccacctacgccatgctcaaggcattggacctggaaccggtcgtacccggtgccggtgccctgctgtcgggcgcctactga

SEQ ID NO: 366325 - DNA, 642 bp, Pseudomonas aeruginosa
atgagcgacgcacagagcgccagcgacaactaccaaggcgtatggggccagcgcatcggcttcggcaaaaagcccgccttgctgatgatcgatttcatgcagggctacaccacccccggcgcgccgttgtacgccgagggtgtggtgaaggcggtgcagcaggctgccggcctgctggcacaggcccgcgaaagcggtacccttgtggtgcacaccaacattcgctaccagcctgggcatttcgccgatggcggcgtatgggtacgcaaggcgccggtaatgaaagacatggtcgaaggcaacccgctggcggcgttctgtgccgaagtggcgccgcgcgccgaggaaacggtcatcagcaagcaatacgccagtgccttcttcggcaccagcctggcctcgctgctgcatgcccaaggggtcgataccgtggtgttggccggttgttccaccagcggctgcatccgtgccagcgcagtggacgccgtgcagcatggcttccggaccatcgtggtgcgtgagtgcgtgggcgaccgacaccccgccccgcacgaagccaacctgttcgacatcgacagtaagtacggcgatgtcgtcagccggcaggaagccatgcaacacctggtgcgcctggccgactga

SEQ ID NO: 366326 - DNA, 1314 bp, Pseudomonas aeruginosa
atgccaattgcgaatgcaaccacggtccacagcgataccgaccatggtactcaagcgctttaccgcaagatcacatggaggctcattcccttcctgtgcttctgctacctcgcagcttatctggaccgcatcaacgtgggctttgccaagttgcagatgctcgaagacttgcagttcagcaccgcggcctatggcttgggggccgggctgttcttcgtcgggtacatcattttcgaggtgccgagcaacctgatcctggagcgcgtgggcgcgaagatctggatcgcccgcatcatgatcacctggggcctgctgtcggcctgcaccatgttcgtcaccagcaccacgcagttctacatcctgcgcttcttgctgggcgccgccgaggcgggcttcctgccgggcgtgctgtattacctgaccatgtggtaccccacctatcgacgggggcgcatcattgccctgttcatgatcgggttgccgctctccagcgtgatcggcgggccaatttccggctggatcatgagccacttcgaccaggtgaacggtctgcatggctggcagtggctgttcctgctggaggccattccaagcgtgctgttgggcatcctgaccttctgggcgctgcctaaccgcttccaggaagccaagtggctcaacgatgacgagaaagcacacctggccagcgacctggccgccgacgacgccgagggcaagggcagcaagcacagcttccgcgacggcttcttcaacctgaaggtgtggatgctcggtggcatcgacttctcgatcctgctcagcgcctacgccatgggcttctggatgcccaccttcattcgcgatgccggggtcagcgacaccttccatatcggcttgctcactgccattcccagcttggctgcattggcaggcatgctgatgatcggtgccagctccgaccgtcaccgcgaacgccgctggcacatcatcgtgccgttcatcatcggtgccatcgccatggcgtccagcaccttgttcagccagaacctggtgatgaccgtgaccctgttcgccatcgcctcggcggcgatcatcggcgcggtgccggtgttcttcagcctgccggccacgttcctcaagggcaccgcagcggctaccggtttcgccttggcctgctcactggccaacatcgcgggcctggtgagcaactcgctgatggggatcgtcaccgaccttaccggcacctcccatgcggcgctctgggtgttcgccggctgcctgattctgagctgcttcctggtgattgcactgcccgccaagctggtcaaccgctaa

SEQ ID NO: 366327 - DNA, 723 bp, Pseudomonas aeruginosa
atgctcaagcttcacgatttttgcaacagagcccaccagcgcgtacatgtcctggccgttcgacgagtcacgcaaacgcgtggagcggaactgaccggcgttcagcgtcagccccggcaactcgcgagactcgatcatcgcgccctggtaagtaggcggcagcaggcgcagatcgctgaaggtcagcaccggcaggttaggcatcaactcgcccaccttcagctcggtcttcgacaccttgaacttgatcgccccgcccaagcggctgtattcatccgccgactcgccattggcatgggtgggcaacagcccggacttggcgcggtcacggctgctgtcgagcttgatgcccagcagcccgatcacatccacgcccaccccgacggtgccttgggtgtagccggagctggcattgaggatgaagccctgggcccactcctcggtcttggattgagtactgccaccgcggatatccgagtagtcgcggctgaagtagtaattgcgcgcctgcaaagtagcgcgggcgccttcgataaaacctgcttcttcagccttggcgtcaccacacaaagcggcggcgacacagccgctggccaggcaagcgaccgagttgaaacgttgttgaatctgcacgctcatggcactgctcctgaaattcgggcaacagcgatccgtcgtgggggccttgggccatccacggggcggattgcgttaggaaagtga

SEQ ID NO: 366328 - DNA, 483 bp, Pseudomonas aeruginosa
atgtcgcggacgacgcattggaaggattttcgcaagcgcgggttacgcacactggtgccgctgggcgtttcgctgtcgctgtcgccttgtgcgctggccgaaatgcggcccagcggttgggagcaggacttcatcggcgtagcggaagcacgcgggctgggattgaccggcaagggcgtggatgtcggggtgatcgacggcgggttccttcccggtcacccggctttcgtcggccaggcgatctctgcgctggccagccgagtggtcatcgacggcgacgaagtgctcgccgatcccatgcagccgctcttcgaacgcgatgagcagagcggcgaaatccgggtcgccagtcatggcgcgaatgtcagcggaatcatcgcggccaggccggaggtcattgccgatttcacctaccgtggtggcgtggcgccgaaggtcgggcttttccggctcttcgcatttaagggtgtagctgatttctaa

SEQ ID NO: 366329 - DNA, 834 bp, Pseudomonas aeruginosa
atggtggacgtgaagtctctattggaagcggttcagccttatcttctcgggccgaacgatacggttgatccgactgatagagagtgctatcgactgacagaggatgataaacgtcagattgagtggtccatcgcgcagagtggatacgactcaatacagaacattacgaagggtggagtagttctatatcttcggaagcatcagagattttcaggtgaagattccgcttatctaaggtatctgttttcccctgagtcagtagatcgcttgaagtggagcggccccgagaagattattataacaagcgatagctcagaaaaaattggcccgtcaggtcacgttatccatgttgtcagaagttactctccttttcttgataggctttataacttgccctacgagcctgagacggattttagaggtatcacaattgggtttcggttctgcgcaacgattcaagcaagaaatagcctttctgttttagagcaacatggccgtatagagtgtgtcggcgttgatagactccctaaaatcatatctgaaccttggcaaggtatttggttgccatttgctaggctgaattacatgtttccaatggggacgacggcatctgatatcgggcagatacccggcgatggcggagactacctgcgcttcttgcttatgataaaaagtattggagcgacgcctatagcttatcgagagaaactaaagatgttggatggtattcatctgatgtgggggagtgatggtcattctttctctgagtattcgtccaatgggcacctggatctagaggaaataatgagaacggagattgtcgatgaagaataa

SEQ ID NO: 366330 - DNA, 414 bp, Pseudomonas aeruginosa
gtgagccgctctgaccctcagttcaacctgcgtatcccagaagagttgaaggagctagtggtcgcagccgcgcgagaaaacaagcgatctgcaactgcggaaatactcgctcgcctggagcgaagctttaccgaacctgatgatttgggctggaccgatattgagcgtctgcggggcgaggagcttggcaatccgacgcaaaagcccaacagcactcggccgacgccccatccctcccggaaaatcgaattggttactgactcggcgaaggtgagcgatgtggtcatcgacggggaccggatagtcattcagatcaccgaggccctcgcaaatgccctcaaagggcgcgaacgctccgaacaggcagaaccttcacagccgtctcgatcaggcaagagatcgcccaagaagtga

SEQ ID NO: 366331 - DNA, 318 bp, Pseudomonas aeruginosa
atgtcggagcgcagtacgttctggttgtcgcacctgtcggcaatcgaagccgagggcatcaccacgaaggcgtacgccgagcgcgaggggctgtcgccgcaggcgctctaccagtggcgcaagcgcctggtggccggtggccgtcgtagccgcgccaagcttggcggattcgtcccgatccagatcgaaccctcgatgacgccccgcgcgggctgcacggtggtgatcgacgcgcagttgcggctcgaatgcgcgatgctgcccggcgtcgactggctggccgcgctgtcggtggcccttgccgagcgggggcgctga

SEQ ID NO: 366332 - DNA, 360 bp, Pseudomonas aeruginosa
atgcacccggggcattcgatcggtgcggtgtatctgtaccggccggcgatcgactttcgcaaatccatcggcggactgtcggcactggtcgagcaggagctggggctgaacccgttcggcgacgcactgtacctgttcatcaaccgtcgccgcgacaagctcaaggcgctgtactggcaccgcaacggcttttgcctctggtacaagcggctcgaagccgagcgcttcgcctggccggcggccgaggcgggcgagcccacctgcgtactgacgatgaaggagctcgaatggctgcttgagggcttcgatctgtgggcggcaaggccgcataaaacgctgcaataccaatcagttacgtag

SEQ ID NO: 366333 - DNA, 1746 bp, Pseudomonas aeruginosa
atgccgcaacgtaccgccgcccctcgctcgaacccttccgttggcgtgtgcgcatccgtcctggccgagctgttgcccgacgatccagcaacgctcaaagccttgttgctggcacagcagcgtgccttcgagacgcgtgaagccgaacggcaggcagccttcgaggcccgtgaggccgcactccagaaagtcttcgatgcgcgggaggctgaacgccaaagagccttcgatgcgcgggaggctgaactgcaaaaggccttcgaggcacgcatcctcgagctctacgagcagcttcgcctggcgcgtcggcgcatgttcgggcccagcagcgaatcgcacgcgggccaggcctggctcttcgacgaggccgaggcgctggccgagtccgcacccgaggcgctcgacaccgcaaccttgccgccgccggccaccgagacgacgggtgaggcgtccgccgacaccggcaagaagaaggcgcgtggtaagcgcaagcccttgcccatcgagctgccgcgcatcgacgtcgtccatgacgtccccgaggccgagcgcacctgcgcctgcggcacgcccatggtcgagatcggccaggacgtcagcgaacagctcgacatcgtcccgatgcaggtgcgtgtgctgcgccatatccgcaagcgctacggctgccccgagggcgaccaggcgccggtcaccgcccgcgccccggcgcaggtgctgcccaagagcaacgccagcaacgacctgctggccttgctgatcgtcatcaagtacgtcgatgggctgccgctggcgcgtttcgagtacgtgctcgctcgcgcaggcgtgcttgtgccgcgccagaccctggcgcgctgggtgatcggtaccgcccaggcgctgcagccgctcgccaacctgatgcgcgacgtgctgctcgggcacgacgtcatccacatggacgaaaccccggtgcaggtgctcaaggagcctggccgggcagccacgagcaagagccagatgtgggtgcagcgcggcggaccgccgggcaagccggtggtcctcttcgagtacgatccgagccgcgcgcaggcggtgcccttacgcctgctcgaaggctggaaggggcatctgatggccgacgggctcgagagctacggcgcaattgccttcaccgaaggggtgacccggctcggttgctgggtgcacgcgcgacgtcgtttcgtcgatgccagcaaggtgctgcctgccggcaagcgcggccgcgcccacgaagcgctggccctgatcggcaagctctacgccatcgagaaggacgcgcgcgaactgaacgacgcccagcgcctggcgctacgccagagcagaagccgcgccgtcatcgacgaactgcgccgttggctcgaccaagtgctccccaccgtgccgcccacctcggtgctcgggggtgccctgggctacctgcatcggcagtggccgcgtctgacgcgctacctcgagcgcggcgatctgccgatcgacaacaaccccgccgaaaacgccatccgtcccttcgtggtcgggagaaaggcatggctcttctcggacactcaggccggtgcgcgtgccagcgcactcctctactcgctggtcgaaaccgccaaggccaacggcttcgagccgtatctgtggctgcgccacgtgctgcgcgccttgcccaccgcgaccaacgtcgaacatttcgaggccctcctgccctggaatctcaaggctgagcagttgatcacggcgtaa

SEQ ID NO: 366334 - DNA, 126 bp, Pseudomonas aeruginosa
atggccatcgagaccgagctcgcccatcacctcttcggcgagctggccgcgaacgaggtcgagcaactccaggccttggccctccagctactccagcgcgcaacgaccagccccggcatcacttga

SEQ ID NO: 366335 - DNA, 441 bp, Pseudomonas aeruginosa
atgatgggatacgtgcccgacctgcacaagatttgggttggcacctccgaccagcagctcatggcgctgtcccacgaattcaccgggttctaccgctacgccctcatcatggaggaggcatccgaagctgatcgcaacaaggtatcgcggccctatgacggcatggccaagttctccgaagagcacaagcaagaggcggctcaactgctggtcacggcggcaacccttgaacgcggctaccaggcgtttcgtggaggcggcgacctgcgagtcttccagactcaagtcaacgagctgagccgcctgcatcggcaatggctgtctgatctggatagcttcaaaaactctctacgcacgcaaggcacagaacccaaggcattggagtacgtgaacgaagcgttcggacgccttgccgagcgcatcaagcaacttgccggttga

SEQ ID NO: 366336 - DNA, 1551 bp, Pseudomonas aeruginosa
atgggtgagtcgaaattgaagcatttgcagcgtgaggaaatgcttttgtcgtgtgccggggtgcagacggcgggcggtcgcgtgcgggttcgttgggagaccgacagtgcggccacgccgatggggcaactggcctacttcattgaatttctgacagtgaccgggttgtggtcgtgttggcaggatcgctgcccgctgtcgtactcgagcccgaacgcaccgaccaaggccgatgtgctcggtacctggctgctgtcgattctgtcggggcaccggcgctactcgcacgtcacgacgatccgctgcgatggggtcaatccggggctgctggggatgaacaaggtgatcagcgaggacgcgctgcgccgggcgctggtggcgattcccgaagacaaaggggtgagctggctcgacggccacctgcgcgagagcaccgcgcccttgctcgatgtgccctggattctggacatcgacacgacgatcaagccgctgtacggcaagcaggagggggcggtcgtgtcgtacaacccgaagaagccggggcggccttcgcacagttaccacacctacctgatggccgggctgcgcctggtgatgggggttgaggtcaaggcgggcaacgagcactcgggcagtcacaccttgcccggcttgctcaggatcctcgatgaactgcccgcccatcacaaaccgaagatggtacgcggcgactgcgggttcgggtcggacggcatcatgcgtgagctcgaagcgcgcgcgcagccctacctgttcaagctgcgcctgtcgaagaacgtaaagcgccacatcgagcgcctgttccgggtctcgggctggtgtgatgccggtcagggctgggaagggatcgacagcacgctggcactcaccggatgggaaggcacgcgtcgcgtggtcgtgctgcgccgccccctgcggggcgaaatgctcgtcgcccaggaggacaacggtcagcaactgctgggcttcatcgaggccgaccgcaagggcggaaagcgcatcaccggctacgagtacgctgtgctggtcaccaacctggaccacgaaatcctctcgctcggccagctctaccgtgaccgcgccgacgcggagaacgccttcgacgaactcaagaaccagtggggctggggcggcttcaccacgcacgatctgcatcgctgccaactgtcggcgcgcgcggtcgccctgatctacaactggtggagcctgtttgtgcgcctggccaaccccgaagcccggctcgaagccatgaccagccgaccctggttgatgtcctcggtcggccgacgcaccgagcatgcgggccagaccacgatcacgctgaccgggcagcacgcctatttcgacaaggcccgccaagtgctcatgcgcgtgtccagccagcttcaaacctggatgagcgaagctgcggagcagttcaacgccccatcggtctggctgcgctgttgcgaccatctcaagcgcaccatcgcggccatcggaccaccggcaccccttcgtttgctgattcagcatgcaaaccgggtggggtaa

SEQ ID NO: 366337 - DNA, 2958 bp, Pseudomonas aeruginosa
atggtggtcggcaacgcggaagatcagtggctgttgacacaggccgaacgcgagctggtgatgaccaagaatcgcgcgaaccggcttgggttcgccatcctgctgaccttcttccgtgagcgcggccggttcccacgtgacgagaccgaggtcgaggcgcaaggcatcgctgcgctcagcaaacagctcgacgtgcccgcgccgattgacggcgaagccttcctcaccggccgcaccgccgagcgcctgcgcgccgaaatccgcgtgcgcttcggcttccgcgagacgacggttgccgatgccgacagcctgaccatttggttgcgcgatcatgtcgctggcgaggtcggcggcgacattgagccgatgatcgagcggctggaagcacgttgccgcgaacttgccatcgagccgccgacgccagatcggatggagcggctcgcgcgtagcgcgttgcgtgcccacgaagaccgcttccacaacagcgtctttgaacggttgtcgcctgttctccgtgagcgtctggatgccttgctgcgtcccgagaaagccggcaacgaggagagtggcgctgatgctcaagatgaggccgcaggcagctcgccggccgttttgctgaagctgcgcggcagtcctggtcgtcccagccttgcaagcatgcaggacgagttggagaagctggaactgattaggggaatcgacctacctgccgatctgttcgaccgggcttcaccgcgcgacctggagcgctaccgccagcgcgtatcggtcgaggttccccgcgatctgcgccggcatcccgatgccgcgcgcctcacctggctggccgcttttgtctacctgcgtgcccgcagcctgaccgacgacttcgtggatttgctgattgagaccatccaccagatcggcgcgcgcgccgagcgcaaggtcgaacgtgagctgctggaagacctcaagcgcgtctccggcaagcagaacctgctgttcaatctggccgacgccaccctggcccagccggacggcgtggtgcgcgatgtggtgttcccggtggtcggcgagcagacgctgcgcgatctggtcaaggagtggaaggccaccggcccgacctaccgtgtcacgctgcgcaccgtgatccgcaattcctaccagggccactaccgtcgcatggtgccgaccttgctggccgccttggaattccgctccaacaacgaccgccaccgtccggtgatggacgcgctcgacctagtgaagcgcttcgccggcaccaaggtgcacaccttcccggccgacgaggacgtgccgctcgacggcgtggtgcgcggcctgtggcgcgaggccgtgatggagaaggacgctgccggccgggatcgggtcaaccgcgtcacctacgaaatcggggtgctcgaagcgctgcgcgaacgcttgcgctgcaaggaaatctgggtggtcggcgcgaaccgctaccgcaaccccgacgacgacctgccgaccgatttcgaccaaaaccgcgaggactactatcgggcattgaatctgccgctcgatgccgagcgcttcatcgccgacttgcaggccgagatgcgcggcgcgctttccaccttcgacgctgggctgaagaagaacccttacgtccggctgagcagcaagggcggcggctggatcacggtgacgccgctcgatgctcagccggatccgcccaacctgacggcgctcaaggctgaactcaacgccatctggccgatgaccagcctgctcgacatggtcaaggaaaccgacctgcggctgggcttcaccgatgccctgaaaagcccgaccgcctacgagacaatggatcgcgcggtgttgcagccgcgcctgctgctgtgcctgcatggcctgggcaccaatgccggcttgcagcgcatggccgggctggattccggcaccacggcgcgcgacctggcctacgtgcgccgacgctacatcagcgtcgatgcgatgcgccgcgcgattgccatcgtcgccgacggcacgctgcatgcccgcaacccgacgatttggggcagtggcaccactgcctgtgcatccgactccaagcacttcggcgcatgggaccagaacctcaccacgcaatggcacgtgcgctacggcggacggggcatcatgatctactggcacgtcgagcgcagctcgctgtgcatccactcgcagctcaagtcgccgtcatcgtcggaagtggcgtcgatgatcgagggcgtgatccaccattgcaccgaaatggaggtggatcggcagtacgtcgattcgcacggccaaagtacggtggcgttcgccttctgtcggctgctgggcttccagttgctgccgaggctgaaggccatccactcgcaaaagctgtatcggccggaggccggcaaagcggatgcctacgccaacctccaacagattctgaccaagcctatcgactgggactcggtgcggcagcagtacgaccagatggtcaagtacgccacagcgctgcgcctgcgcacggcggaaaccgaagccatcctgcggcgcttcaccaagaagaacgtgcagcacccgacctacaaggcattcgccgaactgggcaaggcgatcaagaccatcttcctgtgccgttacctgcacgaagaagccctgcgccgggaaatcaacgaggggctgaatgtggtcgagcagtggaacggcgcgaccgacttcgtgttctttgcccgccgtggcgagatggcgagcaaccgccgcgaggatcacgaggtcagcatgctcgcgctgcacctgatccaaaactgcatggtctatatcaacacgctgatgatccagaaggtgctggcgcagccgcactggcagggcaggttcacaccgcgcgactacgctgccctgacgccacttatctgggagcacgtcaatccgtatgggcggttcgacctcgacatgaacaccaggctcgacctgccgtga

SEQ ID NO: 366338 - DNA, 189 bp, Pseudomonas aeruginosa
atggcaatacaaagagcagtaagcctcggccataccgaagcttatgcaaacctaaccgatttatcccttgaagttggcatccctgacgaagaccttgacaacctaataagtcctatcatcaaagagctagaaaaggccggctacaatgccaaacttgatgacatcacaactcttacaattgagttctag

SEQ ID NO: 366339 - DNA, 1230 bp, Pseudomonas aeruginosa
atgcgaagagccgggaaactcagcgtcgagctgaccaagccgactgccaccgcccgcgacctgtcgctggcctacagcccgggcgtcgccgagccggtacgtgaaatcgcgcgtgatccggaactggccttcaagtacaccggcaagggcaacctggtagcggtcatttccgatggcactgcaattctcggcctaggcaacctcggcccgctggcctccaagccggtaatggaaggcaagggcgtgctgttcaagcgctttgctggcatcgatgtattcgacatcgaagtggacgctgaaagcccgcaggccttcatcgacacggtcaagcgcatttccatcaccttcggcggcatcaacctcgaagacatcaaggcgcccgagtgtttcgagatcgagcgcatcctgatcgagcagtgcaacatcccggttttccacgatgaccagcacggcaccgccattgtgactgccgccggcatgctcaatgccctggaaatcgccggcaagaccctcggcgaagccaagatcgtctgcctcggtgccggcgccgccgccatctcctgcatgaaactgctggtgagcatgggtgccaaggtcgagaacatcttcatgatcgaccgcaagggcgtgatccacgccggtcgtgacgacctgaaccagtacaaggccgtgttcgcccacgagaccgacaagcgcaccctgtccgaagccctcgacggcgcggacgtgttcgtcggcctgtccggtgccaatctgctgagcccggaaggcctcaagcgcatggcggccaacccgatcgtatttgcctgctcgaacccggatccggaaatcaagccggagctggcccacgcgacccgcagcgacgtgataatggccaccggtcgttccgactacccgaaccaggtcaacaacgtgctgggcttccccttcatcttccgcggtgccctggacgtgcgcgccacctgtatcaacgaagagatgaagatcgctgcggccctggccctgcgtgacctgaccaagcagccggtaccgaaggacgtctgcgaggcctacggcgtggactccctggagttcgggcgtgagtacatcattccgaagccgatggacaagcgtctgatcaccgtcgtctctgatgccgtggccagggccgctctcgattccgccgtggcggccttgccctatccgaaacactatccgctgcaatcggtggacgacgtgttcaacggctaa

SEQ ID NO: 366340 - DNA, 1170 bp, Pseudomonas aeruginosa
atgaatttttccctgactgtaattggacagatcctcgccgagaatcagcagcacattctcgacgcggtggagtacaagtttccttatttcggtatgcacagccgttgggccctgttgctaacagcggctgtacttggattggctatgactaccgtccttggatgttgttacctagtcagacatcgctccaaaatcaagccggatgcagaaatcgaacacgagaatctagtgcggaccatgcgagatgttgtcgcgcggctcgacgtctctgttgcggcactgcaccaggctcagagagcgcggaacgacgccaactataatgctcccagagtcccccatagtacttgccacattcaggacctgaagggctccagcgcaatggagtcgtctatccctgacaaacagatggcagctgcgaaggttggaataagcatcgccgggcacgctgatacgtgcgatgaagcgacctcacagaccggccagacggcactcgataccaccattgatgcgatggccgcgacgtgtgatggggccctgatcaagcttgccgataacatgggcaatctgggctatctcacccagctactggcgaaggagagactggccctgagcaattccgctttggccccgtcgcctgccatgacagcccagggcgtgacgggggaaacctggcgctacctaaccttcgctctcggtaatgaggcgtttgcagtcaatgcactaagcgtcgtaagcgtcgtcgtggcagatcaacttttcgttaatacgggtgtgtcgttgaagatccgccgggcgatcaagctacgcggcatgctggtgccagtgatagacctgggagcgctcttcgatctgaagccaatcaagattgcgccgcgcactcgcatcgtcattattgaattgcgtagttcagagcatttgcaagtgatcggcatcgctgtcgatgttgtcggaattgtgttggaaatatcaccggcggccatcgaacctcctgcggccatcgaaagccaggttcgccatgcctgcactattggcagggcaaaggtaggagagcactacgtgaccttgctggacatcggtagagagggactggtgaacgggctcgtcgccccgcattccgccgagccttcgccctccgttgaccgatcactggaggtcttgcctgacgggtga

SEQ ID NO: 366341 - DNA, 2007 bp, Pseudomonas aeruginosa
ttggaaacgcttgaacgtctatctctgcccggaaagttcgcgttgctcggcctattagccctaatccttattgccgccccgaccaccctgtacttgctcggagctttggatcagggccggcagactgcccaggaagcgcgtggcgtggagccgatacacgaactgctcctgctcgttcagaagctacaagagcatagctacctatcatccaccgttttgagcggcaatcggacgctagatgcggctaggcaaggaaatcaggcagaggtcgaccgtgcgttctcacaaaccgagaacgcgctgcaagaggcccaggtcgcccctgagactatggcggccttgcgacaggtaaagcagcaatggaatagtcttaccagccagatcgaccaggccaccatcgacacgccacaaagcctctcgcggcactccaaacttatcgacgcctgcttgaagatcgaggatttgctgctcgaccatttcgagctgtccctagatccagtcttcgagacctattacctgatcgccggtgccctggtcgaattaccacggacgagcgaactactcgggaagttgcgcgcgacgggggcgcaacaccttgcgctaggcgaaattcaccccgagcagcgtgcggtactgaccaaccaaatcactcaagcgttggagggatttgacaagatggcacgcgctttagccaaggtcagcaagactgcccctagcttcaggtcctggttggagccgtccttagcggagctgcacccccgcataaagaaggcgttgtcactgaccgagtcccaactgctctctacaagtgtgctgaactatccggccagcgaatatgttgccacctataccgaggctacagatgccctctttgcccttaaccagcaagcacaggaggccctcgataaggcattggaggctcgcaacaacagtaaccggcaaaacattattctcatgaccatcgccttgttagtgctgctgctggtcggtggtagctacgcctgctggatgtcacttagcttgtgcaagcaactcacagtagcccttacggccgccgagcgaatcaacgagggtgatttgagccagccgatcaatgtgctcggcaaagatgaggcggcccgcctgctgcaagcactgcagcgtatgcaagaggggttacgcggcacagtcaagcacattcaggctactgccgagcgattggattcaaccgccagggaactgaacgccacaacagtggatgccactagcggcttgaatcgccagtgcgggcaaatcgacctagccgctgctgctgtcaccgaattgaccatggcgatcgatgacgtggcacgcagcgccgcgtcggcttcggaggcgtcccagtctgcagaagtgcaatctcagcagggcttagtcggcgtctcccggacagtcgactccatcacctcactttccgacgatatcgaactcacttcagagtccctgcaggtactggcaggcaagataggtgacatcggttcagtgctggacgtgattcgtggcatcgcagagcaaaccaatctattggccctgaatgccgcgattgaagcggcccgggccggcgaaagtgggcgcggttttgccgtcgtggcggacgaagtgcgggccctagcgctgagaacgcaggaatcaacaatgcagatcgaggagatcatcagttcggtgaagcaaggcagccaaggtgccctcggcgccatggagagcagtaaaggcaagacccgggatacgctggcaatagcacgcgaagccggcgtcacgctgaatgctatcgcggactccattactaagatcaatgacaggaacctaagcattgctagcgccaccgaagagcaatcctatgctgcccgtgaggtggacagtaacctcctaaacatccgggacgtttcagcagaaacctctgccggcgccaatcagactcaggcgtccactcgggagctcgccagtttggccaacgaattgaatggcatggtgaagcacttcatcgtctga

SEQ ID NO: 366342 - DNA, 894 bp, Pseudomonas aeruginosa
ttggtcaatctgctgaccttgcgcgcgttcaggcgcgtagtggaatccaccagcttcactcgtgctagcgagatgttggacatctcgccaggtagcgtcagcaagctcgttgcccagctcgagcagcacctcggcgcacgcctactgcagcgctcgacgcgcaagatgagcctgaccgaagcggggcggatctactacgcgcactgcgttcgcgtgctcgatgagctcgaccatgccgagcgcgcagtacaacaactggtcgatgtgccgcgagggacattgcgcatcagcgtaccaacatcgttcggcatcctctggttgagcgaacggctgccagcattcctacggcaatatccagaaatccgccttgacgtagtcgcgaacgaccattacgtggacctggtggatggcggcttcgacctcgcgctgcgcatcggcaggaagcttcaggactcctcgctagtggccaaacccctcgtcgagattccgcacgtgctcgtcgctagccctgcgtacctcaaggcggtcggcatgccacgcacgccggcagacctcacgctgcataactgcctggtctatacgctgtctcaaatgccgggcgaatgggtattcggggacggaaagtcggctgtgaccgtgcaggtccagggtaatttacagtgcaacaacagcgtgatgctgcgcgcggcgctgctgcagggcgctggcattacgcagacgccgctgccggtggttgaggacttgttgaagtccgggcagctcgtggcttgcctggatgatttgcgaccgccaccgcatctcctgttcgcgatgctgccgcagccgcgcgcggtgtcgcccaaagtgcgcgcctttatcgacttcatcgcgcagcaacagggacggggggcttag

SEQ ID NO: 366343 - DNA, 543 bp, Pseudomonas aeruginosa
atgaaaactgtctccgccgacacatccgtctaccgtgcaccaatgcgcgcattgcactggagtatggctttgtgcattacggcgctctttgtctccggcgccataatggtcgagttcgacgccaaagattccctacgcgcggctttctacagcttccacaaatcaattggtgcattgatcatcgcgctgttcttgatccggcttatcgtgcggcggttaagccaagtcccgccgctctctatcagcatgccacgctgggagcaacggttagcgcattacgggcactggctgctctacgcgatgatgtttgcagcacctctgacaggatgggcaacatccgacatctatggctacggcgtgaaattcttcgatgttccattgcccaagttctttcccacacttggggcaaccactggtgccacggtcggttatgtgcacaccgtcgttacctatatcttcctcgggctgattggaatgcatctcttggctgttgcaaaacatcgttacattgaccgcgattgcgtcatgcatcgaatggcctaa

SEQ ID NO: 366344 - DNA, 729 bp, Pseudomonas aeruginosa
atgattcgatttgacatacgccgggacgcatcccgaggtgcgctgaaactggactggctggatgcgcgcttcagcttttcctttggtagttactacgatccgcaacgcaacggcttcggccctctggtggcactgaacgaagatgtcatacagccgggaatgggtttcgaaatgcacccgcacaaggatatggaaatcttcatcattccgttgtcaggggccgtcgaacatcgtgacagcctcggcaaccgtgctttcgtcaatccaggggatgtgcaaaaaatgactgccggttcgggaatttggcatagccaaatgaacgcgtcgttgtcagaggtagatcatcatctgcaggtatggctgcggcctcagacggctggggccaagcctgcagttgaacagcgtcgcttcgatacgaagcaacggataggacaatggcaagcgctggtaacgcctgatggacgggacggaagtttgtcggtggaccaagacgctatgatccatgctgccacgctccttcctggccatgttctccctcttccaacctcacagtcccgcagtgtttatttacatgttatccgtggcgccataatcgccgatgcgccactcacgaccccactcttacttaacgctggcgacgctttagcgatggcgacagccatcccagctcagattggtgcaatgtctccacgcgccgaggttttggtctttgaactccctgcggtgtaa

SEQ ID NO: 366345 - DNA, 972 bp, Pseudomonas aeruginosa
atgcaacatctcgacctgctggtaattgatcaagcactggaatgggcgcgcgccggtcactcgatctggttgtgcacggtgctctctacttatggttcagcacctcgctcgccaggtgccatgttggttacctgcggttcgggagaatacaaaggttcgctgtcaggtggctgtgtagaggaagagtttttagccagtttggggcgtggcgagtttagagatatcgcacagatcgtccgctacggtgaaggcatggaagaatgccgtcgactgcagttaccttgcggtggagtgttggtggtgctggttgaacatcgcgatccgaacattgattggctggagcatcttgaggctttgcgagccgcattagtcggtcaacgtcgcgttttgcgcaaggtcaatttgaatggcggtgcactaggactcgaaggaggaattgagcatggcagcgaacgagtacaatttctcgatgattcggtatgcattcacattggcccggctctacgcctgatactggccggcatatctcctgtagcagaagtctgtgcagacattgcaaaagcgcttggttgcgaggtaatagcatgcgaccctcgggaagaaatgctgcacataaatcttgatggggtgcaaatgcagcgcgtcctaccatctcttttcatcgctgccggtggttgccacgcggcaactgccgttgtagccctgactcatgaccctagaattgacgacctggcattaatggaggcagtgaatacacctgctttctacataggcgcaatgggctcaaatgcaacttcagccaagcgcgccgagcgtctcaaacgcattggaggtctttccgacgagcagatagatcgcctacacatgccgatcggtctcaatctcggcagcaagacaccggcagaaatcgcattggcggtaatggcagatgtattacgggtttatcgcggaaaagagcgtcatgccttgtaa

SEQ ID NO: 366346 - DNA, 639 bp, Pseudomonas aeruginosa
atgcagaatcgcaaaactggcatccgcgccttacaagccgatcgcactaaggacagcatccttcaggctgcagtccggatattcagcaagcacggcttcaccgggggacgcattgagcagatttccaagctagcaaaatccaatgatcggatgatctattactactttggcagcaaggaaaagctattcatcagcgtgctagagcacatctacgccagtttcaacgaggcggagagcaagctagaactcgacctgtccgaccctgagtctgcattgcgccacctggtggcttttgtctgggactactacctgcaccacccggagttcgtaaccatcctggcgaccgagaacctacatcgaggtcagcatgcaaagaaatcgctcaatctgcaggctttatcgggcgaggcggttggggtgttgcggccaatcatcgaggccgggcaggccaagggtctcttccgcaacgatatcgacatcaagcacgcgtacttaatgatcgcctcgctctgctacttctataactccaacctttacacgctgagctccttccttgatgaggaccttggcgacaagcgcgccaaggacgactggctccttttcattagcgacttggctctacgtggcctgcgtcgttga

SEQ ID NO: 366347 - DNA, 3570 bp, Pseudomonas aeruginosa
atgaatcattcacagcaggttcccactcgtgaccaattgctggccaaaaccggcgtccttctcattgtcgacgagattgttccaccttcgggaccagtagccaaaggcgttattcccgaggcgaaagcccgtgagttggctctctttatcgccgtcaacgatgatgggcttgtctatgcctttaacgggcacgtagaccttggtactggcatccgcacctccttggcgcagatcgttgctgaagaactagacctgcgcatggaccaggtttgcgtggttctaggcgacaccgaacgcgctcccaaccaaggagccaccatcgcgagcgccaccatccagataactgcaatacccttgcgcaacgcggcagcagaagctcgacgcttcttgctacagcaggcagcacaccgatttggcactgaggtgggcgaactgagaatggaggaaggtgcagttatcgccgtcgacggtcgactcctgacctttgccgacctcgtacgcggggacaaccaacaacttcgcatatcaggggatgctccgctcaaaagcctcgatgaatatcggctggtcggtcgtggcgctgcacgggtggacatcccgggcaaggccaccggggagctgacttacgttcacgacatgcgcctacccggcatgctgcacggacgggttgtgcgcccgccttatgccggctacgacagcggcgaatttgtcgggaacagcctacaagaagtggacgaatcctccgttgcccatattcccggcattgtcgcagtagtggttatacgcgacttcattggggtaattgccgaacgtgaggagcaagcgatcctcgcggctcaggagctacgagtgacatggaagccctggacacagaagctgcctgacatgtcggatgtagctcaagcgatccgaaacaacccccgcatccaacgcacagtgctggacaaaggcgatgttgatggcggactcgccaatgccagccaacgcctgcagcgcagctatctttggccgtaccatttgcacggttctattggcccctcttgcgccctggccgattaccgcgaggagcaggtcaaagtctggtccggaacccagaacccacatttactgcgtgcggacctggcctggctcttggagctgccagaagagcggattgagatcatccgcatggaagccgccggctgctatggacgcaattgcgcagacgacgtctgcgccgatgccgtgctgctgtcccgggcagtagggcgcccagtaagggtgcaactgacgcgagagcaggagcacgtctgggagcccaagggtacagctcagcttatggaaattgacggaggactgactatcgaaggcgacgttgccgcctacgatttccaaaccagctacccgtcgaatggcgcaccgacgctcgctctgttgctcactggctcagtggaaccagtgccggccttattcgaaatgggggatcggacctcaatcccgccctacgactacgaaaacatgcgcgtcaccatcaacgatatgacgccactggttcgggcatcctggatgcgcggcgtgtcggcgctgcccaacagcttcgcccacgagtcctacatcgacgaactagccttcgccgccggcgtcgacccggtggaatatcgcctgcgccacctgtccgatccgcgcgcggtggacttgatcaaggcaactgctgagagagccggctggaagccacgcacacagccgatgcaaccccccgccgaaggtgatgtcttgcgaggcagaggtttcgcgtatgcacgctacatccatagcaagtttcccggctttggagcagcctgggctgcgtgggttgccgatgttgcagtagaccgtcgcactggcgagatcgcagtaacccgagtggtgattggtcatgatgcaggcatgatgatcaatcccgatggcgtacgacaccagatccacggcaacgtgatccagtccaccagtagagtgctcaaagaaaaactgacctttgaagactccaaggtcgccagcaaggaatggggcggttacccaatccttacgttccctgaattgcctgacatagatgtactgatgctcccgcgccagaacgagccccccatgggaagcggggagtcggcttcagtacctagcgcagcggctattgcgaacgcaatcttcgatgccacaggcatccgcttccgcgaactcccgattaccgcagaacgagtacgcgcggctctgaatggtagcggctccaacaccgaacagaatccgacgcagatccatacgccgaaacgatcgaagtggtggtttggctcgctcgccggcctattcggcgccgccttgggcatggcggctacagcgttgccttggcgagctgagatagcgcctgtagccccgccacttgcaggcacctggtcggccgcgacacttgaacgaggacgccaactggccgcagccggcgactgcgcggtctgccataccgtcactggtggcacggtcaacgccggtggactggcaatggaaacgcccttcggcaccctctacagcaccaacatcactccagatccagaaaccggaatcggcaattggtcgttcgctgcgttcgatcgggcgatgcgtgaaggcatcagccgcgatggtcggcatctttacccagccttcccctacaccgcattccgcaacattaccgatgcagacatgcaggcgctctacgcttacctgatgtcccaggaaccggtacgccaggaggcacccgccaatcaaatgagcttcccgttcaatcagcgcccattgatgtccggctggaatgctctcttccttgggcgaggcgaataccaacctgatccgcagcgcagcgagcaatggaatcgaggtgcctacctcgtaaacggtttgggccactgctctgcttgccacacgccccgcaacttgatgggggcagagaaaggaggcaaagcctacctggctggaggaatggtagacggatgggaagccccggcactcaacgccctttcgaaatctcccacaccttggagcgaaagcgagcttttcgagtatctgcgcaccggattctccgacaagcacggcgttgcagccggccctatgggtcctgtagtcagtgagttggctaccttacccgagagcgatgtacaggccattgcgcactatctggcctctctaagtggtgaagccgaaccacgcgcggcagtcgctagcgccccggccaaggttgaccctctagtatcgctgagcaatggcgaacggattttccaaggcgcgtgccaagcctgccacagcgaaggcaagggacccaagctgttcggtgtgagcccgtccatggcagcgaataccaatgtccacagcgatctgccggacaacttgctgaaggtagtactgcacgggataccgaccccggcgactcgcgacctgggttacatgccgggcttcaaggacagtctttccgatcgtcaagtcgcagacctattggcctatctacgccatcgtttcgcttcaggtaagcctgcttgggaaggactgcttgcgaagagcgcccatgtgcgcgccaaccccggcacccattga

SEQ ID NO: 366348 - DNA, 474 bp, Pseudomonas aeruginosa
atgcaaaaaagcatctccatgtccatgcgagtcaacggcaaggaggtcgaagtcactgcgatggccgatacgccattgctcttaatcctgcgcaacgacctctgccttaatggcccgaaatacggatgcggcctgggtgagtgcggagcctgcacagtcatcatcgacggcgtggccgctcgctcgtgcgtcattccgctggccggcgccgaaggacgagaaatcacaaccttggaaggactggggagcaaggaggcgccacatcctgtgcagcaagcattcattgaggaacaagcagctcaatgcggctattgcatgaacggcatgatcatgaccgccaaggctctgcttgaccgaatcccccatcccagtgacgagcaaattaagaacgagctgtccgggaatctgtgccgctgcggcacccacgttgaaatcttgtgcgcggtgcgtcgcgccgctggccgccaggcctga

SEQ ID NO: 366349 - DNA, 486 bp, Pseudomonas aeruginosa
atgcctgcagataccgacctggcgcccggcgccgccccgcaatcgaacgaagcgccctatgatgttaccgagcagatcggtcacctactgcgcaaggcctatcagcggcacaccgcgatcttccagcagaacgcctgcgacccccagctcacctccatccagttcgtcaccctctgcgcactgcgcgaccacggtcccagctcccaggctgaactggtcaaggccacggcggtggaccaggcaaccatccgcggcatcgtcgagcgcctgaaggcgcgcaacctggtcgcactgtcccgcgatccggaggaccggcgcaaggtcattgtcgacctgaccacggccggtaacgaggcgctcgacgccatgatcccctgtgcccggcaaataagcgaactgaccatgggcagcctgaatgccgccgagcgcgtcgccatcctcttcctcctgcggaagatgaatgcgagcgaagacgcgtccgattaa

SEQ ID NO: 366350 - DNA, 1053 bp, Pseudomonas aeruginosa
atgccggttagcgatagcgaattgactcagatgttcgagcacgtactgaagctgtctcgcgtggacgagacgcaaagcgttgccgtgctcaaaagccattactccgacccgcgcacggtacgggcggcaatggacgccgcacagcgcctgaaagccaaggtctttgcagtggaactgccctcgttcaatcacccaatggcgatgggcaacgacatgaccgcctactgcggtgacaccgccttgaccggcaacctggcggcccagcgcgccctggaagcggccgatctgatcgtcgacaccatgatgctgctgcactcgccggagcaggagcagatcctcaagaccggcacgcgcatcctgctggccgtggaacccccagaggtgctagcccgcatgctccccaacgaggacgacaagcgccgggtacaggccgccgaagtgctgctcaagcaggcgcgcagcatgcgggttcgctcgaaagccggcagcgatttccatgccccgatcggacaatatcccgccgtcaccgaatacggcttcgccgatgagccaggccgctgggaccattggccgagtggcttcctgttcacctggccagacgaggacagcgccgaaggcaccttggtattggatgtcggcgatatcctgctgccgttcaagacctactgccgcgagcgcatcaccctggagatcgaaaagggcttcatcaccggcatccatggcggtttcgaggccgagtacctgcgcgactacatgaagtacttcaacgaccccgaggtctatggcatctcccacatcggctggggtctgcagccccgcgcccaatggaccgccatgggcctgcacgaccgcaatgacggcatgtgcatggacgcccgcgccttctacggcaacttcctgttctccaccggcccgaacaccgaggtgggcggcaagcgcaagacgccctgccacatggatattccgctgcgtaactgcgatatctacctcgatgaccaggccgtggtgctgggcggcgaggtggtggcccccgaagcgtcgaaggcccgctag

SEQ ID NO: 366351 - DNA, 1206 bp, Pseudomonas aeruginosa
atgcgtgcacaggcgccgcaccaggcgctgggcgagtacgccaagcatcgacgaggcgagcaggaacggctcgacccccatgtccaccagccgcgtcactgccgacaccgcgtcgttggtgtgcagcgtggccagcaccagatgcccggtgagcgaggcctgcacggcgatctgcgcggtctccaggtcgcggatctcgccgatcatgatgatgtccgggtcctgccggaggatcgcccgcagggctacggcgaaggtcatgtcgatgcgcgcgttgacctggatctggctgatccccggcaggtcgtactccactgggtcctcgacggtgaggatgttgctggtgctggcgtcgagccgcgccagggcggcgtagagggtggtggtcttgccgctgccggtgggcccggtgaccagcacgatgccgtgcggctggcggatcaggttgtccagcggcgccagcacgccgggagccatgcccagggtctccagcctcaggcgtccggcctgcttgtcgagcaggcgcatcaccacccgttcgccgtggccggtgggcacggtggagacgcgaatgtcgatcggccgcccggctacccgcaaggcgatgcggccgtcctggggcaggcgtttctcggcgatatccagctgcgccatgatcttgatccgcgacaccagcgccgcgtgcagcgccttgcgcggcgcgaccacgtcgcgcagggcgccgtcgacgcggtagcgcaccaccgaatgggtctcgaagggctcgatgtggatgtcgctggcctcatcgcgcgcggcctgggtcagcagcgcgttgatcatgcggatcactggcgcgccatcctgggtgtcgagcaggtcggtaacctcggggatatcgtccatcaggcggtcgaggtcgacctcgctctccgccgcgccgaccaccgccgcggcgctgccggtatcggagtaggcgctggccagcagggtgtcgagctcgtcgtcgcggacgctctccaggctggccggcgcatgccgctggcgcacctcgctgatcgcccagccgggcgtccgcgggctgaccagcagggtcgcgccatgctcgcccggccgcagcaaggcgcgctgcgccttggcccaggcgtagggcagcaggctcatagcggcgccgcctcgcccagcggtaccgcgcgcagcggccgcgggctcgggcgcaagtcgtag

SEQ ID NO: 366352 - DNA, 2187 bp, Pseudomonas aeruginosa
atgagctcgaccggcctcaccttgcctgacgcccacccgcatcccacctcgcgcctgcgccgcagcgcactcgccgccgcgctgctggccggcctctgcccacccctgcatgccgccgatgccccggccgacgtcgatggcgcgcgcatcgctgccgccgaccaggagccgggcaactggatgagcaccgggcgcacctacgacgagcagcgctacagcccgctcaagcagatcgaccagggcaacgtcgacaagctcggcctggcctggagctacaagctggacatcgaccgcggcgtggaggccacgcccatcgtggtcgacggggtgatgtacaccaccgggccgttctccatcgtctacgcgctggacgcgcgcaacggcaagctgctgtggaagtacgacccgcagtccgaccgcagccgcgccggcgaggcctgctgcgacgcggtgaaccgcggcgtggcggtgtggaagggcaaggtctacgtcggcgtgctggatggccgcctggaggccatcgacgccaggaccggcaagcgcgtgtggagcgtcgacacccgcaccgacccctcgcgcagcatcaccatcaccggcgcgccgcgcatcgtgaagggcaaggtgatcatcggcaacggcggcgccgagttcggcgtgcgcggctacatcaccgcctacgacgccgagaccggcaagcaggactggcgcttcttcaccgtgcccggcgaccccaagcaggcgccggagaacaaggccatggagatcgccagcaagacctggttcggcgacaagtaccccgagcagggcggtggcggcaccgtctgggactccatgtcctacgaccccgagctgaacctgctgtacatcggcgtgggcaacgcctcctcgtggaacccgcgcatccgcagcgagggcaagggcgacaacctgttcctctcgtccatcgtcgccatcaacccggacagcggcgagtacgtctggcactaccagaccaccccgggcgacgcctgggacttcaccgccaccgcgcacatcatgctggccgacctgcccatcgacgggaaggtgcgcaaggtgctgatgcagtcgccgaagaacggcttcttctacgtcatcgaccgcgccaccggcgagctgctctcggcgaagaacatcatcccggtgaactgggccaagggcatcgacatgaagaccggtcggcccatcgtcgacgacaaggctgcggcctactggaaggatcccgagcgcaaggcgctgctgatccagccggcgttctggggcgcccacgactggcagccgatgtcctacaacccggccaccggcctggtgtacatcccggcgcacatcatgtcggcctactaccaggacgtggagggcgcgccgccgcgctcgaagttcaagagcatctaccagctggacgtcaacaccgggatgatgcccgaggacccggagggcctgcgcaaggtcgccgactcctggtccggtaagctgatcgcctgggacccgctcaagcagaaggccgcctgggaggtgccctacagcaccatcttcaacggcggcaccctgagcaccgccggcaacctggtgttcgagggcaccgccgacggccgcgtggtggcctacgccgccgacagcgggaagaagctctgggaatcgccggccaacaccggggtgatggccgcgccggtgacctacgaggtggacggcgagcagtacgtgaccttcatggccggctggggcggcgccttctccaccttcgccggcgccctgtcgctgcgcgctggggtcaagcccaacgcccaggtgctgacctacaagctcggcggcagcgccaggctgcccgaggccaagtacaagtgggccggacgcaagcccgagccgccgaagctgaccggcaccaccgcgcagatcgaccagggccgtgagctgttcaacgccagctgctcgcagtgccacggcatcaacgccatcagcggcggcgtactgcccgacctgcgcaccctcagcgccgagaaccaccagcgcttcctcggcatcgtctacggcgggcgcatccccgacggcatgccgtcgttccagggccacctcgacctgcagcaggccgaggcggtgcaccagtacctgatcaagcgcgcctacgacctccaggaacagctggccgccgcgcagaagaccgccggcaagtga

SEQ ID NO: 366353 - DNA, 1914 bp, Pseudomonas aeruginosa
atgaacgagcatgccctggacaactgcccgaacgacctcgccagcttcatcgccgaccacttcggcgagcgcgacctgcaaccggaggacgccatcgcccgctcctggtaccgcagcgtggtgcagcaccacctggacccgcgcgccagcgccgagaagcacatcctcaccgccggcgaaatccgcgagcaccaggcccagcacgaggaatacctggccatcgccggccagggcgtcagcggcctggcccggcgcgtcaccccggccggcttcgccgtgctgctcagcgacgagcagggcgtcaccctcgacgcccgcctgccggcgcagcgcgaccgctatacccaggccgggctgatcgtcggcgcgcgctgggacgagtcggtggccggcaccaacggcatcggcaccgccctggccgccgccgcgccgctgaccatccaccgccaggagcacttcctggtcagcaacttccgcctgagctgctcggtggcgccgatctacgacgcccagcacaacctgcgcggctgcctcaacgccacctgcctgaacagcggcgggcccaaggaggcgcagtacctcaccctgcaactggtcatcctctacgcccggctgatcgagaacgccgccttccgccagcgctaccgcgaccgcctgacgctctcggtgaaggctcgcgacgaggtcgccgacctggccgccgagcaactgctggccctggacgagcgcggccgggtgatcggcgccaaccacgccgccttcgccgccagtcccggcgagctgctgggcagccgcatcgagcagttgctggccagcgacctcgaccagctgctggccctgagccagggcggcgcccgcgccgtgcgcctgcgcaccctgggcgacgaggcggcggtggaggtcggcctgcgcatgcccgccggcctgccgcggcgcagcgcctcgccggcgccggccaaggccggcgagcacccggacctggcgcgcctggccggcgccgacccgcgcctgcaggagggcgtgcggcgcctgcgcaaggtgctggacaagggcatcgccatcctgctcaacggcgagaccggcaccggcaaggaggccttcgcccgcgccatccaccaggccagcgcgcgccgcgccgggcccttcgtggcgctgaactgcgcggccatccccgagagcctgatcgagagcgagctgttcggctaccgcggcggcagcttcaccggcgccagcaagaaaggcatgaagggcaagctggaactggccaacggcggcaccctgttcctcgacgagatcggcgacatgccggcgcacctgcagacgcgcctgctgcgcgtgctggccgagcgcgagatcctcccgctgggcgccgagacgccggtggcgctggacgtgcaggtggtctcggcgacgcaccaggacctggccgcgatgatccaggcccgcggcttccgcgaggacctgttctaccgcctggccggcatgaccctgcaactgccggccctgcgcgagcgcagcgaccgcgaggcgctggtcgagcagttgctggccgccatcgaccccgcgctgcgcctggcgccggaagcgcgcgaacgcctgcgcgcgcagccttggccgggcaacatccgccagttgctcaattgcctgcgctacgccgcggccctggccgaggacggcgtcatcgacctcgactgcctgcccgccgaactgcatcagccggcccccgtcgtggccacgcccagcagcgccctggccgcacgcctggacgacaccgaggcgagccacctgctggccgcgctgcgcgagcggcaatggaacatcagcgcggtggccgagcacttcggcgtggcccgctcgaccctgtatcggaagatgaagaagcacggcatcgtccagcccaacgcgttgtattga

SEQ ID NO: 366354 - DNA, 915 bp, Pseudomonas aeruginosa
atgcacatccgtattctcggttcggccgccggtggcggcttcccgcagtggaactgcaactgccgcaactgccacggcgtgcgcagcggccaggtgctggcgcagccgcgcacccagtcgtccatcgccctgtccgacgacggcgagcgctggattctctgcaacgcctcgcccgacatccgcgcccagctcgccgccttcccggccctgcagccggcgcgcaaggtgcgcgacacggccatcgccggcatcctcctgctggacagccagatcgaccactgcaccggcctgctcagcctgcgcgagggctgcccgcacgacgtctggtgcacgcagatggtccaccaggacctgaccagcggcttcccgctgttcaacatgctgcagcactggaacggcggcctgcgccaccacccgatcgagctggacggcgtgcccttcaccgtgcccgcctgcccgaacctgcgcttcaccgccatcccgttgcgcagcgccgcgccgccgtattcgccgcaccgccacgacccgcacccgggcgacaacatcggcctgttcgtcgaggacctgggcagcggcggcaaactgttctacgcccccggcctgggccaggtggacgaggcgctgctgggctggatgcgccgcgccgactgcctgctggtggacggcaccctgtggcgcgacgacgagatgctggtctgcgaagtgggcgacaagctcggcagcgagatgggccacctggcccagagcggccccggcggcatgctcgaggtgctggacggcgtgcccgggccgcgcaaggtgctcatccacatcaacaacaccaaccccatcctcgacccggcctcgcccgaacgcgccgaactggacgcccgcggcgtcgaagtggcctgggacggcatggccatccacctgtag

SEQ ID NO: 366355 - DNA, 1146 bp, Pseudomonas aeruginosa
atgcgcaattctggatcgagctgcactgaaggcgccggcccgccgctgtggctgctggccgagctgacctaccgctgcccgctgcagtgcccgtactgctccaacccgctggacttcgccaagcagggcggcgaactttccaccgccgaatggatcgaggtgttccgccaggcccgcgagctgggcgccgcgcagctgggcttttccggcggcgagccgctgctgcgccaggacctcgccgagctgatcggcgcggcccgcgggctgggcttctacaccaacctgatcacctccggcatcggcctgagcgaggcgcgcctggcgcagttcgccgaggccgggctggaccacatccagatcagcttccaggccgccgacgaggaggtgaacaacctgctcgccggctcgcgcaaggccttcgcccagaagctggccatggcccgcgcggtgaaggcccacggctacccgatggtgctcaacttcgtcacccaccggcacaacatcgacaacatcgggcggatcatcgagctgtgcatagagcttgaggccgacttcgtcgaactcgccacctgccagttctacggctgggccgaactcaaccgcgccggcctgctgcccacccgcgcgcagctggaacgcgccgagcgcatcacccacgaataccgcgagcgcctggccgccgaaggcaacccctgcaagctgatcttcgtcaccccggactactacgaggaacgccccaaggcctgcatgggcggctgggccagcgtgttcctcgacgtcacccccgacggcaccgcgctgccgtgccacagcgcgcggcaattgccggtgcagttccccaacgtgcgcgagcacagcctgcggcacatctggtacgagtccttcggcttcaaccgctaccgcggcgacgcctggatgcccgagccgtgccgctcctgctcggagaaggaacgcgaccacggcggctgccgctgccaggcctacatgctcaccggcgacgccgacgccaccgacccggtgtgcgccaagtcggcccaccacgggaagattctcgacgcccggcgccaggccgaggaagcgccgctgggcctggaccagctgacgtggcgcaaccagcgcgcctcgcaactgatctgcaaggcctga

SEQ ID NO: 366356 - DNA, 1833 bp, Pseudomonas aeruginosa
gtgcgcagcctggcccatggcgactggcccagcgcctggagtgccgagcgcgcggtggcggcggggcgcgacttcgccgaactgcacgcggcccacggcgggctgctgtggctggagttcgaaccgcgcagcgcgcgttgccgcctgtacctgtggcgcgacggcgcgctacaggagctgacgccgcccggcgtctcggcgcgcagccgcgtctatgaatacggcggcggcgcctgctgcgccacggccgagggcgtggcctgggtggaggagggcgaccagcaggtgcgctggctgcgcttcggcgaggcgccccggcagttgaccgagcgcccgcagtgccgctatggcgacctgcactacgtgccggcctggaatgcgctgctggcggtggaggaaagccgcgagggcgatgccgtggtccaccgcatcgtgcgcctggacgccgatggtgcgcgccaggtcatcgccgaaggcgcggacttctacgccgcaccgacagccagctccgacgcggcacgtatcgcctgggtggaatgggaccgcccgcaacagccctggaccgccacgcgcctgtgcctgctgcgggacggtgtgcagcgctgcctggcgggcgagggcggcgaagaatccatccagcaaccgcgcttcgacgaccagggccgcctgcactggctcagcgaccgcagtggctggtggcgccccgaggctgaggacgggcagacgggcgccttcgccttcgccgaccacgccccggcgccctggcagctgggcgggcgcagctacctgcccttgcccggcggggaaatgctgctgagccgcttcgaggaaggccgtggtctgctcatcctgcgcgccgccgatggcagcgaacggcgcctggccccggatttctcgcgcttccgcgccctggccgccgacgccgggcactgctactgcatcgccgccgccgaggaccgcctgccggcgctgctggccatcggccgcgagagtggccaggtgcaagtaatcgccggcggcgaacatccgctggacgaggccgagctatcgcgcccgcaacccttcggctacccggtggccggcaacgagcgcggccacggcttcttctacccgccgcgcaacgcccagtgccgcggcccggcggggcggcggccgccgttggtggtgttcctgcatggcgggcccacttcggcctgctacccggtgttcgatgcgcgcatccagttctggacccagcgcggcttcgccgtggccgacctcaactaccgcggcagcgccaatttcggccgcgcctaccgcgaacgcctgcgcagcgaatggggcagggtggaggtgcaggacatctgggcggcggtggtgcaactggccgccgacgggctgatcgaccgccagcgggtgttcgtccgcggcgccagcgccggcggctacagcgcgctctgcgccctggccttcgtcggcggcttccgcggcggcgccagcctctacggcgtcagcgacccgctggcgctggggcgggtgacgcacaagttcgaggccgactacctcggctggctgatcggcgacccgcaacgcgacgcccgccgctaccgggcgcgcacgccgctgctgcacgctgcgcgcatccaggcgccggtgatcttcttccagggcgagctggacgccgtggtggtgcccgagcagacccaggccatggtcgccagcctgcgccagcgcggcctggccgtggaatgccacctgtaccccggcgagcgccacggcttccgacaggcggccaacctggcccacgcgctggatgccgagtggcgcttctaccgcgcgctgctgggcggctga

SEQ ID NO: 366357 - DNA, 534 bp, Pseudomonas aeruginosa
atgagccacgacctcagcctgctgcgtaaattcgtctcgccagagatcatcttcggtgccggctgccggcacaccgtcgccaactatgccaagaccttcggcgcccgcaaggtgctgctggtgtccgaccccggcgtgctcgccgccggctgggtgggcgacgtgcaggccagcctggccgggcagggcatcgagcactgcctgtacaccgacgtctcgcccaacccgcgtgtggaagaagtgatgcgcggcgccgagctgtaccgcagcgaaggctgcaacgtgatagtcgcggtcggcggcggcagccccatggactgcgccaagggcatcggcatcgtcgccgcccacggccgcaacatcctcgagttcgaaggcgtcgacaagctgcgcgtgcccagcccgccgctgatcctcatccccaccaccgccggcacctcggccgacgtctcgcagtttgtcatcatctccaaccaggacgagcgcatgaagttctcggtggtgagtgtcgttttcagaagacggctgcactga

SEQ ID NO: 366358 - DNA, 702 bp, Pseudomonas aeruginosa
atgatcttgtccagcgttaaggatcgggctaatcctccatttgatcctaatgctagcaaaattacgcttcctgttatgttagtgcagaccccgccatcggcagatgaagggcgtttgtatagccgtattctggaaaatttgggcttgcacgttgctgatcgcgagccggaagacgctaagttgaggcgaataaggattgtctttgagaaactagaggttcagatgttgatcatggatgatttcctcaatatcgcttccagctcaatatcgcgtcggcggaggtttcttaatgctctgcgaaacctcagtgtcgaacttgcaattcctatcgtcgtttctggtacgcctgagattcaaaacatcctggcggttgatgcctccatcgcgaataggtttaagccaatttttgtcaggaagtggcataaagatcggttggaggaattcgctaggtttgtcttgacgatcatgccgcgctaccaattaaagggcggcatggaaataatgcagcgtaagacgcttgagaatcttctgatgttcagtgaaggtttactgggcgaagctgtagaaattcttgaactgttggctgagtgggcggttcgcagcggaacggagaaagtgacagcagacctactgacaagggagaatctatatgcgttggggtatgtgatgccctcggacagaacccgacaactggctgaataa

SEQ ID NO: 366359 - DNA, 330 bp, Pseudomonas aeruginosa
atgtcaggctccagtactacccgcgacgattaccccacctataccgacgcatgcgatcagctcaacttcaccgcacaactcgcttccccgaaggaggaagtcgttgagcaactggaggagggctgcgttctcgacatcgtcactggcgagcagaatggacaggccgtagtgcatgcgctttggcaggggcaagtcgcgggaggaatcgccgcccagcaactgcagcgacttcgccaatgtctggcggaaggaactatctatgccgctcgggtgctgagcatcaataacgggcaggtccgggtacgcgtcttccccgccaatattcactaa

SEQ ID NO: 366360 - DNA, 168 bp, Pseudomonas aeruginosa
gtgtacgtaatcaaacgctacaccctgtgggacctcgactgcatccagctggaatccctccagagccgctctatctcgcatgacatagagcgcctcgcgatccaggtagctgtgcagggatacgtcgccgccaattcgcgcgatcgcagttgctgcacgccctgctga

SEQ ID NO: 366361 - DNA, 747 bp, Pseudomonas aeruginosa
atgtctcgcgcctctggcgagacgccagaagcaatggccaggcagcttgccaacgaggccggcgctgaagtggtcgtgatcaaaatgggccccctgggggccttggtgtacgacaacgggagcgtttctacagtccccgcatatcgaaccaagcacgtatggaaaatcggctccggagatacgtttgccgctcacttcgcctatgcctggatgcaggagaggcgttcacctcgtgatgctgcagatatcgcgtctcgggccacggccttctattgcgaatcccagggccacccaagccggaaacaactggatcagttcagtcccgagccgttgtgcgcttctgaacggtatcgggatggttaccagcctcaggtctacctcgcggggcccttcttctccctggcccagctttggttggttcgtgaggcccggaacgacctaagaggaatggggctgagagtattttcgccataccacgacgtcggacgcggctcggctgacgatgttgtggagaaggacctgcaaggcattcgggactgcgacctgctttttgctatcggcgatggactggatgccgggactatctatgagattggctacgccagagccctggaaaagcccgtggtgatgtactcggaaaacgagtcagaggaagacaagaaaatgatggaaggatctgcctgccgaattacagacgactacgtgtcggcggtctatcagacagtttgggcggcagcggagctatga

SEQ ID NO: 366362 - DNA, 606 bp, Pseudomonas aeruginosa
atgaaagttgccctcttgctctccggtggaatggattcactctcactcgcctggtggaaacgtcccgatctggcgttcacccttgactacggacagctggccgccaaggcagaaatcgcggcgtcccgcgccatctgcgagcgccttggaatcccccatcatgtgctggaaattgattgccgcgcccttggctccggggatatggccggaagcactgctgatggcctggcaccggcatccgactggtggccataccgcaatcagatgctggttactctcgccgccatgaaggccatttccttcggcgttacgcacctttggttggggaccgtcaaatccgatggatcgcaccaggacggtacgcctgcatttgtccgagccatcagccagctaatggccctgcaggaaggcggcatggtcgttgaagcgcccgcgatcgagttctcgactgcagatctggttcgggtatcgggaatacctgcggagcacttggcttgggcgcatagctgccataaggcggacgtgccctgtggcaactgtcgcgggtgcaacaaatacttcgccgtgttccgagaggtcggttatgacttggatcgacctgggtaa

SEQ ID NO: 366363 - DNA, 834 bp, Pseudomonas aeruginosa
atgcaacacggagccatttttctcgatagggccgtgatcaacgttgagttcccgatgccagaagcggaagtgcttcctggagtgccgtggggctcgattgacgcgtttcctactccagcctactgggcgtaccagatttacgcgcggcgggttcagggtaatcgcgtcaactacaagcttggggcgaccctgaaagaagaggtaggtgcctgcctgcttggtggccatggaatacccgcaagcgttggcctagctgcatttcgtcatgtgaagcagaaaggagcgtttggcgatgtgccgccgtccgaagaaactcttttagagtggctacatgagcccctggaagtggatgggcggcaaatccgctaccggttcgccaaacagaaagcccgttacttagcagcagcactacacaagctggcaacagaagaggcgccgctcggctctgggaaggcgctgcgcaattggctgttgtcggtccccgggataggctacaagaccgcttcgtgggtcgctcgaaattggctggacgctgatgacgtggccatcctcgatatccacatcctccgagccggattgctgggcaagttcttccaagaacgcctgaccgtggaacgccactaccttgagctggaggagcaatttttgcgctttagcgaggggctgggcgtacgggcgtctgaactcgatgcactgatctggctggaaatgatgtcctccccagaaacggtacacagcatcttggggatggggcacacctcacctgctcgcagtgggcgaagcagagccaagaagagccaaccccacacccaccaactggcgctgcttggctag

SEQ ID NO: 366364 - DNA, 678 bp, Pseudomonas aeruginosa
atgaaatatccaggcggaaaaggcaagtgctaccagcgcttgatcaatctgatgcctccgcatcacacctacattgagtcgcatctgggcggtggcgcggtcatgcgccacaagaaagccgcagctcgaagcatagggctggacttagatcccatagtaatcaaccgctggcgaaacgagtttcctgaagtctgcgaattgcaccagacggatgcagtggccttcctccagacgtacgaatttcaaggcgatgaactcctttacgttgatccgccctacgttccggagactcgccggcgagtgaaggtgtatcgctgcgactacgcccatgacgaccacctccaactgctgcgactcctgatgacgctgccctgcaaagtcatgctttcgggatacgactgcgagctctacaacgcggagctggacgattggcgcaaggtcagctttcccgcaaagacacatgtcgatgtacgggaagaatgcgtctggatgaacttcgaaccccagagccggctgcacgacgcgcgctacatgggcgacacgttccgtgatcgccagaccatccagcgccggcaagcccgtctaaggtcacgtattgaccgtatggaccccaccgagcgccacgacctgctgcagtggatgcaggagaactatggttgtaccgaggaggtcgcctga

SEQ ID NO: 366365 - DNA, 1032 bp, Pseudomonas aeruginosa
atgccggctatagatctagatgacgcaatcgttttgccggctggcctggggactagcaccccgcacgctctgttcactttgtgctcccaaattgccaatagtggcaacgacatcgtccttgacgcgagcaaccttaactacgtggacccgttgggtatggcgacgttgagagccttgttcgagcaacagatcgaaaccaagcgtatatctattcagtttttgtctaagaatttgacttcttatctggctcggatggatttcttcaagggtctcgacattgagggagtcgatctcaaccagttcgcccgcaggaatgaccgcgcgaactcgctcgtcgagattacgaaggtgtcggaacacgcccaagctgaagccgtcgcgtctcgtcttgccaacgcaatcaccggcaagctcacccgttctgaccctgatgcgccggtcgatgaacagaccggccgcaacgagttcgactcctatagagggccgcttgagtacgcactcaaggaactgcttgaaaactcactcacccacgcacgacgcgaggggcggatagatgcagctgtttgggtcacctgccagttctatccaaaactgaaccttgtccggatggcgattgtcgacaacggatgcggcttccttgcaacgctccggaaccatcccgagctggcagagcgcacggatcgtggcgccatcgaagccgctctcaagccaagggtgagctgcaatcgcggtgcgatggcaaacatccttggcagtgagaaccagggagtaggtttaacaacgaccgcgaaaattgccgaaacggcaggcggaggcctcatcgtggtgagtggtcgagcaatccacgacactcagcggaaccgctttgatgagatgcacgaaacagggtggcaaggcgtatcgatcggcttcacctgccagcgggaaagcctccctggcatctcgatcagcgctttgctacctagcgaggaagatgaaaattcagatgctcaagatcaccaagaccttgaactggacctcgattttcgctag

SEQ ID NO: 366366 - DNA, 777 bp, Pseudomonas aeruginosa
atgcgcacgctgacctggtgcgtcacgatcacccgcaccgaattggtgtccgcgacgttgtcatccaggcacacccatccatcccgagatgaattcagctgcttatctgggacagtagtgctcgtacccagcaatgggccgggtgttgctgggtacgctcatgccagaccagtagcttgcgaaagcctgggatggccagcggcggttccagcacctgcaggccgtccccgggccgtaccagcctgcggggaaggactgcgatcaggtcaccgctgcgcaagacctccagtaacatcaggaagctgggtaccgatagcgacacgcgtcgttcgcggccaagttcagccagcgcctcgtcggtcactccgcgaaaggcatcacctgccatcgagacgatggcgtgttctagggcacagaaacgatcaagatccagttcgctggcggctgggtgggaggctctcgatgaagatcacagcaatggaacaggccgaatcggtcagtgatgttctatgcgacgtttgtggcgctagcacgcgtgttgaagggtatggattgcaatttggcacccttcgcgccaactggggctatggctcggcccatgacggtgagtgctatgaagtccatctgtgcgagccctgtttttttgggacgctttcaggcctcagacgcgagcgcatggtgaacttcatgttcagtgataaggaccaagacctcagcgattttgggcgcgttgctcgcgatgattttttcaatgacggcggcagctcgacctcatga

SEQ ID NO: 366367 - DNA, 486 bp, Pseudomonas aeruginosa
atgtctgaagaaatcaatttggcgcctggcggcgccccgcaactcaacgcagattcgtacgatgtcaccgagcagatcggccacctgctgcgcaaggcctatcagcggcacaccgcgatcttccagcagaacgcctgcgacccccagctgacctcaatccagttcgttaccctctgcgcgctgcgcgaccacggtcccagctcccaggccgaactggtcaaggccacggcggtggaccaggcgaccatccgcggcatcgtcgagcgtctgaaggcgcgcaacttggtcgcgctgtcccccgatcaggaggaccggcgcaaggtcattgtcgacctcaccgcggccggtaacgaggtgctcgacgccatgaccccctgtgcccggcaaataagcgaactgaccatggacagcctcaatgccgccgagcgcgtcgccatcctcttccttctgcgcaagatgaatgaaagcgaagccacagccagttga

SEQ ID NO: 366368 - DNA, 267 bp, Pseudomonas aeruginosa
atgggcgcccgcgccttctacggtaacttcctgctctccaccggcccggacaccgaggtaggcggcaagcgcaagacgccctgccacatggatattccgctgcgtaactgcgatatcgacctcgacgaccagtccgtggtgctaggcggggagcgacgcgtcgacggcccactagccctcggccaaggcttggttatactggccgggctctccagtcgggggccgccagttcatccaaacctattgctcaacccattacatgtctga

SEQ ID NO: 366369 - DNA, 1812 bp, Pseudomonas aeruginosa
atggaagaagcagttgagcatcggtccctcaaacgctcaggagtgtggcgaattgccggctaccgatacctggagcagcgtgaatctgctgatgcatacgaccttcggattcaactcaccattggccgggtcgctgaccaactgcttcctgccagcaaccctggctccatccaaggtacccttgaggaagtccttgttcccatcggcgaactgccccgcctctgcctcaacagtctcatcgtcgacggcatactctcgaatcagcgcaagcagctagcaaagcaagaagttttcaccaaaacgctcaatctggataggaacaacatcaaggtcttcaaacgcttttttgaagagcaacagacccctattatccctattactcagcactccaccccagaagacgacgaaatcctgtatatcgcagttggggacggtgaagatcaatacgcggtgatcattccctcagtcgaagtattccggtttttttacgccacttccgacacgctcaccaagacaatactgagcgattggattctcgatccaacgctgcacatatttgatccggaaaaatcaagcctagataaacgaactgcacggctatggctacgaaaagacatgcagaacgcagatatccttcacatcgccaggttcatcttcgacgattacgcgctacaacaagcacaaaacattcagcttaatcggatgaaacaggctgccggatccaaaaaactcgcaattcttgccataccgccaattcagggtgaggtcgagctgaaactattgggacgttacatcgaccagggaagatttcttgtcacgcaaataatcaattgcaactggtccccattttttgacaatctgctatggagcggtgacggcagagcgcaaatcttgtggaaagacaatgaaggagttgggcaatctataaagctcactaaaaccatctcctccccacgtgcattgattgatgagccatccgataacgataacgctccttcacgcatccaggacccggaaattgctcagaggtttccgaacctttgtggtgttcagacggagaaaatcatcaaagaggaaagcaccaatcatccggccagacgcagggttaacagagaagagactgtagactttggaacagtgattaaaggacctgacagaggcggcgacctccgtccttcacatatacacggctccgacgcgccaacattgccagattacgctgaagagtttgatgcatccgaagatacccatgaagagcttgaaccgattatgggtgacaaggacaatcagtgcatcacaatacttagactactgaatttcgccaacaccaaatcaatagcaaaggtcacttttataacggcctgtcgaaatagggtaattgcactaaccccagaaaagaatagtgaattaaattcattacccccagaaattttcgggaaaaagaaagcttgtctttacaccaaccttttgaaatcaagccgaagatacgcgttaattgcagaaataagttttgaagaccgcattcgctacatagttgagattcagaaacgcgacaatcaagacatctcaaccgctgttatttggagcccgagaggcgaagccattgccacgaaagacctgtacaacctcttaattgactgcgcatgctcaggaaactcgaagctacctcgagcagataggctacaactgtcttggggacgattgcgtcatactgatacgcgaaaggtcgactgggacaatcccaaggaggtggtgaacaagttcttgtacaagctcttccaagtaaacccacaaccaccttcggcgggttaa

SEQ ID NO: 366370 - DNA, 825 bp, Pseudomonas aeruginosa
atgcagaagattgatctcatcgacttgcttgaccgcgtagtgaccagcgttgaggcggctggtgaacttctaatagccgagtgggcgcgcccagaggggcctagaggttccggctataaggcggaggtcgaccttgagatagagcagtttctgcgtccagagctactgcatttcttggattgcgacttctggggtgaagaaaccggccagatcgtgacgggtcatcgatggtgctgggcagtcgatcccaacgatggcaccggcgacttcctgaaccggcgaattggctcgtcggtatcagtcggattgctgagagactcaatcccggtcctaggggtagtgtatgcgccagttaccgacgagcttggccgtgactgcatcgcctgggcggagggacttccccatttgctgcgcaatggccgcgcggttgcaaatgatctgagtcagcagcacctgtcgggagacgcacgcgtcatggtgagcgctgccgcagcgtccaagcctcgcttgaatgccgaactctgctccccagcacaattcattccgatgcccagtattgcctaccgtttagcccgtgtggccgcaggagacggtgtatgtgccgtgtcgctgtatccactttcggctcacgatgtggtcgccggccatgcgctgctccgggcaagtagaggtgttctgctcaaaccaaatggtgattcgatcaattacggagccgggtccaacttgggcgcagtcgccagcggctgttttggcggggcagttgaggcgtgctcatcattgttggtccgcgattggggcagagcactgcggcaggacgaaacttga

SEQ ID NO: 366371 - DNA, 1416 bp, Pseudomonas aeruginosa
ttgcctaaggtcagcccgcgagagtttgtcacctatctggcgtccgaatacgagcgctacggtcaggtttccgatgctcacaagctcaacaagctatccgaagatgaagaaaacttctggcagtcatatgcgctgcatgccagaaggggcattaagcatgtgctggaactgctgtgccgctctaatatggcggctggcaaggtcgccaaaacccaagccgagcaggaagacgcgatctcgatggtcttcattgcggctgaagagttggtcagcctgtatatgaggagcgacaattacaggggcttcttggacgaagtcacgctgacgctcgatccgagccagtccacgtacttccatgtggaagaggatggcaagttcaggtttgacattcgtgaatcggttcgtgaccttgaaaaatacgtgccgtctcccatgttcctccaggacacggacgcgcacgccgagatcctggacgcaagcttcgtcgagacccttggcctgagctacaacaatacgctgagcacgcttgggtggatcatcgactactttagcgacaagcagaatcccgaaacgttgggcatgttcgaatggaacgaagcgatcgaaacgatcgccctgaatttccgtatcacttcagagcaggcggagctgctgctcaatggtttttgcctgagcgcgcaaaccatggaggatcgggagctgtttcgcccaaaacaagagtatcgcgcgtacaaacgagctttcttcaaagatcccgttgatggcgttgactgggtatttttctcccggcgcatggcgctggagtgtctaaacatcctaatcaatgacgtgcctttcagaaaattgccgcccgagtggcagtccgtgagcgtgaaaaatgcactcgacgtcttgtctcttaaagctggtcggtggttcgagcatgtcgtagagcggaatcttgaaaccttgggcattgccggatcatcttcggttaagaccttgtcgctcggtaacggccagacgctgaagattccatttgaagtgggtgagattgatttccttggctttgatgaagcgcaaaaattgctggtgatcatcgaggtcaagcaggtcggcttctcgaccgagcctcgaatgttccgtgatgatcaatctaagttcatcgatggctcgagcagctatagcgctaagttcatcaaaaaatacaactgggtgctgaagaacgtggaaagtgtcgaaaaacactttgcccacaaattcaatctggacaccaagcttgagcaggctggctacgcgatggtcacgttgtaccctactatcgtgtccaccaagattaaggatttctcctgtgtgtcgatcagtgagtttatgagcagatcccagggcagcgacgcctggccgttcagcaaaatccaactgaaaaaaccagagtga

SEQ ID NO: 366372 - DNA, 876 bp, Pseudomonas aeruginosa
atgccccgcaaattcctggccgcactgttgattggcagtggtggccttctatgcttgatcgccttcatcatgagcagtccctggcttttagcgctggccctagtcggtaatgtcgggggcggggtgctctaccacctcacgcctgccgaccggattgaggtgcgagtggaggtgccgatccatgagcccgccagcaggatcgtccccgagccccagcccgagcccgagcccgagcccgctgtggtcgcccctgctactcgcctgcaagcgcccctgaccgaactgctggacgccatcctgcattgcgaggcggatatgcagtacgccacctcgctggctcgcgcggctggtgagaaggtacagctcggcgccgagagcatgcatgccacagctggcgccatcggcgagttggattcctacatggcgcatatcggccaagtgttcaatgagctgggtagccagtcgatgcgtatcggcgccatcgtcggcagtatccaggacattgccaagcagactaacttgctggcactcaacgccgccatcgaggcagcgcgggccggttcccacggccgcggctttgccgtggtagcggatgaggtgcgtaacctggccctgcgagccaacgaatccagcggtcagatccgtgtgatcgccgaaggcctgcagaaggcggctcttgaggcgagggcaggtatggatcatgtaagcggttccactcgcgctggattggaaaaatccgccgctgccctgggcgctatgggcgagatgcgtgccgacgctgcggcgcgggtcgaagtcgtcgagcgcatcgtccggcgcctaaccgagcagcgggtactggcgcagaggatggtgggactgctggcaactggctga

SEQ ID NO: 366373 - DNA, 729 bp, Pseudomonas aeruginosa
atgctgactaccttccgcactttatgggccactattgtcctagccttctcacttgcgccttctgtttacgcaatggacgaggccatcctacctaagaccgggccgcgcgtaggtcaagatgccgtgcttatagtcgtggacgttcaaaactgctttatcgatggtggtagcttaccggtaccaaagggtgagcaggtggtgcccgtaatcaataagctgggtaaaatatttgataacgtcatcgttacgcaggattggcatacccccggccatgtgtccttcgcaagcagccacccggggaaaaagcccttcgatacgacgtctctgccttatggtcaacagatgttgtggcctgatcattgtctacaaggtacaactgatgccgaactggtgaaaagtttagacttgcctcaggcgcagttgatcattcgaaaagggtatcaccatcataccgatagttattcagccttcgtagaggctgataaaaagacgctcaccggcttgggtggctatataaaggagcgtgggatccgcaaggtatatgttaccggacttgccaccgatttctgcgttgctcggaccgcgctggatgcccgcaagcaggggtttgaggtatatgtggtggaagatgccgcccgcggaatagacgtcaacggttcattggctgcagcgtgggagaaactgctcggggctggtgtaaagcgtatccagtcgagtgatttaatgtga

SEQ ID NO: 366374 - DNA, 918 bp, Pseudomonas aeruginosa
atgaaaataagaaataagcttgtgggcggtggaaaagcctctaatggtctggatttggcgatcgctgtcggtgccttggtgattgcggctatggcatatcctaaatttgcttttgcgacggtcttgggtagtgatcctggcgacttcgtggcactgccggaggagacgcatcttggactgctttatttgcagcacgctgagcgtaagagtttgatggcgaatgatcgctccgtacctaatgctccgaacttggttagcgatattggcgttgctcgttatgtttattacacaacgctaggtggttatttgatttcgccggaaattgtcgcgcccttcggtagcttgcggttgaatggctccgttgacgattcggctgctggcgccggcgatccagttattggcagtgccctatggcttgttaatcagccgaacgagcgatatttcgctctggctgggtatgtaggtgttccggttggaaactatgacaaagatgaagcattgaatcttggtgagaatcgttggaggggaatagctcaagcaaactacactgagcgtctctatggaaatttgtggggtgaggctactcttgagtatgtcacgtatggcgacaataaggactatctgggagacagtactctagagcagaaagatacctacgaacttcatacgcatttacgctatcagtggacgccggccaccagtacgtccgtgagttggtatcaccttgaaggaggggaaactaaagttgatggcgtatcgcaagacaatagattgaagactgataggtatgctctatcgctagggcatttcgtaacgccgcagactcagttaatggttcaatatggacaggattttaatgttgagaatggattcaaggaacaatccagagtgaatttcaggatcgctcacgtcttctga

SEQ ID NO: 366375 - DNA, 1038 bp, Pseudomonas aeruginosa
atgaccatcattgcaggcgccgttcacgcggcgccggtattcatgaatgtcgatgccaccatcgacaaagcgtgcgaaatcattcgtaaggcgggcgaggacggagtagagctcctcgtgttcccagaggtttttgtgccgggatatccctacttcatcgagtgctatccgaccttaatccaaactgctgcgcttgctgcctacacggatgcatccgtggaggtaccaggtccagaaattcgtcgcttgcaagtcgccgcgcatcaggcgggtgtgatggttgtcatgggggtgagcgagcgcctgcgcggaacccgcacttgcttcaacagtcaggtgttcattgatcgtgatggcaccctgctgggggtgcatcgaaagctccaaccgacctatgtcgagcgaattgtctgggcgcagggaggaggccacaccctgaaggtattcgataccagtcttggcaaggtaggggggctggcctgttgggagcacacgatgaaccttgcacgccaagctttgatcagtcagggcatccaaatccatgctgctgcatggccaggactttcgacgatggccggcttcgaagccgtagccgatattcaaattgacgcgatgatgaagacccacgcattgagcgctcaatgttttgtggtctcggccggtaaccctgttgatcagacttgtttggaatggatggagaaaaatctaggtccgcaacagtttgtctccgctgggggggggtggtctgcaatcgtccatcctttctgtgcgtatgccgcaagccctcacactgggcctgaagagaaagttgtggtggctgaattgaatttggaagagctcaaacaggtcaaggtttgggttgattcttctggtcattatgcgcgtcctgaagttgtgcgactgcaagtaaacaagcagccgttatggcacgacgaggttgttggagaggttatgggttatgaactctttgaggcaggggttcagcctgatggctccattgaacagcctgaaaaaccctccgcgctaactagccattaa

SEQ ID NO: 366376 - DNA, 1293 bp, Pseudomonas aeruginosa
atgcacagttattcgccacacagcttttctgcagttgtcagaatccttggcggctgctttgcggtcatcctctcccctgtctcgctggcagaagaatctggtttcatcgaaggcgccagtgcgacgttgcaggctcgtaactactacttcaatcgagatttttccgatatccaaggcgccaacaagcaatccaaggctgaagagtgggcacaaggtttcattctcaatgccagctcaggctacacgccggggaccatcggggtgggtgttgatcttgtcggcatgctcggaatcaagctcgacagcagcccggaccgcacccgctccggactgctgccggtccacggcgacggcgaggcggcggacgagtacagccgcctgggcgcagctatcaagctgaaggtttccaacaccgagctgaagatcggcgagttgcagccgaacttgcccgtgctggtcttcagcgaccttcgcctgctgccacctacctaccagggcgccatgctggtctcgaaggaattgccggggctgaccctgaacgctggccagttccgctcgacccgcctacgcgactcgtcgaacgaccaggagatgtttgcgctggtcaacgatccgatcaatcccgctcgcctcgcccgattcaccagcgaccgcttcaattacgtcggcgccgactatgccttcaacgacaatcgcacgacggtcggcctgtggcaggcgcaacttgaggacatctaccagcagcgcttctacagtctgaagcacgccgagccgctgggggattggactctgggcgtcaacgccggcttcttcgatgctaaggacgacggtagcagcatcgccggcaagtacgacaaccatgccttcttcagcctgttctcggccaagcgcggtggccacaccttctatctgggctaccagcaaatcgggggagacgatggttttatccagttgggcaacaacaccaaccctctgggtaataccctgcccacctacgagttcgccgccaccgacgagcggtcctggcaggtccgccacgactacgacttcgccgcgatcggcctgcccgggctgaccaccaccctgcgttatgtaaccggcgacaacgttacgactgggcggggctttgaaggcaaggactgggagcgcgacctggatatcggttacgtagttcaaagcggtccgcttcaaggggttggagtgcgcattcgaaatgccaccgcgcgctcgaactaccgctcggatattgacgagaaccgactgatcctcagctataccctcaaaatattctaa

SEQ ID NO: 366377 - DNA, 453 bp, Pseudomonas aeruginosa
atgaaagctcaaaaaggctttaccttgatcgaactgatgatcgtggttgcgatcatcggtatcctggcggcgattgccattccccagtaccagaactatgtggcgcgttcggaaggtgcttcggcgctggcgacgatcaacccactgaagaccactgttgaagagtcgctgtcgcgtggaatcgctggggaaaatattaaaattggttcccaagcatctactgcagatactacctatgtaggtgttgatgctaccgcaaataagcttggcactattgctgtgacaattgggaacaatggcgcaggtaccgtgactttcacttttgcagccggcaattccagtccgaaaaactccggtaaaattatcaccctgacccggactgatgcagggtcgtgggcttgtacttctacccaggacgaaatgttcatccctaaaggttgcaaagcgccttaa

SEQ ID NO: 366378 - DNA, 198 bp, Pseudomonas aeruginosa
gtgctgaagagccgtaatgttgccgggattgagatttttcgagccagtgctgcacacgaggaacgcgtctacaacagaatcaagggtgctgtcttcgagcacttcagtccgggtcggtacactgacaaggctgtcatcgtcgaaatcgtgaacctgatgttcaaagagtattacggctcttcgcatttaagggtgtag

SEQ ID NO: 366379 - DNA, 702 bp, Pseudomonas aeruginosa
gtgaacaacatcgcttccctcatcgagcgcttggggactaatgagggtgcgcaagtgactgaacttgcgcgcctctatcgacaagcagaagagaaaatcaagctggttgagaatctcagccaggaattgtctattcctgctgtcaacgagctccgttacgccggttaccacatggtccagtacctaagtggggatggtgagcctgaggtggagctgaagaaagcccagaaccactgcaagcgagcaatctacgatgcggtcgaggccggcattactcaccagttggaaatgattcgaatttttcagcaggacttcaaagtgctgattttgtcggacttcattcctaactatccggccctgcagaagcagatcagggaagcccgcgatctgatcctggcgcccaagaatgctcacaaggatcgcgctgcctactatgagcagtgcgtgacacaccttgaaaacctcagagccggcctggacaagcttgatgagcaccgagaagagctactgaagcgcctgaagcagcgcaaccggtcgtctattgcgaactggtcgatgctagctgcaacgctggttgcgactgttataggcgcaattttcgctgctcttgcttatctcaagccaccagtagctaccactccaagccctgcaggtgcgtcagccgtggcatcctctacccagcagccgcccaagcccaagtag

SEQ ID NO: 366380 - DNA, 195 bp, Pseudomonas aeruginosa
atgcgactcaccaagcttctcaaggcacttctgccttcgcttgtctccatccctgcgaaagcagacgctgacgtcgtcgctcgcaagcttgtccgctcctacgctcgcggcaatgtgaaccttcagtacggccgctatctgaccagcaagcaactcgaagctcgcaagcagaagctcgctcaacactcgttctaa

SEQ ID NO: 366381 - DNA, 246 bp, Pseudomonas aeruginosa
atgcaaggcacgaattgcctcactcagtacttctttttgcccattctctcgcgcctgcaactccgcgagctcagcaagcgcctgcaaaccctccctagcgcgagcgtagggatcgctcgccacgttcgcgagatttgtcccgcaagccggacaagcgtcaggcaccgaatcggaaagctgcagaaccgcctcatacagctgcttgtaggagacctcacccgaacgctgggccaggaccgcaactga

SEQ ID NO: 366382 - DNA, 936 bp, Pseudomonas aeruginosa
atgacgcagcgcatctcgcttgtcgtcttgcgccaaggcctgctgggcaagcagtacgtagttcttggtagcaggatcgctatcgacgcgaagctcgtgttcgccttcatgagggaggaatttgtatcgccggatcatctgcgcgcgctccgcccccaactcctgctggattcgaagcaaaaactcttctgcatgggaggtcaggatcacctgcttggcatcaagcaatccggcctcaaagaaagtacgccagatgccgttccgatgctcgtcgtcaattgcattcacgacatcgtcgaaaatcaccacaggacaattcagcgagaggttcttggcgaggagaattgccaaccccaagcatttgatgtgaccttcactcagaatcaacagcgcgtcatagcggacgccgggctctccgacgaattccaactcgatctttccgttctcggcgaggggcagccacaaggactgcaggagatccccaggtgggtcatcacggttgaacgagttgtaaagattcgttgcgctctgccccagcccttgaaggagctgcccaggaagttcgtccaaataggccttgagctctgcaaggaattcgtcataggccagtttgacccgtccatgcaactcaacgactggcacctctgcctccaccgctgcaatcaaatctcggttggcttcctcaaactgcatcacggtttctgtcgcttcacggtgctgcagttcattggctgtgcggaaggcatttgcgcgctccacttctgccctcaaaagatcgagccgctgtcgctcctctgccatcgcatcgcgttggccgcgctgggcaagcgcctgttggtcgaatcgctctacctcggcgcacagctccaggagcgactgccaggagacccggtcttgatccatccaggcttgaagccacggcccttggaaggctaa

SEQ ID NO: 366383 - DNA, 357 bp, Pseudomonas aeruginosa
atgtcgaaacttgcagaattcaaagcgctagaagctcagcttgccgaacaactgaagcagctggatgccatgaaaaatgatgactccctcaagcgtgagatcgagtttgagaaaaagctaaattccttgatggctgaatacaatattggccttcgtggcattattgctctgctggacccgcaagccggcgcccataaggttcagactgcatccagcccaaggcgagctcgccaagtaaaggtttttaaaaaccctaacaccggcgaaacggtcgaaaccaaaggcggaaatcaccgcatcctgaaagcctggaaagagcaatacggtgccgaaactgtggaaggctggcttcagtag

SEQ ID NO: 366384 - DNA, 639 bp, Pseudomonas aeruginosa
atgaaaaaggaaccgaaaggagcaaaaaacaggatagtcatcgccaaagatgagaagaacgttctgacctgcaccagcgaagggttcgaatatacgccagacatcgtcaagaacgtctacgggaagagcagccgacccgcactggaagactggttcctgacggaacttgatttctttcgcaggtattaccctggatacgagattttcaccctcggctccagttgtgtcttcggcgaaaagttcgtgaactacctgaccatctgcgaattcgacatagacagtacctacgccttcgactgtctcaagaaggccctgagggagtccgaccaggccattcggcggaaactctccgccatgtggaaatgggacatggccgccaggaaggactggagcatcgtcttcatggtcgggcacatggacttcgcctacttcctccagcacaggaaggagttccagggggatgcccataagcgcttcatgagtacattcaccacggcggagacgaaaatcacctctcgcgactacaaggtcatgcatgacggcgcgatcctgcccttcgacgaaacggccctgtcgccggaagacaggttcattttcgagaactatcaaaagataaagttcgaaaccacgccactatga

SEQ ID NO: 366385 - DNA, 1941 bp, Pseudomonas aeruginosa
atgaatacctcagcaccttggatggatagcctgcaaaaggcggtgcggcggggactcatggcgctctacaaggagccgccgaagacgccggtggagtgggccaacgagcacttctacctgtctagcgaatcgtcctatcaggagggacgctgggagacgttaccgttccaggtagcgatcctgaacgcgatgggtaacgacgagatccgtacggtcaacgtgctcaagtcggcacgggtcggatacagcaagatgctgctggtggcggcggcctaccagatcgagcacaagcggcggaacatcctgttcctggtgcccagcgatgcgagtgccgccgagttcatgaagtcccagatcgagaccatggtgcgggacgtaccgccattgcgagatttggcgccgtggtatggcaaggcgaaccaccgtgacagcacgttgaacctgaagcgcttcagccatggtaagcagctctggtgccggggcggcaaggcagcgaagaactatcgcgagttgtccgccgatacagtcatctacgacgaactggcggcgttcgattcggacgtggagaaggaaggttcgccgctgtttctgggtgataagcggatcgagggttcgacgtttccgaagtcgattcgtggtagcacgccgaaaattcacggccccgtggatgagggcggctgccagatggaggcggcggccaatgcttctccgcatctaatgcgtctgcatgtgccttgcccgcattgtggcgccgagcaggcgctgaagtggggcggcaaggattgcgcctttggcatcaagtgggatggggataatccatcggctgcttggtacgtgtgcgaagccaatggttgcgttgtgcagcagcatgaaatgcaggcccagcagtcgaaaggccgctggatatgcgagcggacaggcatctggacgcgagactcgcaggatttcttcgacgcggacggagagacgatccctgttcctgactcgctgagcttccatgtttggacggcgtacagcccgttcgtatcgtgggggcgcatcgtgctggacttcctgcaggcgaagaaggatgtcaacggtctgaagacctggaccaacaccaccctcggggagacctgggtggaggatcagggggacaagatcgagtgggaacttctctatggtcgtcgtgaggtctggaatcatctcccctctagagtggtggccctgacggggttcatcgacactcaggacgatcgctacgaggcgcgtatctgggcgtgggctgcgggcgaggaaggttggctggtggatcgttggatcctgtacggcgaccctgcgagtcaggagttgaagcgcaaggttgggctcaggcttcaccagcagtaccagcgtgaagatggtgtgagcatgcgggtggccctgtggggatgggattcgggcggccaccatcgtgatgatgtgtacgccgaaagcaagaagcatggtcttctctgggtgataccgaccaaggggcacagtgtttacgacaagccgattgccgacttcccgcgcaagaagaacaaggatggcgtctacctgaccatgatcggcacggacaacgccaaggaactgatctacagccgcttgaagctgcagccccaacccggcgccatcgtgcctggggtattgcacctgccggccaacgacgacatctgcgatgagagcgagctcaagcagctcaccgcggaaaccaaagtgatgaagatcgagaagggcaagcgggtgtaccgctgggatgacaagggaaggcgcaacgaggcgctggactgtgtggtcggcgccctagcgatgttgcgtgtggcgcagcagcgcttcggcctggtgcttgaggttccatccacagccgttacggctccaccgcctgcggtgacaagcaaacgccgcagcaccggcagcggctatctgaaacaacgtcgataa

SEQ ID NO: 366386 - DNA, 546 bp, Pseudomonas aeruginosa; identical to SEQ ID NO: 338792

SEQ ID NO: 366387 - DNA, 747 bp, Pseudomonas aeruginosa
atgagaggcagtatctccgctcgagacctcgatgatgcggtggcgtctctacgggtcctctgtggcgacctgccgaacaaagtgttggccgacgccttgaaccacaccgcgaaccaggcgaatcaggccctggtcggggagatcgaccaggtcttcgaccggccgacaccgttcacccgtaacgccatccgcatcctgcatgccacctcacgccggcttgaggcggccttgtgggtgaaggacgaaaaggaccatgcctcgaaggggcagtcgccggaggactgggtagctccccaggtcttcggagggccgagggtggacaaggcgtcggagcggaacctccgggcccggggcatcctgccggcgggcatgttcgtggttccagcggagggcgcccggctggaccagtacggcaacatgagccgcggccagatgatccagatcctttccggcctaggcgccctggaataccgagcggggttcaaaggaaacgccacccagtcggcgcgttccttggcgaggggacaccaactcgcgtacttcgtgatgcaccgtggccgccgaccgattggcatcgccgagcgccgtggacggacgttgactatggtccttgccttcgtccgccagcctcagtaccgcgtgcgcttccaatttcacgaagtcgttcggcgtgttgccgaggacgacgcgcgcctagaggcgaacatcgagcgggccctggcgaaagcgttgcgttcaagttcgtga

SEQ ID NO: 366388 - DNA, 441 bp, Pseudomonas aeruginosa
atgacccatgccctgtttaaacagatcgacctgaccgccaagctcggccaggacggtagctcgctccaggccatgaacgcgctacgcgtcatccgggaaacggtagcgaagcacctggccggcaccgagggtgcaggagagattccgctcgagcgcgccctcctggcgctccgcaccatcgccgagctcccctgtcccgagcaagacgacctcccggcggcgaacatgcgacagatcgcactggcggccttgggtggcgctggagcgagttcagagccgggcaaccctggcggcgaacctctgtccggaccaggtaataccggcgagcccctggccccgcgccgaggccgggtgatgactcccttggcgaaagccttcgaaccctggaacgctggcttgatcgagtggcaatcgaggacggctatgtcagcgtgccggtga

SEQ ID NO: 366389 - DNA, 405 bp, Pseudomonas aeruginosa
atgtttgcggcgttcgagggttaccactcgacggtccagaacctcatccgctccaccgaatccatcaccaagtggccgctgcgcaaccgcaacccgctgccgctgtggagccgtggtcgcctggtcctgctcggcgacgcctgccacccgatgaagccgcacatggcgcaaggcgcctgcatggccatcgaagacgctgccatgctgacccgttgcctgcaggcgaccggcctctccgaccaccgtacggccttcgagctgtatgaggccaaccgcaaagagcgtgcctcccgcgtgcaggcggtctccaacgccaacaccttcctgcgtacccaggaggacccggcctgggtctacggctacgacctctacgcccaggagctcaagagcggggaggctgcatga

SEQ ID NO: 366390 - DNA, 807 bp, Pseudomonas aeruginosa
atgagcaccttcatcgagggggggaatgtcaacgccaatggcattcgtcagcattatctgcgttatggcgggaagggccaggcactgatccttgtacctggcatcactagcccagctatcacttggggatttgtcgccgagcgcctggggaagttcttcgatacgtatgtgctggatgtgcgcggacgtggcctgtcgtcaagcgggccagacctggattacggcactgatacgtgtgcagcggacatacccgcgtttgccgaggcgcttgggctaaccagctaccacttggtcggacactcgatgggagcgcgcttcgccatccgtactgccgcccaaggggctcctggcctgcaacgtctggttctggtggacccgccagtctcggggccggggcgtcgtgagtatccgagcaaactgccgtggtatgtcgactccatccgacaggcctcggtcggaatgaacgcagatgacatgcgcgcgtattgcccgacttggaccagcgagcagttgcaactgcgtgccgagtggcttcacacctgtttcgagccggcgatagtgcgtgcattcgaagacttccaccaagtggatatccatcagtacctgcctagcgtcactcagccggtgctgctgatggtggccggacgtggaggagtgatccagccggtggacgaggcagaaattcgcgaacttaagccaggcgttcaaattgctcgcgtagagagcgctggccacatgattccttgggatgacctcgaaggcttctttgccgccttcggagacttccttggccaacccattgtttaa

SEQ ID NO: 366391 - DNA, 753 bp, Pseudomonas aeruginosa
atgaccaagctgtaccgcatcggccagattgtcccgagctcgaacaccaccatggaaaccgaaatcccagcgatgctgaccgctcgccaggcaattcgtcctgaacggttcaccttccactccagccgtatgcgtatgaagcaggtgaagaaggaagagctggctgcgatggacgccgaatccgatcgctgcgccgtcgaactgtctgacgcaaaagtggacgtgctgggctacgcctgtctggtagccattatgtccatggggctgggctaccaccgccagtctgaaaaacgactgcgtcaagcggctgccgacaatgatggtgttgcaccagtgatcaccagtgccggcgcccttgtagatgctctcaaggtaatgaaggccaaacgcatcgctatcgttgcgccctacatgaagccgctcacagagctggtggttaattacattcgtgaagagggctttgaagtccaggattggcgtgccctggaaatccctgacaatctcgaagtggctcgccacgacccagcgaacctgcctggcatcgtcgccggcatgaatctcgaaggtgtcgacgtcgtggtgctttccgcctgcgtgcaaatgccatcgctaccggcagttgcgaaggtcgaggcacagaccggcaagccggtagtaactgctgccatcgctaccacttatgccatgctcaaggctctggacttggaaccggtagtgcccggtgccggctccctgctgtcaggcgcatactga

SEQ ID NO: 366392 - DNA, 642 bp, Pseudomonas aeruginosa
atgagcatctcgcagagcgcaagcgacaactaccaaggggtctggggccaacgtatcggcttcggtcgtaagccagcccttctgctgattgacttcatgcagggctataccactccaggtgctccgctctacgccccgggggtggtaggagcggtggagcaggccgctggtctgctggagttggctcgtgaattagacattctcgtggttcacaccaacatccgctaccaacccgatcacttcgccgatggcggtgtttgggtgcgcaaagcaccggtgatgaaggacatggtggaaagcaatcccttggctgcgttctgcgcgccggttgccccgcgatctggcgagccggtaatcagcaagcagtatgccagcgctttcttcggaaccagcctggcatcgctgctgcatgctcaaggtgttgacaccgtcgtgctggccggttgctccacgagtggctgtattcgtgccagcgcggtggatgccgtgcagcatggtttccgcacgatcgtggttcgagaatgcgttggtgaccgccaccctgatccccatgaagccaatctattcgacatcgatagcaaatacggcgatgtcgttagtcggcaggaagccatggagcaattttcccgattggccgtttga

SEQ ID NO: 366393 - DNA, 1368 bp, Pseudomonas aeruginosa
atgaatgccttcaacggagcggcacgcaacaatgcagaacccatgagattccgcagccttggcggatgggtggagcagccagacgacctgcagccggcgctgaaaggccacgagcacacagacgtagtcgtggtcggcgccgggttcgccggcctgtcaacggcgctggaactaagggcgcgtggagcgaacgtcatcgttctggaacagcagttcgcaggcttcggggccagcgggcgcaatgccggctatctgctcggcagtatgggcatagaatgcgaggttttcgtcaagcgagtggggcttgagcaggcacgtaagttcgtcggtttctatgacgaggccgtcacctatgtggaagagcgtttggctgcgctggacatcgattgcgattacacgccctcgggaatcatccgggccgccgtccatcccagccaggaaaagcgactgcgagcgaacatggagcttggccacgcgctgggctctgtcacgcgcttcgtggatagcgccgagatgcgcgcgcgaggcataccgcccgcattcctgtttggcagcgagcagcgtggcggcaccttgaatccgggaaagtacgtcaacggcctgcgtcgtgcggcaatcaaggctggcgtgaaattgtacgaacgcacgccggtgctttcctactgtgaagggcaggtgattacctgcaatacggcccagggtatcgccaccgcccctgtaatggttctggcgaccaacgcctacacgcctcagctgggagtgctccgcaacaaggttgcaccgatccgggtttcggcaatcgaaacccagccgctatcggcggagcaactggcgtccctgggttggcaagagcgtgaaggcctcattacgccgcactacaccatggaaagtcatcgcctgacggcccatgacaccctgctgctgaccgtgaagcaattgggttatgcctacggctcgaagacacccaatgttccggaccacgccgcctacgccgcgttgtcgagagtgttgcgcgagcgttttccttccttgcagggccttgccattcggcattgctggagcgggtatatcagcggggcctacgacttcctccccgtggtcggggtgacaggggccaggcagaacatcttctatacggcgggatgttcagggcatggccttgccactcaatcgctcatgggcgcgcttttcgccgagcgaatcggcggtggagagcctccgctgctagcggcgctggaacacaagacgccatccatgctacccgagccacttcaatggtgcgccataaagacggcctttgcggccgccaggctactggatgcatggaccgacaagaaagtgcgcaaagacaaagccttgaacggctga

SEQ ID NO: 366394 - DNA, 462 bp, Pseudomonas aeruginosa
atgatcgaacgtaataccaagcgtgtgcgccagaagggcttcaccctgatcgagctggccatcgtgctgggggtcatcgcgatcctgactgctttcttcctgccgggcatgctcaaggcgcgtgaagactccaagctgagcactgcgatcactcagctgcagaaagacttccccggtgcaatcgcccggcaggtgagccgcaccaacacctgcagcacgaccaccatcactgcagccaagctgaaggaacgcggcctgcccgatctgactgtctggaacacagcctggaccgttgatgctgtcaccagcaaccaggtgaccatcagctacaccatcgacagcactgacaccaatgctgctgcggacctcgcaacagcattgaaccaaagcaacaacatcgtgaagaactccgcaacagcgacgggcaacaccaaggtgacagtggcataccgctgcaactaa

SEQ ID NO: 366395 - DNA, 462 bp, Pseudomonas aeruginosa
atgatcgaacgtagtaccaaaggtaatcgccagaagggttttaccctgatcgaactggccattgtgctgggggtcatcgcaatcctgactgccttcttcctgccgggcatgctcaaggcgcgtgaagactccaagctgagcactgcgatcactcagctgcagaaagacttccccggtgcaatcgcccggcaggtgagccgcaccaacacctgcagcacgaccaccatcactgcagccaagctgaaggaacgcggcctgcccgatctgactgtctggaacacagcctggaccgttgatgctgtcaccagcaaccaggtgaccatcagctacaccatcgacagcaccgacaccagcgccgctgccgacctggcatccgctctgaaccagagcaacaacatcgtgaagaactccgcaaccgcaaccggtaacaccaaagtgaccgtggcgtaccgctgcaactaa

SEQ ID NO: 366396 - DNA, 516 bp, Pseudomonas aeruginosa
atgaacccattcaaaggccggcattttcagcgtgacatcattctgtgggccgtacgctggtactgcaaatacggcatcagttaccgtgagctgcaggagatgctggctgaacgcggagtgaatgtcgatcactccacgatttaccgctgggttcagcgttatgcgcctgaaatggaaaaacggctgcgctggtactggcgtaacccttccgatctttgcccgtggcacatggatgaaacctacgtgaaggtcaatggccgctgggcgtatctgtaccgggccgtcgacagccggggccgcactgtcgatttttatctctcctcccgtcgtaacagcaaagctgcataccggtttctgggtaaaatcctcaacaacgtgaagaagtggcagatcccacgattcatcaacacggataaagcgcccgcctatggtcgcgcgcttgctctgctcaaacgcgaaggccggtgcccgtctgacgttgaacaccgacagattattaacctggcaaataaatag

SEQ ID NO: 366397 - DNA, 186 bp, Pseudomonas aeruginosa; identical to SEQ ID NO: 357063

SEQ ID NO: 366398 - DNA, 624 bp, Pseudomonas aeruginosa
atgagcatcctgaccaataccccggtttcctgggtagacgtcagagtgaacatcgacgtcatggagaagatcctggccacagccgagcgcagcgcgcaggaagacctgcagatcgaacgcgcactgaagctgggagccaccacaacgatgatccagagctttttcggtctgtcgccggaggacaccgccaccaagcgcttgatgctggagatccacccgcgccgcggtcgctggcggcagctcgatgaacagatcgagcgccagatttggttccgctgggagcacctgatgcatgaaaaccaggtccgcctcgaggacagcatggagttgctggacatcgcgatgatcctcaccgaggaaatcaacgccggaatcgaacaagacagtccagaattcatcagcctcgccattgtgtggtctctcatccagagctggttgaaagacaacctctatcaaccaaacaggaaaggacaggccaagcccaccaccctttacctggccagcgtcagcgctcacctcccctcgcctgcggctcacccgccacagagtcccgccctggagattgagcctgcgcagcagcaactcctcaacctggttcagtcggaaggcgatacgacaccatga

SEQ ID NO: 366399 - DNA, 201 bp, Pseudomonas aeruginosa
atgaaattgagcacccaccgcctgattcagatccacaaccttgccgacgacatgtcagggagagccctcgtcgctcaccgtggcgcggtgagcctggcccgcatcggcaatcagaagggctctcgatacatggcggctcgcgccgctcgtttcgcctcgctggcagacgcgtgcgttgcacgcctggaacgtgacgcatga

SEQ ID NO: 366400 - DNA, 147 bp, Pseudomonas aeruginosa
atgggctttatccatcccaaagtcgccacctacaacgccagtctctaccgccgcacagcgcgtgctatcgaggtcgagttggagactggtcaggcggtgtgtgtttgctgcttcaagccgttcgggcgcggcgtcctccatcagtag

SEQ ID NO: 366401 - DNA, 576 bp, Pseudomonas aeruginosa
atgggccacccagccactgtagatcggcgcttcggcgcccagcagctcttcgcggatcttcgagtggatgccatcggcaccgatgacgatatcggcggtggtgctggtgccgtcggcgaactccaggcgcacctgatcgccctcgtcgacgatcttggccagacgcttgccgaagtgcacggtgcccggctggatgctggagatctgcagttcatgcaggtcgccgcggtgcacggtgatgtaggacgcgccgtattcgcggcgggcaaactcgcccagcgggatgcgcgacaggtagtcgccggtcacgccgtcgcggctgaaccagaagtccgggtgggaactcatcagctccagtttctgctccagccccatgcggcggaagatcttcatcacgttcgggccgatgtgaatgcccgcgccgagccgggtgaattccggagcctgctcatagacctcgacattgaatccagcctgctgcagcagcgtggcggcagctgctccgcccagacccgcaccgacaatcgcgattttctgcttaccccgcatgggcacgcctcctcttgttttgagtga

SEQ ID NO: 366402 - DNA, 225 bp, Pseudomonas aeruginosa
atggccatcgaagacgccgccatgctgacccgctgcctgcaggcgaccggcctctccgaccaccgtacggctttcgagctgtatgaggccaaccgcaaggaacgcgcctcccgcgtgcaagcggtctccaacgccaacaccttcctgcgcgctcaggaagacccggcctgggtctatggctacgacctctacgcccaggagctcaagagcggggaggctgcataa

SEQ ID NO: 366403 - DNA, 690 bp, Pseudomonas aeruginosa; identical to SEQ ID NO: 335380

SEQ ID NO: 366404 - DNA, 1233 bp, Pseudomonas aeruginosa
ttgccggccccggagggtccgacgaggacgttcagcgaacccggctccagcctcagggaaatgtcctcgagcaaggcgcggccatcttccaggcgcaattccacggcctcggccgccaggctggcgtcgtgcggccgctcgcccggctcggggctgtgcagcggagccagggcgaaaacccgcagcagggtatccagcgcctgccaggcgccgcgcaacgcctggtcgagatgggtgagctgggccagcggctcgatgaagcgcaccagcagcaccagcacggccaccagtcgcgcgccgtccagccattgtcgctccaccgcccaggcgccgccgagcagggcgaaggcgaacgccgcctgcaccgccagggcgaagccgaggccgctgggcaggctgcgccgcaacagttccagggtgctgcggtggagactgcgcaaggcctcttccagcccctggcgggcgacgctttcgcgctgcgccgcgcgcagcagtggctggcgttcggcgaacgcctgcaactgccgtgcggcgtcgcgctcggcggccagccgggcatcctccgccgccagattgcgccgcccgctccagcgcaacagcgcggcgaggacggcaccagcaaggagcaggcagagggcgatggacgggtcgatcaggaacagcccgaggatcaccccgagcggcgtcaccaacgcggcgatcagcggccccagcaggtgcgccggaatgcccatcgcctgcatcaccgggccgcgcagcaggccttcggccggcgcgacccggcgcagcgccggcagcgccaggcgcggcaagcgcgccaccaggctgcgcaccagtccagccgccagcgagccgccggcggcgaaaccgcgacgcagggccaggtactgcaacagcgcctgcgccaggctcaagccgagcaacgcggcgacccagcgccagggcaacgcgccttcggcgaaccaggcctcgaccagcggcaccagcaatacgccgcaagcggcgtccagcagcgccgccaggaccgcccaggcgctcgcccgacgcaacgcggcacggcagtcttcgggcagcgcacgcattcgttcgaacagggtcatgccgccacctccgcgccgttctgttcacgccacaagcgcgcataggcgccgtccgccgccaacagcgccgcgtgctcgccgcgttcgaccagacggccagcgaccagcaccaggatcaggtcggcatcgctga

SEQ ID NO: 366405 - DNA, 303 bp, Pseudomonas aeruginosa; identical to SEQ ID NO: 351362

SEQ ID NO: 366406 - DNA, 621 bp, Pseudomonas aeruginosa
gtgcgactaccgattcagccggctctggcagctcaactcctcgtatggttggcagcaccccggcacggggaacgcggtcggcgaggcagggttttgcaactggcgcggcgacgacaccgagttaccggatgtcgagatgatcacatcggcgaccgaaagcagcggccagacgttgttctatgcaacttggtatccgctgccacccactggggtctactgcaatccgccggcggcatgggtcaacaacttcaccgaattgctgctcggcggaaattggattgctggccggcgatgggtgcagtccgtaaccgagcgctaccggctggtcatggaagttcagccgagcgtggcggcgaccggcccgattgtcggtcggcagcgtgcctcgttcgagatcgagtcggacagggccgagcgctgggaaagcgagccgatcaccggcggcagcaccggccacgacgacgagaaggatggcagccggcgtttgtccgcgctgaactgcttgttggcccagggagcaacgacgcttactgctgcgcaccgtggcacgaccgtgacctgggatgttccgacatccatgatcttgccgatcgatctggtgcatacgctccgcctcgatga

SEQ ID NO: 366407 - DNA, 381 bp, Pseudomonas aeruginosa
atgctcaagctacttgccaccggcctggcagcctcgtttctcctcctgcccccggcgcaggccgcaccgcctgcgccctatggcgtgcagccgcaccagcaggcggtgcagcgcgctggcgaacagcgccaacgccagctccaggaacagcgccagcgcttcgacgaacaacgcctgcaactgcagcaggatcaactgcaacgccagcagcagaacctgcagcggcaacggcagcagcgacagatgcaggacaacctgatccgccagcagcaactggaccagcagcgctggcgcctggagcaggaccagcggcgcctcgacagcgaacgccggcaactggaaaaccgccggcgccagagccagtccccggcgatccgctga

SEQ ID NO: 366408 - DNA, 729 bp, Pseudomonas aeruginosa
atgcaaatcaatatcattggcaatcatttcgccttcatggacagcgccatgttgctgcatattcccgccatcttcaccgccgaggaagtctcccggatccgcgcagccctggagcaggcggaatgggccgacggcaaggcgaccgccggctaccaatcggccaaggccaagcacaacctgcaactgccgcaggaccacccgctggcccgggagatcggcgaagccatgctgcagcgcctgtggaaccatcccctgttcatgtccgccgccctgccgctcaaggtcttcccgccgctgttcaactgctataccggcgggggctcgttcgacttccacatcgacaacgccgtgcgcgacatccatggcggccgcgagcgggtccgtaccgacctgtcctcgaccctcttcttcagcgacccggaggactatgacggcggcgaactggtgatccaggacacctacggcctgcaacaggtgaagctgcccgccggcgatctggtgctctaccccggcaccagcctgcacaaggtcaatccggtcacccgcggcgcgcgctacgcctcgttcttctggacccagagcctggtccgcgaagacagccagcgcaccctgctattcgaaatggaccagtcgatccagcgactcacccgtgacgtccccgaccatccctcgctgatccgcctcaccggtacctaccacaatctcctgcggcgctggtcggaactctga

SEQ ID NO: 366409 - DNA, 825 bp, Pseudomonas aeruginosa
atgagcaatagaagaaagcgaagccaacaagcctttaattacaaagaaggttttattagcaagatacaatcctacaaagtaagaggacaaaacaattttcgggaggcttttgcaaagactcgacgcgacctcccgatagagagtttcccgaacgcggttcacacactgctcggctcctcagcctataaaaaccttgcgactcatattacgttcccgcccgactattccaacttcacaaactgtaaaaccataattgtcgatttagatccagataaagcgttttactggacggcacttgttcttggcgagttcaaggaaaccctgtctagctttgcattgcgacaagcagattttgatgaaagtctcctgcatggaaactacagtcgggcgcaagaaatactaaacgaaatagaggatgaatttggagtctcaatttggtttataacaaaaaaattgacgctccttcagctatcagagggcagatctgctcaaaagaaatacgtgcaagatacgattgatacaaatgaattcagtattctagcggcaatgtccgcatattttatcagtatggctctcgacgaaagcctctctatagcgcagcttttggtttccattatcagcatgggagcgagaacaagcccggcgaattgcgagggagcccatccccatcgcctcggctcccgaagctttcccctcaaattaaacgcaacaatcgtcaatttgtcccgttcggcgttaccgttcttctgtaaagaatgttgcgcatcactgatgcatggatgtgcaacatatcaactcattgagtatgggcaacaagagtattga

SEQ ID NO: 366410 - DNA, 1329 bp, Pseudomonas aeruginosa
atgtccgaagaaataaatgtcttgcgagaagatattcgtgtgactgtcagtgttgctcctgaatttccgaaggaaaggcttcttccgcttgagccaagtgttctctctaagaatataagtcggcaggtaaaagaagagcggaagtataatgaggaaaaaatcaagcgggatagggagggtggcggagaaagcagtggaataccttgttgtaaaactctgcatgtgagcataggctatgatggcactaataataatgatcgggctgatggtgcatcattgccgccttctagaagtaatgtggcaaagctatttcatgcttctgtcggagaaggctccgtgcaggaagggttgggtttctttcgatattactgccctggggttggtacggtatttccagatattcgggaatatactccgtcgagtctcggtttgattgcggcggcaggtggggagaacagagtaaactggggaataacccgcttggttgatgttttgcaaggaacgcttaccccagaaagtcctcttctgctagatgagtctcaaacaatgattaagaacatggcaaccaatggaattgccaaggttctaaccggtgggttgttggagaacggcgagaaaaaacgccgagctgccttggagccaaaactcaaggaactggaggaaaagcttcgccagcgtcaggactcagggcagaaaccgcatatcctggccatgcgtttgtatatctatggattctcccgtggggcggcggaggcacgagccttcgccaactggctgcaggagctgactcgggccagcggtgccgatggccgggtggaatatcgcttcgccggcctgccgatctccatcgagttcctcggccttttcgataccgtggcggcagttggactggcggatagcgcgccgttcgccgccggacatatggattgggccgacggcaccatgcggctgcccgacgaagcccaggttcagtgcctaccgaccacattgccggaagactgcgcttttctgaaacgttgcgtgcatttgatctcatgccatgagcagcgtgccagttttccgctggattcgatccgccgtcgcgacctggatgccaacggacgtcgtacggggccttcctgctatcggcagggtacggtggaatatgcataccctggtgttcactcggatgttggagggggttatggcgttggcaaccagggtaaggcggtgggaggttcggaattcctgctatcccagatagcgctgcagcatatgtatgcggaagcttttgatgcccggtgctcctttgcaggttcccaaatcagccgttcatccggactttcatga

SEQ ID NO: 366411 - DNA, 171 bp, Pseudomonas aeruginosa
atgccttgtgaaggcttcctgcgctacgtcctgggcttcctgggcgtcgtgcacgaaccgcacgatcaatcccagtatcttgtgctggtatttcagtaccagcagatcaaaagcccgcttgtctccgcgctgtacccgttcaaccagttgctgatcctgttcctgggttag

SEQ ID NO: 366412 - DNA, 411 bp, Pseudomonas aeruginosa
gtgcccggccttcaggacgtttcgggcatccccgatctggccaccctcgacgaacagcgccagggctcgccttgcgtctatgtcgtctacctgggcgacgagatcggcaccggggcgtcgcaccagggcggcagtcgggcgattcagacggtcacccagcactgggcagccgtgctgacgttgtactacgccgacgcccagggcgacggccagggcgcccggcgcgaagccggcccgctgctcggccagctgctcaaggcactgaccggctgggttcctgatcagggcgtcagcccgctggcccgcagcccgcaggcttcgccagtcagctacagcaacgggttcttctatttcccgctggtgttcaccgccaactttgtcttcccgaggctcaagtcatggaaaccgtaa

SEQ ID NO: 366413 - DNA, 180 bp, Pseudomonas aeruginosa; identical to SEQ ID NO: 328933

SEQ ID NO: 366414 - DNA, 1521 bp, Pseudomonas aeruginosa
atgagactgaatctacctaatacttttgaagatgtacgctcagcacttcaaagtgcaggaattgaccaacgcctagttgagttcgtcaagcctatcgagaaagcagagaaaataatattaaaaataaaacaagaaattgagcactctggaaaagttctattcctccttgcccctcccggcgcggggaaatcaacttttatccaatccctaagttggcgaccacatataaaatttcgcgaccttatagagattaatgcagtcaccaccatgccaggcaaaaaatttgaaagccttgtcaaaagaattcgcgaaattgcagagattgccaacaatgagaaagaccaaggcccgacactagtcgtactagactatcttgagtccttaaacgaatacccagagcaagatgtaaaaggtttctttagagatataaatggaatcctaagaaggtctccactcttaattctatggcctgctacagaaaagcaagacgttgataaaatgctgaaatttgccgaagcagtttcaggcactatattctctgatgatcatgcatatgttgatttcgaaggtcctatccaggaaactttccctgacattgctaaaaacacagttgccgtaatcaacggaagagacatttcagattactcactaacccaagcagacttggaaagtctactcgcaaaaataaaattaaaatctaagaaagaccgcacaataagaaactaccttaagtctgtaaaaagtctttgggcagaaagaagcgaccatattcagcaggtagaaagccaaatcccaaaacccaacgagatctggtttatcttctcttacccctcagcggaagaggtagttggaaacttcatccgaaaaggtgaacgagtccatgaagcatggacagccatcggagataaacttgatgaatatgttcaatcaagcgcccaaaggaaaagcatttggaccccacaaaagctacagcttatgctaaccggttcagtaaaaaccagaattatgtatcttccaacgaactgtttggtctctctttcccttgcattctctgaaaacaaacagttaatttccagaatagctcccgacgctcccaaacactggagccaaaaaaataaagcagttgctcagttagagaactcccccttagccaagcaactccagggacaaacagtttcagcgggaaagaggaagggaggtcctgccgcaaaagcactgagaaacgcagccatatcctttggaaaacttgttgactgggtttcaagcggcggcgggcacgataaatacgttaatgaatcagttgcaaaaggattagcacaacttggttttgtctgtacaactggtgccgaccacccctggatacctggaataaagccagacatacttgtagaattaccggacaaacaaatctgcatagagtttcaccataccaataacgacgcccaagccaagattgcagactatgtactttctaaactatccgactacagcaaccagcttgactattacattcaaagctaa

SEQ ID NO: 366415 - DNA, 3330 bp, Pseudomonas aeruginosa
atgaatcctttcgaccgtgcacgaattcaagctatcaatgcacgggcgaaactcatcgctgcgtgtggtgaacagtatccgaccagcaagcaactgattgacgttgctgaagcgacgttaggcattgcgatcgagtgggtggctcccgatgactatgcgttgggcggggcagatgcgctcctgcagcggtcgatgcacacgatcctgattcgtgatgacgttcgacaggaggcgaaggcttacctgttggctcacgaactcggccattggtatctcgactcaccccaacctgctccgggtacctctaccgtgtctttcatcgccaacaccgacgatgaagctgataccaccactgctactagcaaccccagcagcactagtcccggaagtgcggtggtggaggggtatggtgcatgggagcgcaatgagctccaagcaaacgtctttgcgcgagagctgttgctccccaggacggcggccagggcattgtggtcaacaggatggcgttctcgattgatagcgacgcactttctgttgccgctagaagtcgtaaggcagcaattggctgacgcgctgctgctcccggatgtccctccagttcctccggctcccgcacatccccctagcgatacccagcgtcttgcggctgaggccccagaaaagttcgtcaacgtggttgcgggcccaggaaccggtaagaccacgacgttggtacaccgagtggcccatttgatcgccagtggtgttcccgccaatagaattttggtgatgacctttaccaaccgtgctgcccaggagcttgtggaacggttgacggcagccaatgttccgaatgcttcacaggtatgggctggcaccttccattcgttcgggcttgagctcctgcgaaagcaccaccttctcttcggtctgacacctcagatcaagattgctgacgcgctgcagcaagtcaggatgatggtcgaagaactgcccaccctgcagctcgaatatttcttcaggttgagcaacccgtatgactggttgcctgatgtgttgaggatcatccatcgtctcaaagaagaattggtcaccccggacgaatacgctgcaatcgttcgagcattgccggcggttgagcccgatgtcgagcgagagcggaacgacatagtgaccctctacaaggcctacgaagccgtactgcggcgggaagggtgggtggactatgcagaccttctggttcgacccactgtacaggctcgtgatgatcgtgcgtccctggctgctttcctagaacagtacgatcacgtcttggtagatgagtaccaggacgtcaatcatgtgatgattgagttcgtcaaaaagatcggatcgccgcaacgttgcttgtgggtggtcggtgatattcgtcaggctattcatcactggcgtggtgcgtcgatccaaagcttgctcaagtttgacgaggcgtacgttgccagaggacaggctgcttcaatcaggcgatacagcttggacatcaaccggcgcagctctccagagattcttcgtctggttgagcgggctggaaccgaccatgtgttgcagccattcgtgcccctggatcccgtatcaccttctcgctccgtgatcggggttatgccagctttattccacacccaaagggatgctcagagcagtgtcatcgtcggcgagattactcagtgtcgagcggcagggcactcgtacggcagtcagggcatcatcagctcgacgaatgcccaagtagacaagcttgcgcaagacatcgaggctgctggcattcctgtgttgcacctgggtgagttgaaccagagggctgaagtcaaagaattcatgtgcttgatgcaactgctgacgcagcgttcgcctggagcgctcctcggcttgttcgggcgtgcaaacttgaggatgccggcggcagacattgagttgctgacgaaccagtccaagctaggtttcaaacaccaacgtggtcgttggctgagccgccccgctccagggctttcgacgcaaggtcagcaggttgtccaggtgttgagtgacttgttggacggggccacgcgaagctcccgcccttgggtgtttgtctgtgacctgctgtttgaaaaaggctttgggttggagtcgttggctgaccagtctgccactgagcagatcaatcgtctggcgttgtggcaattcctctatggggttcgaaacagtgatggcgttggtagccaagcgacgttatcgaagtttttggtcagagaagattttcggcggtatatcgggcagcgatcagcagagcgcgcgcttccacccgaggcggctgcgatcgacgctgtgcggctcatgaccatccatggcagcaaagggcttgagttcgacgtcgtgcacatggccaacgtcgaaaagaccaagtttggcgcagaggcaccgccacgtcttgatgagcggcaggcgttgctgctgccccctcaagcgttacacagcacgcaagccctgcggctccagggtgaggcaatcgagaggaacaatctgttgtacgttggcctgtccagggcgaaagatcggctgagggtctacggcggtactgacgcagcgacgattcccgatcccttgcgtgatccttctatcattcctgccagcgtcgcgcgagcttctgtgccagtagcggcgcctgtctcgcgtgtatccatgacaccgcccgtggcgatgacctacgccgccctagatggattcatgacctgctccctgcaatatcactatgcccacgaattgagcctcccggtcgaacaggagttggatgtctcaattcgggctcgtcgagcagtgctggcagggcttgagtacgtctaccgcgatggaatgaagaccgatgatgccttcctgcaagcgtggggcgagaagccgttgccgacatgggaggaggacaaaatgctgatagagcacgcctgggtcgccttcagccgaggtgctgtatggcagccgggtagcgcgtcttacgttcccgagacgactgccaatgtgaatggccaggccattacgatgccatggatgcttcgtgaggcgactggtgatgtgatctggctgcgcacgggggtaggcctgagtaccgtagcgcgaaatgttcggcccatcctagagaacctgggaggcaggcgttgcaaccgaatttccattcattcgctcgtcacgggcctttctgaggacgcagttccgtctgcaagagcgagcagtaccagtgtgtttaaggcgatcgcggcattgcgtgctggtgagcgtaaagcgagccgaggcaagcactgcaatcgatgcgcctattcgacgatttgtgctcagagacactga

SEQ ID NO: 366416 - DNA, 1251 bp, Pseudomonas aeruginosa
atgaaacgtaatgtcaatttgccgtctccagccctcaacgctccgcttagggcgtggtcggattacctgggatgggtgtctgcgacggcggattttcaggtggtagggggcgtttgtcggtgtacggttgctatgccggagggacagatcctagaggtgcaggcggcgaccccagatcttctggccaagcaggtcatggtcgacctgactgccaacatggtggttccgccgaccatggatcgctcaacaacatcatcgcttcaagatgcaccggaacagccgaaacaaccgaaacagcaccataagcaacagcaacagctgcaaggtgagccagggcaggacgaacccaggctcgtgattcccgaaggtctacaaacccaagcgtcgccacaggaggtgtctatgcgcagtcattacgaacctgctttgcctcgtgcatcgcaggcgccgcgatctgcacccgtgtctagcaccaagggcacattgcagacggtaggcgtgtatgtgccggtagctatgcatgaagtgcttaaggccattgcggaggggcagggcaagaaattctctgtgctcgttcgagagatggttgagagtggctacgagcgttttgaggatgcgatcgaagagcgtagcgggagaaaggtgctcgacggctatgagcagaaggtggcgagctatgatggccagtccgaacaatggatggcccgacttgatcgcaagctcagtctggagctcaagttgaccgcgaaggaatacggacggtcagcttctcaaatcgtgggtgggctattggctgaagagctttctcattgtccacaagcccagacggttgtttcatccctctctgccactgcccaggcagtgcctactaccgctgcccgagtaatcgctgatccaggtgaagtggtacgtgctcaagccgcaattgcaggccttgtaggccctaaggccaacgagctggccagtcacctaggcctgcccggcaagcgaagattggtcaacgaggtgctggttgggatagttcgtgcacctggcgtcttgatgagaaatgtcgccgagtatttccaggtttcgccagaagcgatgaatgaagcggtgagtttgaatttccgtcagctagcggcaccctcctttaaagcgcccaacggccaaccaagggtgctaacagagcctgtttcttgggaggaggcggtgaaagcgctccacttacctcatgacgaagaggcgcaactgttggccttaggggactga

SEQ ID NO: 366417 - DNA, 990 bp, Pseudomonas aeruginosa
atgcacgataattcgctcgaatcctgcctcgcagcgctcgacaatccagtgcagcttggcgcccacctgctaccccaggtcatcgctgctctcacggctgtcgacgtcgatctgtacgacgtccagcgcagtgcctggacgaatccgttgattcatctgcgcgctgtttttgacattcacgatctgccagatacgccaactgcgttcatccccgtgcctgacgtcgccagcaccgtcgctgccagggccagtgcagtggtctgcctcgccgcgctcaattcggacaccatttcatatggctccgagaatgacggccacctgttcgtgaacctggtggtgcttccgggcgacggagactttgctgacaaatcaaagagcaatatgcgcggccacaccgacggtgtgtcgttcccggttcgcggacagccgcatgagtttgaccagcgcgtagcaccctcccctgacttcgtttgcctgagcggtcttcgtaatcccaacagcactgccaccacggtcatgcccctctctgcagtcctgcagaggctgacggacgaggagatcgaagagctgacaaagcctcagtacatcctccgtccccaaaaaactttcaagcttgggctgcgcaagctcttgggcaaggacagtcctctgctggaagtaatggtggacatccagctgctgttcgaaaccgaggatggacactggattcgctacagccacagtgcggcggatacagattttgactctgagcttgcgagccaagcgatcaagagcttcgagcaggcctgtcaggaatgttccgcatcggtggtcatcgcgcctggcgatatcctgctcgtgaacaatcgcgtgggactgcatgggcgcggcgtagtgggtggcgaggcaggtggcgattcacgatggctgctgcgcacctatggcttggatacccgggagttgcgggctgaccagcgctatcccgacagtaccttcaagctctacccgtga

SEQ ID NO: 366418 - DNA, 1431 bp, Pseudomonas aeruginosa
atggaatcacccagcaattctgtggccctgccagttgagcagaacctgataccccaagagccaaatccagcctccaacgagctcagcccccccccgtcagaagctcgccaaactccacatctctcccaagccccgcaccctcaacctgaaggcgcgtcagctctgtcactggctcttcacgaaggtcttatgtaccagcgcactctcccgcgagaagaacgcaccacccacttgggcgtgtttgcttacgacagactcgatgccctaacgcgagtgatagagcagtatttgccatccctcaaaccagatctaagcgcgctactcagtcttctaacggtcgcgtcccaagcaactctcacaactgagcaagcgactgagttaagagaaatttataatcgaacccataaaacggtctttcccgtaaacgataagtatctctactggtgccaccagtttcatgggctttcggaagatcacagcctgagatctatttcttgggatcatctgaaaaggctggaggaagagtcatatgcggacgatgagctgaaggcccttgttcaagagctgaagttgtccttcggtcgtgtgaaggatgtgtctgatagtcaagggttgaggcaggtgtttgaatattacggcgaggctcttgtatattcaaagctcagcaagcacttcaagactaagcggatcgtggccaagcaagactcgatgcctgacttcgtttgcgttctgccagatgggaaaacattctatgttgaactgaagtctttggatctcgtacaggctccgcttcgatcggatcagatgcatgaagatgcgatgaatcaaaatatcgagatcgaagaccaacttctgcaaggtaataaggtagcaatggcagaaagggagattcctccgtttaagccagcgtttgatgatgggtcatacgatccgcgttctttgttgttagtgattaatacgctgatgaaaaaggcgaggggtgccttcaaggagtctcagtttgcccaggggcctacttttgctttcatgctctgtgatcgattgatgattcctgctggcaaccatagcgttgctcctcagtacttcgagcggggaggtgatgctgtagtgtctggtgcactctggagcgcttgttttgccaagatgggctggccaatttttaggatgccagactttgagggggctccagggctggaaggccatatgtccgagcatgggttgtttgtagatgagtacgttaagtttccaactggcgcggtagtgttttccaagtttggatggcaagaggataccttgatgggtctctatgactccaaatggaagccgactccagattggactgaagaagatactcaaagcgtgatccacgtgctatgcaccgcgtacaacgacgaacgaaactcgtatggtcagtctgtcgccatgacctga

SEQ ID NO: 366419 - DNA, 1425 bp, Pseudomonas aeruginosa
atgatcagctatggatcggtatgcagtggtatcgaggctgcgagcgttgcctggcacgggcttggattccgcgccagttggttcgccgagatcgaacccttcccgtccgccgtcttggcccatcgctggccggcagtgaaaaacctgggagacatgaccaggatctctagcaaggttctagcaggcatgatcgacgcacccgacattctagtcggaggcacgccctgtcaagccttcagcgttgccggcatgcgtgaaggactgtccgacccacgcggggcgctcacaatcaaatatgtggaattggcaaatgcagttgaccatgttcgaaatgcccgaggcgatgacgagaccgttgtcatctgggaaaacgtccccggagtcctctccagcaaggacaacgccttcggctgcttcctcggcgccctggtgggcgaatccgaagaactccagcctccagggggcaaatggaaggacgctggttgtgtgtatggacccaagcgaacagccgcgtggaggattctggatgcccaatatttcggcctggcccaacgacgccgccgtgtgttcgttatcgcaagtgctcgagcaggattcgatccatgcgaagtactttttgagcgcgaaggcatgcgcagggatcatccgccgcgccgaggccagggggcgaacgttgccggaactcttacaaacagccttggaaagaacagtggaatccctgccggaaacgactgcaaccccagaaacctgattgcgggaacgctccaggcgggcggcaaagcagccggttccgccaccctgcaggatgctgagtcaggacttctagttgccttcggtggtagcgcgaactgcaagcagaccgatgtcagcaccgccctgagcgcacaccctggcggcacccgcatggacgcggagacggagaccttcgtggtgcatggtacgcaggatccagatgtcgcgctggggattgcccacacgctgggcaggaaccacggccaggaaaatgccgtattcgatccgaaccagatcaccagcgtgacgaatcgcagccaacccactcccgggctgtgccacacactgccggcatcgagtcagccacccattgctttcagttgcaaggactacggcgccgacgccggcgaggttgcgccgacgctacgcgcgatggggcacggcgacagccacgccaacgccggcggccaggttacggtacagaacacaactggagtccgtcgcctcacccctcgggaatgcgagcgcctgcagggattccccgacgactacacgctgatcccttggcgtgggaagcccgctaccgaatgtcctgacggcccgcgctacaaggcgatcggaaactcgaaggctgtccctgtcgtgcgctggatcgggcgccgccttaaagctcatctggagaaactctcatga

SEQ ID NO: 366420 - DNA, 366 bp, Pseudomonas aeruginosa
atgccttaccacgtccaaccacaatgcccaaggaagcgctgtaatctgatcgtggcgataccggtaactcagtcgctccagcagccttggctcacgctctacaagcgcatcacagagccgctggaagacctcgaacggagcgtcgcgcatgccaatgacgctcgtgtgcacctgtcggtggatagacagaaccatggctgcaggatcaatgacgtgcaaaccggccaggcgcagtacgtcgacttcgaacgcctccgcacctatcgcatcgaacaaccgctcaacaacttcgagttcatcgatgttgtgacgctccaggccaattatgtgctgtcccgagctcatcgtctccgtccgcgcaattga

SEQ ID NO: 366421 - DNA, 129 bp, Pseudomonas aeruginosa
atgaagcccctccgatcgggcatcattcacctggtggagatgaagtggctcaaagatccagtgggagtgagcgatttcgggccacacctggtcagggtgatgaaccgggcaaatgtgtcgggcatgtga

SEQ ID NO: 366422 - DNA, 768 bp, Pseudomonas aeruginosa
atgcggacagcactacaccgtgacacactcgaaaccctggatgcccagggctatgaagacgcatatggcaagcccgttgataactatggcaaggagcgagtacgacctccggccctttgcgatatctgccgacaagacgtgtttttgcgagctgagcacagcaagctgcgcactcccaatttcgttcacttcgaggacagcgctccctgtccggtcaaagccttcaacgctcaagcctaccgcgcactcaatcctggacagggcaatgccgctgacgcccagaggcttcgagagggcttctttgcgacctggcggtatcactggcgagaattcgaccggatcatcggttacgcctcggtgttcgatttcgtcaccgtcctcaaatacgctgatcgccacggcatctggcgttaccgggacatgggtgttcaggatgtgctgcctgtcctgctgacgctgatggacttccctccgctcccaaagggcaagcgccatctgcgtgactatggcttgcgcttcctctatgtgggcaccgttgccagtaccaatgactactggaacctgccggcccacgagcggcgccttctcaaagtggtttacgaattcccggggcaggctcgtacattccagtcagaacgaatttcagcgaagcatcccgtggcttttgagccggactacgaggcagctcgcttcgatttggacgtcgacaatcaacccacagcccacccctatgtcgttaacaccatggccagggatttcaaggtgtag

SEQ ID NO: 366423 - DNA, 2160 bp, Pseudomonas aeruginosa
atgaatcccacgcaccgaagtgaagccgaagttttcaaggaactgataaatctgacggctcgaccaggctacgctcacgctatagccgggatttgtcatcgcgacaactttgtgtcgttccaaggcgagcacaagccctctgaccttgatcatatatttgaccgtaaaagactcaaccgcaatgaaataggcacggtgttgggtctgatgatgcgtcagcctctcgatctgtctgaggtcgatgaagccacacttagaggctatgcctcccgcactgatcagctattgggtgagcttcacagtgctctgaacggccaggtgatcggcgagctggcaccacaagcccagaagggcgaagtcatggaagacttttggcaagggccgatgatgaaggagcccattttctatgccaccgaatcagcctacagcttccagtatcgagatttttttgcagagaaacacgctccggatgatgcctggttagagcgggtcatggggttcagcagcgcccaagctttacgagtggcgaacgcgatgtgttcgttgatgaacgagcgagctaacaacggagcgcgactgactggtgaaccccagctaggccagatgccgacaggctcggtgctggagcttttcgagttcagggcgcaggaagtagcccattgttcgggccaggaactggatgtcgttgaggcagttttcaaagcgctgacgttcagtggtgataatggcctgttcagggaggttggggacttcaaccaggtagcagctacgcctctgctgccaacaggtcgggactcagtacttctgttttctcatcacatgatttacgaagccctgtacgagtcgcctttcttctggatgaatcaggataaggattacaagcaacaggcctccgacaatcgtggtgcatttactgaacggttttctctgcgccgcttggcatcggtcttcggaaggtcgaacgtccacaccaacgtcaacttgttcgaggggaagcggatcgtcgctgaagcggacgtgttggtcatcttcggtgatcggatcatcatcgttcaggcgaaagccaaaaaactgaccttagcggcccgcaaaggcagtgatggacacatcaaggctgattttgctgccgccattcagaaggcctatgaccaaggggctgaatgcgcgacagctattagatctgggagctgccgcctcgaagacgatcaaggccaagcggtcgtgcttccgaagcaagtcaaagagatctatccgttctgcgtcgtgtccgatcactacccggctttagcattccaagccagccaatacctcaaatacgcagccgatgaggtcgttcgtccacctttggtgatggacgtattcctgctggatgtccttgcggagatgcttgatacgcctctgcgttttctaagctatatccgaatgcgctcagagtcatcatcaaagctgatggcagggcacgagctcacaaccctggcctatcatctgcggtgcaatctctggctcgacgatcagttcaatatggtgatgctggaggactcgatcgcagcagatttagataccgccatggttgtccggcgggaagggctaccgggccagcgagtccctgaaggcattctcactaggatgaaagggacgtactacgagcgcttgattgagcaaattgagcgccgacctaacccagcaattcttgaactgggtttcactctgctttctatgagcggagaaacgtgtgatgcggttcatcaggccattgaacgcttgaccaacatgacgaaaatcgatggcaagcgccatgattttacgattggtatgactgagcatggggcggggatttgctttcactgtaaccccgctcctagccaggaagccatcaggacgcttgaggtgcactgtgccaaacgcaagtacacccatcagacgccggaatggtacggagtttcggtgggggttaatggcgaaattcagtttggcatcacgctcaatttcccatgggagaagtctatcccgctggatgacctaacaagggaaatgaaaccatcttcatctgttagacagggcctgaaggccatggagagattgtttgcccccaaaaagcatgggcgtaacgatgcgtgcccctgcggaagtggactcaagtacaaaaagtgctgtctgtga

SEQ ID NO: 366424 - DNA, 1755 bp, Pseudomonas aeruginosa
atgctggaacggaaagctttgcttgatgagatcgctactcactttgctgtacttaaattctttattgaaacgaacaccgcctctggatttgttgacaccaatatagtaagtgaagattttgtcgctagcatattgaatgtctcgcacaagtggaatctagccaataccaaccacacgaccacgaacgccaagtccattgatttactggacgaatccaatcgaattggggttcaagtaagctcacgagtcgactcgaagaaaatcaactcaacgatcaacggcttgatcgagaatgagcatcgtacaaaaataggtgaactgttctttttttcactgaaacaaaagcaaaccagatacaaagtagatgccgagtgcccaggcattaagttcaccactaaaaacgtgctggatttcaaccaagtcatacgcaaaacaaaagctctgtcaaccggggttgatgaccttaggcagatgcgtgacgtcgtgataaaaaacttctccgaaatccctaggcgcataattgaaaaagcgacggccataagcaactggctatcacatttcgacgactcgattgttgacaaaaagctggaagagctcctagggcgatcatttcaaacaggagagacgcttaaagcccaagccattcttctaatcgaaaagaacgaactaaaccaagccaaggaattgttagacagcttggccaacactagcagaaagatggcggcacaggatttcattgatatagccaacctctatacactactgggctccgaccaagcagatatttattattctcatgctgcaagcctggatcccgaaagcgtaaaagaagccaacctctatgcgatagggcttatgcttagaggcaaactaccggaggctgagaaggtctttaaagcgtgcctcgaaaaagaagatatcactctcaaagaacgagaggcagtacttgggaacctgggattcctttataagaacaacgggcgcttccctgaatccatagacgcgtttgaaaaagcattggtaatatccgacagcattgatcacaaaataggtcgaataaagcaccttaacggtctgggcagctgctatctaaacctagaaaacctggaactatccgaccagtacttcagtcaagccaagtcattgcttgacgacacgctgaaaacttcaaaggacgatagcgaaaagaaagaactgcgctcgatcaagtcaaatttactgacaaacatcgccattcgcttgaagcacatggctgaaatctcaggcgacgaaagcttgttccaccaggcattggagttccttgatcaggccgttgacttggcggagatgatgagcgactcaagaagcctgttacggcactacggaaatatcgccaacatctaccagggactcaagaacctggaaaaatcgcgcgagtacaacgttaaggcctacgaactatcaatccaagaggaagacaaaaggtcacaagtagcatcgcttttaaatatcggcctagttgacaaggacgaaggagacctactctccgcaaaatccaacttcaaacttgccctcaaactagaaaacaacgtatacccaaaaattcgagctaatctactggccagctccgcgcttgtccataaggcgctgggagagcactcagatgcccaagagcattatgaccaggccgaaaagctttacaaagagctgggcctgcaagactccctatatagcttagaggtaagattttcacaggtgaatgctgcagaatcgtaa

SEQ ID NO: 366425 - DNA, 1281 bp, Pseudomonas aeruginosa
atgcagcagtacgttgagcgcaaagatagattatcaatgatagagcgacctactttcatcgacgcttttgctgggtgtggtggcctgagcctgggtctcatgcgctctggttggaaagggctatttgctatcgagaaggattctttcgctttcgatactttaaaaagcaacttgcttgatggtaatagagatgctcagtatcaatggccggagtggctaccacaagaaccgtcatgcatagactctctactcgaaactcataaagagaatctggagctattgcgtggaaaggtagatctgctcgcaggtggtcctccatgtcagggtttctcttcggcgggaaagagaaaccctgcagaccctcgcaatacactgatgaactcctatctggatcttgtcagaatattggagcctaggattgtactcattgaaaacgtccatggaataactttagatttcacaaagaaggaaaatccgaaagagtccattaattactctaaagtgttgcttgacgcactgagcgaggcctatgtaactagctggaggatgctagactcttcagattttggggtaccgcaagctagaaatagattcttcttaataggaatcaggagggatatctatagtgagaaaatcaaaccctttgaaagtctagagtcacttaagagtacctttttgaggaagaagggcctcgtaaataaggtgggagctgctgaggctatttcagatcttgaaataagaagaaatggaaagataaactatccctatgattttaaatatgaagcaataggatatgtagctccaaggacagtttatcagaagctaatgcgagatggagagaccgatgcaccttccaatacccgattggcgaggcatcgaaaggatatctctgagaggttccagaagatcatcagtatttgtcacaaaaatggtcgcctaaataaatcaattggcagagagctgcgagaggcttttggattgaagaaacaggcacttcgtgtcctagatcctgataagccatcaccgacgattactagtatgcctgatgaccttcttcactatagtgagcctcgcacgctcacggtcagagaaaacgccagacttcaaagtttccctgactggtacgattttaaaggaaaatacactagcggcggccatcgtagaaaaagagaggtgccgaggtttacgcaagtggcgaacgccgtgccgccactgttagccgaggttattggtaccactatcctacactgcctatcaactcagctagaagcacttgattag

SEQ ID NO: 366426 - DNA, 933 bp, Pseudomonas aeruginosa
atgaggttggacttcagaattctttggattgacgatcagccaaagcatgttgcgagctttgccgatgggatacgaagaacactcaaagagctagggtttaacttggatctgatagagtatgccagcctcgaaaaagttagggagtatattggtgctcatgttcatgatgatggaattgacttagtacttgtagatttcgacctaggacacggaagcggagatggcggtcaaaaagtgctggctgctgttcgagagcgtttcccatacaaagatattatcttctattcggcaaccgacacccataaacttcgagagattgcgtactatgccagtattgacggcgtatacttttctaccagactttctctcgttgatgatgcgcgagaggtaatcaataatcttctcaagaagactctagaccttgaccacatgcggggcgtcgtaatgtccgcaactagtgatatagattacatggtggaaaaaagcttagtcgccgtctatgacaggttgaatgaagctgaaaaagaaaagttcttaaatgaagcgactgagagcattcgagaaaaattagatagatacgccaaggaagtcgaaaaggcgagcgggaaaaatgacttctcagcaatcctcaagttgaagcatctatttacagcagcagatcgactagactccctttataaggagctaagctcaagagctagcgcaggcgttagtgggtacttggatcaagttaaaatttatcaaaaagatgttattccgaggcgcaataaattggctcatgcaatgctaagaaacgtggatgggcgtcaggtattagtcggagcagacgagcctatatctcttgaggaaatgacgagcctacgctgtgagctaatcgatcaccgaattaacattgagagtatcgcagtactcgttgatgttaaacttgactag

SEQ ID NO: 366427 - DNA, 2373 bp, Pseudomonas aeruginosa
atggacgagaaaataacgcctgagggcgaagataatggactgcacttcgaggtaagtgcaggcttgaagcgcgtgatcgggcgggacttaattacagatgatgaggtcgcagtcttcgagttagtaaaaaactcatttgatgcaaatgcaactgtagtggagctgttttttgagcctggcagaattctgataattgataacggggatggaatgtccctggatgacattaagaacaagtggctcatggttgcctactcctcaaagaaagctgaggagaaaaccaccgatggattcaggcagcaaatatcaagcgcaaagcactacgctggcagcaagggaataggtcgtttttcttcagatcgcctcggaaatgagttgcgcatgcaaactaaaccagagggggccgataaagtacatatagttgaagttgactgggggctctttgataaggaccagtcgacccattttgaccaagtacctatcgaatatgccgaagcggatcagttctcgctcccttctgaggtaaagagtatttcgaatggtaccgtaattgaaattttatctacacgtgaaatttggaatagggagtcaattcttaagctaaaatcatcgctggcgaaacttataaacccatttggtgcggaggctgatggattcgggattaacattctctctcctagcgaccttggtattgataaaaagctaattgagcaagcagaagagagtggcgaagcccctcctcaaaatgcacttgttaatggtcctgttgggaattttattttctctacacttagagaaaaaaccacctttattgaagtcttcattgatgaggatggaaaacacattatcagctctctaaccgacagaggggagctgatatataaaataagagagcctcacgattatgcggagttagaaaggtctggcttttcttgcaggttatactatctaaatcaatctgccaaacatacttttgcacgcagaatgggattgccttctgttcagtttggctctgtatttctattcagaaatggcttcagagtttatcctattggagaagacggagacgattggttcggaattgaccgcagaaaacaacaaggctatgcgcgattcctaggtactcgtgacgttattggtcgagtggacgtatcaggaaccgaagagcagtttaaggaagcctcgagccgcaaccaaggcctcatcgacacacctgcagcaagagcaatgcgtgattgcttttgggagttttgcctaaagcgactagagcgctatgttgtacctgtaacctgggtcgactcgggcgagaaattttcggatgacctttccaggttgcttacagactcaggcagagccagggtcgctgcggcagtttcgaaattggtagacaatccggaagttgaggtaattgagtacagcaggaagcttatcagcatacttaatgagcgctcgaagcaatttgaagagtcaattgccagccttcgagcaatagcagttaagacaaatgattctgagctattatccaacctacatcgagctgaaaaacggtttgaagatctaaaggcagccgaagcagaagccttgaagttcgccgaagaggagcgccgtgcaaaagaggcggcccagcagcaggcgaaagcagctgaggccaaagtaaaagaagcggaggaaagccttgaagaagagaagaagagaaatcttttcctcacttccatttcatctttagattctgacattattataaacatgcatcaccagatcactatctatgcagcggatctcaaacagcaggtagagaactgtctggcagcagccagagcaggagagttgaattctgatgacttagtttcgcgaatggagcaagtcgcgttcttgaatcagaaagtcctttccatttcacgattggccacaaaggcaaattttagattagagtccgataaaattgaggctgatgtagctgactttatcgctcaatacgttctcgaaggtgcagcaccattcttaggcgcaggtttaagactggaagttgaaaatagtgcagagttgataaagcgtttcagcccaatcgagatatctgtggtcgttgacaatctaatcaacaattccagaaaagcacgctcatccgtcgtcaccttttctctttcccaggtagataaaaagactatacagatagacgtgtcagacaatggaactggattgcaatctgccatttctgaaccagagagaattttcgagcttggcttctcgagaacatcgggatcagggctcggcctttatcatgttcgccaggtgcttggtgagctaggtggtagcattgctctcgcaaaaagctcgaacgcagggactacattctccgtaaggattacagcatga

SEQ ID NO: 366428 - DNA, 840 bp, Pseudomonas aeruginosa
gtggctaatgatcttttttacgaagatattctgcacaataacttaattgttatagttgacgcgatcccagatggtgagattggagcgcagcctttaaatcaaagcatacaggattgttttagcgagcaaggaatcaccagttattgtttttatgaaagagttcgttcgctacaggaatttagactcctttttgaagcgcttttagcctatgctgaattaggtgcattaccagttatacatatagaggcgcatggagcaaaggggaagggactaagaatcggcaatgaaataatgggatggcaggagctatacgagtactccctaaaaataaacaccaggacaagaaacaactttggagtcattttatcatgctgctatggaaatgaactttcaagcttggtaagcgttgataggccttgcccatttcggtttgttattggtcataaatatgaaatcaacgccggcccccttagggatcaaatgttatccttctacaaagaaataattttatcaggcaggcttgatactgcggttggtcatcttgatgaaggattttctcatttctcaagcagtaagtattttttgataaatattgcaagttttttctcaaaaaattcatcaggaaaatcgcatagactgcttatagaagatttacttaccagggtgctagaaggtcgtaatgccagtcctacttcaataagcgccattagaaatagagtgaaatatttagtgaaatctccggagtggtttataacccaatacatgagaaactttttgcatggcgaagagccggtgagcttttcagatttagaacgtttttatcgagatgttgaaaagtga

SEQ ID NO: 366429 - DNA, 549 bp, Pseudomonas aeruginosa; identical to SEQ ID NO: 351918

SEQ ID NO: 366430 - DNA, 204 bp, Pseudomonas aeruginosa
atgactaccccttttgccgtgacgggcgccgatcttcaactgactgagcgtgttgaccaagcgctccagcagtttcgtttggggctgatcaccgctcaggagcgacaagcgcagaccgataaggcgttcgccatctatcgcgccggcgtgaacgccggcagacaactcgctcttgagtgcctgagccgtgaggtagatcgatga

SEQ ID NO: 366431 - DNA, 237 bp, Pseudomonas aeruginosa; identical to SEQ ID NO: 338785

SEQ ID NO: 366432 - DNA, 180 bp, Pseudomonas aeruginosa
atgattggactggtccaccagtcgctgcaggacggtagcctggagcccttcatggagcctggcggcgaaaccagcagcggccaggacctggtcttcagtcaggctgtcggggtctgcatcttcccaggactggatgaatcgagctgcatcgataaccgagcgggcgacgatgcgatctga

SEQ ID NO: 366433 - DNA, 240 bp, Pseudomonas aeruginosa; identical to SEQ ID NO: 326531

SEQ ID NO: 366434 - DNA, 1887 bp, Pseudomonas aeruginosa
ttggcgctgatccggccctgctggccgttgtccagccgggcggccaccagggtgatgccggtgttgctgccgatgctgccgtcgcggctgttgtccagcgcgccggtgcggatatccaccgcacccttggcgctgatcacgccggaacggctgttgtcgaggctggcgcccttcagcgtcacgccggcatcgctgagcagcctgccgccctggttgtccagcgcggcctggctggtcagcgccagcgcaccggcgctggagaaggttccgccacggttgtccaggcgcgcggcgcgcgccgtcaggctgccttcgctgaccagcgcgccgccctggttgtccagcacgccgccgaggctcacgctcaggctgttctggctgtcgagccgcccgccgccgccgttgaacagttcgccgccgtccaggctcaggccgtcgcgcccggccagcacccccttggcctggttcagcaggcgctgcacggtgaggcgcaggccgctgtcgccgatgaccttgccgccgcggttgtccagttgctcgcgggcgttcacggcgaccttcgaggtgctggaaatctcgccggcgcggttgtcgacctgccgcgcctcgatagcgatgccgccattcgcggcaatcagcccggactggctgttgtcgagcacgtcggccgcgaccttcagggtcttttcgctgaccagttcgccaccttgctgggccaggctgccaagcgtcgcctgcaggtcgcccttggcggcgatacgccctccggcgttgccgacggcgttcgctgcgaggtccaggcggccatcgctgagcagcttgccaccctggtcgttgcgcaggctggcaacctccacgcgcacgccagccttgccgctggcgctgccgccgtcgcggttgtcgaaggcgcctcccgtggcgctcaggccggcgtcggccaccagcacgccgccacggttgtccaggctggcgccgtggacgttcaactcgctgcggctcgacagcaggccgccggcgcggttgtccagttgccccaccgtcacgcgctgcgcgccctggctgagcaggttgccttcatcgcggttgtccagcaggccgccgaggctgacctccaggccgccccggctgctcagcgtgcccttgccgctgttgtccaggctgcgcgcccgcaggtcgaggcggttggctgcggagaacaagccgaggcggttgtcgatggcaccgctggcgaccaccagcaggtcgtcgccgatcagcttgccgccgcgattgtcgaggctaccgacgcgggcctcgacgcgcttgccggagacttcgccgtccccccggttgaccagcgcctgggcgctgacgcgggtggactgctggctgccgagcaggccttgctggccgttgtcgagcgtcgccgcgccgacctccaggtcgttcaggccgatcacctggccgccacggttgtcgagatcgccacgggtcttgaccacggcgcggtcccggctctgcaacaggccgtcctggcggttgtccaggctgctcgcctcgacccgcagttcgccctcggcgagcagcttgccgccacggttgtccaggtgtccgccgtcgacccggacggttgcccccttcaggctgccgccctggttgtccagcgcctggctcgccttcgcttccagcgcgcggctggccaccaggctgccggcgttgcgcagggtgccgctgcgcagctcgaggtcgccgcgcgcgttgcgccgctcgtctggctcgacgccggcttcgatcaccccggcgttgtcgatatgcgccgcctccagcgcgatgcgttcgcgcgccgccaggctctgccggttgaccagttcctccgcgctgcggatctcggcgctgccaccggcgtag

SEQ ID NO: 366435 - DNA, 237 bp, Pseudomonas aeruginosa
  misc_feature (24)..(33): n is a, c, g, or t
atgtacgatcagccaccagtaggnnnnnnnnnncaaatcaagcaggccttgctgatatcgaacctgcaagcctgctccgaacttatctcccgcatcactatcatcggtgacaaagtcaatacgcatcttgcatgcttcttccacacccacaaggtagcaaaccataagcctattcccttgcccaagctccctatatctgggagcaaaggaaagcaggttcttgaaatcgcgaactaa

SEQ ID NO: 366436 - DNA, 1506 bp, Pseudomonas aeruginosa
atgtgtggcatcgtcggtatcgtgggcaagtcgaacgtcaatcaggcgctgtatgacgcgctcaccgtcctccaacatcgcggccaggacgctgccggtatcgtcacctgccatgacgataagctgtacctgcgcaaggacaacggcctggtccgcgacgtcttccagcagcgccacatgcagcgcctgatcggcagcgtcggcatcggccatgtgcgttacccgaccgccggcagctccagctcggcggaagcgcagccgttctacgtcaactcgccctacggcatcaccctggcgcacaacggcaacctgaccaatgtcgagcagttggccaaggaaatctacgaatccgacctgcgtcacgtgaacaccaactccgattcggaagtgctgctcaacgtgttcgcccacgagctggcggtgcgcaacaagctgcagcccaccgaggaggacatcttcgccgcggtttcctgcgtgcacgaccgttgcgtcggcggctacgcggtggtggcgatgatcaccggccatggcatcgtcggtttccgcgaccccaatgcgatccgtccgatcgtcttcggccagcggcataccgagaatggcgtcgaatacatgatcgcctccgagagcgtggccctggacgtactcggcttcaccctgatccgcgacctggcgccgggcgaggcggtgtacatcaccgaggaaggcaagctctatacccgccagtgcgcgaaggcgccgaagtacgcgccgtgcatcttcgagcacgtctacttggcgcgtccggattcgatcatggacggcatctcggtgtacaaggcgcgcctgcgcatgggcgagaagcttgccgacaagatcctccgcgagcgtcccgaccacgacatcgacgtggtcatcccgatcccggacaccagccgcaccgcggcgctggaactggccaaccggctcggcgtgaagttccgcgagggcttcgtcaagaaccgctacatcggccgcaccttcatcatgcccggccaggcggcgcggaagaaatccgtgcggcagaagctcaacgccatcgagctggagttccgcggcaagaacgtgatgctggtggatgactccatcgtccgcggcaccacctgcaagcagatcatccagatggcccgcgaggccggggcgaagaacgtctacttctgctccgccgcgccggccgtgcgctaccccaacgtctacggcatcgacatgccgagtgcgcacgagctgatcgcgcacaatcgcagcaccgaggacgtcagcaagctgatcggcgccgactggctggtctaccaggacctgcccgacctgatcgacgcggtcggcggcggcaagatcaagatcgatcacttcgactgcgccgtgttcgacggcgagtacgtgaccggcgacgtcaacgaggcctacctgaaccggatcgaacaggcgcgcaacgatgcgaccaaggccaagagccaggcggtcagcgcgatcatcgatctgtacaacgactga

SEQ ID NO: 366437 - DNA, 768 bp, Pseudomonas aeruginosa
gtgatcgaacccaacctgcgaggcaacggcaaggtcgccctggtcaccggggcggcccggggcattggcctgggcatcagtgcctggctgatcgccgagggctggcaggtagtgcttgccgacaacgaccgtgaacgcggggccagggtggccgaggcgctgggcgagcacgcctggttcgtggccatggacgtggcccaggagggccaggtggcgatgagcgtggccgaggtgctcggtcagttcggccgcctcgacggcctggtctgcaacgccgccatcgccaatccgcgcaatacgccgctggaggcgctgagtctcggcgagtggacccggaccctggcggtcaacctgaccggtccgatgctgctggccaagtactgcacgccttatctgcgcgcgcacaatggcgccatcgtcaacatcgcctcgactcgtgcccaccagtcggagcctgactccgaggcctacgccgcgagcaagggcgggttgctggcgctgacccatgccctggccgccagcctgggcccggatatccgtgtcaatgcgctcagccccggctggatcgatacccgcgaggccgccgagcgcgaggctgcgccgctgaccgagctggaccacgaccagcacctggtcggccgggtcggaacggtggaggatgtcgcgtcgctggtggcttggctgctctccgaggacgccggtttcgtcaccggccaggaattcctggtcgatggcggcatgacccggaaaatgatctacctcgactga

SEQ ID NO: 366438 - DNA, 1005 bp, Pseudomonas aeruginosa
atgccgatccatcacgccatcgtccacctgatcgagaagaagcccgacggcaccccggccgtgctccacgcgcgcgacgccgagctgggcgactcccaggccatcgagaacctgctggccgacctcaacgaaagctacaacgccaagaacaaggcctggggcttcttccagggcgagtccggggcctacccgttcagcggctggctcggcgagtacctggagggcgaccgcgacttcgtcggcttcagccgcgaagcggtcgagcacctgcaaaagctgatggaggagtccaatctctccaccggcggccacgtcctgttcgcccactaccagcaaggcatgaccgactacctggcgatcgccctgctgcaccacagcgaaggcgtggcggtgaacgagtcgctggaggtcaccccgtcgcgccacctggacctcggccagttgcacctggccgcgcggatcaacatttccgaatggcgcaacaacaagcagtcgaagcagtacatctcgttcatcaagggcaagggcgggaagaaggtctccgactatttccgcgacttcatcggctgccaggaaggggtggattcgccgagcgagacgcgcaccctgctgaaagccttcagcgatttcgtggaaagcgaggacatggccgaggaacaggcccgcgagaagaccgagacgctggtcgactacgccacctcgcaggcgcgcatcggcgagccgatgaccctcgacgcgctttcggaactgatggacgaccagcaaccgcgggcgttctacgactacatccgtaacaaggactacggcctgtcgccggaaatcccggcggacaagcgcaccctcaaccagttccgccgcttcaccggccgcgccgaaggcctgtcgatcagcttcgaggcgcacctgctgggctccaaggtggaatacgacgaagagcgcgacatgctgatcatccgccagttgccgacccagttgaaggaccagctcaagcggcgcaaggactga

SEQ ID NO: 366439 - DNA, 1164 bp, Pseudomonas aeruginosa
atgagccgctttcgaccgataaaccgcgaaatcgactacttgctcccgccgtcggtgcaggactggctgcccgagtcacatttggcgcgctacgtggtggaggtcgtagagggcctggatctgtcgaagctggagagcgtctatgcgggccgtggcagcgctgcctaccatccggctatgttgctgtcgttgctgatctacggctatgccacgggtgcgtattcaagccgcaagatcgagcgagccagctatgactccctggcgttccggtttatcgcctgcgaccagcacccggatcacgacaccctggccagcttccgccgtcgccacggagagcagttcgccgcgacctttgtgcaggtactgcaaatcgcgcgcgagaaccaagtctcgcgttttggcacggtcagtctggacggcaccaagatccacgccaatgcctcgcggcacagcgccctgtcctatgctcacgccgagaagatcgaggcccagctaaaggccgaggtccaggagatgctcaagctggcagaagcggccgatcagagcgacctccccgacggggtcagtctgcccgacgagatcaagcggcgcgaagaccgcctggccgccatagcagaagccaagaccaagatcgaagcgcgggccaaggaacgcctcgagcgcgagcaggccgagtatcaagccaagctggacaagcgcgaggccaaggaaaaggccaacggcaagaagcctggaggcaaaccgccgaagccgccgcaggtgggcccgcgcccggacgaccagatcaacctgaccgacgaagagtcgcgcatcatgaaggtggctggtggcggcttcgagcagtgctacaacgcccaagcgctggtcgatagcgaatccatgttggtcatggcgccgcatgtgacccaggcgggcaacgacaaggaacaggtcgtaccgatgctggccaagcttcaagcgcttcccgaggagctgaaccagccggagaaattcctggccgatagcggctacttcagcgagaagaatgtcgaagcctgcgaggccgccaggatcgagcccctgattgccgtgggccgcgacgcccaccatcggcactggcgcgagcgtttcgaagagccggcagcgtcatcggagccgaccagtccggtcgtaaccgctccataa

SEQ ID NO: 366440 - DNA, 255 bp, Pseudomonas aeruginosa
atggggtctatggagcgcatacgtccggtcgacaaaatgaagcaccgactcaagaccaaggccgggcgcgcggcctatgggcagcgcaagcagacggtggaaccggtattcggaatcatcaagtcggtgatgggcttccgtcagttcctgctgcgcggtctggcgaatgtccagaacgaatggaccctggtgtgcctggcgtggaacttgaaacgcatggccacgttgcgcccgcattccgttcaaaatgcgtga

SEQ ID NO: 366441 - DNA, 1713 bp, Pseudomonas aeruginosa
gtgaccccggtgctgtggcgcctgctgcgcacctatcgctggcggctggcggcggccatggggttgcaggccctggccgggctctgctcgctgttgccctggatgcttctcgcctggctcgccgagccgctggcgcgcggccaggcgcagccggccctgctggccctggtgctgctggcggtgctggcctggctgggctgccaggcgctggccgcgcacctggcccaccgggtcgacgcggacctctgcaacgacctgcgcctgcgcctgctggcgcacctgcaacggctgccgctggactggttcggtcgccagggcccggacggcgtggcgcgcctcgtggagcaggatgtgcgggccctgcaccaactgatcgcgcacgctcccaacgatctcagcaacctgttggtggtgccgctcgtcgcattgctctggctggcctggctgcacccctggctgctgctgttctgcctgctgccgctggtgctggccgccgccggcttcctgctgctgcgctcggcgcgctatcgcgacctggtgctgcggcgcaacgccgcgctggaaaggctctcggcggactatggcgaattcgcccacaacctgctgctggcccgacagtaccccggcgccggcatacaacagggcgccgaggcgtcggcggcggccttcggcgaagcgttcggcgcctgggtgaagcgggtcggccacctcgccgcgctggtctacgtgcagttgtcgacgccctggctgctggcctgggtcctgctcggcgcgctggccctggatgccctcggcgtgccgctggtgctcggccaggcctgtgccttcctgctcctgctgcgggccctggctgccccggtgcaggcgctcggccacggcggcgacgcgctgctgggcgcgcgcgccgccgccgagcgcctgcagcaggtgttcgaccaggcgccgctggccgagggccgctcgacccgcgagccagtcgatggcgcggtggcgctgcacggcctgggccatgcctatgaaggcgtggaggtcctggccgatatcgatctggagctggaggatggcagcctggtggccctggtcggtccctcgggctccggcaagagcaccctgctgcacctgctggcgcgctacatggacgcgcagcgcggcgaactggagattggcggcctggcactgaaggacatgcccgatgccgtgcgccaccggcatatcgcgctggtcggccagcaggcggcggcgctggagatatccctggccgacaacatcgccctgttccgccccgatgccgatctccaggagattcgccaggcggcccgtgacgcctgcctcgacgagcgcatcatggccctgccgcgtggctacgacagcgtgccgggacgcgacctgcaactgtccggcggcgaactgcaacgactggccctggcccgtgcgctgctatcgccggcgcgcctgttgctgctcgacgagccaacctcggcgctggatccgcagaccgcccggcaggtcctgcgcaacctgcgcgagcgtggcggcggccggacccgggtgatcgtcgcccatcgtctggccgaagtcagcgatgccgacctgatcctggtgctggtcgctggccgtctggtcgagcgcggcgagcacgcggcgctgttggcggcggacggcgcctatgcgcgcttgtggcgtgaacagaacggcgcggaggtggcggcatga

SEQ ID NO: 366442 - DNA, 2199 bp, Pseudomonas aeruginosa
atgcggttgttcatagcggagaagccccagctcgggcaagtcatcgccgaggcgctgggcggcggtcaacgtcgaggcggcagtatccagtgtggtcaggacgtggtgacctggtgcgttgggcacctactcgaactggccccgccggaggagcacaacccggcgtatgcgaagtggaacgcggcggatctgccgctgaagctgcgcccggtgaagtaccagccgattgccggaacggcggaccagttgggggtggtggggcaactgatcgcccaggctgatgagatcgtgcatgccggtgacccggatgaagaggggcagttgctggtggacgaggtgttggcctatttcggcaacagtcgaccggtgaagcggatcctgatcaacgacctgaacgcagccgcggcacggaaggcgctgggtaacctacgcgacaacagcgagttccttgggttgtcgctgcggggccaggcgcggagcatcgctgaccagctctacggcttcaacatgacgcgggcgtacagcctggcggtgcaggcgcggggggggcgaggggtgttgtcggtggggcgggtgcagacgccgatccttggcctgatcgtgagtcgatatctcgcacacacggctcacaagggctctttctactacaacgtatcggcagcgctggactttaagggtcggatccgggggcgtctgctggtcgcggatgacgctccgactgacgaaaaggggcggatcctcgaagagagttatgccaacggcatcgcgagcgcgtgtcgcggccagccgggcctagtcgtgtcggtcatccaggaagagaaatcgcaggtcgcaccgttgccattttcgctgctggacctgcaggcgcagatgagccgtgaacatgggatcaatgcggaaaagaccttggcgatcacccaggcgctgcgcgagaagcacaaggcgatcacgtacaaccgctcggactgcaactacttgtccaccgagcagcataccgaggcgccgggaacgctggcggcgctatcgcaagcactaccggagctgcggacgaccttcgagcagcttgacccaggacgtaagggacgggctttcaacgattcgaaagtgtcggcgcataccgcgatcatcccgaccgcggtagtggtggacatgaatgcactgagcgccgacgagcaagcggtctacctggcgatcgtcaggcagtacctggtgcagttcatgagcgagaagcggtatttggccgtgaaggcgctgtttgaggtgcagggtcatgtgtttgaggcgagcgcgaccaagaccacggcgccgggctggacccagttgctgcgcgaggtagccgatgaggcgagccaggccggcgaagaggatgagggcgaggtggaagctacgcagttcgaggagctgtcggctctcgctggaggggagcaaggccattgcctggatgcatcggtttccagggcgaagaccaagccgttaccgctgtataccgaggcgaccttgctgaaagaccttaagcaggtggccaagtacgtgcaggaccagcgcatcaaggcgctgttgctggaccgcgacgatggcaaggctggagagcgtggcggcatcggcaccccggccacccgggcggcgatgttgggcaagctgcaggagcgcggtttctacacgatcgagaagaagaagctggttccgacggccctcggagtggccttcatccaggcgctaccgcggatcgcaacgaccccagacatgacggcgctgtggcatgagcagcaggtgatgatcgagcgtggcgagctgtccgtcgatgccttcctggacgagctggaggccttcatcggtgagcaggtcagcacgatcgatctcggcgacatgcccattgccggacgtgctggggtcgagccgctggcggcgcgctgccccatgtgcggtggcgagctggccagaacggcaaaggtggtggggtgcaaggggtgcgagtttcgcgtgtacccgagcatcgccggcaaagagctgaccaccagtcacctcgaaagcctgctcagcaagggcaagaccagtttgatcaagggattcaagagcaaagagggcaaggccttcgacgccgccctgctcctcaatggccaaggaaaggttgtgttcgatttcccgaagaccagcaagaccagcaagaccagcaagaccagcgggaagcgttacgcgtaa

SEQ ID NO: 366443 - DNA, 150 bp, Pseudomonas aeruginosa
atgatcacgttaacctcgctgattgaacaaattttcttgatggttactttgatcctgatcctgatcctgatcctgatcctgatcctgatcctgatcctgatcctgatgctggggttggctcgtttggcttatggcggacagatagactga

SEQ ID NO: 366444 - DNA, 1263 bp, Pseudomonas aeruginosa; identical to SEQ ID NO: 326666

SEQ ID NO: 366445 - DNA, 1158 bp, Pseudomonas aeruginosa
atgctggataccgttgaggtcctgcttccagccattccaagcatgctgtactcgggcctgggagttgatcgtgtctctcgcattctctcactacgaaaggcttccctgggctgctggaaacgcctttactccggcgagggtatcgacttcgagatgctgttccaggacaccctggcgatcttcgacagtagccctgacgagttcattttcgagcgtttccaggacgaactcatcgaccagatgaagcgtcccttgggccttcgctatgatcaaatcctgctcgagatcaccaacggccagcaggagcagcgccgcggcactctggtcgacctgcccgcacctgccgcaccacctggaatcccagccgtagggcaggaaaatcctgctgcgtcgactactggacaagcacaatcacagagccccgctgccggcctccaaacgtccaagaccaatagcctcccgggtaatccctctaccccgccagctccgccactacctgtacaacagcagcaactgaccgacgaggagcgtgctgaactcttggcaggtcatatcgtgagcccggtatccaccaagattcagcagactcgccaacggctggccgctctcgagggtgaacatctacctgtcttcgaggaaacagctctgcaggcaatcccggtgcaagtcggcggcctgcacccgatcaccgacctctggtacatcgagcggtcgatcgacacccccgaaatcctgcgacagcacatcgctgacttggtggaagaaattgcctttatcgtcggcgcccccggaacgatcgagaggattcaaggtggtgtgggctactcgtaccgggagccagcagaagattgcgaactttctgaggcagccctgcacctgatcaccttgtttcagtctctcagtggccaggtccaggtaatcctggacaaggtcgactcgcaaacttgtcgtgatgctctgggtgaattccagttctcagctggcctcgctcagttgctgctgggccaacccaccacaggcgatcagccatccagccaggcaggccgtcttaatgacgaagccctggtgaaactgttccggatcattcgtcttgcccggcgcctggttgaccttgagctgccgccggccacctccgagcaagcagctaccgaccagtga

SEQ ID NO: 366446 - DNA, 741 bp, Pseudomonas aeruginosa
atgagcggagcgcagcaagccgtagagcaaatccttggcgatggaagagccggccacgctgggcaaggacttggcggccacaccttcaccgatgatctgaccctggaggaagttcagggcctgcttgatctgctcgggattcgccgcgtccaaggactcgacggccaggtagttgcatacgacctgttctgtcctggggcgggccggctcgccgagggtgtggtcgcgcatcaagtcgagggtcttgatggcgaactggagcaggtggttgtgactgaggatctcgggttgctcgatgagcgcctgttccatcttgttgaaggcgttgatgtaggcctccttccaccgggcggcctccttgccggtgaatcccatgcagaggaaggtgaagccgtcgcgggtcatgcggaatgcgggttcctcccgcttggcccctttgggccccagcacggtctggatcgtgggcgcaaaattgcgctcatgaaactccgtcgagcaatccaaattgcggatcgcgcgcagaacatccttgtgctgcttgccgaagtgtttggcgacgtcgaggctggtagtggtgggcttgccgccggtgatctcgacgctgacctcggtggagggctgggtattggtgttggaaacggtcttgctgctgatgttgctcatgttgtctctccgttggtgatcgtttcgtcgaaggtagagcggtacagctacatgcccacggaaccagggcgggtctga

SEQ ID NO: 366447 - DNA, 357 bp, Pseudomonas aeruginosa
atgctgaaattcaccctccagaaactgtccaccctctgccggcgcctggcagccatctctttggcactcccaggtgtcgccttggctgcactccccaaacccgaggcccctagccgtggggaagggtcgggaatcatgcaaaccatccagaacttcggctatgacggagcgatgctcctcgcgctgctcatctgcgcggctgtctttctgggggtcgcttggcatacctacggcacctatcacgccatccatgacgggaagaagaagtggtcggatctcggagcgggcgtagccgtaggtgtcggcctgctgatcttgatcatttatctcgtcaccaaagccaccaccatcatgtaa

SEQ ID NO: 366448 - DNA, 846 bp, Pseudomonas aeruginosa
atgcagttgctgagccagtccaccggcgacagcaaccgagccatacgcgaaatcggccaggtcacatggcgggagttcagggatgacccggacgttggtcgccgcctcccaacccatctggagaagctcgagggacgcttgaaccaccagcaatgggctatcgatagtcagctcgaagcagatccagcggcagagttcggcatccgaactctgcccgatctacctcattcaaccccgagttcggatgccgaactcagtgaaatcagcggcaagcaatgcgctctaccgctgagttcggatgccgaacccagacagaatccgccgagtacacccttggttcggatgccgaactcatatagtacgtatacatacaaacaagattctgtatttaaaaaaccagtacaaccgcgaacacgcgaggaagcacatccgaactggcaggatctcctgaacggactggagggcgagcaacggttccaggcggtaagcgcgctccgacgggtgtccgaggagcttcggctacccatcatcgagcagtggcggcaccgatgtgccggcggaaccgtcggtaatccgttcggctacctcatgacgctcatccagcgtgcagtccagggaaagttcaacgcttcttgggctccggaagaaccggctgaacgaaccatcccagcagcggaacgccccagtcgtgctccggcaccaccaagccccacaacgcctacacagcctcaggttcagccgaagggggatacccggacagggaacgaagtcctcagccggctcaaggacctcattcggcccaggcacggatcgagcgtgccatccgagcggggtgatgagccatga

SEQ ID NO: 366449 - DNA, 846 bp, Pseudomonas aeruginosa; identical to SEQ ID NO: 366448

SEQ ID NO: 366450 - DNA, 261 bp, Pseudomonas aeruginosa
gtgctgtcgctcatgtaccagccgccgccccacttctcgttgtaccagcccgtgtcaccacgggtcctgaaccagcctccggtgtacgtctcgccggcgacgtcagcagtgccggctttcaccgtgccagtggctgtcacgttgcgcgcgctgatgtccgcgctggtggtgatgttgccgctggccgtgatcgccccggccgcggcgatattgttgcctcccatgtccagcgtggtattcatccggttgagttcaggatga

SEQ ID NO: 366451 - DNA, 1038 bp, Pseudomonas aeruginosa
atggcacttcaaaaactcgtccgtctctatcatacgcttcggtacctgaggctcaagcagataatatttcgagtgtattatcgctttgcccaggtccgagttcatatttatcgaaatgttgctgtgcgtcgttggcgtagggactggtctgcgccctcttggaggaatttgtcaacgaatgatgctgtggagttcacctttctcgggataacagggaaagtgcagtgccccgaggactggcaagctgataggagcagtaaattatggctctataatctgcactatttggatgatctgaacgctagggacattggcagtcagcctgggctagccgataaactaattcaaagttggatccaggctaatccaccggtatccggtgaaggttgggagccttatcctctttccttgcgtatcgttaatcttgtgaaatggcttgctcgccatgatgagcgttcgacctttctggcggacagtctagctgtacaagcggacgcgctggtgcaacaagtagaatatcatatcttgggaaatcatctattcgctaatgggaaggcgttggtgtttgccggcgcttatctgtcaggcgcgatggctgatcgttggcttgccaaggggttacggatacttgacgaagagcttcctgagcaatttctgaatgatggtgggcatttcgaattgtctccgatgtatcacgccactttactctgggatatgtgcgacctggtgaatctctccacgcggtcgggcctacctgatttggctgagcgtctaccgcaatggcgagaggttgtggtccaaggattgaagtggcttcgtagcatgcagcatccggatggtagaattagcttcttcaatgatgctgcattcggaattgcacctgaatatgaagatattgcagcgtacgccttgcaacgcgaaatcccgcccaaacttcagaggaatcatagccaagcaatcccaccgtattatgcgccgcagtaccacgctgcctttgtcgctcagagtcatcaccgtactgagaagttccggaattga

SEQ ID NO: 366452 - DNA, 183 bp, Pseudomonas aeruginosa
atggaggcggtggcggcgggcaccttcgccatccagtgcgggatgccgaccgcggtgctcacctacctgttggccaagcgttacgacggaccggtgaacgaagtggcaggcatggtgctgatcaccacgctgctggtgctgctctccacgcctttgttcatccagttgctgccgcgcgcgtga

SEQ ID NO: 366453 - DNA, 183 bp, Pseudomonas aeruginosa; identical to SEQ ID NO: 366452

SEQ ID NO: 366454 - DNA, 183 bp, Pseudomonas aeruginosa
gtgcagtggaacaacctgcccattccctcgggcggccaggtcaacgaagcggaaagccccgaatacggcaacctgatgcgcggcatcggcaccttctactacgagaccaatagcgtcgcgcgcaaccagaccaacagcgaaaccgtcctgcagaccgttctcgcccgtctctataccaactga

SEQ ID NO: 366455 - DNA, 219 bp, Pseudomonas aeruginosa
atgaacggctatgtcggcctgcgcgacgaccgtcgcgacggcgagcgcctggcggcgcggatcggcctgctgttccccggcccctcggcggcctggctgcaacgcgccgagcgcctgcggcggcagcaggcgtcggcgggcctcgggggtcaggcgcgggtggcctgcatcgacgggcgctggctgacttcggcgaaccaggcggcgagtcgcgggtag

SEQ ID NO: 366456 - DNA, 672 bp, Pseudomonas aeruginosa; identical to SEQ ID NO: 321489

SEQ ID NO: 366457 - DNA, 669 bp, Pseudomonas aeruginosa
  misc_feature (639)..(648): n is a, c, g, or t
gtgcgggccctgcagactcgcctcaaacgggcagaaggcgagggctgtgtcagtgatgcggaccagcttgcggaaatcgaagctcagggcatcaacaccgtactggatggctccagtgaacaggggctgtccagcgacgatattgagcccggcgctgtcgttgaggaggatgccgagcgactgcgcagcctgatcgacaaggccgccagcctggccggtgcaaacgatcccaagctccaacaactgatcgttgaggtccgagcgttggttgagcagggcttcaaaccggtggttttttgccgctacatcgccactgcccactacgtggcagctgccctgcagcctctgttcaaggatcacgaagtgatcagcgtcaccggcgagctcagccccggcgaacgagaagagaaaatcctcgccctgcgtgacatcgacaagacggcgatcatggtcgccaccgactgcctgtctgagggcatcaacctgcaggatgtgttcgatgccgtggtgcattacgacctgtcctggaacccgactcgccacgaacagcgtgaaggccgtgttgaccgcttcggccagcgctccaacaaggtgcgtgccctgatgctctatggcgcagacaaccccgtggatggtgcnnnnnnnnnngctgcaggtgatcctgcgtaa

SEQ ID NO: 366458 - DNA, 474 bp, Pseudomonas aeruginosa
atggaggacaagaagggcgccgagcagttatacatccacgccgagcgcaaccaggacaacctggtcgagaacgatgcctcgctgtcggtcggccacgaccgcaacaagagcatcggccacgacgagctggcgcgcatcggcaacaaccgcacccgcgcggtgaagctcaacgacaccctgctggtgggcggggcgaagagcgacagcgtcaccggcacctacctgatcgaggccggcgcgcagatccgcctggtctgcggcaagagcgtggtggagttcaacgccgacggcaccatcaatatctccggcagcgccttcaacctctacgccagcggcaacggcaacatcgacaccggcggccgcctcgacctcaattccggcggcgccagcgaggtcgacgccaagggcaagggcgtgcagggcaccatcgacggccaggtacaggcgatgtttccgccgccggcgaagggctga

SEQ ID NO: 366459 - DNA, 786 bp, Pseudomonas aeruginosa
  misc_feature (660)..(669): n is a, c, g, or t
atgccgctgctcgacgactacgtggtggcccttggcaacaaggaagcgctggcacgtgcaggtcggcgcggcacgcgcctgctgggcatgctgcgcaacgagctcgtcagtgcccagggcatctggttggagcgcagcaagccagtggaggaggccgcatcccagtggctggatgtcaagctgggatctgctcacctgcgtttcgacaaagctctgcagcgctggcgcgatctgtatgcttctacgcgtaggcagattgacgaagctagcgccatcatgaccaacccagccgcgcccgagaaggaacgcaagatcgccgagcgccgtcatcgcgaggcgatgattcagcataacctgctgctggaaactagcagtggcagccactcagacttcgagacatatcgctacctagccagccaaggcttcctgcccggttacaacttcccgcgcctgccgctgtccgcgttcatcccgggacgcatgggcggcgtggggcgtgacagtgtgctctcccgccctcgcttcctggctatctccgagttcgggccgctcagcttgatctaccacgaaggcagccagtaccgggtcaagcgggtgattctcggtgtgcgcaatcagggcgccaatgaggcgcggatcgtcaccgaagaggccctgctnnnnnnnnnngctctgtcccgcatgcggctatggacatttccgcaaccagcgccactacgagcactgtctttcctgtcaggcaccgctggccggtggcaaggtcatcaacaacctgttccgtattga

SEQ ID NO: 366460 - DNA, 786 bp, Pseudomonas aeruginosa
atggcgcatgccgaccagcaatacgttgtgcgcatcgcagtagtcgcgccagaactccaccgaccagccgtcggccaccgctatcacgtccggtttccaggccatgacttcatcgatgtcgaggctcaggaggctgtcctcgaaacactcggccaaaggacgcaacgagcggtagtggaaaggcatgttgccgtaacaggcgaccctcaggcccgagtagcgctgcatgcgcgcaaccgccaggtcctgccggaacagttgcagcacccgctggcgtccgccgtcgtccggcgcgcccaggtgcagttccgcgacctgccgcaagcccagggaaagcgccaggcgggcctgcgcctggggactccggcaagcgcctgcggcggataccgagagagcctcctccagcagcagccagccgcgatcctccaggctctccaccgcgcgcaggagcaggcgcatggcctgccagtcgtccgccacgcctcccaccgccccgcccaggcaagccaggcggaaacgctcgttgccaggcagctcgccagcgacggaagcctcgacgaccttgtgtgcgcccccggcgaacggcgcgccgtccagcccggaaacccagaccgcgtccccctcctccagcaccggcaagacctgccgctgcagccaggccaatcgtttcccggcatccccgccgtcgcgccggtcgggttcgctcacgctgtcctcaatcattcaggttccagttattcaggtgcacgcctgtctctatacacatctgacgctgccgacgaatag

SEQ ID NO: 366461 - DNA, 624 bp, Pseudomonas aeruginosa
atgcatgtggatatgggcaagctcatgcataagcgtgaaccagaagttatcgtagcggttgtatcgaagcgctatgccaacaacgggcgtaccctgcgacaacttgaaggtgcacccatccattttcatcgacttgaagcccggctccaccaccagaagcacgccataggactcagccaaaacatctaccagggaggtgatgttttcaggcttgaggctcaggagcgcgatctgccggaggtgttgagcgctcagcccctggaaatcaggcatcctccggctcagcacggcgaagtcgtcatacgcctcaccaggccgcgcatgcgtcttggcatccgccggtttcagcgctttcttcaggctggacagcgccgccgtgaactcaaccgcagcatcccgcgaggacggataaacctcgaagtcgcctggaagcccttctggagagtcagacatgctgagcctcccctgccagcttcccagctatatcaggaggcgcttcgaagtagcgcaggttctctttgtcggcatcagcgtcgtactcaatcatgccgaggtagcggtagtacccctccgcagtcggcagagaatgcaagcagaagcctggacggtagcccagctggttga

SEQ ID NO: 366462 - DNA, 129 bp, Pseudomonas aeruginosa
atggcgcagcacctggttgtaagcgttatcgatatcgaactcatcaaaacggcactgtacccgctgcggagtgaaggcattcagccgcacttgcctgaccagatctatccgcccccgcacggtacttag

SEQ ID NO: 366463 - DNA, 321 bp, Pseudomonas aeruginosa
atggatgaccttgcctgcaaccaggcgcagatagcgtccgggctgaaagtcgacacgctgcatcgtactattcaggtcatccaggcgttcctcgatcatcgagacttcatggtcgatatagctgagcagttgggtgacgccgtcatccgaggagcgattgaggtattccaggaagcgcttgagtttctctggcaaggcttcctcggtcagcacacgcagacgctccagatacctggggacatccaccagctctcgcccgacctctgcaagcgccccggtgtctaccttgagggcatcagacatacgtttggcaagctctga

SEQ ID NO: 366464 - DNA, 291 bp, Pseudomonas aeruginosa
atggaacacccgaacctgtctgccgtcacaagccgatcttgggctgccctgatctatctcggtctggtggcatcagtcgggggattcatcgtgtacttcttcctgctcaagcgtttgagtcccgttgtgctgtcgttcgtcttcatcattttcccggtgttcgccgtgatcatcggcgcctggtacgaaggggttgccatctctcgcgagttgattggcttcaccgtgctcctattggctggatttgccatcaccaagcttcccatcgagaagctgctcggcaggaggtga

SEQ ID NO: 366465 - DNA, 288 bp, Pseudomonas aeruginosa
ttggagcagaaccgcttcaacgagtgcaagagcaacctgcgcctcctggagtacggcgtgctcggcttcccggtgatctgcagcgacgtgctttgctatcgcgacagtctcccggtcacgcgggtgaagaaccgttccagggactggctggaggcgatccgcgcgcacctggccgatgcagacgccaacgccgcggccggcgcgcagttgcgcgaggcggtgcgccgcgactggatgctcgaaggcgcgcatctcgaggcatgggcggcagcctggctgccggactga

SEQ ID NO: 366466 - DNA, 207 bp, Pseudomonas aeruginosa
atggtcgatacgaccgacatattccagttgatcacccttgcctcgacaggccagatcgccggtccggtagatccgactgccgggtacctgagcgtaggggtcgggcaggaaagcgagcgcggtacgaccggggtcagcaagatagccacggcctacgccggtgccggagacatacagttcaccgatgccgcccagcgggaccggtag

SEQ ID NO: 366467 - DNA, 228 bp, Pseudomonas aeruginosa
atgttgatcgaccacacctttctgggcctcaagctgacttttgcattgctcctgatccagttcggcctttttgtactccttctcgagcctgttggtttcagccaaccacagtcgatacccctgctcggcgaaccaaaccgggaggataccttcgagagcctgcttatcgtgcagctgttcttgcaagacctggtaacgctcccagccatcggcgaccggctgcaatga

SEQ ID NO: 366468 - DNA, 285 bp, Pseudomonas aeruginosa
gtgctctaccagcaccccgaggtggtcgaggccgcggtggtggcgcgcccggattcgcgctggggcgagacaccccacgcgttcgtcgccttgcgggcggatgccttacccagaaccacgggtgacgatctggtccgctggtgccgagagcgcctggcgcacttcaaggcaccgcggcatgtgacgcttaccgaactgcccaagaccgccaccggcaagatccagaagttcgtcctgcgcgagtgggcccggcaggaggaggaggccggcgacgccggccgctga

SEQ ID NO: 366469 - DNA, 231 bp, Pseudomonas aeruginosa
atgatctgggtcaccacacgcatgttgctgtcaatgaactccgagatggaccgcgacgagacctccaggaattcctcaagcaccctgggatcctgcgtcaggttgaaggccatcttcatccatagctcccaggcggtgttctgtgtcgacctcgcgacattcatcagcagctcggacagccctctgcgggcgagttccctggccgtgtccaccatgtcggccgagacgtag

SEQ ID NO: 366470 - DNA, 2010 bp, Pseudomonas aeruginosa
atgacccaactgttgcccaacggcaagcagcattttgtcgacaacaacgggcatccgctcgtcggtggtcgggtctatcattactatgttgggactaataaccccaaggacacgtatcaggatagcggtcagactataccgaatacaaacccagtcgttttggatggtcgtggagaggccgcaatctacgggaccggcccgtatcgacaagttctccagactgcaactggagttctggtttgggaccaagtaatcccggatggaagccagttggctcaggatgggctgaaccaattcaagatcgacttggcgaacagctctgatgccactaagggcgcagcgcttgttggctataagcgcacgccgctcagtacaagtatcgccaccgtaaagcagatgctggattctaccgccgtaagggtatgggaattcgcatcgctggtaacgagcaagccgaaccttctcgacccctccacatgggattggacccccgccttgcaggctatggtcgactctgcacaaggatatatctccgggtctggttcgaaacgtgttacttgcctgattggcccaggcaccttccttataaagtcagtcgtttggaagtccggtgttcatgtctatttctgcggagcagaactgaaggctcacccaagttcagttgatggactatccttgattgatgcctctgcaaccctttcagatataggattctacgggcctgggtcaatcaacggagataaagatatcttccccgcagagcataggcagcttgggattaactgtgttgcgaaaaacgttaaggttcgcgacctactcatagagaatattggcagcaatgctgtttattctctaggcgacggagttattttcaggccaacaatccctgctggcgattttcaatgtgaaaactgcgaagttagcggctgcacatttagaaacattgaacgtcaatgcgtgacagttgagtcaggtttcaggataagaatttttggtaactggttcttcgacagtacatactcagctgtagatgttgagaatgcagggtatacgatgggcgatgtagatggcgttttattctgggacaactacgtcgataattgcctttacgggctgacggctgtgacttaccagcctgtagatgctcagcgcaagattgtttgcggtgggaatatattcaagaacgtgatggatgcataccaattccgtggctgctctaatgtaaaggtgggatatggagacaatgctgaagtaacccgctatggagcctatctgtattctgacgggtcgacaacggtcgacaacatcgagatcgaaaactttacagtatccggagggcaatatgggatttttggtcaaaccactgctggcggatccattactagggtaaaagtaacaaaccctaaaatttctggctctaccacctcggccattacattccaagcgacatcaggtctcaccataaatggtggagacattcttgttaacgtcccggctggtgtcgttattacaaattgcgcaaatccatctataaccggcttgagagtttctagtgctatagctgtgactggatcggctatagtatttaatggtgcgacaacccttccaagatttggaggcatcgacataacaaactttagcgttggaatatctgtcaacacttcttcccctacaaccgtagtgtcagggaaaggtggtgataatgtcttcaacagtgttgccacaccatattctacctctgctggaaattattggaggggcacatatcatggaacgtttacaatggctgctgctgcccaaactaacgtccctacagttttcgccaatgctgcatctgctgtcgaattcatgccgaccaaccaggccgcggcgaccctttctgcgagcacgaaacgaccatggtgcaaccctgctggcgtgagcaacaatgccagtattcgggtggcaacgactgatggaacggcggcggctggtacggagacatatgcataccgactcaccaacccatga

SEQ ID NO: 366471 - DNA, 870 bp, Pseudomonas aeruginosa
atggacgtgaaagccaacattccagagttcaatacccccttcatcggccaggatgggcgagtcaactatgtctggtggcagttcctgctgaagctatggacgcgcaccggcggcacgtctgggaatgacggcagcgcgtccttaaatctcatcagggcgctggaaggaagcgcagcatctgccatcgctttccaggtcgatcctgctaattctccggctccagacgatcaggcttcgcggctgcgtagcccccctgtggtcgtaccggaccagatggcctatcagcatggaatacatgacgctggagatctgcatgccgccgtgacgtctgcgaagaacggattcatgacgtcaagtgacaagtccaagctggacggtttcccgaatataacgcctgtggcgttgacggctgatgcgaccatcgtcaatagcacggctgatgggaatattctgcaactgactgcgccggccggcagtctggccgttggttcgactatcggcggacgcctctatgcccttgttagctcggctgcggcaacaggaacgctgagcgtatggctcaagattggcgcgacaaaggtaatcacgcagaccttcacgatgcctgccttgggtcagaccaatacaggcatgtcgtactacttcacggcttctgtgcgtaccacaggggcctcagggacgatccagctatctgcgctaatgacctcgaacggtaacgctctgaatgccggccccgttgtgtcgacagctagcgcgaccatcaacacaacgatatccaacacgttcaccctcggctggaactggagcgtcgccaacgctgcaaacagtgccaccgcgaagaatgctgtcctgagccaggagaagctatga

SEQ ID NO: 366472 - DNA, 1422 bp, Pseudomonas aeruginosa
gtgaaatttcctctcactcagggcgcctacgaggcgcgtagcgtcattgctaacgcacagcgctgcctgaaccttttcccagagtcgaataccgaggatgcgcctttcccaatgacgcattacacgactcctgggcttctcctgaaaggggttgcgccaagcggagatgggtggcggtgcttgtatgcggcaaacaacggaagtctctatggtgtcgcaggcgaaaaggtctatcggatcaagccagacttcacctttactgaactcggctcgattctgtacagcactgggcctgtgtatgctgtagacaacggcatctatgtgctgatggtcgatggaaccttgaatgggtacacgattaagctaaatacagacgagttcgcgactgtctcgtcgtccgctttctacggatcatccagggtagatttggcagatgactaccttctgctcaatcgccccggaacaaatcagtggtacatctcgaaattccaggctgtcgagttcgatgcacttgatttcgctgcaaaaactggtttttcggacaacgtagttgctgttgctgcggcgaaacgccaggtattcgtcttcggcgaactgactacagaggtctggttcaacgaaggcaacacggattttaccttcagccgcatgcctggcgcgttcatccaacatgggtgtgctgctgtcggaagtatccagcagatggatggctcactgtattggttaagccgcagtccacagggccattgtgtatttgtgcgttccgttaactacgaggccgcacggatttccactcatgctatcgaacaggaaatcagcaaatacgccaggatcgacgatgctattgcatacacctatcagcaagaaggccacttcttctacgtcgtgactttccctgccgccgacaagacatgggtctatgacgtagcaactcagctatggcatgaacgcgcgtggctagatgagtttggtaaagagcatcgccatagaagtaactgtcatgcgttttggcagggaatgactcttgtaggcgattgggaaaacggcaacctctacgaaatgcgcccggatgtgtaccaagacaatggcgaggcgatccggcgtgtacgatctttcccgcatatgttgagcgattctaatcgcgtcatgtatcgcgaactgatcgccgctatgcaggttggtgaagggcggccggatagtttcgaatccggggagcttagattgcgctggagcgataccgggggtgccagctgggggagttcgatcagtagcgagcttggaccgcgcggtgatcacatccggtctcttcagttccagcggctcggctacgccagagatcgtgtcttcgaattgtcttggatggcaaacacaaagaccgctctgaacggcgtcttcctgcgtgttgaagaggccaacgaatga

SEQ ID NO: 366473 - DNA, 723 bp, Pseudomonas aeruginosa
atgggcggaatgtctggggctggcgtgaaccattacctgaatggggttaacgctcttaacgttcaggtagcgtctcgtttcgctaagctgctccaggtaagggtcttggactttagtccaagattagccaaagaaatcgatgcgatggcgtctagatcgacgtcttcaggcgatcaacctgaccaaagtattaaccacacatttgataatgactttttgacaaatcagcctttggaattaacctcttgtgagggcgaagaagcgcaaaataagatccgccctcctagcgagagggatttcgtcttgattcctgtgatatcaatagagcccggagatagtggttcgctcaacgaccacatgcggatcgagggaggccaagcgcttccgcgtaaactgatcgagaatcttggcgtcagcccgagccactgcgttttcatccaatcgacaaacgccggcatggagccctacatctttgagggcgaccttgtactgattgatcagtctgaacgcacgatcatggacaagatggtctatgcattccttggcgctgattccaagatctctctgaggcgggtgagtattcaactgtctggccaggtggttcttcgatccgacagtcaagacaaggtacgatttcctgatgaacacgtcagccacgctgatctgggtgcactgcctgtattcggtcgagtgaggtggagaatgggcggaggtggtctttga

SEQ ID NO: 366474 - DNA, 207 bp, Pseudomonas aeruginosa
atgaacactcaagctcaagcattccacctcatgatcgaagtcaagtatggcgatagcccgtcctattggtatccggctttcgaagctgaaacccaagaggaagccaacgagctgatccagcacttcccgcaggcctacggtgaaatttcccgccgcatcgtggcaggcgccccttccatggactgcacagaactgcggccctgctga

SEQ ID NO: 366475 - DNA, 276 bp, Pseudomonas aeruginosa
atgagcgcgaaatacgatgttgtggcaaccgttgggcagtacgagaaagacggacagacaaagtatctgagccgaaaggttggcgtgatcgtcaacacaaagaacggattccgtctgaagctggacgcttgcttcaatccggctggctgcccgcgcaccgatgacggtggagtatggcttgcgctgttcgagccgaaagagaaggagcaacagcagcagagcacaccccgacaagctcaggctaacgacagattcgacgacgatatcccgttctaa

SEQ ID NO: 366476 - DNA, 426 bp, Pseudomonas aeruginosa
atgaccggcagcttcaagctcacgcgcaagtgcctgtttccagcccccgccgccatccatcgtctcccaaacgacaccggcgaaatcacttggaatttccaccgccccgcgtttgagagcacataccttgtctctgcccaggcgaccaatgaagtaccccaactccaaaagcacattctgacgggctctaggctcaggcgttcctccttttacgcagccctcatcgtctggcgtaagcagaactactgcgaaaccaacatcactgtgagcaaccactttttcgataattgtccgtccttggttagcctgttcgtgcaagatgatggcttcaagcccgattcgctcaagaaatcgtgccactgtttcacgagcaccatcatcgtgaccatgaacaataaagaccttgcgcgaaaattgagcttttaa

SEQ ID NO: 366477 - DNA, 804 bp, Pseudomonas aeruginosa
atgtactttctgcttttgttcattggtttcctcgccgggataacgaccgtgctgttcggcttcggcggtggcttcgtcgtcgtgcccgtgctgtattccgtgctcctggctacgcatggcggcagcgccgtgggcgacgccgccatgcacgtggccgttgccacgtccacctgcgtgatgatcttcggtgcggggctggcgacgctgcgccatcacaaagctggcacggtgccgtgggatcaggtgcgccctctgctgggctacatcgccgtgggcgcgataccgggtgcggccgcagcgttggcattgagcggcgactgggtacgctgggccttcatcttctacctgggcgtgacgatcctcgacagcatcctgtggccgggtttcacccaggaaactgctgcgcggattcgtccgtggggacggtggatggccgccgcggcaggcacggcgattggtgcgatcgccgccttcctgggcgtgggcggcagtgtgatgacggtgccgctgatgcgccgccgtggcgccagcatgaccgccgcgacggcagcggccaacccactgtcgctgccaatggccgtggtcggctcggcgacttatgcgctgctggcgtggaacgatgcaccgctgggtgcatggcacgcgggctacattgacttgcgcgcttgcctggtgctggtggtcggttcgtggctgggcatccggctggcgtcgcgctggatcggcaagattcccgaccgtctccatgccagggcctacatcgtgctgctttgcatcgttctagtggtgatgctggtggtctag

SEQ ID NO: 366478 - DNA, 786 bp, Pseudomonas aeruginosa
atgcgcaacgtaccgctggactccgtggatgccgtggcgcgccccgtgctggccatcggcaccgactacccgccgggcaccttgctcgacacccatacgcaccggcgcgcccaggtgctctacggcatgagcggggtgatggaagtggaaacggacgatggcgcatgggccattccgccgtacagcggcgtgtggattcccgctggcaaaccccaccgcgtgcggatgcagggtgtgagtacgcgcagcctctacatcgagccggctgccgcgccgcgcccggcagaccactgcgaggcgctggttatttcccctctgctgcaccagttgctgctggcctcggcggacatgcctgcgctgtacgacgaggacgggcgtgacggagcgctggcgcaactgctgctgcatgaggtgcgccaggcgcagacgatgcccctgttcgcgccgatcccccaagaccgccagcttgcacggctgtgcaaggcattcctgaagtcgcccagcatccaggccacgccccaggcatgggcgcagcgactgcacaagagcctgcgcaccttcacgcgcttctttcaccagcagacgggtatgagttttggggcatggcggcagcaagcctgcctgctggcggcgctgccccggctgtcggccgggcagtccgtcacgcaggtggcgctggatctgggctacgacagccccagcgcgttttcctcgatgttcaagcgacggctcggcaagacgccaatggagttcatctgcgaatccgacacggccgcatcccggtag

SEQ ID NO: 366479 - DNA, 210 bp, Pseudomonas aeruginosa
atgaaccaccaacccgcaaaccgcccccgcatggccgcgacctatgcccccggcacggtacgcgcccgccgctggcatggcgatggcgacgtgcgaggctatcgtccgcctggcggttggacggcacgcgccgacctgaccgactcgcaccccatcacgggcagcaccttgccgcgtgccgtgtggtggatcatcgaaaccaaggaatag

SEQ ID NO: 366480 - DNA, 2079 bp, Pseudomonas aeruginosa
atgaacgccaatacccaaacccaacaaaccgaagcccgcgccatccaagcccctacgctggaagcagccgacccgaccaagaacctgattcttgtttcgctgtcgcggctggtgtcgcgcccgaccgggcgcaacgtgcgcaagaccccgcgcatgtccattcccgaactggccgcatccatccagcgtgtgggcctgctgcaaaacctgatcgtcaccgcgaccactgacggcgagcgttacgaagtcgtggccggaggccgtcgccttgccgccctgaagctgctggcgaagaagcgccgcatcagcaaggaatgggacgtgccttgcctgctggtggccgatggcaccgcccgcacggccagcctcaccgagaacgtgcagcgcgaagccatgcaccccgccgaccagttcgaggcattcgccgcgctggtggccgaaggccgcagcatcgaggacattgcagcggatttttccgtcacgccgctggtggtgcagcgccgcctgaaactcgccaacgtctcgccgcgcctgctggccgactaccgcgccgaggccgtgagccttgaccagttgatggcccttgccattaccgacgaccacgccgcgcaggaaagcgcgttctacgatgcgccgacatggcagcgcagcccgcacaacctgcgcgaccgtctcaccgaacgcgaaatcgacgcctaccggcatccgctggtgcgcttcgtcgggctggacacctacgagcgcgaaggcggcggcatccgccgcgacctgttcgccgaaggcgacaaaggcgtgtatctgaccgatgccgcgctgctggaacggctggcgcaggacaagctggcgggcatcgccgccgaagtgcaggccgaaggttgggcgtgggtggatgccacgccgggcatgacccatgccgacttgcaagccttccagcgtgcgccgagggagcgccgcagcccgaacaagcgcgacgcgcagcgcatcgagaagctgcaaaccaagatgcacgaactggccgaagccgtggatgccgcgctggacgccgacgacgaaaaaaaggccgatgccttgcaggaggaaggcgaacgcctgggcgagcagttgcaggcgctggaagatggtttgctggactatgcggccaacgtgaaggccgcagccggtgccatcgtcagcatcgaccgcgacgggctagccgtgattcatcgcgggctgctgcgcgaagccgaggccaaggcattgcgcacgctggaacggctgcagcagcgtttcggcagcgaaggcgaagccgggaacgacgacgaaggcgagaacggatacgacgacaggcagcccaaggccgccgccatgtccgaccgactggcccagcggttgagtgcccaccgcacggcggcgctgcaaatcgaagtcgcacggcatccgcaggtggcgttggccgcgctggtgcatggcatggtgcagaccgtcttgcaggaaagctactacggccacgatctgccgctgggtgtgagcctgaaactgcaagaccggctggaaagccttgccccggacgtgtcggaatcgcctgccgccgtggcgctgcgcaccttgcaggaagtcgcgggcgaagccttgccggaggacagcgccgaactgttcgccgtgctgctggcgaagtcgcagaatgaactggtgcggctgctggccgtgtgcgtggcgtccacggtggacgtggtgacgcctcgcgctacgcctcaccaacccggcgcggaactggcgcaggccgtgggactggatatggccgcatggtggaagccgaccgcagacagctacttccagcatgtgccgaaggccgcgattctggaagccgtgggcgagttcgccccggatcatgtcacccggctggcgaagttgaagaaggccgacattgccagcgaagccgaacggctggccgatggcaccggctggatgcccgccatcttccgcaccgaagacccgcagcagatggcgcaggatgcggcgacggatgacgaagccgaagcgctggaggaagccgccgctgtggccgatgagcagccgcaggccgaggcactggccgcgtga

SEQ ID NO: 366481 - DNA, 852 bp, Pseudomonas aeruginosa
atgagcatgtttattcatcacacattgatgatgctggaagacgccggcatgtccatcaaatacccagaaatccgccacatcacgttggacaaagacggcaagagcacgatgcactcgtaccactccctcatgcaaggaaggcgggtaagcatcgaacagaaccagcagatgaagttcctcatactgttcacgttgttggacttccatgtggatgctgtttatcccgatctggaaggaaaaggttatcgggagaagtacgagaacctgcccgcacaaggcgactacaacctcatcctgcgtcagttgttcagagtggcgaaggtcatcagaaatgccctcgtccacaatcagtcgtcgttcgccatttccgacggcaaggtcagcgtggactacaggcgcggcaagcaccacttctgcctgaaaatgtcatgggaagcgttcaaggactttcacaccgcgatcgtcatgtacgtcaggggcgagatgggcaagggaagctatttccttggcatcatgcgctcaatgtacgcgagcatcctggcgggcatcacgcagttcaacgacgaattcggaagcgcactcgaacagcccacgaccggtatcaagatgaagcggcacgtgcgccaaatcgtcctgtatccgccctacgaaacctgtggtgacgcgcttcgctttccgagcgcagcgcgccagattgcagagtgggaaggcatggatctctacatcgtccacagaggcgaggaatttctggtgcctcgtgaagcactgaacgaagacctgtcgatcacggagcacgacctgatcaccggctggaagcgggaaggtcactatccgcaggtcaaagcgccgtag

SEQ ID NO: 366482 - DNA, 852 bp, Pseudomonas aeruginosa
atgacgaaatccaccctcaagaaaaacaaggggaagtccgattacttctccgccggaaagccggttcatcggctgtcctattgcgcctttctggatgtcttgggcttctcggagagaattcgtacaagctacaaggatggtagcgcggacaagctgttggagagtttccatagcattctcgccaagagcattgagcagttcaaagaaagcaccgaggagtcgatgctctatttcaagtcgttcaccgataacgtggtgctggcccatcctcggttcagcgacgacatggaatccgagttcggattcatcctttggtctatcaaggagtaccagtttcagatggcactgaaaggcttcttcatccgaggtggcctagcagttgaccagttgttcatggatgaaaatagcgtgtatggcgcggcgttgctggaagcatatcgccttgaaagcaaggctgccgtgaaccctatcgtcgttctgtgcgacaacaccatgaaactggtggatatgcacattggctattacatcggagagattgctccgcagatcagggatgtattgagaggtccggatggtcgttatttcctgaactatctgacagagtgcattattgagggcgatgatcgagagtatcttgatgctaaatcccttcgcctgcacaagaagcaaattgagaagtcgctaaaatcctatgtctcaatccctacggtgttttccaagttctcttggcttgctgcgtatcacaactatttttgcgacacggtttccggctacccggaatacgatgaagcaatgaaggtgtcggtggaactcgccgctgtgcggtttcaacgaatcgccaagaaaaaataa

SEQ ID NO: 366483 - DNA, 645 bp, Pseudomonas aeruginosa
gtgcgccagctcgaccggcagatcaacagccagttttacgagcgcaccgcgctgtccagggacaaggctgcgatgctggtcaagggcgccacgccgaagccggaagatgccgttacgcccgacgacgcgatcaaagacccctatgtgctggagttcctggacctcaaggacgagtattcggagtccgatcttgaacaggccctgattcatcggttgcaagacttcctgctcgaacttggcgagggcttcacgtttgtcgggcgacagcggcggttgcgcatcgaccagacctggtatcgggtcgatctgctgttcttccacaggcgcttgcgctgcctcgtcatcatcgacttgaagctcggtgccttgacccatgccgacgtgggtcagatgcacttgtactgcaattatgcgaaggagcactggacgtttcacgacgagaacccgccggtgggcctgatcctgtgcgctgacaagggccatgcgttggcgcggtatgccctggaaggattgcccagcaaggtcatggcggcgaactatcgaaccgtgttgccgaatgccgaactgctgcaagaggaattggagaacacgcggcggctgatcgaatcgcggggaacgcttcgccccaagacgcgcaagcgatag

SEQ ID NO: 366484 - DNA, 477 bp, Pseudomonas aeruginosa
atgagcaagaagacgcttccggcggcggggaaaaaccccgccgtcttgccggccggctacgccggcatccacagcggcatcgtggaactgctcgatgccgcccgtcatgcggcagcccgcagcgtcaatgcgctgatgacggccagctattgggaaatcggccgccgcatcgtggaggccgagctacagggcaagcgccgcgctggctacggcgaacagttgatggagcggctttctgccgacctgactgcgcagttcgggcgtgggttcagccgcccgaacttgcagcagatgcgctcgttcttcctgacttggccaattcgtcagacagtgtctagcgaatcttcctcggtgccagcgcgaccctggcggctcgacgagttggcgcaggtgttcacgctgccgtggtcggcctatgttcggctgctttcggttaaggaggggagcccgcagaattcggaaaaaatcgtacgctaa

SEQ ID NO: 366485 - DNA, 126 bp, Pseudomonas aeruginosa; identical to SEQ ID NO: 329847

SEQ ID NO: 366486 - DNA, 405 bp, Pseudomonas aeruginosa; identical to SEQ ID NO: 327120

SEQ ID NO: 366487 - DNA, 231 bp, Pseudomonas aeruginosa; identical to SEQ ID NO: 339222

SEQ ID NO: 366488 - DNA, 207 bp, Pseudomonas aeruginosa; identical to SEQ ID NO: 332728

SEQ ID NO: 366489 - DNA, 240 bp, Pseudomonas aeruginosa; identical to SEQ ID NO: 331046

SEQ ID NO: 366490 - DNA, 1698 bp, Pseudomonas aeruginosa
gtgctagtcgaagaaactcttcaacttgaagaaatatgcactttgacgcatgaagagcggcgacgaagtctcggcgcattttacaccccaagttttctaagtaaattattatgcctctgggcaattgaatgcaaaaatcaggtagtactagagccgagctttgggggctgcacatttcttgaggaaatcgcatcccgcttttctcatctgggttcaagcacccccttgcaaaatgtttttggatgcgacattgattccaacgccttcttaaaacttgatacattaaatataggggaatttaaagaaaactttatcaagaaagatttcttgctccttgacgatgaaaatttctgcagcggaaaggcagacatcgtcattgggaatcctccctatattgggcactcccaaataggatcatcgcagcggaaatccgtggaaaaatggaaaaccacctacggcttaaccattgacgcaagatcgagcctatgggtttattttttgatccattcattgaatttccttaaagatggcggacggctagcgttcgtccttccaggaagttttctctccgcagattactcaaagaaaatacattctctactccgcgagaagtttgagcattgtctgatagctcctatcgcagaaaggattttcatttctgaaggcgctgaagagcgaaccgtcatattgctggccgatggatttaaacattccagccaaagtccaggcacagtaaaaatagcgcacacagctactctctcaaagctgcctgagctgtttattaagtggatgaaaaacaaaagcgaactgcacgattttgaaagtgtaggcgcaggctcctttttagaaagaaactctcagcagaaatttgctgagatttcgaagaacaccgcaaatatcgaactagaaagcatcgcaagagttaacatcgggatcgtgacaggcgacactaaattcttcattaagcagttaagcgcctggcaaaacctcggaatcaatagagagcactacgaatttattgtacccaagatcagagatattaacgggttaaacctaaccaataatcaagtacaaactttgatcgactccgatgctcgctgtctaattctaaacaccaagacaaaatttctttcggctcaggttttgtcttatctcagtagctacccagctgaaaaattggatttggcaacatataaaaagcggccggtttggcatcaacctaacgatcataaggtccccgatgcctttcttacctttctaacacacaacggcccaagattgcttataaatagtgcaaaagccaactgcactaactcagtgtaccgcatgtttttgaaagagcgtacaagcgcaaaccgaaaaaagttcattgctctttcttttctgtctacatttacacagacacatgctgaaatcattggtagaccttgtggatctggtgctctaaagctggagcccaaagacgcgcttaagctaaggattttgtatccaaaggttatcaacagtaatttagtagatgtatcctttaaagctgcgcataaagaactatccaagaatccacccaatgaagaagccgcgcgcaagatagctgatgatgccctcgcaagtatgcttggggaagactttagacgccagttaatggagcttgagggtgcattacattccgcccgagagcatcgtaagggaaatgtagcttag

SEQ ID NO: 366491 - DNA, 216 bp, Pseudomonas aeruginosa
atgagcacctccgcagatcgagccgaggcgatcgccaatcgcatcgccaatgatgccagggagtttgccaaggctggttcaaaagagcctttcggcatggccgctgccgcaattttgactgggcagttgatcaagtcacttgtgcgcatcgaacgactggagggcgatatcaaggtcctgaccgaattattggccaatgtggagtccagccgatga

SEQ ID NO: 366492 - DNA, 447 bp, Pseudomonas aeruginosa
atggatatgttcggcgtcgccgtcctgatctttctggtcaccgaccccttcggcaacatcgccgtgttcctcgccgcgctgaaaggcgtcgcacctgggcgccgcctgcgcgtggcgtttcgcgagctggccttcgccctgggcctgctgctgctcttcctcaccctcggcgagcacatcctcagcggcctcggcctgtcccgcgaggcgaccgggatcgcgggtggcatcatcctgttcgtgatcgccatgcgcctgatcttcccgtcgccccaagggctgctcggcgaagtgcccgacggcgagccgctgctggtacccctggccaccccggcggtggccgggccctcggcgctggcgatgctgatcaccctgcgcaccaccttcgacggtccgctgtgggagcttacctggcggtggtgctggcctgggccgctactgcgctga

SEQ ID NO: 366493 - DNA, 177 bp, Pseudomonas aeruginosa
gtggtgctggcctgggccgctactgcgctgatcctgctgcaggcggcgttcctccagcgtttcctcggcccgcgcgggctgaccgccatcgagcggctggccggcatgctgctgatcatgctcagcgtcgatatgctgttggacaacctgcgcagcgtgttgcacatcgccgcctga

SEQ ID NO: 366494 - DNA, 1143 bp, Pseudomonas aeruginosa
atgaattgcgttaaatacttgtgcattgacgaccagccagaagaatatatagagccactgttagaccagctaagcactcacaatccaaacctgcaattcagaggaatgcacccggaagagtttgaaagtcagtttgaaaaaatcaagagcttagctagtgaagagcattgttttggcttgctagttgaccttcggctagaccaggatgcagatgcagacggcaataaggtgtattaccgtggcccaacgctcgcacaagagctacgtacgcggatggcggagaaggagcttccaaatttcccgatcatcctttggtcaatgaacgataacatcgtacattcttatgcaccagacagctcgtcacatgacttatttgatgcggtttatgcaaaagacgatgggaagcacccactcggtgaaaacgtagcatccgagatttattggcttgctgctggatatcgcgagctttctgaaatccatgagcgtcattcgggctattctctagagcatgtgattggacttattgaaggggatcgggacagcttggacccacgcctcctatcgtttctaaagtgcaatgtggcatttgaaatagctggcaaagttttaaacacgctgcttcgatcagagggtgtattagccagcccggctatgcttgcagcgcgcttgggggttgatattgaaaaatctgctgatagctggaccaacctactagaaagtctgatgagctgcaaatactctggcgtcttccatcaagcttggccaagatggtgggttcatcgtatcgagaactggtggtctgagcttgcctcttacaaaggatctttgcgcaaattcacggccccagagcgcgtgaccattatcaatgaaaagcttgggctaaacttggtatccgcaaaccctatcgaggaaaattatagcctgagatactctactgtttgcgtcgccactgaaaaagcgctcgacccagttgatggcttcaaagtctatagttctcggcaagatgcttggcaagatagtaagtatgtctcggcttatgctgtacttaaaagggttaaaaaaagcgaatggattctcgacccactggaggtggaacgttttaaacagcttacggaaaggctaaaaaatgtcaaaaaagattaa

SEQ ID NO: 366495 - DNA, 738 bp, Pseudomonas aeruginosa
atgctgcgggttttggcaagtctgggtcttaccatcggtgaattcacacacgaaacaaggcacgtattgtcagcgttgtcagcgggcatattccgcctaactaaatctcaccccgaagcggaaaaaattaagacattgcaggccaatatagaatcactgcaagcttacatgagatattttgacaaagcagtaacccagaactcgcagagaaatcttgaggtacacgaacttcgagatttagtcggtgatttccagcaggttgttgagtcagcaatcaagcgtcaattcgtcagtttgacggtagacataagcggatatgatctttttgtaaagcctagtcacaaatcagagtgggcctcaatatttttcaatttattcaccaattctttaaaggcaattaatcgtgccaaggtcatcggcgacatacggataattgcaggtgaggttgatgagaccaaactatttatcgaattctcggataacggtgacggcattgccgaggagaacaaatccaaagtatttgatgcgttctttaccacaagcactcctgcggatgcattggcagatgacgaggttcatattactggatctggcctgggtctgaagataattcgagatatcattgagaacgggggtggtgacatttatatatctgaaccacctgaaggctactcaacgtgcattcgaattgaattcccaagagccgaagaagaggaaataccagatgaattgcgttaa

SEQ ID NO: 366496 - DNA, 198 bp, Pseudomonas aeruginosa
gtgggggaaacgccctgtgcgttcattaccctgaagagcgatcatcaggggctcgccgagagcgagatcgtcgcgttctgtcgcgaacacctggccgcgttcaagattccgcgtaccgtggtgttctcggaactgccgaagacctccaccggcaagatccagaaatacgtgctgcgcgagtgggccgccgccctctga

SEQ ID NO: 366497 - DNA, 237 bp, Pseudomonas aeruginosa
atgcgcgctcagcgcacccacgaaacccaggcagagcgggacgaccacccagagaagaaggaagggcccgcagcattcctaggaaagctgcacgacctggccggcacccgaaaaccatggcacggctttttcgcccgcccggcagaggggatgcccgaacgctcgccagaaaagacaaagcccccggaacgccaggcattccaggggctttgctcatatgtaatggcggagagatag

SEQ ID NO: 366498 - DNA, 297 bp, Pseudomonas aeruginosa
atgagcaagggagtattgacctgccttccagctcacgacggccacccaggtgtggaaatcatctgggcctccgactgcagggaggcattcaaccagggcgccaagctggcccagagttggcttgataatgctcgtaccggctggctctgggcagtcatgattgccgagcgagacctgctgccatgcgcaatagaacgacgggcattcgaagttgggttcctcagccgcctacatcagcgcatatgtgctcacaggtgctgcggccagtcggataaacctctttgcctggcgctataa

SEQ ID NO: 366499 - DNA, 1116 bp, Pseudomonas aeruginosa
atgaccatgagcacctgtcagggtgatagctgcgccggcagttgcggtactccgacaacgtctgagcaggtttccacaggcgaggccttacgggcgagcacgtactctgtttcaaagatggactgcccctcggaggaaaacctcatccgtatggccctgagtggccttccgggggttggggcaatggctttcgatttggccgctcggaagctgcggataactcacttcggtgaacctgagcgaatcactgaaaagctactgcctttgaacctcggcgcaacatttatagaaactaccgccatcacgaatggcgttgccaggaagacccgcttcgctattccaaaaatggattgtccttccgaagaaaacctcatccgcatggccttggcggatgcgtcgggggtcgctgctctggtgtttgacctaaaggcccgtgaactgaccgtggctcacgaaggaaaaccagacgatgtgttggctcgccttgtcccgctgaaccttggcgcacgcgtactagaaagcatcgagggcgtcgaggtggagccggccagccctgatcccgagggcgacgcagcggaggctacaacgctgaagctgctgctcggcatcaatggtgcgatgtttgtcttcgagatgatcgtgggcgtgtttgcccaatccaccggcctcatcgcggactcgctcgatatgttcgcagatgctgcggtttacggacttgcgctttacgctgtaggccgcactgcggccttgaagttgaaggccgcgcacattgccggttggcttcaggttgtgctcgcgctgggggctttgtctgaagtgattcggcgagcattgttcggaagtgaaccccagtccgcgctcatgatgggcatgggattggttgcattggcggccaacgtcatttgtctggtgctcatcgccaagaagcgcgaccggggtgcccacatgacagcgagctatatcttctcggcgaacgatgtcattgctaatgctggcgtgattgccgctggggcgcttgtcgcctggacaggttcgtcatacccagacctggtgattggaacgctcattgctctggtagtgctcaacggcgcaaggcgaatcctgaagctcagctaa

SEQ ID NO: 366500 - DNA, 414 bp, Pseudomonas aeruginosa
atgaaaattggtgagttggcgctgatggcgggttgttctgttcccaccatccgcttctacgaggccgagggccttctgcaagcgccatcgcgtacagccaacaactatcgagactacggcgaccaacatgccgacagactggctttcgtcatgcggtgtcgctcgctggacatgtcgcatgacgagattcgcgtcctacttcagttgcaggatgatcccgaaagatcgtgcgatgatgtcaacacccttctggacgcccacatgcggttagttgagcagcggattgtcgaactgaaagccctgcgcaagcagcttcatgcggttcgcagcacttgtgcggggggtgtctgcattggtgactgcggcgcgcttgagtcgttgcgctcagcaaccggagccagcacgtcaaagtag

SEQ ID NO: 366501 - DNA, 1053 bp, Pseudomonas aeruginosa
atgtcaggtgcctactacaacgaattcgacccatatgccgctcagtggcttcgaaacctgatcgccgccggccacatagcacctggcgacgtcgacgaacgatcgatcgaggatgttcacccagatgacctcaagcactacacacaatgccacttcttcgcgggaatcggcgtctggtcgctcgcccttcgccgcgccggctggccagatgatcgacctgtttggaccggttcctgtccttgccaacctttctcctcggcaggcgaaggagctgggtttgatgacccgcgtcatctctggccacattttgcctggctcatccgccagcgccgccctggagaagtccttggtgagcaggttgcaagcaaggacgcggagccttggctcgaccttgtacaaactgacctggaagccatggaatatgccttcggggctatcgcgtttccgtctgcgggcatcggtgcgccgcacatccgagaccgaacctactgggtggccaacacctacggcgatggatgcaaaccgcggcgccaaggatgcaagaccatgggacacggggcgcccattgggccagatcgcggccctggcgggatgggcgacgccagcggccagggattgggtgagcgcgtcagcctcggaagagtttcttgccgagagactggaacagaaacgggggaagccactcagcgaacaggtatttaccttgtcgggatggccaacgccgatggcgggcactccagcccagaacgggaacaacatggccggcaactcggacttcacccggaagaccgaggcgatctgcggccgaaccgtcgtggggcacgggatgagacttccggaaaactggagcgggccggcccggttaacggtctctgggcagatgctgactggatcttctgccgggatggaaagtggcggccagttgaacccggcacattcccgctggctcatggggctgcctcccgagtgggacgcctgcgcgcctacggaaacgccatcaatgctgaagcggcgacgcagttcatagccgcatacctcgacgctacctcatag

SEQ ID NO: 366502 - DNA, 1728 bp, Pseudomonas aeruginosa
atggagccctctgccgagcaacaggccataattgatgcgcccttagcccccctcgcagtaatcgcctgcgcaggtagtggcaagaccgccacggcggtacgccgcctggtggcgatgcgacggctccttgctgatgaccgtggacgggtggccttactatcgttctccaacgttgctgtggagacttttcgtcgaggctatcaagtcctcgcacagaaattgcccagcggagccggccgtagtcgagtggatatcgataccctggacgggttcattaccagccacatcctgcgccctcacgcctatcgtacgatgggtgccacgcaggcggcctttctggtgaccggttttgaacccttcctcgatggcttcacctgcaggggggacaattttccgatcccagtcacccaggtgaaggtcggcattcacaatggtgaaccatttttctattacgactaccgcggcaatctgaaactgttggatcagaactctgccacgcatgtggtcacccgtctcgggcgcacaggcgcctacacgcatgacttagggcgctactggtgctatcgcacgctgcgcgctcagcctcagttgctaaaggcattggtccgacgctatccccatgtcttagtcgacgagtctcaagacatcggtatgctgcaccaggccattcttgaactgctggccgaggcgggtgtacaggtatcccttattggcgatccgaaccagggcatctacgagtttgccggtgccgatgggaacttccttcgtaactatcacaaagggaaagacatcacgtcctttgccctgacctgcaactaccgctctctgcctcccatactgactctggccaaccacctctccggtcgcaccgatgtgcctcaccgtcaggccgagcctggagccaatggtgcttatttcattggttacaccgagccggagttgccaggcctgcttgatgccttccatgccgaagtcaccaagctgggattgcaaccggaaaacgctgctattttgtgccgtggggcctccctagcagaccaactggacggcgtaattgcaccctccggtcgaggcacggtaaaagtatttgccgaagcagccctacaccgggacatgcataaccgcttccttgatgcgttcaaggcagtggttcggggagtcgtcagcctacttgccgatccgccaaaaggccttctagcgaagctgagcaaccccgtacatgaccctttgctacgcgagctcaggaggcgcctctgggcctttacccgaaatgccgaaactggcctgccgtcgtcagaactgccggcgacggatgattggcaccctctgttactagcacgtgtacgcacattgttgaatggtattcagcaggatttcggactggctccggtcgataacttggggcgcaagctagcgcgaaccgagttgtcggtcaggccgctcagtgctggggcggatctggctgcagaacgggggccacgaatccgcgtagacaccgttcaccaggccaagggcgaaagcatcgacgccgtgctctacgtggccgcacgccaacacgttcaagagatgctaaatggcgtagaaaccgaactgggccgcattggctacgtcgccgtgacccgggcgcggaatctcctctggctgggcgtaccggcgaacgccctgcggactctgcgcccggccttactggctgcgggattccaggaggcgggtggacgccaggcttag

SEQ ID NO: 366503 - DNA, 1779 bp, Pseudomonas aeruginosa
gtgcatttagctgagttgaacatcagcaatttccgcaagctacgcaatgcgaagctacgcttccaggcaggtctgaacgtcttggtcggtgccaataacgtgggtaagagcgcgattgtcgacgccttacgagccctgctggccggtcatgaggaaccctatccacgcttcgacatagacgaccgtcattgccctcgggacggtgaagctgaaggagacatcgacttccactatgtgttccgtggtcttgatcatgacgacgaggcggattttattgccgcgctcaaacccaacaccgaaggccagatggaagctcacatccacgtacgctattcggatgccgacaaggctggtcgcttccgcgtcaaacgctggtgcggtgatcacgaggacgtgccactgtcctcggacatgatggagaacctacgcggggtatacctccaaccattgcgcgatgcctcgcagagtttgcggcccagccgtaatagtcagctctcgcgcctgctgcatctgctcactgatgaggtcggtcgtgagggaatcaatgacgccctacgggagctggatgaggaactcaagcagcatgcccccatcctgaacacccaaacagccatcgctacccgccacggtgacatgttgggagatcagttcgcccaagcgcttgcagtggggttaagcgctagcgatttccagcgcctgtcctcacgtctgtcgctgtctgtggatgcgttcgagatagagcagaatggtcttggcttcaacaatctgatcttcatggccgttgtactcagcgagcttgccaagaatcctgacgccacttaccgcggattgatagtcgaggagccggaggctcacctgcacccgcaactgcaagcggtgctgctgcgatacttggccagcttgcaggcggtcgcgggagagaagcccgtgcagctattcgtaaccagccattcgccgaacttcgccagtaacgccaacctcgattgtcttacttgtttggtggagtccgacggtcgcgtagagactttctttcctcgcgatgtcaagttccaaaagggcaagcgtgagaagctcgagcgctatctggacgtcacccgagccgagctgtttttcgcccggcgagtgatcttcgtcgagggagcagctgagctgatgttagtggatgcattagcgacttttgccggtttcgaccttcgtggatacggcgttagcctgatcagcgtcgagggcctgaatttcgattctttccttccgctttttggtgaaaatgctctgaagatcccctgcgccctgattaccgacgcagaccctcagacgcaggaagatgagggtgatgacgaaggaagcgaaaaggaggaagacgagggcaagaaggccgtagctgtatacccagcgcttggcgaggaagtggtcgtatccagcaacacgaaaaagatgaaggccttggaagaccgctacgtaaaggtattccacggggtgaagactctagagtacgacttggctctgcatgagagtaaccgcgaagccatgttgaccgccttggcggatccacatccgaagatcgccaaagccttgcggaagctcgtagaagctgagcaggacaacactaacaaggcccgcgtgctgttccgtggtatgttcgagcgaagtcagaacaatgtgcagaaggggcgcttcggtcaagctctggcccaagtgattagcgaaggagccgcgtgcgaggtacctgcctatatcctcagtgctatcaaccatgtctgtctggttgaggagcgctga

SEQ ID NO: 366504 - DNA, 402 bp, Pseudomonas aeruginosa
atgggttggctgtactcattccgtacccggtcagaactcatccaaaatctgatccgccccgaagacacgacacgggccagtgttcgtgtgcttgtgcatacagtgcgcggcaacgtgctgtggtcggtcaccgaggtcacggcgaaaaccgaaggcgtttacccagacctcgtgcctggcgagtccatgcgctacatccgctgcgacctgctacaacgcagtggtggtgagtgggggtacaaagccatggatgagtccatggcgccgtactactacagctgcccgctgcgctatctcgacatggccaaggaactctcgcccacttggcgcgagaaggttcgtgcccatcacgcacggcgccggcagccggtgaccgccatggccggtggtgcagcccggtaa

SEQ ID NO: 366505 - DNA, 855 bp, Pseudomonas aeruginosa
atgagccactgcctttccggcccacacgcgtgggccggttttcttcgagttatcccaacgctgctgctcagcgccctcctcgccggctgccagtcgccccgcgaggcactgcagcagttggcggatgagcatgggcggcaactggagatactgtcggggcagccgtccccattggccatgcttccaccgcagagcaccacgaaagccactcgtttacgcgtctacctggaaggtgatggccacgcctgggccacggcgacgcagcccagcctggatccgagtccgcacaacctgctggtggcgcggctggccgtggacgatccaacgccgaatgcctacctggcgcggccctgccagttcgtgatggcaccgacctgcgaacccacgctctggacccaacggcggttctcccaagaggtggtcactagcctcagccaggcgctggatcagttgaagcagcgttatggcaatcgggaattcgagctggtggggtattccggcggggcagcactggcgctgctgctggcagcccagcggaaggacgtggcgcaggtgcaaaccctggcgggcaacctcagcccacggctttgggcgcagatgaaaggactgtcgcccctcgacggttcgctggacccgttaggctatcgggaacggctggcggcaataccacaacgacatttggtgggagacgcagatgacgtggtccctgcatcgctaaccaaggcctacctggaacagctaagcccaaacacctgcagtcagcttgcactcttgcctgcaatagatcatcagcaaggctgggaggctgtctggaaagcatggagagataagccgttgaactgcgggagtcattaa

SEQ ID NO: 366506 - DNA, 1236 bp, Pseudomonas aeruginosa
atgacggaagaaatccgcctggaggcgctggacttcgccgccctgatccacccgggcgaccgggtggtgtgggggcagggcggcgccgaacccacggcgctgaccgcgcgcctgatggcccagcgcgaggcgatcggcagcttccgcgccttcgtcggcatgagcctgtccgccagcgtcggcccggaacatgccgcccaggtgcattaccagtcgtactgcggcgccgggcgcaaccgcctgctggcgcgggagaagcgcctggacatcctgccgtgccactacacccagctggcggcggcgctggcgccggtcgacgtgctgctgcttcaggtggccgaagggccgggaggcttcagcttcggcatcgccgccgaatacctggtgccgctgctgcgcagcgcgcggctggtgatcgccgaagtcaacgagcaggcgccctggacccacggtgaatacctggacccgcgcgacatcgacctgctggtgcgcacctccagcgcgccgctggaagtcccggcggtgcccggcggcgaggtggagcgggccatcgcccggcacatcggcggcctggtggaggacggcgcgaccctgcagctgggcctgggcagcctgcccgaggcggcgctggacggcctgcgttcgcaccgcgacctgggcattcattccggcgccatcggcgacaaggtggcggagctgatggagctgggcgtgatcaccaatgcgcgcaagaacatcgacaggggcgtcacggtcgccggggtgttgctgggcggcgagcgggtctaccgccatgcccaccgcaacccgcgcatccagctgcgctcgacggcctacacgcattccctggcggtgctcggcagcatcgagcgcctggtgaccatcaactcggccatcgaggtggacctgaccgggcagatcaacgcggagatcgccggcggcgcctacgtcggcgcggtgggcggggcgatggacttccttcgcggcgcccaggcctcgccgggcggcctgccgatcattgccttgccggccacggcgctgggcggtaggcagagtagggtggtggagtgcctgtccggcccggtgagcacgccgcgggcggacgccgcgctcatcgtcaccgaatacggcgtggccgacctgcgcggctgcgacctgcgcgagcgagcgcggcggatgctcgccatcgcccacccggatttccaggaatcgctggctcgggctgccgggctttga

SEQ ID NO: 366507 - DNA, 1197 bp, Pseudomonas aeruginosa
atgagaagagcagcgatagtcgcgccgcgccgtaccccggtcggcgcctttggcggcagcctgcgcagcgtgccggtggagcgcctgggcgccgaggtggtcaaggccatcctggcgcagacgcgcctggacccggcgcgcatcgatgacgtggtgttcgcccagtcctacgccaactccgagacgccctgcgtggggcgttggatcgccctggaggcgggcctgccggtgagcgtgccgggcatgcagctggaccgccgctgcggcggcggcctgcaggccctggccagcgccgcgatgatggtgcagaccggcgccgccgacgtggtcctggccggcggcgtggagagcatgagcaacatcgagtactactccaccgacatgcgctggggcgcccgcgccggctccgtgaccctgcacgaccgcctcgaccgcggccgcgagcgctcgcagccggagcaccgcttcggacgcatctcggggatgatcgagaccgccgagaacctggcccgcgaatacaccatcagccgcgaggaggccgacgccttcgccgcgcgcagccagcagcgtgccggggcagcctgggaagccgggcgcttcgacgccgagatcgtgcccatcagcgtgccgcagaagcgcggcgaacccatcctggtgaaccgcgacgaaggcgtgcgcggcgacaccacgctggaaaaactggcgggcctgcgggcgctggtgaaggacggcacagtgacggccggcaacgcctcgcagcagaacgacgccgccgccgcctgcctggtggtggccgaagacaagctggccgagctgggcctggagccgatcggctacctgcacagctgggccgccgcgggctgcgagccggcgaccatgggcatcggcccggtgcctgcggtgcgcaagctgttcgagcgcaccggcctcggcttcgagcagatggacctggtggaggtcaacgaggccttcgcctgccaggtgttggcggtgctcaagggctggggctggaacgatccgcagcggctcaacgtcaacggctccggcatttccctggggcacccggtgggcgccaccggcatgcgcatcatgacctcggtgctgcacgagctgcagcgccgcaaagggcgctacgccctggagaccatgtgcatcggcggcggccagggcctggcggcgatcttcgagcgggcctga

SEQ ID NO: 366508 - DNA, 930 bp, Pseudomonas aeruginosa
atgactatcctggtaatcgctgagcacaacgacggcgccctggccggcgccaccctgaacaccgtcgccgccgcgcagaagatcggcggcgagatccacctgctggtcgccgggcaggacgtcggcgcggtggccgaggccgccgcccaggtcgccggcgtggccaaggtgctgctcgccgacaacgccgcctacgcccaccagctgccggagaacatcgcgccgctggtggtttccctggccggcggctacagccacgtgctggcgcccgccaccaccaacggcaagaactacctgccgcgggtggccgcgcaactggacgtcgaccagctctccgagatcatcgaggtggtcagcgccgacaccttcaagcgcccgatctacgccggcaacgccatcgccaccgtgcagtcctcggcgccggtcaaggtcatcagcgtgcgcggcaccggcttcgacgcggccagtgcgcaggacggctcggccagcgtggaagtcgtgagcagtgtgttcgactcgcgcagctcggccttcgtcggcgaagagctggccaagtccgaccgcccggaactgaccgccgccaagatcgtggtctccggtggccgcgggatgggcaacggcgacaacttcaagatcctctacgccctggccgacaagttcggcgccgcggtgggcgcttcccgcgccgcggtggacgccggcttcgtgcccaacgacatgcaggtcggccagaccggcaagatagtcgcgccgcagctctacatcgccgtgggcatctccggcgccatccagcacctggcgggcatgaaggattccaaggtcatcgtggccatcaacaaagacgaagaggcgccgatcttccaggtcgccgactacggcctggtgggcgacctcttcgaagtcgtgccgcaactgcaggcggcgctctga

SEQ ID NO: 366509 - DNA, 177 bp, Pseudomonas aeruginosa
atgaaagcgaagaagaagccgctggaggtgatcaccccggacgctctcggcgtttccaccgcttccaccgtcaagaccctcaaggtcgaggcgccggccacccgcagcgccggcatcaaggtcacctccgtggccgaactggtcgagaaactgaagaacgaggcgaaggtgatctga

SEQ ID NO: 366510 - DNA, 387 bp, Pseudomonas aeruginosa
gtgagcgccccggccgtcaaaccgagcagtagtacgctccgggtcgtcgagtgggacgagctgccggagtcggtgcgcgccatcccgcaggggtacaaccccatcgcggaaggtctgctcatggcgcaccaggccgattggctggccattcaggcgcagatcaaactgtgcgagaagggacgccggacgggcatcaccttcgccgaggcgctggactcggtgatcacggccgcctcgcgccgcagcgctggcggcatggacgtgttctatgtcggcgacacgaaagagaaaggcctggagttcatcggctactgcgccaagttctcccgcgtgatcgccgaggcccaggcttccggtgtcagtgagatcgaggagttcctgttctag

SEQ ID NO: 366511 - DNA, 234 bp, Pseudomonas aeruginosa; identical to SEQ ID NO: 335098

SEQ ID NO: 366512 - DNA, 858 bp, Pseudomonas aeruginosa
atgagtatcattcgcaatatggagcgcacccgcaaggaactgtccgagttcctgcgcagccgtcgcgagcggctgagcccgatagacgcaggcttaccggcgggtggtcgccgccgcacgccggggctgcggcgcgaagaggtggcggctctggctggcgtgggcttgacctggtacacatggctggagcaagggcgcgatatcagcgtgtccgccaccttcctggacaacctggcacgcgtgctcaaactcgatgcggcggagcggcgctacctgtatttgctcacgcaacaacgcccgcccgccgagccgggcaagacgtggtgcgtcgtaccgccagtgattcatcggctcatgggcgacctgatcacacgccccgcctatgtcatcaatctgcgttgggacgtcctggcctggaacacagtggcggaccgtgtatttcgcttttcccaacatgctcctgagcgccgcaacttgttgtggatgttgttcgctgacgaaccgacccaggcgctgttcgatccctgggatgaccaggcgctgcaaatgctgtcccactttcgccgtgatttcgtcaaggcaacgcaggagcctgatatctgtgcattgattaaggatttagagaaggtctcacctgacttccgagaatggtggcaacggcaggacattcacggacctgaccatggctggcggcgcctgcatctcgaagggatcggtccggtggcattcgactacaccaagctgacgattgacgaggatcatcatttgcggctggtgtactacgcggcaatggaagatgacggcggcacgcgaggattcgcgaagtggttaaaccaggccgaagcgacggaggcttga

SEQ ID NO: 366513 - DNA, 1242 bp, Pseudomonas aeruginosa
atgtaccagcgcttgttgagtgaaaagctgaatggattgaaggcgaccgggcaataccgcacctttgtgaccttgaaccggatctgcggccagtacccgttggcgcagctcgaaggcaacgacgagcgttcggtggttgtctggtgcagtaacgactacttgggcatgtcccagcatccggtcgtgcgcaaggccatgcacgaggcgattgatctctacggtgccggctcgggtggttcgcgcaacatcggcggcagccacgggctctacgacaagttagagcgcagcctggccgattggcatgccaaagaggcggcactggtctttccaacgggtttcagttctaacgatgcgtcgctgcagtgcctgttgcggcagattcccgactgcgtggtcatcagcgacgaaatgaaccatgcgtcaatcatcaacggcatccgtgcgacgactggtgagcgccaggtcttccgtcataacgacctgtcgcatctggaaacgctgctggctcagtatccgcgcgaacggccgaagatcgtgatcttcgagtcggtgtattccatggacggcgatgttgcgcccatcgccgagattgtcgctctggcccaccgccacaacgcgctgacctatctggacgaagttcatgcggtgggcatgtatggcgcgcgcggtgccgggctggcggcgctcgaaggcgttgccgatcaagtggacatcatccagggcacgatggccaaggcgattggcgtgatcggcggctacatcgccggtacatcatggctaatcgacgcagttcgctcgttcgccactggcttcatcttcaccacgtcgctgccgccagcggtgacggccggttgcctggccagcgtcgagcacctgaaagcgcatgtagatgaacgcgaacgactgcatgtgcagacccgtcgcctgcggcaagcgttgaatgcctttggcatccctgtgatgccgtgctcaaccacgcatgtgctgccggtacggatcggcgacgcaggtaaatgcaaggccgccgccgaaaggctgctgcgcgtacacggcatttacttgcagccaatcaacttcccctcggtggcagtcggcaccgaacgctttcgggttaacgctaccccgaatcacagcgacacgcagatcgaccaacttgccgaagcattgcgcgaggtgtttatgcatttcgagattcccttgcagacaccagcaacagccaccgccttacaggaggtgtcgtga

SEQ ID NO: 366514 - DNA, 501 bp, Pseudomonas aeruginosa
atgccaaagactgcctggacggttcgcccggctgcgttggcggacatcgacgcgctggtagcgctgcgtgccaatttgctcgatggcgcatccgaggcgagctatgtgagccgcacgcccgatgaaagccgacgctggaagatcgcctatcaagaatggctggcccagatgctgcccggcgacgcgcaagtgcggatcgtcgtcgccgaacaggcaggtgaggtcgtggcctgcgccaccggccttatagaccgacgcccacccgcaccggatggtctgaccggctggtgcggctgggtgcagtcggtggtggtggtgcccgcctgccggcgccagggtattgccgagcggctaatgcgcgagctgctgcaatggttcgccggacacggtgcgactaaggtgctgctggagacgaccccggccgccgaagcgttgtaccgcaagctcggtttcgcacgcagcccggaaggcctgctgagcttcgtcggaggtcgaccatga

SEQ ID NO: 366515 - DNA, 1074 bp, Pseudomonas aeruginosa
atgaagctgctcattgttggcctgggctatgccggccagcgctaccgtcgcgcgtttcatcatcttgccggcaagctggatctgccactcgacatggcctacgtggcacgccgtgaacgcagcggcgaaaccctgtcgtattactccgatgtcccccgggcgttggccgagttccgcccggacatggtggtagtcagcgtcaacgaccacgggcatgtgggcatcttgcgcgacctagccgggttcgatggcttcgtgctctgcgagaaaccgctggcggctccaggagatgattggccgcgcgtctgcaccggactggcgcaaacccaaggcttcgcgctggacctggtggaacgctattcgtacgcctcgcaacgcttgaaagaacgggtggcccagcagggctggtcgctgatccgcgccagctttcattggggcaaggataggctgaacgactaccggcccacctgcggcgtgagcagcgaggtaattcacgctctggacctggtgcagtggattggtgcgctcgacgaaacgctgtgcgtgcgccaggcgatcggcatcggttcggacttttccctctccggttccaaggtgccggacacggtgatgctcaccgccaccctgggcgaggcggtggtggcaggctacagcagcttcgtcaacatccagcggcagcgcacggtggacttctcgttttccgatccggtaggccggattttccacgcgcggctggtctacgacaccccggcctgggatcacgacgaactgcgcatctggacccgcgatggtgacggccgggaggtggtggtggacgaataccacacggcccctggggaagccgggctggaaacgttgctcaagctgtcgcggctgtgcgaagacgccctgcgcgtggcggcgctggacgcaccgccacgtcaaccctttgccggcctcgatgacgcgatccacctacaacacctgctcgacggcatcggccagcagcttggatcgccgccgctggcccgctacgtgcgcggcggcacacgcctgcttatccccgcgagcgcagacctcgaaagcctcggctga

SEQ ID NO: 366516 - DNA, 1854 bp, Pseudomonas aeruginosa
atgtgtggaatgacaggctggcttgcgttcagccatgacatggaggcgcaccgcaagaccttgcagcgcatgaccgataccctggcaccgcgcggcccggatgcacaaggcatctggatcgacggcccaatcggcctgggccaccggcgcttgtcgatcatcgacttggaaggtggccgccagccgatggtggccgaccacggcggccagcgtgctgccgcggtcatcagctacacgggcgaggtctacaacttctgcgagctgcgttgtgaccttcaggcatgcggccaccgcttcgagacgcaaagcgataccgaggtagtcctgcgtgcctacctggaatggggcgcagccttcgtcgagcggctcaacggcatgtatgcgttcgccctctgggatcgtgccaaacagcaactgctgctggtgcgtgaccgcatgggcgtaaagccgctgtactacttccagaccgacgacggcgtggtgttcggctccgaacccaaggcactgctcgcccacccgctggtgccacgcaaggtggcggcagatgggctgcgggagatcctggagatggtcaagacgccgggacaagccatcttcgccggcatgcgcgaggtgttgcccggcgaaatgatccgggtgggtcgcaccggcctgtcgcgccaccgctactggacactggaggctcgcgagcatggcgacacgctggaacagaccattcgccacacccgcgatctgctggaggacatcgtcgatcggcagatcgtcgccgacgtaccactgtgcagcctgctttccggtggcctcgactcctcgatcatcactgccctggcctctaagaaactgctggccgccggtaaggacaatatccgttcgttctcggtggacttcgcggatcatggcggtggcttcagcggcgacgccgtgcggggaacgcccgatgcaccatttgtgcgcgatctggtggaacgcatcggctccacccatggcgagatcgtgctcgacagccgcgagctagccgacccggagctgcgtgccaagatcgtccgcgcactggatctgccgccggcgttttggggcgacatgtggccctcgctgtatcgcctgttccaggagatccgtcgtcactcgacggtggcgctgtccggtgagtcggccgacgaggtgttcggcggctatcgctggttccacgacccggaggcgatcgcggcccagacctatccgtggctaacctcggtcactggcaaatacttcgacggcaagaccctgttcgcccaggatttattggacaccttgcagatggacagcttcctgcgcgacagctacagccaggcgctggccgaaaccccggtgctgcccagcgaggactcgaccaaccggcgcatgcgccagatgagctacgtgaacctgacacgcttcgtgcagacgctgctcgaccgcaaggatcgcatgagcatggccgtgggcctggaagtgcgcgtgcctttctgcgaccaccgtctggtcgagtacgccttcaacatcccctgggagatgaaggccttcgatggtcgggagaaaagcatcctgcgtgccgccacccgcgacctgctgcccgacagcatcgccgagcgggtcaagagcccatacccctcgacccaggaccctgcctacgagcgcggcctacgcgaatcgctggccgccatcctggccgacccctccgcgccggtactgccgctgcttgatcggcagcgtgtcgcccacaccctggccaagccgctcggcgacctgtcgccgatgtacgaccgaatgggcatggagctggcgatcggcttgaacgcctggctggccgaataccaggtcgagctcgctctctga

SEQ ID NO: 366517 - DNA, 390 bp, Pseudomonas aeruginosa
atgaagctgggcggtgatgcgctcatgctgggcgacggtcatcagcggcatatgcacgccatcacctttggacgccagatcaacctgaagtcgctcgacgaccttcatgtcgagttcaacgtcgttgtcttccagctcttcctggtccgcccagccgcccagatacagactgcccaccacctccggccgctccgcctctgcctgttccgcttgctctgcctgccctggcgtttcgagctgctggagagtccgttcgaatcgctgccatgctttttctatcatgctatccggcacttcgatttctggaacatcaaggccaagcaagtcttcaccctgctggctgatttcccaaagtgcggggctgcgctgaacccggttgagaagccctag

SEQ ID NO: 366518 - DNA, 561 bp, Pseudomonas aeruginosa
atgaccgaccacgcagagctgcggagggtggctaaggcggcaacgccggggccgtggagttgcaatcgccactgggcaattgtgggtggaccaactcttgagttcacgaacggagcagcgcagcagcagatagccatggcctgctggcaaagctggatgcatgaagaagaactgcgcaacaacgccgagtttatcgctgccaacaaccccaagaccgtcctcgccctgctggacgagatcgacaggctcaaggcggagaacgaaaggctgctcgacgaactatccgcatgcaccgagcatccaggcggatgtgggtattggcgcgaggccgccaagcgtagagccgaagaacgcgaccggctcaaggcggagaacgaggcggtgcggggagcgctacatgccgttcaagctgaggtagacgggaatctccgcccacttacccgcgacctcgtgaacatggtcagcggcttgaataacggcactcacccgaatgacatctacgaccactgcgacgagatcgaaaggatcatcgacgcagccctagaaggagcaacgcaatga

SEQ ID NO: 366519 - DNA, 372 bp, Pseudomonas aeruginosa
atgaacgaccgcacactactcgaactggcggcgcgggcggcggggattgaggtgcgctggcgagacgacgacatctatctcggatcgttcgagcgccgcgttgttcctgagccaaaatcgccatgctcgaaatggctctactggcgccccctaatggacgacggcgatgcattgcgcttagcggtgcgactgaacctggatatccgctacgaaagctatgacgcaggcaccgccgtcatagtgggcggcgcttgggacggcgcgccggaagcggtacacgaaatattcgaacgtgacggcccgcgtgcaactcggcgagccatcgtccgcgccgccgccgagatcggcaagtctatgggagttggggaatga

SEQ ID NO: 366520 - DNA, 1449 bp, Pseudomonas aeruginosa
atggctcttctattcgaaagcctattggatacagacttttcatgctcacctgatgctcgtttcatattggaggtcattgccagggatccaggatgctggctaggtccagcgagcgagctgagcgtgaagccgtttgcgaagaggctccatgtggcggagagagtcgtctctgccgcattgagtgagctagtcgacgctggtgccatggagcgtgatgctccagcccgagtaggaagcggaggaagggcaacggttacctacacgctaggttcgtgtcatgtggacgcattggtaggggatgattcctaccatcaacatgccgagttgttgcaggcgctgttctcgggcgcggacatggttttttctgtactcggacgtgcacctgacgaacaagacgaactaggtgaggaggtgatggctgcggcggagcctaaaaaggggaggcgccagccgccaggtagccgtgggcggctgagcatccgtaatcgcctgcttttcgcggttttgctttctcgctctgaccggtttggaatggtccagatcgggctgctggaactggcgcggctcacaggcatgcagactgaacaaatgaaggctcgtctttctcgcctaatggtcttggggctgattcgacgtcatacccccggcctttcgagcaaggtttttgccgcaggtaaggtcgagagcacgtattacctgaatattgatgcgctcaagccacagggggctattgctgtacacatcagttacgactggggaaagcccaatcatgcgaagactcttcacaagcaggctcatgcttatgccgagaaggtgcggcgtgaaagcggtgtggtgctagtccccgtcggtctggctcagatctgggcgggtcagcggcagcctgtatttttcctactccaacacctgctttataggtatgcctctcacctgctatcgcaccactggcggcgcttggcttcggacgttccgattgaagatgctgagctcagagcattgattaagagtgattttgtcaggaatcgtaatccgatggtagccgaggagaggggcggattgatggaagaaagtgatagcgaagttgccaccgagtccacggatggaactgatagcaatgccaagcaggtttgttcgtccatctacacaatggcgatggaggtcgcccacgaatatcgggcgcgatttggtcagttgaactgggttgatttcgaggcagcggatattcgtattcttccggcaatggatgacctcggctataagtcgattacgatcatgctccaaccggcgcctgtggggttgggacgtttttcggtgttcgaggaggtcactcgggaaaatgtggataggtggctagcaatagatgaagccgagttgactctacagaaccgaatggacttcggattggttactttgcctcgcaaggtaaaaagagctctgcggctgcagtaa

SEQ ID NO: 366521 - DNA, 1278 bp, Pseudomonas aeruginosa
gtgcgggaaacccttgtccgtggtcagcccgacctgcacgggcagcgaggccttgccgccggcgcccgcagcgggccgcgagcggctcacgacgttgaggtacgtggcttcgtcgatgtcgaagtacacgtgcagcgggtcgatggacacgatcgtggtcagcagcgtggccgcgccggcgacaccgccgctgaccaggttgccctcggtcacgagcacgcggtcaacgcgcccggcgatgggcgccgtgacgcgggcgtaggacagatccagccgcgccgcagcgacggcggccttggccgcttgcacctgggcctggcgcgcactgcgcgcggagacggcatcgtcgtaggtcttgcgcgcgacagcgccggtcgccaccaggcgctcggcgcggtcgaagtcggcctgggcctgactggccagcacctcggcctgttgcagttgcgccgcagccgtgtcgagcgtgacctggaacggtcgggggtcgatctggaacagcagttgtcccttgcgcaccaggctgccctcggggacgctcacagcatcgacggcgccgccgacccgcgagcgcagctcgacggtcttgggcgcggccaggaagccggtgtactcggccgatggcgcgaccgtgcgggtgatgacctcggccacgggcacctgcggcgccatcggcgcgcccgccgggggcgccgcggccttgccctcgtccttggcgtcgcgggcggcaatcgctatgcccccgacggctgcgatgacgcctgccaccacaacgattctgatttttttacgcatggaagtgcccctttcttggatgcaggactccggcccttccgaagcgctctgcagaaatttgtgtggaggctaggcgttacaacgaaggcaaggtcaagccctttgggttgccctagcgggcaggctgcatggacaaggtggtgggaaaaccccgcgtcgtcgctgtggccactccgacatccagctcacgagtgccgttgtgcggttgaaccggtcggtcttgtgggtgattgcgagcgcgggaggctcaggcgtccaagctgccgccgcccattgctgtgcctgcgcggcatcccggcgcccaggcagggcccgcgattcagggtgttgcgcccaggccgcatcgaggacgtccttgaggctaaccggcggcgtgggtaccggcgcctcgcaacctgccattcgcctgggtgcttgggcctggtcagtcgtcggctttgtcctcggaaatgtggaccgccatgtcctgcagcacctggctga

SEQ ID NO: 366522 - DNA, 1089 bp, Pseudomonas aeruginosa
atgaagaagatcaataagaaagttgtttcgcttgcctgctatttattcataggtatttcatcggtttcctctcaggccagtgccgatgaagttataaaactcggcatgtcgctgattctttcgggctctgccggtaattggggcataggttcgaaatggctgtgcgacgaagcggccaaggaagtcgcggccgccggtggcgtgaaggtttccgggcacgtctacaacttccagtgcgtggcttacgacaacaagtacaacgccgccgatggggcgaaggtcgcccagaccttgctgagcaaggacaacgtcaagtacgtggtggccgcccatggcaccgccaccgcccgcgccctgcagtcgctttccgagcggcgcggcgtgttgatgttcacctccgcctggggcgagagcctgaaggggccgaagtacccgctgaccttcacgctgaacaacggtccccgagaaatcgtcgcgccgctggtccgctacgtcaaaagcgccaacccgcagatcaggacggtggtcctgctcaaccccaacgacgccagcggcaaggaagtcgaggcggtcacccggcaagcctgggaagccgccggggtgaaggtgatcgccagcgactggttcgagcgcggcacctcggagttccagccggtcgccgccaagctggccgcgctcaagccggacgtcgtcgacctctgcgccagccccgccgcggacagcggccgggtgttcaaggaactggccgcgctcggctggaacggcgtcaaggtcaaccagatcggcaccagcgccgccggcctgctggtcaccggccagggcgcggtggagaacctgtacatgggcttcgccacgccccagggcggcgccatcgacaagcaccgggcctacctgaacgagggcgtcagggcgctgaccggcgaggacgtcaacccgatccagatcgcctcctacgacggcgtgaaggcgctggccgccgccatgcagaaggcccagagcatcgagcccggcgccgtcgccgcggccctgcccaaggtcaccttcgactccttctacggccctgccgccttcggtggcgccgccacctaa

SEQ ID NO: 366523 - DNA, 2289 bp, Pseudomonas aeruginosa
atgactgagaaaacggttcgcatcgtcgatgcggtggtaatcggggccggcatgtccggcctctacatgaccaagaagctggtcgacatgggcctggacgtccagggcttcgaggccggcgacaacgtcggcgggacctggtactggaaccgctaccccggcgccagggtcgacctggagagcttcgactactccttctcgttctccgaggagctgcagcaggagtggaactggagcgagcgctacgcggcccagccggagattctcagctacctgaaccatgtcgccgaccgcttcgaactgcgccgccatttccagttccagacccgcgtgacggccgcgacctacgaggaaaagcaggcgctctgggccgtgcacaccgaccgcggcgaaaccctcaaggcgcgctacctcatcagcggcgtcggcgtgctgtccgagccgaaggcccccgagctggaggggctgtccagcttcaagggcgccacctaccacaccgggcgctggccccacgagggcgtggacttcaccggcaagcgcgtggcggtgttcggcaccggttcctcgggcatccaggtcattcccatcgtggcccgccaggccgcgcacctgagcgtgttccagcgcaccccggtgtactgcgtgcccaccgacaactacaaactgaccgacgaactccgtgaccgggtcaagcagagctacgccgcgcgccgccagaagtcccgctacacccgctacggcatcccggtggacttccccagcaccaaggccttcgacgtcagcgccgaggagcgcgagaagaagtacgagcaggcctggggcgagatgggccacctgctggccttccgcatgacctacgccgacatcctcgccgacgaggcggccaacaagacggtggcggacttcttcgcgcgcaagatccgcgggatcgtcaaggacccggccatcgccgagaagctgatccccaccagctaccccttcggcaccaagcgcccgtgcctgggcatcgcctactacgagaccttcaaccgcgacaacgtgtccctggtggacctgcgggagacgccggtggagcgcgtgaccgagaccggcatcctcacccgcgacggcgtgcaccacgagttcgacgccatggtcttcgccaccggctacgacgccctcaccggcgcgatcctgcgcgtggacctgaccggccgcaacggccgcaagctgcaggacaagtggcgggacggcccgcgggcgctgctgggtatcagtaccagcgagttccccaacttcttcatgatcaccggccccctgagccccggcccgctgaacaacatggcggtgtccatcgagcagcacgtggagtgggtgaccgactgcatcgcctacatgcgccgcaacggcctggcttccatcgaggccgaccaggccgccgaagagaactggttcgagcacgtgcaggaggtggtgagcaacaccctctacctcaaggccaactcctggtacctgggcgccaacgtgcccggcaagccccgggtgttcatcccctacctgggggggcgccggcggctatcgggagaagtgcgacgaggtggcgaacgacggctatcgcggcttcatcttccagcgcctcgaaacccccgcggccaaggctggaaccgagctggcgtgatgcgcccgatgccggccgcggccaaggcggccggcatccgtgactacaagggaacagcaatgactgatgcgatccagcaactgatcgacaaatccatcatccatgacgtggtgatgcgctacgcgcgctcggtcgaccgccgcgactgggagagcgcccgcgcggccttcttcgaggacgccaccgaccaccacggcgacttcttcggcagccgcgagcagttcatcgactgggtgagcggcaaccattccggcgtgcccaagtccacgcacctgctgggcaactgcctgatcgagttcggtgacgagaacctggccgtggtggagacctatttcttcgcggtgctggaactcagcgccagctccgaagggcaccgcaagatgttcttcggcgacgacgccgacgcctcggccaccggccgcgtccgcatggacgtgttgggccgctacgtcgaccgtttcgagaagcgcgacggccagtggcgcatcgccaagcgggtgaccgtgttcgactccacccatgcccggcccaacgtcggcacggtggacgaccatcccaagtgggcgctgggcaagcgcgacgccggcgatccgctgttcgcgatccgccgcgccgccggcctgggcgattga

SEQ ID NO: 366524 - DNA, 753 bp, Pseudomonas aeruginosa
atgggtaggttggctggcaaggtggccttcgtcaccggcgcggcgggtggcatcggctcggagatctgcaggcgtttcgtgcaggagggcgcctgtgtgctggcggcggacatctcgcgggacgcgctggagggcgtcatcgcctcctgcgccgatcgcgagcgcatcgtggccggcgtggtggatgtcacccgcagcgaaagcgtggtggccggcatcgagctggcggtgaagtccttcggcaagctggacatcctgtgcaatgtcgccggcggctccacgccccacgacagccgcgtcaccgaggcccccgaggaagagttctggcgggcgatcagcctggacctgttcggcaccttcgtctgctgcaagtacggcattcccaggctgatcgaggccggcggcggctcggtcatcaacttctcgtcgatggtcgcgctgatgtcgctgcccgagcgcgattgctatacggcggccaagggcggcgtgtcggcgatcacccgttcgatggcgcacgaatatgccgccgacaaggtgcgggtgaacgccatcgccccgggcctgaccctctcggagcgcacccgcgggctgatcgaccagcgcgaggaactgaagaaactcgccgaccagtgcctgctgggcgtctgcgagcccatcgacatggcggagatggcggtgttcctcggcgccgacgagtcccggcgcgtcaccgggcagatactgccggtcgacagcggcgtgacgatctactga

SEQ ID NO: 366525 - DNA, 903 bp, Pseudomonas aeruginosa
atgtcgaaacgaatcgatctggggtggataggcctgggccagatgggcgcgcccatggccgagcgcctgctgggtgaggacgtcaccctgcatgtcttcgaccgcaacgcgcaggtcctggacgcgttctcgcgcaagggcgcggtcgtccatggctccccgcgcgaggtggccgatgccgcggaaatcgtcttcgcctgcctgcccagcccggccatcagcaagagcgtcgcgctggacgagggcggggtgatcttcggcgagcgggtgcggctgtacgtcgaatcctcgaccatcggccgcgactgcatccaggccatcgccgcgggccttgcggcgaagaacatcgccctggtggacgggcccatcagcggcggcgcccccgcggcccgcgagggccggctgacgatgatggtgtccggcccgccgcccgcggtggacgaagtgctgccctggctggggcggatcggccggcaggtgaccaacctgggcggccaggccggccaggcgcagatcatgaagctggtgaacaacctggtgatggcggcgaacatggtcgtcgccgccgagggcctggccctgggcagcaaggccggcctggacgcggcgaccatgctcgaggtgttggccgccagcaccggcagcagtcgcgcgctgaccgagatactggcgcaggcgctgaagcccggctcctacagcttcggcgcccatctctccatcgtcgccaaggacgtcgcgctcggcgtgcacgaggcgtcggccctggaggtaccggttccggggctggaggcggtccgcgcgatctgggcggccgccgtcgccgacgggcacagcgacgaagacttcaccagcatcatccgcttcgtggaaaaacaggcgggtaccgaagtgcgcagcgcctga

SEQ ID NO: 366526 - DNA, 336 bp, Pseudomonas aeruginosa
atgaaaatgatggccggtgtcatttccctgatgacgctatatggatgttctacaccgtcgggtgaaggcaggtcgggaagtttctccgaatatacccggaagtccccgcaggaatatgtcacctgcctggagcccaagtggcaggcggtgaatatatccacgtccaagaccaggacacggagcgggttctccctggaggcttccgcgccgcagagcggcccggtggcattggcgatcatcgacgcccaggaaagcggttccagggtggaggtcttcctgccgacggcgcagggccgggccgaaacctggggcgaccgcgccaggagctgcctgtag

SEQ ID NO: 366527 - DNA, 1518 bp, Pseudomonas aeruginosa
atggtcaattacacaagtgagtcggcagatatcggcgagcaatatgtcgatcatgaagtcgccatcatcggcacggggttcgcgggtatcgccatggcgcattacctggacgagctgggcctgacggatttcgtcctgttcgagaaggccgacaaggtcggcggcacctggcgcgagaaccactatcccggcgcccgttgcgacgtgcccgcggccctgtactcgctgtcgttcgccccggagtggagctggacctcgaactatccgccgcagcgggaaatcctcgcctacatgatgcgaaccgccgaacgccagggcgtgacgctgcgcacgcgcttcaacaccgaagtgctcaaggccgagttcgacccggcgcggggcatctggacgctgcacggcgccgacggggtgctggctacctgccgcaccctggtttcggcggtgggccagctgaaccacccggccatgcccagggtcgaggggctggacagcttccagggcgcggctttccattccgcgcagtggcgccacgacgtcgagctcaaggggcgcaccgtggcggtggtcggcaccggggcgagcgcgatccagatcgtcccggccatcgcccccgaggtggagaagctgattctgctgcagcgttcgccggcctgggtgttccccaagcccgagcgcgaaatccccctgcaggagcgcctgcactaccgcctccaccccgagctgctgcagcaggagcgcgaagccctctacgagcagttcgaggccggcttcgacaagtacatggcggacacgccgatgaacgtccaggcgcgcgaggaagggcgccagctgatcgagtcgcagatcgccgaccccgagctgcggcgcaaggtcacgccggactacctgcccggctgcaagcgcatcctggcgtcgaacgactggtacagcaccctggcgcgggacaacgtcgaagtggtcaccgcggggctcgaggccttccagggcgatgagatcgtcgacacagacggtaaccgccacaaggctgaggtggtggtgttcgccaccggcttccgctccacggacttcctcttccccatggcggtcaagggtctggacggcgccgacctgcacgccacctggcaaggcgagccgcaggcctacctcggcatgagcgtgccggagttccccaacctgttcctgatgtacgggcccaataccaatacgcacaactcgatcatcggcatgctcgaggcccaggcgaagtacatcgcgcgcaaggccaagggcctccaggccgccccgggccgcttcatcagcgtgaagccgcaggcccaggagcgctgctacgccgacatgacgccgaaattcgaccgtttctcctggagcggcggctgccacaactggtatcgcaccgccagtggcaaggtggtcaacaactggcccgagcgcacgcgcgcctacttcgacctgctggcccgcgaggacgacgccaactacgacgccttcgtcgcgccgcaggccccggccggccgctga

SEQ ID NO: 366528 - DNA, 2007 bp, Pseudomonas aeruginosa
atgacctcgaagtaccgtttggccctttcccccctgcaggtcgggccggtcacactgcccaatcgcctcgtgcggacggcgcacgccacgctgttctcgcgcggccaggtgaacgacgaccacatccactaccacctggagcgggcgcggggcgggatcggcctgaccatcctggaatgcgtatcggtgcaccgttcctcgaccttttccctgggcctggaggacgacgccggcatcgccccgctgagccgcctggtggaggccatccgcccgacgggcatgaagctgttccagcagctctggcacggcggcaacgtcgagccggcccccaacggcgggccgccctggtcggtaacaacgctgcccgggcgctactcgcggatgccgccggtggccatgtcgccgcggcagatcgccgagctggtccacgcctacgccgcggccgcggtgcgcctggccaaggccgggatagacggcgcggaggtgctggccggcaacggctacctcatctcgcaattcctctcgccgtcgctgaatacccgcggcgacgcctacggcggcagtttcgagaatcgcctgcgcttcctggaggaactgctcggcgaggtgcgcgcccaggtgccggccagcttcgcgctcggcgtgcgcatgggcgccagttccgatccggcgatcctctcggcgcaggacgtgaacgccgcgatcctccggctccaggcgaaggggctgatcgacttcgtgaacatctcccagggcgactactacttccacgtcgagcgctatgccgcgatggaccagcccgcgggctaccaactgccggcgatgcgcgaggtgggcaaggacgtcagcgtgccacgcatcgtcgtcggccgcttcggcaccctcgacgacgtggagcagacgctgcgggcgggcgatgccgagatggtgaacctcgtgcgcgccaccatcgccgacccccatctggtgcgcaaggaggtcgaggggcgctcgctggaggtgcgcccctgcatcgcctgcaaccagggctgcatcggcggcctgttctccggccgcatgagctgcacggcgaacccgacggtaggccacgaaggccgcctcggcgaacacctgatcgtccgttccggccagccgcgcaaggtcgtcgtggtgggcggcggcccggcggggatggaggccgcccgcgtctcggcgctggcgggccacgaggtcatcctggtcgaggcgtcgtccgacctcggcgggcagatcaacctcgccaagcacctgccgaagaaccatggcatcggcgacctgaccaactggctcgaacgcgaggtcttccgcctcggcgtgcaggtgaagctgtccacctacgtggatgccgccgaggtgctggcgatgcagccggacgtggtgatcctcgccaccggctccatgtcggccgccgccgacgccttcgtgcagaccgccgcgccccagctgcagctggacatcgagcccggcgcgcgggtggtctcctccgaggacctggtgctcggcgccgccggcgagctgggcggcagcgccgtggtggtggacgacatcggccactacgaggccatcggctgctgcgagatgctgctggagcgcgggctggacgtcacctatgtgacgcgccacgcctccttcgcgccggagatcgacaagaccggcaggacccaggccgcgctgcggcgcttctatgccctgggcaacttccgcctcctcaccagctcggtggtggtggcgatccagcgggatgcggtgcaggtgcgccccatcgacggcttcaggccggagagcgtgaaggccgacaccaccgtggtggtggcctaccgagaggcgctgcgggagctgtgggacgaactggtggacgccgggccgcagctgtacgtggtgggggatgccctttccccccgcgacctggtctgcgccatgcgcgaaggccatttcgccgcgcgctcgatcgacgacccgcggatcgaaagcctgtggaacaacatgtga

SEQ ID NO: 366529 - DNA, 909 bp, Pseudomonas aeruginosa
atgccactcgatccggaaatcgccgtagtcctgaagtccctggagggcatgccgcccatggagcgcatgagcctggcggagctgcgcgcgagcgtcgcgcccgttgcgccggagcgtcgcgcgccggtcgccgcggtccgcgacctggtggcgggcctgggcatccccctgcggcaatacacgcccctggagctggcgtcggacaggctcatcgtctacttccatggcggcggcttcgtcatcggcgacctggaaacccacgaccacctgtgccgcgacctggccaacgccagcggttgcagcgtggtggcggtggactaccggcgggcgccggaatgccgcttcccgataccgctggacgactgcatcgccgccgtccgctggatcgccgccaacgaccgggaactgggggtgagcaccgagcgcctgatcctggccggcgacagcgcgggcgccaacctggcgacggtgaccgccctgcgcttgcgcgaggagggcggcccgcgcctggtcgggcaactgctggcctacccggtcaccgactaccacacgccggccaccccgtcctacctggagaacgccgagggctactcgctgacgcgcaacgcgatgatccgtttctggcaggactatgtcgccaccccggagcagggctgccagccctatgccgcgcccctgcgcgcgccgtcgctggccggcctgccggcggcgctggtgatgaccgcgcaattcgaccccctgcgcgacgaaggcgacgcctatgccgggcgcctggccgagagcggcgtggcggtgacgcacctgcgctacgacggcctgatccacggcttcctgcgcatggccatggtcagccggcgcgcgcgcgaggcgttcgccgacatccgccgctgggtggacagcctgccctga

SEQ ID NO: 366530 - DNA, 753 bp, Pseudomonas aeruginosa
atgagtcgtcctgtcgtgctggtaaccggtggcgccggagtgatcggccgtgcgatcacccaggcgatgatcgccgatggctggcgagtggtctgcctggatcgcgccggcgccatcgaccaactggagcatgaggagttcgtcacccccgtggcctgtgacatcaccgaccaccagcagctggcctcgaccgtcgcccagtgcggcgagctcgccgcgctggtcaactgcgcgggcatcgtggagttcgggccgctgatggacaccgacctcgaatcctggcggcgcaccttcgaggtcaacgtcaccgcgcccttcgcgctcattcgcctggcggccccggccctggcgcgcagtggccgcggcgccatcgtcaacatcacttccatcaccgccaggcgggcgagcgtggggcgcgccgcctacgggccgtccaaggccgccctggaagggctgacgcgccaggcggcggtcgaactcgcgccccttggcattcgctgcaacgccgtggcgcccgggccggtggaaagcccgctgtccatcgccaacctgttggcgaaggactatgcggactacgtcgcgagcattcccagcgggcgcttctccagcgcggccgaagtggcggatgcggtggcctacttgtgctccgggcgtgccggctcggtcaccggccaatgcctggccgtggacggcggctggcttgccgcgggggcgggcatgtggcgcctgcgggaaaccgcggggcagcgctga

SEQ ID NO: 366531 - DNA, 741 bp, Pseudomonas aeruginosa
ttgaacccactcaaagacgccttcgtgaaacggcaaggctattggaacgacgacctgcagcgcgccctggataccgacccggggttcttcgaggcctgcctccggctctgcttcccctccccgcgcccgccgctgctggaggcgcgcgtgcggcacctggtgctgatcgcggccaacgccgcggtgacgcacctgaacgaacgggaactgggcgtgcagataaaatgcgcgctcgaccagggcgccacccgcgagcaggtccgggaagtcctgcagatggcctcggtgctgggcatgcacggcttcatgctgggcgccccgatcctgatgcgcgaactcggcggcggccaggcccgcgaggcgtcggccgaacaccgcgccagggcggaacaggtccgggacaagttcaccgccggcaggcagtactggagcgagcggttggaggacatgctgcaggcccaccccgagttcttcgacgcctatgccgacttttcctcggtgccctggctgaccggcaccctcgaacccaaggtccgcgaattcatctacgtcgccatcgacgtttccaccacccacctgcatggggagggggcgcggatccacatggccaacgccctgcgccatggggcgacggtggacgagcttgtggaggtgatgcaggtcgtcagctgcctgggcgtgcagagctggaccaccgggctgcgcgtgctggagcaggtcgcgccgtccgcccaggactag

SEQ ID NO: 366532 - DNA, 753 bp, Pseudomonas aeruginosa
atgcaagcagagaagcagaccgtcctggtcaccggcggcgccagcggaataggcgcggccgtcgccaggctattcatcggccagggcgcgcaggtcgccatcgccgacatccatttcgaacaggccagggcgctggccgccgaactgggcgacaacgccaggcccttcgcgctggacgtcggcgacgccgggaacgtccgcagcctggtcgcgcagctgggcaaggtcgacgtcctggtgaacagcgcgggcatcctgctcaacaagcccttcctcgacaccgagcccgaggacttcgagcgcctgctgcgggtgaacctgctgggcacctgcctggtcgcccgggaggcggcgcggagcatgctcggccgcggcgggcggatcatcaacgtcgcctccgcggccggcctgctgggcttccccgggcgcacggcgtacgcggcctccaagggcgcggtgatcgccgcgacgcgggtgatggccctggagctggccgagcacggcatcctggtgaacgccatcgcccccggctcggtggcgacggcgatgaccgccgccacctacgacgagcgcttccgccgcagcatcaccgccagcgttccgctggcccgggtggccagccccgaggagatcgccgaggtcgccgtattcctggcctcccccgccgccagctatatcaccggccagacctttgccgtggacggcggcatgagcagcaccggcatgacctgccagagcctgcagcaggactag

SEQ ID NO: 366533 - DNA, 933 bp, Pseudomonas aeruginosa
atggcactcgatcccagtacgcaagatttcgtcactgccgcgcggctcaatgcccgcaaacccaggcacctgatgtcgcccgtggaagcccgcgatgccctggcgggcctgaagggcctgctcggcccgggggccgggctggcgctgcgggagaaccgcaggctggcggtcgcgggcggcgagatcgagctgcgcctgcttcgcccggaaggcgagcttctgggcgtcatcgtctatttccatggcggcggctgggtcgtcggcagcaacggcgaattcgagcccatatgccgcaacctcgcggcgcagagcggctgcgccatcgtcatggtgtgctaccgcaaggccccggaacaccccttccccatcccgctggaggatgcctgggccgggttcgagtgggtcgccgcgcagcgccgggcgctcttcggcagcgacctgccgttgctgctggccggcgacagcgccggcggcaacctggcagcctgcgtggccctgcgcgaacgccagcgcggcggcgagcgcatacggggcctggtgctgatctacccggtgaccgacgcggacttccagaccgcgtcctatcttgacccggacatgcaggtcctgctgcccgccgaggtcatgcgctactactgggaccactacgtgcccgatgccagccggcgcagcgacccccgggtgtcgccgctgcgctcgcccagcgtcgccggcctgccgccgagcatcatcctcaccgccgagcacgacgtgctgcgcgacgaaggcgaagcgttcgccgcgcggttgcgcgaagcgggcgtgccggtggcccatcgccgcttcgaggggcagatccacgccttcatgatgatggtcgacctgctgcccggcagcgccgaggccatccgctacaccgccgacgaaatcagggccctgctcggcaggcgctga

SEQ ID NO: 366534 - DNA, 804 bp, Pseudomonas aeruginosa
gtgaagaacctgcgcaagccatctttcaaaccggtcgaggccgttgtccgcgcgctcagggtgctgcgcgtcatcaacgaggagaagcagtcgaccgtcgcctcgctccaccggcagaccgggctggacaaggcgaccatcgtgcgcatgctggaaaccctccaccatgagggctacgtcgccagggaccaggagcgggcggtgtattcggtgaccgcgcgcacgctcctgctgagccagggctatgacaggtcgcgctggctcgccagcgtcgccgagccgaccctggcgcgcttccgcaacgccatcggctggccttcggacctggccctgttcgacttcgacgccatggtggtggtgcagacgtcccgcggcagcggcccgctgtcgttcaaccgccagcccggcttccgctcgcccatgctggccacctccatcggcctggcctacctggcgttctgcggcgaggaggaacgccgctcgatcatcgagaacctggccgccagccccggcgaatggaaccagctcgcccaggaccccgtgcggctcgaaaagctgctgaagaagatccgcaaggacggcttcgccgtcatgagcagcgagtacagccgcgacgtcttcgccagcaacgtctgggccatcggcgtgccggtgatgcacgagggcgagctgttcgccaccatgaacgtcatgctgctcaagagcgccgtcaacctcaccgaggcgcgcaagaccctgctggcgcccctgcagcgcaccgcggcgcagatcgcccgcgacctcgcccagtcgcgctacagctga

SEQ ID NO: 366535 - DNA, 309 bp, Pseudomonas aeruginosa
atgattgctggaaccagcgcacgacacggggccgtcgggactgcggtgcgacgcgtccgccagcgccgggccgccgtgatccatgcgttgctcctgggtgtcgtgctggggcaaccgccgctgtggagcggtggcgccgcgctgcggtccggccatgacggcggtaccggcgggcgagaggcgcgggtggcccaggccaggctggcactgcagcaacccgtgctgtccggacgcgagcccgggcagcacgagagccaggcgcggcgtggcgacttgaagcgttatgcaactgacatggctcggctgtga

SEQ ID NO: 366536 - DNA, 1071 bp, Pseudomonas aeruginosa
atgtattcgtctgaagagcgtttggaaaatatccgcatgatccgcgacagcgcctcggccttcgccccggcgggtgagctggcgcgggtgcgcgggctgcgctaccaggcccctgggttcgacaaggcggtgtggcgcgagatggccgacaacggctggctcggcctgccgctggcggaggcgcagggcggcgccggcctgggcatggccgaatattgcgcgctgttggaagtgctgggcgccgcgctggtgccggagcctttcgtgccggcggtgctggccgcgcgcctgttgaacggcgagctgctggccgcccagctgactggtgagcgcttgctgctgcctgcgctgcaggagcagtacgacagcctggaaccgcagaccggggctacgcgcctggtcgatggcaaggtccgcggcagtaaggtctgcctgcccatggccgccggcgccgatggcttcctggtcagcacggaccgggggctggcgctggtcgaggtaggggcgcccggcgtgaccctgtacgtcgcccagacccaggacggcggccacctgggcagcctggtgctggagcaggccccggccgaactgctgccgctggatgccgaggccctggccgacgccctggacgaagccgcgcttggcaccgccgcctatctgctgggcgccgccgagcaggccttcgccctgaccctggactacctgcgcacccgcaagcagttcggccaggccatcggcaacttccaggccctgcagcaccgcgcggtggacctgaagctgcaactggccctgtggcgcgccagcctggaggccgccgcggccgcctgcgacgccggcgcccccgtggcccagcgccgcgccgccgtgtcgcgggccaaggcgcgcgccgccgacgcggcgctgctggtcacccgccaggctgtgcagctgcacggcgccatcggctacaccgacgagtgcgatgtcggcctgttcctgcgcaaggccatgagcctggccaacctctacggctcgtccgcccagcaccgacgccgctacgacgcctgcatgccgcgcctgggcgacgcctga

SEQ ID NO: 366537 - DNA, 1158 bp, Pseudomonas aeruginosa
atgagcgacaaaccgcaactgcccgacttcaacgcgctgagcgacgacgcgttccgccaaacggtacgcgagttcctgcgcgcgaacttccccgaggagctgcgcgacctgcccaagcgcctgcactggagcgaggtcaaggactggtacatgaccctctccgagcacggctggctgtgcccgggctggccccgcgagttcggcggcatgggcctgtcggcggccaagcagctgatctacaccgaggagttcgagaactacggcgtggcccgcactccggaccacggcatcatgctgctcggcccgctgctgatccgctacggctcgcccgagcagcagcagtacttcctgccgcgcatcctctccggcgagcacatctggtgccagggctacagcgagccgaacgccggctccgacctcgccagcctgcgcaccgaggccgtgcttgacggcgacgagtgggtggtcaacggccagaagatctggaccaccctggccaccgacgccgactggatcttcctgctggtgcgcaccgacaagacggcgaagaaacaggagggcatcagcttcctgctggtgccgatggacagccccggcgtgaccgtgcggccgatcctcaacctcgacctgcacgacgagctgtgcgaggtgttcttcgacgacgtgcgcgtgccgcgtggcaacctggtcggcgagatgaacgccggctggaccatggccaaggcgctgctgggcttcgagcgcatcttcctcggctcgcccaagcagtcggccaacgcgctgacgcgcctggagctgctcggcgagcacctggggctgtccgacgagcccggcttccgcgaccgcctgacgcgcctgcgcctggacctggacgaccacaagctgctgttcgagagcttcgccgagcgcttgcgccgcggcgagagcctgggcgccgacgtatcgctgctcaaggtgcaccagaccgagctgttccagcgcatcaccgactacatgctggagatttccggcgagtacgccgcgctgctggagcccatcgagggcaacggcaacctcaaccccaccggcctgttcctccaggcgcgccccgcgaccatctacggcggcagctcggagatccagcgcaacatcctggccaaggccgtgctcggcctgtaa

SEQ ID NO: 366538 - DNA, 906 bp, Pseudomonas aeruginosa
atgctcgacaacaaagtagtggtggtcaccggtgccggtggcggcatcggccgggccatcgcggtggaaatggcgcgtgccggcgcctcggtggtgatcaacgacgtcggcgtctcgctgggcggagagggcggctcggccaccccggctcaggagacgctgaaactgatcgaaggcttcggtggccgcgcggtgatcaacaccgacagcgtcgccgagtggaacggtgcgcagcagatcgtcgcctgcgccatggacagcttcgggcgcatcgacggcgtggtgaacaacgccgggatcatccgcgacgtgatcttccacaagatgagcgtggaggactggctgtcggtgatccaggtccacctcaacggcagcttcttcgtcagccgcgctgccgccgagcgcttccgcgcgcagaacggcggggccttcgtgcacatggtcagcacctcggcgctgatcggcaacgtcggccaggccaactactcggcggccaagctgggcatggtcgcgctgtccaagtccatcgccctggacatgcagcgcttcaacgtgcgttccaactgcatcgcgcccttcgcctggagccgcatgaccagcgccatccccgacagcaccccggaggagaaggcccgcgtcgagcgcctgaagcagatgaccccggaaaagaacgcgccgctggcggcgtacctgctgtccgaccaggccaagggcgtcaacggccaggtcttcaccgtgcgccgcaacgaaatcttcctgatgagccagaaccgcccggtgcgctcggtgcagcagggcgaaggctggaccgcgcagagcatcgccgagcatggcatgccggcgctggccggctccttcacgccgctgcaggtcagcgccgacgtgttctgctgggacccggtctga

SEQ ID NO: 366539 - DNA, 1167 bp, Pseudomonas aeruginosa
atgaacgctgagcgtgcccaagagagctaccaggacatccgtgagggcgtgcgcgccctctgtgcggagttccccgccgagtactggcgcaagatcgatgaagcaaaaggcttccccgaagccttcgtcaaagccatgaccgaagccggctggctgtcggcgatgatccccgaggagtacggcggctccggcctgggcctggccgaggcctcggtgatcctcgaagaagtgaaccactgcggcggcaactccgggaccatccacgggcagatgtacaacatgttcaccctgctgcgcagcggcagcgaggagcagaagcgctactacctgccgaagctggccagcggcgagctgcgcctgcagtccatgggcgtcaccgagccgaccaccggcaccgacaccaccaagatcaagaccaccgccgtgcgccagggcgacaagtacgtggtcaacggccagaaggtgtggatctcccgcgtgcagcactccgacctgatgatcctgctggcgcgcaccacgccgctggccgaggtgaagaagaaggccgacggcatgtcgatcttcctggtcgacctgcgcgaggccatcggcaatggcctgaccgtgcaaccgatcgccaacatggtcaaccacgagaccaacgagctgttcttcgacaacctggaaatccccgccagcagcctgattggcgaggaaggcaagggcttccgctacatcctcgacgggctcaacgccgagcgcacgctgatcgccgccgagtgcatcggcgacggccgctggttcatcgagaaggccagccagtacgcccgcgaccgcgtggtgttcggtcgcccgatcgggcagaaccagggcgtgcagttccccatcgccgaggcgcacatcgaggtggaagccgccgacctgatgcgctggaaggcctgcgcggaatacgacgccgggcgcaacgccggggcggcggcgaacatggccaagtacctggcggccaaggccagctgggaggcggccaacgcctgcctgcagacccacggcggcttcggcttcgccaacgaatacgacgtggagcgcaagttccgcgagacgcgcctgtaccaggtggcgccgatctccaccaacctgatcctgtcctacgtggccgagcacctgctcgaactgccgcgctccttctga

SEQ ID NO: 366540 - DNA, 846 bp, Pseudomonas aeruginosa
atgactgccaacgatctgggcccgctgcaggcctggctgggacgccaggaatcctgcgaagcgctgatcaccccgcagatgctggaagcctaccgcgccaccctggcgccgcacctgtgggaagaccagggcttcgccccgcccggcctgcactggtgcctggcgccgagcccggcggcggcgggcatggccgagctgggcgaggacggccacccgcgccgcggcggcttcctgccgccggtgccgctgccccggcgcatgtgggccggcggcgaagtggagacgctggcgccgctgcccatcggcgaaccgatcctgcgggtgtcgagcatcgacgacatccgcttcaaggaaggccgcagcggcaagctgtgcttcgtcaccgtcaggcatgaactgtcctgcaccggcaccctggccatccgcgagcgccaggacatcgtctaccgcgccccggcggcgcccggcccggcgccggccggcggcgcggcacgcgaaggcgagcggcaatgctgggtggaaaccccgtcgaccctgctgctgcgctactcggcgctgaccttcaacgcccaccgcatccattacgacctgccctatgccaccgaggtggaaggctacgcgggcctggtggtgcacgggccgctgcaggccagcctgctgttcaacctggccgccagccatgccgggcgcgtgcccctgcgcttctcctaccgcggccaggtgccgctgatcgccggccggccgttccgcgcggcggtgtcctggcagcacaagggcgacagcctgcaggcctggacccaggacgccgacggcaacctcaacatggaggccagcgcagcatgctga

SEQ ID NO: 366541 - DNA, 831 bp, Pseudomonas aeruginosa
atgctgaacgatgccttccaggcgccgctggtgcccctgttcgtacccggcgaccgccccgagcgcttcgccaaggccgccgccagcggcgccgatgcggtgatcctcgacctcgaggatgccgtggcccccgccgcccgtgccatggcacgggaggccgtggccaaccacggcatcgacggcgtgccggtgatcgtgcggatcaacgccacccgcaccgaggatttccaggccgacctggcggccctgcgcgaggcgcgtttcgacgtgctgatgctggccaaggccgaggccgccatcgatatccgcctggtgcactacctgctcggccgccaggtgccgctgatcgcgctggtggagaccgccggcgccttcgacgatctggccggcctgctgcgcgaacccggcgtggtgcaggccgccttcggctcgttggacctagccctggacctgggctgccagcccagctgggaggccctggcctacttccgcggcgcgctggttttgcaatcgcgcctggccggtctggcgccgccgctggacggcgtcaccaccagcttcgacgaccccgccgcggtgcgccaggacgccctgaccgccagcggcctgggcttcggcggcaagctggcgatccatccgcgccaggtggcgcccatccgcgaggccttcctgcccgacgccaaggcggtggactcggcgcaagccgtgctcgccgccgcccagagtggcgccgccgtccagctcgacggggcgatggtcgatcgcccgctgatcgagcgtgcccgccgcattctttcccgttccagcgttactggagaaaaacacccatga

SEQ ID NO: 366542 - DNA, 1185 bp, Pseudomonas aeruginosa
atggcgaaggtgctagagaatattcgggtcctggatttcgggcggttcatcgccgggccgttctgcggcgcgctgctggcggacctgggggccgacgtcatccgcatcgaccggctgggcggcagcgaggaccgcttcgtcatgccggtcaccggacagggcgatggcgcggtgttcctgcaatccaaccgcaacaagcgctccatcaccctggagctggccagcgaggaggggcgcaggatcgtccggcgcctggtggaatcggcggacatcgtcatcgccaacatgcccggcgcgacgctggtcaacctcgggctggactacgagacgctcaaggcgatcaagcccgacatcatcctggtggcgccctcggcgttcggcgacagcgaactgctgcgcgacaagatcggcttcgatggcgtcggccaggccatgagcggcggcgtctacctgtccggcttccccggtcagccgatcaagtcgatggtgccggtggtggactacgccacggccatctcctgcgcgctgggcgccgtcgccgccctctacgagcgcaacaagagcggccaggggcagaaggtcgaggcctcgctgctgcagaccgcgctgaatttctccagcggctacctcatcgaggaacagctgctgaagctggagcgccaggccaccgccaaccgcagccagagctacggcccctcggacatcttcgagacccgcgacggctggatcatcgtgcaggtcatcggcccggccatgttcaagcgctggacgcggatcgtcggctgtccggaactgctggacgacccgcgcttcgccgacgacgaactcagggggcgcaacggcgaggagctttccgagcgcatggcccagtggtgcgcgcagcgcacgcgggagcaggcgttgcaggagctcggccaggccaagattccggccgggccggtatattcgccggcgcaggtgaatgccgaccaggcgattgccgatagcggcgcctacgtctggctggaacacccgcacctggattcggtggcgccctacatagccccgccggtgaatctttcccgaacgcccctgcaaatccagaaacatgctccattggttggagaacataccctggaagttctgcaggaatatggtttcgaccctgcccagataaaggagtggcaacttaaaaaggtgatctga

SEQ ID NO: 366543 - DNA, 786 bp, Pseudomonas aeruginosa
atggcaattgacgagcacggcgatgcgctcttgactgtcgagcgcggcctgcaggtcctccgggccttccgcggcgagcgcacgcccctgtccaacgccgagatagtggcgcgcaccggcctgccgaaatcgacggtgtcgcgcctgaccacgacgctcatgttcgccggcttcctgcgccacgcggtgggcgggcgccagttcgagctgggagccggttcgctggggatcggccacacctacctggagtcgagccccctggtgcgcctggcgcagcccttcatgcaggaactggccgacgagctgaacgtgtcggtggcgctggccgttcgcgacgacctggaagtgctctacgtgacctactgttcgagccggtccatcgccacgctgcgcctgggcgtgggctcgatgctgccgatggagtccaccgccatcggccgcgcctacctgtgggggctcggcaaggcggagcgagcgcagctcttcggcgagatgaaacggcgtttcggcgagcgctacccgcaggtcctcgtgggcatccagggcagcttcgaggaactgcagaacagcggtacctgcctggtcaagggcggctaccagcgcgacacctacggcatcggcgtgccggtgcggatcggccgcgccgcgaccgtgatggggctgaactgcggcgccgccgtggtgggcgcggacttcgacaaggtccgcagtgtcatcggcgagcggctcaaggacgccgccccggaactggaacgcatcctccgcgacctcgaagggccgttctag

SEQ ID NO: 366544 - DNA, 873 bp, Pseudomonas aeruginosa
atgacccgggccgaaagtacctcagccgagctgcagcggagccagaccctggaatttccggagcttcccgccgcccgctcgaggctggtcatgcccttgctgcgcgcgctggaggtgctgtccgccttcagcgcccacgaccaatggctgggcaacaaggacatcgccgaccggacggggcttccggcctccacggtcaaccgcttcctgcgcagcctggtcgccctgggctacgtcggctactgcaaggagcgccggcaataccgcctggccgccccggtcctttcgctgggctactccgccaccttccactccgacgtgcagcgcctggtgcgccaggacctgatccgcttcgcctgcacgcacaacgtgaccgtgctgctggccatgcgcgatcgcctggacctggtggcgctggagagctgcacgggcaccggcagcttccgccgctcgggcctgaacgtcggcacgcgcatcgccatctcgtcctcgcagatgggccacatgctcctggcctcgctgccggccctggagcgcgcctacctgctggagaacatcgccaggcgcatgcccgcgcagtgggaggggctggagccgcacctgaccgagtcgatcaaccagttccggaccatgggcttctgctattcgctgagcaagctcgaccgcgacctgggcgtggtctcggtgccgatgaacgtcgccggcaagggcctgttcgtgctggcctgcatcggctcgctggcgcacatgagcaaggcccgcgtctcgcgcgagctggggccgcagctggcggcgctggcgagccagttcaagcactcgctggacgcctccgccgccagccactacagggaggagcccgagcatggcaattga

SEQ ID NO: 366545 - DNA, 819 bp, Pseudomonas aeruginosa
atgtccgaaacagtttcctatgcagccgactaccagcgcctgaccttcgaccgtccggcgccgcgggtgctgcgcatcaccatcaaccgtcccgagcggctcaacgccctggacgccatcggccacgccgagatcgccagggtctggcgcgacgtggaggccgacgactcggtcaatgccgtgatcatccgcggcgacggcaaggcgttctccgccggcggcgacttcgaggtcgtcgagcagatgatcgacgacttcgagtaccgctgccgcatgtggaaggagtccaaggacctcgtctacaacatcatcaactgcaacaagccgatcgtctcggcgatccacggccccgccgtgggcgcgggcctggtcgccgcgctgctggccgacatctcgatcgccgccaggagcgccaagctggtggatggccacacccggctgggggtcgccgcgggcgaccacgcggccatcatctggcccctgctgtgcggcatggccaaggccaagtaccacctgctgctgtgcgaaccgctgagcggcgagcaggccgagcgcctgggcctggtgtcgctgtgcgtggaggacgacgagctgcaggacaaggccctcgacgtggccacgcgcctggccagcggcgcgcagtcggcgatccgctggacgaagtactcgctgaacaactggctgcgccaggccggccccatcttcgacgcctcgctcgccctggaaatgctgggcttcggcggcgccgaagtgaaggagggcgtggcctcccatcggcagaagcgcgcgccgaagttcccggacgatacccaggtgtag

SEQ ID NO: 366546 - DNA, 780 bp, Pseudomonas aeruginosa
atgaatctcgaactcaaaggcaagacagtgatgatcaccggggcctcgcagggcatcggtgaaggcctggcggtggcgttcgcccgcgagggcagcgacctgaagctggtcgcccgcgatgaaggccgcctggccgcgttggccggttccgtgcgggaacgcttcggcgtgaacgtcgaggtgctgccgctggacatgtcgctgcccggcgccatcgccgaggtggcgcgtttcggccaggacatcgacgtgctggtgaacaacgccggcagcatcccggcggggaacctctgggacttggacgaggaacgctggcggcagggctgggagctgaaagtgttcggctacatcaacctgacccgcctggtctacgccgcgatgcgcgagcgccgcggcggggtgatcctcaacaacatcggcagcggcggcgaaatgttcgacttcgactacatcgccggcaccaccggcaacgcggcgctgatggccttcacccgggccctgggcgggcgcagcctggacgacggaatccgcgtcgtcggggtgaacccggggccggtggacaccccgcgcatccgtcgcctgctggaagccgggacctgcgaaagcgcggacgaggcggaggccttcaagcgctacccgctcggccgccccgcgacggtggacgaagtggccgacctgttcgtcttcctcgcctcggcccgctcgtcctacaccagtggcgcggtggtgaccctcgacggcggcttggtttccaaccgctccatcagcggcggacgctga

SEQ ID NO: 366547 - DNA, 1941 bp, Pseudomonas aeruginosa
atgaaaagcaactcgctcactgaatggcaacccagcgccgatgacctcgccaccgccaatgtggtggaactcatgcgcctgctgggaacggatgactatgacgagttctacgctcgttccattcaggaccccgaccgctactggcgcatggtgatgcagtattgcggcatcgcctgggagcagccgttcgacgcctacctcgacgactcccgggggccggaattccccaactggttccccggcggccggctcaactgggtgcagagcatcctcggcaaggcggacgatgcgagcctggcggcgcaggccgcggtgatcgccgagagcgagaccggcccggcgcggcgcgccacctacgcggagctgtcggcgatggtcagggccttcgccgccgggctcgaggccagcggcctgaagcgtggcgaccgcatcggcctgctgatgtccaacggcctggaagcgaccgtttcgctgctggccatcgcctatgtcggcgcggtcgccgtgccgctgttcagcggcttcggcgtggacgccatccgctcgcggctgtccgcctgctcggccaaggcgctgatcgccagcgcgggcttccatcgccgcggcaagtgggtcgacatcctcggcctgataaagaccgcccgcgaagaacttccgagcatcgagacgctgatcgtccacacgtccgaaggggcgccggggcagggcggcgacggcctttcctgggccgcggtggcgcaggccggggtcggccgcgagcgcccggcggccagcatggcggcgaacgatccgttcatgatcgtctacacctccggcaccaccggcaagcccaagggcaccgtgcacgtgcacggcggcttcgccctgaagatcgcccacgattcggcggtgcatttcaacgtgaagccgggcgatgtgttctgctggcccgccgacatgggctggatcgccggcgccttggtcctgtgcagcgcgctgatgcgcggcgccaccctggtctgctacgacggcgcgccggacttcccggactggtcgcggatgggcgggcttatcgagcgccaccgggtgacccacttcggttcggcgccgacgctgatccgtggcctggccgcccacgaggcgctttcctgccagaccgatttctcttcgctgaagctgctgatcaccgctggcgaggggatcgacccggagcacttctgctggttccagcagcatttcggcgccggccgctgcccggtcatcaactacaccggcggcaccgaggtatccggcgcgctgctgtccagcgtgatcatccggccgatcagccccgcggggttcaacaccgcgtcccctggcgtcgcggtctgcgtggtggacaacgagggccacgacgtgaacggcgaacccggcgagctggccatccgccgtccgttcgtgggcatgacccagtccttctggcaggacgacgagcgttacctggagtcctactggcggaccatccccggcctctgggtccacggcgacctggcgctgcgcgagaacggcagctacttcatgctgggccgctcggacgacaccatcaagctggcgggcaagcgcgtggggccggcggagatcgaagaggtgctgctggaaatcccgcagatcagcgaagcggccgcggtgggcgtcaaggacccgaccaagggccagaagctggtggtgttcctggtggcccccggcgtcgaggacggcgacaccgacctgctcaagcgcatcgcggcgcacgtcgaggcgcgcatgggcaagcctttcgtgccggcccgcgcccacttcgtgacgcagctgcccaagacccgcagctccaaggtcatgcgccgggtcatccgcaacctctgcaacgacctgccgctgggcgacatgtcgtcgctggacaaccccgctgcgctggatgtgatccggcaggcgctgcagcgctga

SEQ ID NO: 366548 - DNA, 726 bp, Pseudomonas aeruginosa
atgaacggcgccgtcgagtattcgctgcaggtcgagcacctggtcgccagctacggcaaggtccccgcgctgcgcggggtgagcatgggcgtggcgcgcggccaggtggtgacgctgatcggcgccaacggcgcgggcaagtcgacgctgatgaagtgcatcagcggcctgctcaagagcgacgcgggcgaggtccggctcaatggcgaagcggtcgccaaccgccagcccgacgaattgctgcgccgcggcctgagcctggtgcccgagggccgccgcctgttcggcagcatgacggtgctggagaacctgatgctcggcgcctattgccgcaaggaccgctcgcagatcgaggcggacctggagcagtgcctggaattcattcccgacctgcgcccgcgcctgcccagccaggccggctcgctcagcggcgggcagcagcagatggtcgcggtcgcccgggcgctgatgagcaagcccaggctgctgttgctggacgagccgaccatcggtcttgcgcccgccgtcgtcgagcagatcgcccaggtgatcggccggatccgcgataccggcgtcgacgtgctgctggtcgagcagaacgcggaaaccgccctgcgcatcgccgactatgcctatgtgatggagggcggcgaaatcgtttcccaaggcgtggcggcggaactggcgcagaacgaagacgtgcaaagggcatacatgggtatgtga

SEQ ID NO: 366549 - DNA, 744 bp, Pseudomonas aeruginosa
atgatgaacgccgccacccagtccattctcgccacccgcgacatcagccgctcgttcggcggcgtcaaggccgtggccgacctcagcttcgacatccgccgcaacgaggtgctggggctcatcggccccaacggcgccggcaagagcaccaccttcaacctgatcagcggcttctacaaaccgtcgagcgggcgattggaagtggacggcaacgacgtcaccggcgtctcgcccgagtcgatcagccgcatgggcatcacccgcaccttccagcatggcagcatcctgccgagcatgagcgtgctggacaacatcctcatcggcgccatcggcgcgctgccgctggtggccagccgcgcccagcgcgcccgggcgctcgacaccgccgaaatcctcgggctgacgggttgcctggcgtccaccgccggcaccttgccgcacggcatccagcgcctggtgagcatcgccatcgccttcgccacccgcccgcggctgctgtgcctggacgaaccgctgaccggcctgaatcagacggaagtggagtccaccctcgaagtcttccggcgcatccgccgcgagttcggcagctccatcctgctggtggagcacaacatgaaggcggtgatgcagatctgcgatcgcatcgtcgtgctgcaccatggccagatgctcgccaccggcacgcccggggagatcaggcagaccccccgcgtgatctccgcctacctgggaggtgtgcaatga

SEQ ID NO: 366550 - DNA, 951 bp, Pseudomonas aeruginosa
gtggctaagcaaaaattccttgtctgctgtgttttctgtgtcgccatcgccgtggccagccatttcgccggcgacggctacagcgccaagctgatggtctggatcgccatcgccgcgctggtcgcctccagcctgcgcttcgtcatgctgatcggcgagctgaacttcgccaccgcggccttctatggcatcggcgcctataccgccggggtcatgaccaccatgctggagtggcccttcgtcgtcgccctgctggccggcggggtggtggccgcgctgatcagcctggtgttcggcttcatcaccctgcgcaccaagggcccttacttcctgctgatcggcttcgccttcgccgaagtcatgcggatcatctacaccaagtcggaatggctgggcgggaactccgggctggtcggcatcttcatgcccgagggcctggacgcctacaccacgccgttggtgatcctgctgagcgggggcctggtcgccgcgctctacctgatcgaaacctccaacgtcggcaagatcttcaccgccatcaaggacaacgaaggcgtggcccgctcggtgggcatccgcgtgcacctgagcaaggtggcctgcttcgtcatcgcctccttcgcggtgggcgtcgccggctcgctgcatgccttcaccaacaacgtgatcagccccggggacttcggcttcctgctctcgaccttcgctctggcctacctgaaggtcggcggcgagcagcacccgctcggcccgatcctcggcgcggcgctgctcatatcgctcaatgccctggcgctggacagcggcctcaacgagcacatcttctacggcgcctccatcgtcatcgcgatgctgctgctgcccaagggcgtggccggcctcgtcggccgcgcgctgtcgtgccgcccgcgggcgtcccgcgccagcgtcgtcgcccggagggcccaatga

SEQ ID NO: 366551 - DNA, 876 bp, Pseudomonas aeruginosa
atggaaactatattccagttgtttttgacgacggtgcagatcggctcggtctatgtgctgttcgccctgggcctgaccattatcttcggcgtgctgaagatcgtgaacttcgcccatggccagttcttcacgatgtccgcgctggtcgtcgcggtggtcattccctggctcaccgcccaggggctttccctgttcgccgcctacgggctgggcctgctggccggcatcgccctggccaccggcttcggcgtgctggcctaccaggtcggcttccgctggttccagcgggacctggtcggctccttcattctttcggcaggcctggtgttgctgttcgaaggggcctacctggagatcttcggcggcgccgtgcgctccgtcccgccgctggtggaaggcaccgtcagcatcctgggcgccggcatcagctcccagcgcctgctgatctgcatcatcgccgtgctgctgaccgcgggcctgacctgggcgctggcgaagacgcgcttcggcaatgccctgcgcgctgtgtccatcgaccacgaggcggccatgctgcagggcatcccctacaagtcgatcgccttcagcggcttcgtcttcgccaccctgatcggcgccgtggccggcgcgctgatcgccccggtgtcgtcggtgtcgccgaccttcggcgacagtttcctgatcaagggtttcatcgcggtggtgatcggcggcctgggcagcgtgcccggcgccatcatcggcagcctgctgatcgccgcgatagaagccttcggcggtttctacttcgacccctccagcgccagcctcgcgattttcgtcctggtgatgctgatgctgcttgttcgtccgaacggagtgctgggccgtggctaa

SEQ ID NO: 366552 - DNA, 1194 bp, Pseudomonas aeruginosa
atgtccgcaattaaacggttttatctgctgttcggtctttccttcggcgccctcgctccgctgtgtggcagtgcggcggaagtcatgaaactcggtttgtcggtgccgctgtccggtgcgggtgcgaactggggtatcggcgccaagtggctctgtgaacaggccgcgggcgacgtggcggcgcagggcggcgtcaaggttgcgggtcagacctataacttcgaatgcgtggcctacgacaataaatacaacgccgccgacggtgcgaaagttgcccagacgctgctcagcaaagacagtgtcaagttcgtcgcgggcagcctgggcaccgcgccggtgcgggcgctgcaatccctctccgaacgccgtggcgcgctgatcttcaccacggcctggggcaccagcatcaaggggcccaagttcccgctgaccttcacccagatgaatacgcccaacgagatcgtctatccgctggtcaagttcgtcaaagaacgcaacccgtcgatcaagacggtggtgctgatgaaccccaacgacgccaccggccaggaaaccgaggccatcgcgcgcaaggcctgggaagcggtcggggtgaaggtgctggccagcgactggtacgagcgcgggaccaccgagttccagccggtggcctcgaagatggcgtcgctcaagcccgacgccgtcgacctgtgctccagcacgccggccgatagcggccagctgttcaaggaactcagcggcctgggctggaacggcgtcaaggtgatcgaggtgggcaccggcgcgggcggcctgctggcgaccggcggggaggcggccagcggtacctacatgggcgccgcggtcgccctggattcgcccggtaccaccgacctgcagcgccgcctgaacgacggcgtgaaagcccagaccggcgaatcgataaacgccatccagatcggcttctacgactcggtcaaggccctggccgcggcgatggagaaagcccagagcgtcgagccgaaggccgtcgccgaggcgcttccggagatcaccttcgactccttctacggcaagtccgcgttcggcggaaaggcaacctacggcacgccccagcaaatcctggtcccggtgatcgtcacccagctgcaacaggacaagctggtcgaagtgggccgcgtgcaacccgaagagctgacccagcgcatccagtga

SEQ ID NO: 366553 - DNA, 861 bp, Pseudomonas aeruginosa
atgcccatcgatgccgagaagttgctcagttattcgatacccagcgtccgtcagtcgctgacgcgccgggaaaccgctttctacgcattgtccgtcgggctcgggcaggacccgcgggacgagcggcaactgtgctacgtggactactcccgcgatctgctggcgctgccgtcgatggcgctggtcctggcccacccgggcttctggctggccgatccgcgctcgggcgtcgaccccacccaggtggtccacggcgagcaggagctgacgctgcacgcgccgctgccggtcgagggggcgctgctcagcgaaacctcgatcgtgggcctggtcgacaagggcgagggccagggcgcgctgctgtatacccgcaagcgcctgaccgatatcggcaacggccggctggtggcttccacgctcaataccaccttcattcgcggcggtggcggattcggcggttcgagcgcgcccatcgacaccagcaggccgcgccccgaaggctcgccggactttgtcgtggacctgccgacccgcccggagcaggccctctattaccggatgaatggcgacgacaacccgttgcacgccgacccggcggtcgccgcccgggccggcttcccgggccccatcctgcatggcctatgcaccttcggcgtggtctgccatgcgttgctcaagagccttgccgactaccaggcgcagcagttgaagacgatggcgctgcgcttctccgcgccggtgtatcccggggagaccatccgctgcgaaatctggcgcgacggcagcttccaggcgcgggtcgtcgagcgcgatgtgctcgtggtcgacaatggccgggtggagttggcgggagcgtcctga

SEQ ID NO: 366554 - DNA, 1656 bp, Pseudomonas aeruginosa
gtggaacgcgaatacatggaattcgacgtcgtcatcgtcggcgccggccctgccggcctgtccgccgcgtgccgactgaaacagaaggccgccgacgcgggtcaggaaatcagcgtctgcgtggtcgagaagggttccgaagtaggcgcccacattctctctggcgccgtgttcgagccgcgtgcgctgaacgaactgttccccaactggaaggaactcgaagccccgctgaacaccccggtcaagcgtgacgacatctacgtcctgaagaacgaccaggccgccaccaaggtgccgaacttcttcgtgcccaagaccatgcacaacgagggcaactacatcatctccctgggcaacctgtgccgctggctggcccagcaggccgagggcctgggcgtcgagatctacccgggcttcgccgcccaggaagcgctgatcgaccagaacggcgtggtgcgcggcatcgtcaccggcgacctgggcgtcgaccgcgaaggcaacccgaaagagggttactacaccccgggcatggagctgcgcgccaagtacaccctgttcgccgaaggctgccgtggccacattggcaagcagctgatcaagaagtacaagctcgacagcgacgccgacgcccagcactacggcatcggcatcaaggaaatctgggacatcgacccggccaagcacgaccagggcctggtggtgcacaccgccggctggccgctgaacgacgacaacccgggcggctccttcctctatcacctggaaaacaaccaggtggtggtcggcctgatcatcgacctgtcctacaccaacccgcacctgtcgccgttcgacgaattccagcgctacaagcaccacccggtgatcaagcagtacctggaaggcggcaagcgcgtggcctacggcgcccgcgccatctgcaagggcggcctgaactcgctgccgaagatggtcttccccggcggcgcgctgatcggctgcgacctgggcaccctgaacttcgccaagatcaagggcagccacaccgcgatgaagtccggcatgctggccgccgagtcggtcgccgaagccctgttcgccggccgcgaaggcggcgacgagctgaccagctacgtcgatgccttcaagggcagctggctgtacgacgagctgttccgcagccgcaacttcggcccggcaatgcacaagttcggcgccatcggcggcggtgcgttcaacttcatcgaccagaacctcttcggcggcaagattccggtcaccctgcacgacaccaccccggactacgcgaccctgaagaaggccagcgaagcgccgaagatcgactacccgaaacccgacggcaagatcagcttcgacaagctgtcctcggtattcctctccaacaccaaccacgaggaagaccagccgatccacctcaagctcaccgacgcgggcgtgccgatcggcaagaacctgccgctctacgacgagcctgcgcagcgctactgcccggctggcgtgtacgaagtggtgagcaacgacgacggcagcaagcgcttccagatcaacgcgcagaactgcgtgcactgcaagacctgcgacatcaaggacccggcgcagaacatcacctgggtcgccccggaaggcaccggcgggccgaactaccccaacatgtaa

SEQ ID NO: 366555 - DNA, 789 bp, Pseudomonas aeruginosa
atgacctgcgaaaagcccacaggcgaaagccacccccgccgcgccggcgccaaggacgtcggcgcggtggtcaacgccatccacatcctccgccacctagccgccgccgaggcgcccgaaggcgtgaccagcatcgcccgcgccaccggcatcagccccagcacctcgttcaacatcctgcgcacgctgagccacgagcaactggtctgcttcaacggccaggacaagacctaccaactgggcctgggcctgtcggagctggccgtggggttcatcggccgcagctacgccgacctgatccagccggaactggacgggctgagccagaaccacaacatcctcatcaccctctggcaactgaccggcgatgcccacatccgcgtcatcgcccactcgatcccgcccactgcgcacatcaacgtcgccctggacgcgcgcctcccggaactggccggcgccgcggggcgctgcatcgccgccgcgcgcaacctgcccgacgccgaactgcgccgccggctgacgaaaatccgctgggaaagcccgcccggcttcgaacagttccgcgcggaagtggcgcaggctgcggaaaggggctggggcatcgaccaggaccagctctatcgcggcgtcagcaccgtctccagcgccatcgtcgaccgtgaggggcagccgcgcttcgtgatctccgccatcggcatcagcgcccagcacgagcaggatggcctcgaacgcatcggcgcgagcctgcgggataccacccgcttcatcgaacgggcgttgttcccctga

SEQ ID NO: 366556 - DNA, 156 bp, Pseudomonas aeruginosa
gtgctcagcggcttctacaacaaggaggtggcggccaagatcgacatctccgctgagacggtgaaggtccaccgccggcacgtctacgccaagctcaaggtcaagtcgcagccggaactcttcaaggtcttccagaacgcccaggccggcagctga

SEQ ID NO: 366557 - DNA, 795 bp, Pseudomonas aeruginosa
gtggaagaaaccaccactaaaaaaagctccctaattgaaaaagcactatcatcagaggctattttaattgcaatcattccatttgtaggaacatacatagcattcctgtatgaagcaggttatgcatcctactatgaaatacctatatcttttattcagatagatgcactaagcattataagctccagtactcttgtagttttatttatttatgcattctttgtattgcttgatcttgcaagaaaaattgttgaaggcagccacccagtcagaaaagcattagcactcccccttgcaatgactattgtatcagcagtttttatagtattcctagatgctccaaataaaatactattaatctcagcagtatttttatttgcaactaccattacatatttgccacccctctttagaagagacacaaaagacaactacctaaaaaggcttgaaattcaaaatgcaaacgaaaacaaaaggctgaaagaaaaaaatccagaaagtacaaggcgagatgtaattggtcccattgcttttttatttgtttttggactattaatatttaaggcaggcattatgcatgccgagggcaagacctattattatgtattaaaagattctccaagcaaggctcttgtttcaaattatggagacaatctaattttctctacttttgaccaaagaacgaaaacctttaccggagaaatcacattcgcaaaacttgatagctcgaaccccttacccctaatacatactgagacaggccccttaaaaagggtggctagagatttaaactag

SEQ ID NO: 366558 - DNA, 828 bp, Pseudomonas aeruginosa
atggctcgattcagtaaaagggaatggattctaacaatatttataatagttattttgcaatttattcttcattggctggcatttcaatacagaggaagttcgaacgcccttggttacatatcctttgccggaactgttgtctctatagtcttaggtgtagtggcgataatatattcttttgtgcaatcaatttctcacaacacctcagtggaagagatgcgggctcaagttgaaggcttaataactgccactaaagatataaacaagtcgaaagatagccttcacgaatccacaattaaaataatcagcgccgtggaatcgctaaatacaaacatagttgaaaacaatatcaatgtgaacaagttgtattcaaggtttacggaaggtagttcagactctgacgcgcaaaactcaaatcagagcaggataaaaataagtaaccatcgcgatgaggctcctccattcctacttaccagtaattttttattaaacagcatgactgctattattggtgaagcagttgcagaagggtggacctcggataagataaatagatttattcttccggccttcaataagtggcatacaattgatacggtttatttttatggcgcatatacgtctttacttatcattcttaaggctgaagggcttgtgaaaggcgggaatagtgcgtatgagcccctcaaagaaagcggaaattttttagaaaaaataaaaactatcagagagatgtttgcaaccagtcaagatgagaatatagccgagataaggctcgctattgacatgctaaaagctcaagatgctgagaaaaactctaaggtatag

SEQ ID NO: 366559 - DNA, 981 bp, Pseudomonas aeruginosa
atgaagcaaatgaccttcgccgacgccgagtacgccggcaagcgcaagcagacccgcaaagagttgttcctgatcgagatggatcaggtggtgccgtggaagggtttgattgccctgatcgagccgcactaccccaagggtgaaggtggtcgtccggcgtatcagctgatggcgatgctgcgcgtacatttgatgcagaactggttcggctacagcgatccagcgatggaggaggcgctgtacgagaccacaatcttgcgccagtttgccgggctgaacctagagcgtattcccgacgaaaccaccatcctcaatttccgtcgcctgctggagaagcacgagttggcggccgggattctggcggtgatcaatggttacctgggcgatcggggcctgtcgctgcgccagggcaccatcgtcgatgccacgctgatccatgcgccgagttcgaccaagaacaaggacggtaagcgtgacccggaaatgcaccagaccaagaagggcaatcagtattacttcggcatgaaggcccacatcggcgcggatgccgagtctggcctggtgcacagcgtggtggggacggcagccaacgttgctgacgttacccaggtcgacaaactgctgcatggaaaggaaaacatggtcggcgccgacgcgggttacaccggcgtagagaaacgcccggaacatgaaggccgggaggtgatctggcagattgcggcccgccgcagtacgtacaagaagctgagtaagcgcagtgcgctgtacaaagccaagcgcaagatcgagaaatccaaggcccaggtgcgcgccaaagtcgagcacccgttccgggtgatcaagcgccaattcggctacgtgaagacacgcttccgtggcctggcgaagaacaccgcgcagttggtgacactgttcgcgctgtcgaacctgtggatggcgcgccgacatttgctgacgaatgcaggagaggtgcgtctgtaa

SEQ ID NO: 366560 - DNA, 300 bp, Pseudomonas aeruginosa
gtgggcgagggcctgagcggcaaccatttctggatcatcgccggcaagctcggctgggtgatgggcgcggcactgctgctggcgctgccggcgatcaccgcgctgctggtggtgaacctcgccttcggcgccatgacccgcgcggcgccgcaactgaacatcttctccatcggctttccgttgaccctggtgctgggcctggtgatcctctggatcggcaccgccgacctgctcagccagtaccaggtgctggccggcgaggccctgcaattcctccgtgaactggtgcgggcgaaatag

SEQ ID NO: 366561 - DNA, 1281 bp, Pseudomonas aeruginosa
atggcactcacagcactcaatcttctctcggcgcgcaaagtggaaacggcgcagcccaggcccaaggtgtaccaactccgggacggaggcagcctctttttgcgcgttcagcccaacggctccaagctctggtggtaccgctaccggctgggcggcgctgaacaggtgtactcaatcggggtgtacccaaaggtcacgctggaggcagcccgtgcggaacgggaccgggcaaaggcgttggtcaagaagggcctcgaccccatcgtggagaaaaaggcggcgatcgccctccaggccgacacatacgaacgcacgttcgagaccgttgctcgggagtggatcgtcagcaatgctcactggagcgagtactacaccaaccaggtcaccagctaccttgagaaggatgttttcccccggattggcaagttgccgatcagcagcatcagggctccacatctgcgccccatcatcaaggatgtggcggctcgtggcgcgaagactgtggcgatcctcatccgccagtggtgtgggcaaatcttcagttatgcggctgcccaaggtctctgcgaatacgatcctgccgccttgctcaagggactggtcaagcgccctcaggtccgccacaaccctccgttgacatgggcagagatcccggactttctcaatcgtgtggacaacgaagggggttaccagacgacagtcctcgccctcaagctgatggctttgacctacgtgcgcaccgtagaactgcgcaaggcctcctgggaagagttcgacctggacaacgccatgtggtcgattccgtccgagcgcatgaagatgcgacgcccccatctggttcccctgtcacggcaggcggtggccgctcttagggaactacatgctctaactggcggcggcaaagtattgttcccgagctacagaaagccgggacaagtgatgtcggcaacgacgctcaatcaagcactcaagcgcatgggttatggcggacggttttcgtcccatggcttccgctcgaccgcaacgacgatccttggactgttgggatatccggagaagcgggtcgatcttcaactcgctcattccaaaaagagcaaggactcatcgcgcgcgccctacgatcacacgaagtttgtggagtcccgcaaggtaatcatgcaggactgggctgacatccttgactcattgcaggcagggaaacccgttgaaggggtcacgaaggcgtttggccccatgtcgaagcgtagaacggcgctgctccgtgtcatagagcgcgagtga

SEQ ID NO: 366562 - DNA, 360 bp, Pseudomonas aeruginosa
atgaacaccacgactcgcaccagcaccgcagaacgcctcggccgcgcctttggccgcggatggcgtgcctacgcgcgctgtgaacggcgggcgtcgaactggttggtttccaagggcatgccgacggctggagccaccgcgctcgtgtggatggttaagctggctgcgctcggggtgctgctgtacaccaccttctggctggccctggtgatggtgtgcgtcatggtggttgcctggatggcccgcaacaccgacttgggcgaggagttgcccgagccagagtggcgaaacggaccagcaggattcggcctatacacctacgacggtttccgcattgatcctcatgtcgaggacgactag

SEQ ID NO: 366563 - DNA, 348 bp, Pseudomonas aeruginosa
atgaacgcggcctggctgcgcccgcgctggcttttcagccggcgcgcggcaaaggcgctgctcctggcggtggtcatcatcgccgcggccgtgggcgccaatctcgtcggcatctacctcgtcggcagcgttgccggctgggagcggtggctggctgccagcgcgggctacttcctggtgtggcggctgtgcctgtacggcgcgacggtctatggctgggtctggatgcgccgccggctgctggcccgcgaggaagacgcgcaagcgcggcgacgcctggtgcgcagcgagatcgccggcgtcgtcgccatcgtggcgctggaagccagcctgctgatgcagagctga

SEQ ID NO: 366564 - DNA, 447 bp, Pseudomonas aeruginosa
atgccagcatcttcatccaggttcgcatcgggctggcgaacccttggcctggccgttgcgctgccggcttccctggccgtgttcagcccggccagcttcgccgccgatgtggtggtcatcaccgacagccgtcacccggtcaggaccatgggtggcgagcagctgatcgagctggatgaagcgccccggatcgaagcggagctttctgcggcgctgcccgccgatcccggacaggcaacagccatcgtgaagcgccggctgagccaggggggcgctgacctccagcgtcgcatcgccaccgcataccagggcgttgccgacgcatggagcctgggcatcaccaccattccggctgtcgtggtggatcagcgctacgtggtctatggcgagcctgacgtggcccgcgccatcgcgcgcatcgaacagcaccggagggccgaaccgtga

SEQ ID NO: 366565 - DNA, 726 bp, Pseudomonas aeruginosa
atgaagccgtcgatcctcctttgtgcgctcgtcctggcgtcggtgcagtgggcgacctgggcgcagcagcccgccacggcccccgcgcgcaatgcacagagccaggagcgcccgctggccgcccttgtgctggacgaccgggcagccagtgaatggggcctgcaaccgcaggaatgggctcgctaccgcgagctgatggacgggccgctgggcatccagtcgcccaacctggacccgctgtctgccctgggtatcgaggcccgcaccgatgaagaacggcgccgctacgccgagctgcaggtgcaggtggaagcgcgccgcgtcgagaagctgctcgcctaccagcgcgcctacgacgaggcctggcagcgcctgaaccccggcatgcagcgcgtgaacctgcccgacgacaagccaagcgccggcatcgcgcgtggcagcggccgcatggcggtgttcgtcaaggacggctgcacggcctgcgggcagctcgtgcagcgcctgcaatcctcgggcgcggagttcgacctgtatatggtgggcagccgccaggatgatgcccgcatccgcgactgggccaagcgcgcgcagatcgacccggcgcgcgtgcgcgccggcagcatcacgctcaaccacgacggtggccgctggctgtcgctgggcctgcccggcgatctgcccgccgccgtgcgcgaagtgaacggccaatggcagcgccagccgtag

SEQ ID NO: 366566 - DNA, 219 bp, Pseudomonas aeruginosa
atgacgtccaaggccggcgactgctgggtggtgtattcgcccaacgagtcggccatcggcgacagcgccggcttctggtccaacgagttcggctgggtcccgttcgaccaggcgacgtgcttctcggcggaagagaccgggagcttgcagcttccgatctccactggcggtgatgcgcgcttcgttccatggcaggaggcccggcggcactacggctga

SEQ ID NO: 366567 - DNA, 1215 bp, Pseudomonas aeruginosa
atggccgtggacgaccccgcaccacgcgcaccgcgccaaggccccgtcgccctcgccgatctgttcgcgggcgccctgaaggaactcgcgccccgttccagcgcacccgcgaccgcacccagcgacggcttcctcttcagcggcaaccggcacgagagcgtgcccaggcgactgttcctcgatcgtcggctgacgccgctggaacgcaatgcctggcaggtgttccggctgatgctcaaccaggacggggtgaccgcgttccccacctatgagcagctacgcccctggctggcgtcgatgccctgcgcaggatcggcttcgcatgaaaccgtggcacgggcgctgacgctgctgcgcctgacgcgctggctgagcctggtgcgccggcgacgcgaccccaagaccggccgcatcctcggcaacctctacgtgctgcatgacgagcccctgaccccgttcgaggcgatgcagttggacgccgactacctggagttggtcagccaggccctcggccactcggccaaggccgtgcaggtcgtgggcctgaacaccttgaaggagatcgcggacgacccgctgctgtccggccgcaccttgccgtcgcggctgcaggtgcttgccgagcgcctggcgcgccagggcatcggagccaccgaaagttatccacaggggggagcctcccacgattccgaagaagggcccgcgagccttcttcggaatggcgaacgcccctcttcggattccgaagcagggccgaaacccgcgtcagacgcctctcttcggaatccgaagcaggaccgtacagtacgtagtagtcgtattgatgaagtacgtactaccgcgcgtgagcgtgagcaggcgcgcgcgatgcagggcattcgcctgcccgagcgcttcctcgatttgaaagaagagcagcaggccggcgccatggtggccttgcagcaggtcgatgcctcgctgcgacaagccgtgctggacgaatgggcggagcgctgtcgtggcagcgccatccgcaacccggccggctacctgttcggcatcatccagcgggccatccgtggcgagttcaatgcgtgggccaagcaggctgggtcggcaccgccaccagccgccacgcgagatgcgccacctgagcccccacgcaacgtggttccgcccgaggtggccaagcagcacatcgaccggctacgcgagcttctgcgcaagagttga

SEQ ID NO: 366568 - DNA, 1647 bp, Pseudomonas aeruginosa
atggctgagatgacctcccaggacatggccggcaagctgcttgccgccgggttcgagcgcagcggtccatcggccacggccttgagcgatccgatcgccgacacgccgatggtcgtgacgctggaccagttgcgcccttacgaccacgacccgcgcaagaagcgcaatcccgcctacgaggagatcaaggcatccattcgcgaacggggcctggatgcggcgccggccatcacccgccgaccaggcgaagatcactacatcatccgcaacggcggcaacacgcgcctggcgatcctgcgtgaactctggtcggaaacgcgggacgagcgcttcttccgcatatcgtgcctgtttcggccctggcccgcgcggggcgaaatcgtcgcgttgaccggccaccttgcggagaacgagttgcgcggcggcctcacgttcatcgaacgcgccttgggcgtcgagaaagctcgcgagttctatgaagcggaaagcggcgccacgctaagccagtccgaactggcccgccgtctgggcgccgatggctaccccgtgcagcagtcacacatcagccgcatggccgatgcggtgcgctacctgctgcccgcgatcccgaccgtgctctatggagggctcggccgccaccaggtcgagcggctgtcggtcatgcgcaaggcctgcgagcgcacctgggagcagtacgccaaagccaagtcgcttcctttggacttcgaggggttctttcaggaagtgctgtcgcagttcgacacgcaggccgacgagttctcgccgcagcgcgtgcaggacgagctgatcggccagatgtccgagttgctgggcatcgactacgacgtgctggcgctggacctgaccgaatcggaaagccgtcaccgtgcattggtcagcgacccgacgccgtccccggcacaaccgaccttgcccgatcccgtgcccctggcgcggccgccacgtgatgcgtcaacgcccgcgccgaccgtggcatcccctgtgggacggccaggcgccgtgcccccacgccaggacaacgcggctggcgaggcgtcttcgggcaacccagtggcagcgtcgggcgatctgctgcaggggcacatcgtctcgccggcaccgacgacggagcgactccaatccatccagcgcatggtcgccgaccagttgggggatgcgctcccgcccgatttctcggccaacgtgctgcagtccatcccggtgcaggccggtggcctctatcccatctcggacgtctggtacatcgatcccggcttggacacaccggaccggctgcgcattcacattgctcagttcgcgcgcgagatcgcggccgaagcggacctggacgggtgcatcgatgaccgtcccgatggcatcggcttcgcatgccgtggccaggccccatcaccggcgggccgcgccgtgctggcgctgctggcgtgccttgcgggccagagcctcgccgagcttggcctggacaacgggcaactcgcccttgatctgccggcactgctgcacggccagggtcaaagccacgacgccacgtgcttgagcgacaccgcagtggtcaagctctttcggctgctgcgtctggctcggcgcctgctggatttggaagccagcaccacggcttccgggacctga

SEQ ID NO: 366569 - DNA, 432 bp, Pseudomonas aeruginosa
atggtcctacacgcacacaccaccaaggcggcgctgctggtcgcgttgacgcttgcgctggctgcctgcggcaagcaggacgcgcagcccgaggcatcgacgccggccgctgcatcggcgcccgcgtttcccacgggaaacggcgacaaggcgatgacgctggccgactgcgacaagctgcctgacccgaagcctgccgacgacagcgcagcgggtcgcgcagcggccgttgggcagggccaggccgcacgcgctgcctgcaagaaggaagtcactgcgcagcaggacaagcccaacgccgacttggctcgcatccgcgagatcaaagagaaggagcaggcggaccaggcaaatcgcaagatttccgagcaagagtggggtaagcgtctaaatgaaggcgcgaacaagcccatcaaggaatacaagtactga

SEQ ID NO: 366570 - DNA, 2511 bp, Pseudomonas aeruginosa
atgtttttcaagaaatcaggcgatctcgaagagtccaagactctcggcaagggcgaggttcacgtcgcgcactacatcccgcaaggcgttcacctcacccccaacgtcatcaagctgcgcgagaacggggatctgtgtgccacctggcgcctgcatggcatcccgttcgagacagcatcacccgagcagatctcgagtgcgaagcgcgaactggtgaacttcctgcatggcgtgcgcggctcggagatctccgagccgtgctcgctttgggttcatcgtgtccggcgtcgcttcgctgatcggctcaagggtcgcttcccgagcagcttcggccagcagctcaacgacaagtattacgacaagctcgctgagcagtcgatgctcaagaacgagctgtatttcaccctgctgctgcggccgacggtcacggccagcggtgcgctcaagaagatgcgcacgcgcaacgccgacagcctcaacgagttcgacgcggaagtccttgagcgcttcagctcactgacacagcaagtcgaggccagcatgcgcaagtacggtggcgagcgcttgggctgccgcgatcgcaagctggccagcggcgagacgcgcaccagctccgacatgctgggcttctatcgcttcttgctgaccggcatgtacgagccggtcgatctggaaccgtccccggtctacaactacctttgcgatgcacggctgtttgctggcgatgccaacggcgtcgttcagacccagcatctgcagcgccgcggcttcgtcggctacctggacttcctggactacccggaagtctcggagccgggcatgaacaactgcctcttctacggcaactacgagttcatcgagacgcagagcttcagcttcatgagcaagcgcgatggcctgaaggcggtcgagctgcagcgcaatcggctggtcagcggcggcgagggctcgccccagcagatccaggacatggagaacgctctcgaagacgtgcgcaatggccgcgtctacatgggcgagtaccactacagcctgggcatcatgggcagctcggtcgatcaggttcgcaaggacatggcgaacgcgcgcacggccctgcaggaggacgtgggctacaaggtggccacgatcgacgtgatccccgagtgcgcccacttcgcgcagcttccgggcaactggaagtggcgtccgcgtgtggccacgatcacttcgcgcaacttcgcgtgcatgtcgcccatgcacaacttcgacctcggcaagcgcgacggcaacccgtggggcgaggccatcgccatcctgcagacgccggccaagcagccgtactacctgaacctgcaccagatggtgctgggtcgcaaccgcctcggcgagaaagaccccggcaacacgttcatctgcggcatgacgggcaccggcaagtcggtgctcttgggctttctgctgacgttgctgaccaaggtgctcgggctgcgcatcctgttcttcgacaaggaccgtggcgccgagatcctgatccgcgcgcttggcggtcgttaccgccagctccagcgcggccagccgaccggcttcaacccgttccagtgggagccgaccgaaagcacggtgaagttcgtcgagcagctcgtgatgcagtgcgctcgtcgcagccctgatgagtcactgcccatcgagatcgagaacgagatcatcaaggcggtgcgccgcgtcttcgcgcagccggagaagtcgtcacggcgcatcagcgccatcctgcagcacgtcggcgagaacagcgccgtaggcgagcgcctggcgaagtggtgccgcaccgccactcgcaagggctcgaactcctgggtgctggacaacgcgcaggacacgacggacttctcgggtcactcgatcttcgccttcgactacaccgagttcctcgaagacgaggaagtcggcccgatcatcctgtcgtacatccttgaagcggccgacacgctcatcgacggcaagcccttcgtgtacgtcatggaagagttcgccaagatggtggcggccaagagtcagacgctggtcgagttcgcgcgcgacaagcagaccaccatccgcaagctcaatggcgccggtgtgttcgttacgcagagcccgagccaggtcaaccagtaccccatcggttccacgctgcgcgagcagtgcgtgacgcagatcttcctgcccaacccgggcgcggactacgccgactacgtggaaggcttcaagctcaccgaagccgagttcgacacgatcaagaacctggcgcccgacagccggtgcttcctggtcaagcagggcgagcgcagcacggtctgcacgctcaatctctacggcttcgccgatgagctggagatcctcaccggcacgcctgaaagcgtcgagctgtgcgatcaggtccgcaaggagcttcgcactgacgatcccgacgtgtggattccggtgttcctggagcgcctcaaggtgcagaagcacgtttccaaacaggcgcttcaacgcgccatggcatag

SEQ ID NO: 366571 - DNA, 324 bp, Pseudomonas aeruginosa
atgcaggacgatttctacgacccgatctacaagggctgcacggcaccaagcacgatcttgggcgtgccgctcattccgttcatcttgggcgcgctggcgatcggccagctcacggtgctcagcttctatttcatccggctgagcgtggccctggtcttcgtgatcatcggcgtgttcctctacacatgggcacgcaaggtgggagcgaatgatgagcatcgcctcctgcagtacctgatgaaagcgcgcatgcgtggccgccagtcggccacgcgcaagttctggggagcggtgagcttctcgcctttgccaccgcgaaagtga

SEQ ID NO: 366572 - DNA, 378 bp, Pseudomonas aeruginosa
atgtacgcaaacaacacggcaggcatcgcggttcagcgcgagagcaatgcagctcagtggggcaaggccctgctgtggtctttcttcctggtcgccatcgtcatgttcttgctgcccggcctggcgcacgccaccggcacgggcacgggcacaggtacgggcggcgccggtgcggcacagacccgcatcaacgcggtggccaccggctggcagaacatcgtgcaaggcgtgggcgtggcggttctcgtcatcgcctggtcctacatcggctaccagatcgcgttcgccggcaagaccatgaaggacatgttcccgacgatggtcggcacgtccatcgctggcctggccccggtgctcgtcggctggctgttcagctaa

SEQ ID NO: 366573 - DNA, 432 bp, Pseudomonas aeruginosa
atgttcgctccctcgcaacacgaagtgcggcgcttcttctgcgcaacgcacgccaagcagcgcagcggcctgccgctgaccccgctggaaacgatggcggcggactggattgccctgcacccggaatatcacgccgatctggccgatgccgatgccgccgtggccgccagctacaccgtcgaggacggacgcagcaaccccttcctgcatctgtccatgcatctgtcgatcagcgagcagctcagcatcgaccagccaccggggatcaagcaggcctttgagttgctggccgcgcgcctgaactcgggccatgcggcacagcacgagctcatggaatgcctgggcgagatgatctgggcatcgcagcgcagcggcctgccaccggatggcgcggcctacctcgactgcgttcggcgacgcgcgacgcgctga

SEQ ID NO: 366574 - DNA, 1581 bp, Pseudomonas aeruginosa
atgttccggtcgtggaaggcttggacggccgccgtactgtgtgcggtggctgccgccgcggcgcccgctgccaccttgcgttgggccagccatggcgatgtgctgacgctcgacccgcactcacagaacgaactgctcaccaacgcgatcaacgggcaggtctacgagacgctggtccatcgcggcaagcagctcgaactggtgccggtgctggcgaccgaatggcggcaaacggccccgacgcagtggcgcctgaacctgcgtccgaacgttcgcttccatgacggcagccccttcacggccgccgatgtggtgttctcggtgcggcgcgcacgcgaagccacgtccgacatccgcgtctatgcccatgcgctcggcgagcccaaggcgctggatgccctgaccgtgcagttcgatctcacccaggtgaacccggtcttcctgcagcacctgaccacagtgcagatcatgagccgcacgtggtgcgagcggcatggcgccacgcgggcgctcgatttcaagaacaaggaagagggctacaccgcgcgtcatgccaacggcaccggcccgttcaagctggtctcgcggcagccggacgtgcgcaccgagttcgagcggaacatgaactggtgggggcgcttagagggcaacctgcagcgggtggtctacaccccgatcgccagcgccgcgacgcgttcagccgcgctgatctccggcgagatcgacttcctgctcgacccggcgccgcaggacgtgccacgccttcgccgcacgcccggcgtgcaggtgatcgatgggccggagaaccgcgtgctgctgatcggcatggaccagtcccgcgagcgcctgctgtacggcaaggcgccgggcgaccgcaaccccttcaaggaccgtcgtgtgcgccaggcgctctaccaggcgatcgacatcgagaccttgaagagtcgcctgatgcgcggtcaggcgttgccgaccggtggcattacgccttcgccggcgggcgcctacggcgatgccgagctggagcggcgcctgccctacgacctgcccgccgcacgccggctgatggaagaagccggttacccgcaggggttcgaggtcacgctcgactgccccaacaaccgctacatcaacgacgagtcgatctgcctcgcgctggcttccatgtgggcgcagatcaaggtccgggtcaaggtcaacgccatgccgcggagcacctacttccccaagctgcagcgcttcgacacgtcgatgtacctgctcggctggggcggggcgatcacggatgccgaaaccacgctgacgccggtgctgcgcagccgcggcgagggcggggtgggcagttggaacttcggcggggtccacaacgcgaagttcgacgaacttgccgccgcttcgagccgcgaggccgacccggcgaagcgggaggcactgatccgcgccgcgctgaaggaacacaacgcgcagatccaccacctgccgctgcaccgccaggtgatcccgtgggcagcgcgtgcgaacgtctccgtggtgcaccgggccgacaactggctcgagtggcaatgggtgacggtgcgctga

SEQ ID NO: 366575 - DNA, 222 bp, Pseudomonas aeruginosa
gtgttctgggaaaccatcagcgccgcgcgtgacctgggccgcctgcaggaggtggcctcggtgttcatgcgctacggcttcggcgacctggtgcggcgcgtggggctttccggcgcgctcgagcgggccgggcggctggtgcgctccgaacacgaaccccccgagcagtggcgcttccaggatctggacgccctgtgggccgaggaggcggtgtctgcctga

SEQ ID NO: 366576 - DNA, 369 bp, Pseudomonas aeruginosa
atgatcggctacgtcaccctcggcaccaacgacatggcgcgtgcctgcgccttctacgacgccctgctgggcgagctgggcgccaggcgcatcatggagggcgatcgcttcgtcgcctggggcaccggcatgcagtcgccgagcgtcggcgtgatcaggcccttcgacggccaggccgcgacgccgggcaacggcacgatggtcgcgctggcggtgcgcacgccggcccaggtcgatgcgctgcatgcccgggcgctcgcgctcggcggccgcgacgagggtgcgccgggcgagcgtttcaagggcttctacgccgcttatttccgcgaccccgacggcaacaagctcaatttcttctgcatggggtaa

SEQ ID NO: 366577 - DNA, 369 bp, Pseudomonas aeruginosa
gtgagcgccccgatcgtgatcggccgcgaccacctcgattccggctcggtcgccagccccaaccgcgaaacggaagccatgctcgacggttccgacgccgtctccgactggccgctgctcaacgccatgctcaacgtcgccggcggcgccacctgggtgtcgctgcaccacggcggcggcgtcggcatgggctacagccagcacagcggcgtggtgatcgtggccgacggcaccgacgccgccgccgcgcgcctggcccgcgtgctctggaacgaccccggcaccggcgtgatgcgccacgccgacgccggctacgacatcgccaaggcctgcgcccgcgagcaggggctgcagctgcccatgctctga

SEQ ID NO: 366578 - DNA, 1104 bp, Pseudomonas aeruginosa
gtgctcaatgcgatcaacgacaccagcaacatcatcggtcagaaggtgaacgacccggcggccatggtgctggctgtcgggcgggcgcagtccgtggcgcagcagaacgcggcctggctgaacgccggcaaggtcgccgagcaggcgctgccggtgttccgcaacgtgatcgaggccatcacctacgcgctgttccccctcctcgtcctgctgatgctgctgaccagcgggcgcgagaccatgctggccttcaagggctacgccgcggtgctgatctggatccagctttggccaccgctgtacgccgtgctcaactacatggcatccatctatgccgcctacgacctcgcggcagcagccgaccttggcagcggcgccaaggctctgtcgctgcagacggcatcgacgatctactcccgggcgatctccggcgaggccgttgtcggctacctcgccatcagcatcccgttcatcgcctgggccgcgctcaagcggatggagacctttggcaccgcgctggtgggcggtctctcaggcctgcagtcgatggtggccggcgccacggcaggtgccgccgcgggcaatctgagcatgggcaatgtctcgatggaccagatccggctcgcgccgaacaggacgtccgcattcatgagcaactggcagaacgacatcagcggcaacaccttctcgtcgaacatgctgaccggccggaccgccgtgagcctgctgcgcaaccagggctacgcgtcccgggtcgtatcgatgcgcgtgagcgagcaggacgtccaggacgccagccgccaggtcgacgcagcccgaagcgaagccgttgccgccagcaccgaacgttcggcggtgctgtcagaggcattcaccaagggcttggcaaagctgaagtcatcgcgaagcagcacggggtcgacatccagcagcttcgagcagttggggcaaaccatcgatcggctggatcagatctcccgaagcgtttccgagtccactgggttgacacagtctcaggttgctcgcattgcgcttggcgttacaggtcacgctggattcaatgctcggttcgttggcgcccaactgaacggagcggcgaagtga

SEQ ID NO: 366579 - DNA, 705 bp, Pseudomonas aeruginosa
atgaaccttcgcaagtttttctcaggcgctgccatcagcgtttcgatgctgttcgcagcaatgccggcacgcgccggcattccggttctcgatgccgccaatctggccaacagcatccagcaggtcctggcctggtcgcagcaggcacaggacatgatcaaccagatcaaccagttgcagcagcagtttcagcagttgcagaccatgaccaccaagctggacggcattcgcaacctgggctcaatcctcaacgatccggccatccgcgcggccctgccgccggaaatgcgcgacgcgacgcagcttctgctcaacccgtctgcgctggccaccagccaggccaatctgaaccagatcctgagttcgtttggcgtcaacacgacggccaatccgaacgcggggcaggcagcagccgacactatcggccgcatgcagcagatccttgcatcgactcagacacggaacacgcaactggcgcagctcgctagccgcgttgacacgacggctgatgccaaggactcgctcgacatgatgaaccgcaacgtgctcgaagcggccagcatcaacaaccagatgacgcagaccatggctgcgctggaagccgcccgccaggccgccgagctgaagaagctggcggacaaccagaggtatttcaacaacctcaacagcgccgccggtcagcctctgcggacctactcctactga

SEQ ID NO: 366580 - DNA, 687 bp, Pseudomonas aeruginosa
atgagtatcttcaataaaggcgccaattgggaggcgacgcgcgtctccgacttggagaagagccgcaagctggcgtggatgttcgccgggctgatgggcttctgcctcgtggttgctgtgatcgctttggccatgctgacaccgctgcgccgtaccgtgccgtacgtcgtgaagcaggatgctcagacggggaacctcgaagtcttgcaggcctttgacaatcgcgtcatcggcaaccaggagctgttgaacaagtattgggcgcgcaggtatgttgtctcgcgcgagcaatacaactggtggctggtgggcgccgactacgacaccgtggcggcactcaccgaccccggcatcttcgcggagtacggcaaccaattcctgggcgacaagggccttgacaaagtgttcggtgacttcaccgagcgtcgcatcaaggtcttgtcgatcgcaccttcgccgaccaacgcgcagcagatggtcgttcgcttcgagcgcaccacggtatcgaaaggcgccgtggttgaagcgccgactgtcttcgtcgtgaacatgacgttccgctacaacccgaacacctacgcctcggaagcggagttgatccgcaatccgatgggcttccaggtcttctcctatcggcgtgatgtggaagtgcctggcactggcgtgtccggcgccgcagggggttga

SEQ ID NO: 366581 - DNA, 954 bp, Pseudomonas aeruginosa
atgaatctgtttttcaagccgcttgcggccggcgtcatgctggccgcgttcagcctggtccacggcgcaggcgtgccagaagccagcccgaacgacccacgcatccgcgtgatcccctacaaggccaacgacgtgacggtgatccgcgttcagcgcggcacggtcacgcggatcatgctagagcgcgacgagaagatcgagatcccggtggtcggcctcagcagcgactgcaagagcgagatcgacgagtggtgcatcagcgccatcgtgggttcaaaccaaatcttcgtgcgtccgcgtgacaacgccagccgcaacaacatggagttgcacaccaacaagcgcgactactcgttcgcgttccaggtggtggacgagagcaaggtttcccgtgggaaacgcgcggatgccgaagtggcgtttttccgcgtggtgttcgactacccgaggcccaagccgctgaccgagaacatgtcgggcgctgagcgggctgcagccgttgatgcgcttcttcagcgcgtggacatgtcggccgctcgccccattccgcagcaggtcgatcccgactacggcatgacgcccgttcagcgactgaaggccgagggcatccagattcgcaacaccaactacagcaagcaggtgctggagcgtggtgaggatgcagaaccgacgatggtgttcgacgatggccggttcacctacttcgagttccctggagcccgagaaatcccggccgtctttgcccatggcagcgacggcgagccgacgcgggtgaattggcacatgaacgggaacttcgtggtggtgcagcgcaccgcccgcaagttcaccttgcgcctgggcgatgccgtggtcggcatcttcaatgaagcattcgatcgcacaggcatcgaaacacccacgtccacggtatcccctgcggtcgtgcgagaaatcaaaggagcggcgcaatga

SEQ ID NO: 366582 - DNA, 1539 bp, Pseudomonas aeruginosa
atgacgacggacgccaacaacatcgagccgggtgatccgtccaacctcaatgccgcgcctgcggcgcccgaggttattgaggacattgtttcggtcaacaagaagggcagcaacgacaacaagttggccaaggcggtatttctgctcctggtgggggcgatgatggtcggcgtcatggcctggttcagccaggactggctgaacaaccgcaaggcgcagatgaaggccaacagcggcccgaaggcagccgaggacaccacgcaggttttcaacccggagaagacaggcgccgcagcccccaagccgaagctcggagcggaaagcggccagcccgccccgtcacaggtggccgcaacgcaaaccgtgcagcccggtgcagctcaggatgattgccgggctcttcgcggtgcggacggcaaggtgatggtcaacgcgcaggggcgcgcaatgtgcgttgacaaagacggcaacgtcgtcgaggtgcccgccatcacggccctgaccggcgaccagcccggacgcaagccgttgcctggtgaagctgcaggaggtcaagcacaaggccagcaggggcagggcggccagcagcaagcgaagccaccgagccgctacgccggttcgttgttcgttggcgagccagccaagccgtcgaacgtttccgccggtgtggacgggactgcgaatcagcccacggcgaacaccatcgctcagacgcaagcgcagcagatcgcggacattctgcgcaacgccggccttggcggcgggacgcaggcgccgagggccgcgacggcttcgccgatgccatttggtcccggcacccaaggaacgccgcctgagcaagcacgcccagggacggttggcagctcgctctacagcagcgcgacgcctgtggcgctggccaagaggatgacggatcagaacctcatcctgcccaagggccgtcaggcggactgcgtgttgaccggccggatcatcgacgaggttcctggcttcacgtcctgtgtcttggcgcagaacctctactctgacaacggccgagtgcttctccttgagcgcggcagcgagctgacgggtgagtacggcaccaccaaccagctcgggcttgaacggctgttcgtgacttggacgcggctcaagacaccggaaggcatcgagatcgacctgtcttcccccggttccgaccgtcttggtacttccggcctccccggccacctcgacaaccgttggggcgcccgcatcggcgcggccttcctgctgtcgttcgtgaaggacattaccgtcgccatcatcaacaagcagactgcatcgcaatctaatgccacggtgagcgtgcagtcggcgccgggtcaaaacacgctgaatgcgtcgtcggccctggccgaggaagtcattaagcagacgatcaaggtacggccgcgcctgaccatcaacgagggcgacaggatctcgatctacgttgcccgcgatctggatttctcgccggtgtacgccttgaagactgctggcgtggccggcgcaaccaggttgcttgccaaatga

SEQ ID NO: 366583 - DNA, 813 bp, Pseudomonas aeruginosa
atggcgcggaatgtgttgacacatcgacttcatgagcgtcgtcttgccggagccggtgtcgccgatcacgccggtgttcttcttggccaagatcgacgcgatcaagaagtcatacaggttgccagcggccagcagctcggcgaggtggcgatcttctggcgagagctttctcaccgccgcctcgaagttgtccggccgaggccagatgaacttcgagaacgcgccgctgtcgcggtagcgtttcagcgggatcacgtccgacttggggatgcggatggacatgctcaccatgccaggctcgaccgccggcggcagcacgatctggatacgctcaccatcgggcatcgtcgccgacagcagcggggtcttggcacccacggtctgctgctgaggcgagtacacagcgatggcttgcgcaaacgcttccagcgccgcgaaatccagcgcgggttcttcgatggtcaggttgcccgtttcaagctggatcaccagctcgcccggcttgttaatccagatctcggtggcttggtgagccagcatgtgcttcttgatcggccgcaagtagctccgcaccaccgtgtcgctggccagcacatcaccgaacacagcgtcgtcgccgaagccgtgatagtcggtgtcgaaccggctgtcgaagttcgtatcaacgaacccggtgtccgacgctgccgcaggcttgcggctcgtgaggaagtcgagtgcgccggtcatttggcaagcaacctggttgcgccggccacgccagcagtcttcaaggcgtacaccggcgagaaatccagatcgcgggcaacgtag

SEQ ID NO: 366584 - DNA, 1134 bp, Pseudomonas aeruginosa; identical to SEQ ID NO: 328658

SEQ ID NO: 366585 - DNA, 855 bp, Pseudomonas aeruginosa
ttgcacgcgctgctgcagaccgtcatcgcccggctgatgaagatgctcacgcgccggggcgtgctggtcgaagacatgggccagacctacctggccgagccggatgccgacggcgaggaggcgcgcacgctgcggccgctgcaggccgcggccatcacctaccgaatcgccttcgggccgcgcgccgggcagaaggtgctgaccctgagaggcgcgatgccgcgcgaggactcggcccgccagccgctgtgcgccgacatcgacggattcagcctgcacgccgcggtgcgggtcgaagcccatgaccgcaagcggctggagcagctgtgccgctacatcacccggccggcgctttccgacgaacgggtgcaggtcaatgccgccgggcaggtcgagctgaagctgaagacaccgtggcgcgacggcacgacgcatctggtcttgagcccgctggagttcatgcagcggcttgcggcgctggttccccggccgcgtctgcatctcatcaggttccacggcgtgctggcgcccaacgccaagctgcggtccctggtggtgccgcaagggcccgaggtggaggaacgggccaccgcagccgttgccgccagcgaatgcgtggtccagaccgagactaacccggaccggccggaccgaccgcaccgaattgcttgggcgcggctactcaagcgcgtgttcgacatcgacatgcagcactgccccaactgcggcgccggggagctcaagatcatcgcggccatcctggagcgaccggtgatcgagaagatcctgacccacctgggactggatccgcagccgccgcccagaggccgagcgcgcgaggcgcggcaagactga

SEQ ID NO: 366586 - DNA, 792 bp, Pseudomonas aeruginosa
gtgatcgtcgaacagatctggaccgcgaacgcgtatcgcaacttcaactacctcatcgtctgcggcgagaccggcgaggcgctggccatcgatccgctcgatcacgagcgctgcctggcggcggccaaggcgcgcggctggcgcatcacgcaggtgctgaacacccacgagcatttcgatcacaccggtggcaacgccgcggtggtcgcggcgaccggcgccaaggtgctggcgcacgccaacgcgcgcgacagcatcgccgggctcgaccgcggcctggtcgcgggcgacgtgatcaaggtcggccgcacggtcgaactcgaagcgctggacacgcccggccacaccatggcgcacgtctgcctgctgtcccacaccgacacgccggcgctgttctgcggcgacacgctgttcaatgccggcgccggcaactgccaccacggcggacacccggagcagctctacgacaccttcgtgcgccagctcgcgaacctgcccgagaacacgctcgtctacccgggccacgactacatcggcaacaacctcggcttcacgctcgcccgagagccggacaacgcgcgcgcgaagtcattgctggacgaagtgaaggaccaggacccgaacgcgccgctggtctcgacgctggccttggagaaggagatcaacaccttcttccgcctgcgcagtccgtcggtcatcgccgcgctgcgcgaggcctttccgaacctgccggacaatcccgatccgaagaccgtgttcctgaagctgcgcgaactgcgcaacagctggtga

SEQ ID NO: 366587 - DNA, 330 bp, Pseudomonas aeruginosa; identical to SEQ ID NO: 320342

SEQ ID NO: 366588 - DNA, 867 bp, Pseudomonas aeruginosa
atggacatcctccagagttcctccgccgcgcccctcgcgccgcgggaagcggccaacgcccccgcgcagcaggctggcggcagcttccagggcgagcgcgtccactacgtttccgtttcgcagtcgctggccgatgccgcggaagagctgaccttcgccttttccgagcgcgccgagaaatccctggccaagcgccgcctgagcgacgcccatgcgcgcctgagcgaagtccaggccatgctgcaggagtactggaagcgcattccggacctggaaagccagcagaagctcgaggcgctgatcgcccacctgggcagcggtcaactgagcagcctggcgcagctcagcgcttacctggagggcttctccagcgagatcagccagcgcttcctggcgctgtcgcgggcgcgcgacgtcctggccgggcggccggaggcgcgggcgatgctggcgctggtcgaccaggcgttgctgcggatggccgacgagcagggcctggagatcgaactcggcctgcgcatcgagccgctggccgccgaggcttccgccgccggtgtcggcgatatccaggcgctgcgcgatacctaccgtgacgcagtactcgactaccgaggcctgtcggcggcctggcaggacatccaggcgcgcttcgccgcgacgccgctggagcgggtcgtggccttcctgcagaaagccctgagcgccgacctggacagtcagtcgagccggctcgatcccgtgaagctggagcgggtcatgagcgacatgcacaagctgcgcgtgctcggcggcctggcggagcaggtgggggcgctctggcaggtgctggtgacgggggagcggggccatggcatacgggccttctga

SEQ ID NO: 366589 - DNA, 669 bp, Pseudomonas aeruginosa
atgtcttatcgcttcttggggcctctcatgcacgacgccaccagcccacgcccacagctcaggctcgccatagcgcctggtgtggcctcttcgtacctagctgcattgcttgccctgcagcgcgcggaggagcccgaagtttctatggaatttaatgaggttacggcgagcgatctcattacgggcctctacaaacggcgcttcgacgtcggcctttctctgaagcaggtgagcgattcttcgctgaagagtctttctatttggttcgaggcgacagctcttgccacgccgctgcgatacccactgctccggcagcagtcaatcagaatagacgaacttaaggagcactccgtgtttcgatggaaggccgaatattctccttcgctggaccagtacctgtcctccatgtcatcaacggaaaggccgaatgtccagcatgtcagttcttttgagatgttattgctctgggtcgcagctggatatggcgtagggatttcctcgcgatcacgcatcgaaaccgctagccagtgcggaatctgcacgcgcccaatagccgatggcccctacgaggtcattacgcacctgcagcgactctcgggacagacgaatcttgtagctgatcgatttgagcttagagccttgcgagttgccgaggcgcgtaaagcatga

SEQ ID NO: 366590 - DNA, 861 bp, Pseudomonas aeruginosa
atgcgccggcttgaaggccacgtaaccggccgtggtttcgcacagccagggcgtcaggttgcgaggacgcttttcggtgaaggccgcgggcgtgaacagggcgacattgcagccgcgctccgggcaacgcgccgaacggtattcgaatgcctgcaccccggcgctgcgcatggcacttcccagttcctggggagcgcggtagtcggcgatgtcggtcagcgcagcctcgtgatcggagaaaggcggcgcctgcagacggattccccgctccaccttccagcccgcctcgaacgaagcgtgctcggacagaatcctcccgctcggtggcggtaccgccatgccactccacaggacgcaacggtaatacgcgctttcggccatggccgtttccagcttcaacgcggcgtagaacaggcttggctcgtggcgacggccaaaccgcgacccccagcgcaagggcggataacggaacggggtcttcaacaggtaatgcaatggctcggcatccgccggcaccggcggcttgctcgactcgagcagttcctcgagcaacgcctgttcttccagggtgtcgaccaattgcagggtcgccacctgctcctggctctccaccaaccgcaccaggcgcccctggagcggtcggatatgccgctcacccttgcactgtcgccagatctcgctcaccttccgcccctcgcttcctgtggtgtcggatgccagcgtagcggcaccgcagtctccattcagccaggcttgtcgcctctggctgccagccttttccgtgacaggcgtaggcccccgtacaggcgcgccgggtatcagaccttgccgcggatcgcatcgaggtattccagcacatga

SEQ ID NO: 366591 - DNA, 1224 bp, Pseudomonas aeruginosa
atggacctatctacgcaaggacggctcgccgctcagcgtgacgctttcggttaccgtcctgcgcgacgaggctggggcgatcaacggctacctgggcatcgccgtcgatgtcaccgaatggcgcaacgccgagcgcgagatggccgcggcgcgcgaccagttgcaaatggccgccgacgtggcgcgcctgggcatctggcgctggaacctggccgacgacagcctgcagtggaacgagcgcatgtgcgagctgtatggccagccgctggcgttgcgcgacggcggcctggtctacgagcattggcgcagccgcctgcatccggaagacctcgagcgcaccgaggccagcctgcgcgcggcggtggaggggcgcggcaactacgatgtgatcttccgcgtggtgctgcccgacggcggcatccgcttcatccaggccggcgcgcaggtcgagcgcgacgccgacggcaatccgctgcaggtcaccgggatcaatatcgatatcaccagcgaccagcaactgcaggcgcgcctgcgcgaggccaaggagcaggcggacgccgccagcgcggcgaagtcgtcgttcctggcgaacatgagccacgagatccgcacgccgatgaatgccgtgctgggcatgctgcaactggcccggcagaccgatctcaacgaacgccagcgcgactacctggacaaggccagctcggcggcaacctcgttgctcggcctgctcaacgacatcctcgactactcgaagatcgaggccggcaaactggtcctggaaatgctccccttcgagctggagccgctgatgcaggacctggccgtggtgctctccggcaaccagggcgacaaggacgtcgaggtgatcttcgacatcgatcccgagctgcccagcgcggtggtcggcgaccgcctgcgcctgcagcagatcctcatcaacctggccggcaacgcactgaagttcaccgcccgcgggcacgtcctggtgagcttgcggcgtctggcgcacgacgcccacctggtgcgcctgcgggtgctggtggcggacaccggcatcggcatcagcgcggaacagcagcagcgcatcttcgaaggtttcacccaggccgaggcgtccacctcgcgacgcttcggcggcaccggcctcggcctgttcatctgcaaacgcctggtcgacctgatgggcggcgagttgcgggtcgagagcgcgccgggcagcggtag

SEQ ID NO: 366592 - DNA, 1758 bp, Pseudomonas aeruginosa
atgcgcatcacgaaactcgaaatcaccaacttccaagggctgcgtcatgcggcccttgatgtttctgcgccggtgctcctggtggccggccacaacggcgccggcaagagttcgctgatcgacgccatcagccacgccttcaccggcaagcccggccgcgttgcacagaagcagcatatcggccaactgatcaccgagggcgcaaagaagggcgaggcccgcgtcgagtggctggacgatgccggcgaggttcaggcctgcggggtcgcgctgcctagcggcaaaggctccccgctcgccgactcgccgttcctgccatacgtgctcgacgccagcctgtttgccggcctgaaggcggatgatcgccgcaagctgctgctcagtctgaccggcgccagcgccagccctgccgaggtcgccaagcgcctgaaggccaagggcatcgacctggcgctgttcgagaaggtgaagcccctgctccgttccgggttctccgccatggtcggccaggcaaaggactacgccagcgaagcgcgcggcgcctggaaagcggtcaccggcgagaattacggcagcgagaaggcgaacgggtgggagccggaggcgccgccggtcatcgtcagcgaggaggaactggaatcggcgcgcgcggaactgcgagccaccgcccaggacctggacgaggcccagcagaccctgggctccagcaagcgcgcccacgccgacgcccaggcgcgggccagccgcatcaccgctctgcgcgaaaccgcagcgctggccgaccgccggcgcaacaagctggccaccgacgaggccaatcaggacgaatggtcggagaaggtgatggcagccgaggccgccgccagcggcgagcccgcccaccagccgctgacctgccctcattgccagggcgccgtggacctgcaggccggccagttggtcgcgcaccagccgccggcgaaggttgccgatcccgaggcggcgaaacgtctggaggagtaccgcgggtatcttgccagcgctcagcgggccgtcgccaacagccagcgggacctgaaggagagcgaggacgccgccgcgcaggccgccgccctggaagccgaaaccgcccaggcgcccagcgccgaggcgatcgccaacggcgaacaggcgatcaacgaactgcgccaggcgcgtgatcggcagcaggccaaggtgcagtcgctgcaggaagcgttcaatgctgccgcccagcgccaggacgtcatcaagcaggccgccggattccacgccgaggtctgcgcctggagcgccctggccgatgccctttcccccgcgggcatcccggctgagatcctggccgacgcgatcggaccggtgaacgagctgctgcagcgcctatccggcaccgccggctggtcgcccgtgcagatcagcgccgacatcgatgtcacgttcggcggccggctgtacggcctgctgtccgagtccgaacgctggcggtgcgacgcgacgctggccctggccatcgcgacgatctccggcctgcgcttggcgttgctggatcgcttcgacgtgctggatatccctgctcgcactcagcaggcgatgaagctgttccagagcctggccgccggcggcgagatcgacacgctgatcgtcgccggcacgctcaaggaaccgatggcgaagacgccggcctggctacaggcggtctggatcgacgccgggcaactcgccgaccagcagcagcaggctgcgggtacctcttcgacctga

SEQ ID NO: 366593 - DNA, 702 bp, Pseudomonas aeruginosa
atgatccctgcgcatgccttcgcgctcaaaaagtacttcgcatggatcgaatcctgctcgagcacttgcgataacgaacacacgacggcgtcgttgggccaggccgaaatattgggcatccagaatcctccacgcggctgttcgcttgggtccatacacacaaccagcgtccttccatttgccccctggcggctggagttcttcggattcgcccaccagggctgcgaggaagcagccgaaggcgttttccttgtccgagaggacgcctggaacgttctcccaccaggcgatgcactcgggctcactgcggtgggttctaacaaggtcaattgcatcgatggtctccacgaacttgatggtcagggcgccgcgcgggtcggtcaggccttcgcgccaacctgcgacgctgaaggcttggcatggagtcccggcaatagccaatgggggagcctcgatcgcccctgtgaggatgcgtcggatgagctttgtcatgtccccatggtttggaacgctggggtagtggtgagccagcacggcagatgggaatggttcgatctcggcgaaccagcgtgctcggaacccgattggctccagggcaacgctgggcgcctcgatgccgctgcacatggtgcagaagtcgagttcctggtgatggttcatcttgatctctggacgagtagagccgcgccggcctgtggctag

SEQ ID NO: 366594 - DNA, 630 bp, Pseudomonas aeruginosa
atgcaacagaatgagaatttcgcaaagcagcccgagcaggcagaggcggagcggccggaggttgtggcgtacttcgaccgaaactacccaagcaccggcgatgccttcatctggtcgaactatgagggaagcccatacgagccagtgatgaccgtctcccagcacgagcgcatcgtcgaagcgcgctggaaccgtgcaatggatttgatgggcgagcacgttgcccgcatcagcgagaagctcaaggtagagcgcgacgtcgccctggccaggagggtggcggagcttgagttgggtattgccaggatcgcaggcgacttcctgcccgacaacagcggacaggccgaactggccctggatgaaatgcgtcaagcattgcacgaacttctcgccgccgcacccacccaggctcagcacagcgtgccggcttacgtgagctacaccacgcgaccagccgaaagccttgccgggatcgccctccgtcagttgaaggacgagagccgttgggtcgagatacgcgacatcaacgcacataccttccccgacatgcagtcgcacagctactacccggccgggaccgtgattaagctgcccgccgccgcgcccggcaaggaggtaggtcatgagtga

SEQ ID NO: 366595 - DNA, 249 bp, Pseudomonas aeruginosa
atgcacaccctcaacctgaccgcgctgttcctggacggcgaggatggccagcgcctggccgaggtcaacggcctcccacgcctcggcgccctgctctcctccgctcaactgcgccagctcgcgcgacaactgaacgagatcgcaaacgacgcagaccagggcgccagcggtgagcactgctacacggcaccaccttacggagcctgcccgccatgtcattcgacgaaaacgccgcataccgccgcataa

SEQ ID NO: 366596 - DNA, 207 bp, Pseudomonas aeruginosa
atgtcattcgacgaaaacgccgcataccgccgcataaaagccctctgctccccggcgccagcacgctacctgcacattcccaccggcattcactgggtcgtcatcgacagcctgggcaatgtcctgcaactcgagaacatcgagcgccggcgccgactgataaccgtttctgacctcgaaaccgaggcctggagaaagctcccatga

SEQ ID NO: 366597 - DNA, 192 bp, Pseudomonas aeruginosa
atggatgacgccgccgagccctgggcgctggcgattgaggttgattgcgagccgcttgtgctcagcgagatgcaggaatacgcggtcaccgtgacgccgccggccgatgtgctggtcgttgtggctggtgatcaggggccgcccggcagggacggcgtagatggcgcccagtgggcacaaagcgagtggtga

SEQ ID NO: 366598 - DNA, 681 bp, Pseudomonas aeruginosa
gtgctcagctatgccatcctcattgacgctggtttcgcgaaaaaaaagctttacccgctcgaaaatccggttactgctgacacgtttgagcgattcgtggaaggtttgcgtgcacaccacgttctaagatgccatcggcttcatcgcgtttacttctatgatgcaaaacctctcaccgacgaagtcgctcaccccaacgggacaagggtgaatttcggtgcttcggtaacggccgtggcaaaccaagccctccactcgggacttgagcgcgctaactattttgctatgcgttacggggagctagtccatcagggatggcgaatcaaaggcaggtcgctcaggcgtgccaaccccgacacacaatttacgaccaacgaccttgaggcgaacgtacagcagaaagctgtcgacatgaggatcggactggacatagccagcctcacgctcaagaagcaggtggatatgatcgtactggtcactgcggacagtgacttcattccagcgatgaaattcgcgaggcgagagggagcacaactggtgctggttacgcttgcccacggacttagggagcctgttcatcagcacgcggatatcctcatacatgagcatgctcgtacattcctgcgactaacccctcccacgcccacgatcgacctgacgccagatccgtctattccttga

SEQ ID NO: 366599 - DNA, 498 bp, Pseudomonas aeruginosa
atgaaatatcagaaaatcaaagctggcgaagacgctggcagctacatcgttcactcacctgttaccgaaaatgaaatcctgcgcttagccttgcagctagcagcccgacggatgtctaaagggaagccgttaactgatccattacaagtaactgaacatctccaaatgcttttacaggattatgagtatgaagtctttgcactactgatgctcgatacaagataccgcgtaatcgcttttgaggaggtgttccgaggcactctggatagcgccagcatctacccccgtgaagtggtaaggatggcgctcaggcacaatagttccgctgtcatactggttcataaccatccatcgggtagcccgactcccaattccgattatcgcttgatcactcaaacactaaaaatcgcacttgacttaattggcacccgcatgctggaccatattgttgttagcagtgaaggctatgtatcccttgctcagttgggctggatctaa

SEQ ID NO: 366600 - DNA, 183 bp, Pseudomonas aeruginosa
atgaacctgatccgctttttaggccttctcttcgtgttcatctgcatgctagccggatgcaccatcgtcatcgcgctattagtacttgccatacggttctggcctgtcctgctgatcctgattttgactctcgctctattcaactggtttctcagccgaatcggaatccaagtgaagtcctga

SEQ ID NO: 366601 - DNA, 201 bp, Pseudomonas aeruginosa
atgcgaattttccgcttacaagacgtgatcactgctactggcctgtctaggtcgaccctgtacaagtacatctcggaaggcaccttcccgaaaccggtatcgttgggcgaccgctgcgtcggctgggtcgatagcgaggtgcacgactggattctcgctaaggtggctgagcgagataaagctttaggcctggctagctga

SEQ ID NO: 366602 - DNA, 303 bp, Pseudomonas aeruginosa
  misc_feature (227)..(236): n is a, c, g, or t
atgaaacccggcatccatcccgaataccgtcccgtcctgttccatgacacctcggccgacgtgtacttcctgatcggctccaccgcggagaccgacaagacccatacccataccgacggcaagacctatccctacgtgacgctggacgtttccagcgcctcgcacccggtctacaccggcgaacagcgcaagaccaagagcgaaggccgcgtggccgggttcaacannnnnnnnnngagcgaaggccgtgtggccgggttcaacaagcgtttcgccggcttcgtcggcggcaagggggcctga

SEQ ID NO: 366603 - DNA, 372 bp, Pseudomonas aeruginosa
atgaagcacaccgcacgcatgaccaccgcagcgcgactcggccgctggctgggcggtgtatggggcgtttgcctgcgcgcggagcgtcgggtgcatcagtggctggtggcgcagggactaccggcaggcggtgcaacggtgctggtccgggtggtcaagctggcgatcctcgcggtgttgctgtacgtcgcggtctgggcggcgctgttgctggtcgcgctcgttgtggcagccaggatggtggagcaagcaccgcaaggtgacgatgatttcctcggacgcaaggccgaagagttggatcatcgcgaaagcctgttctaccaccctgcatcgtacaacgatgatcctgacccgcggtttgaagacgactga

SEQ ID NO: 366604 - DNA, 732 bp, Pseudomonas aeruginosa
atgagcaactatgtgagttcggccgcctatgcggcctcccaggcccttgccgcgcagggtctgaccgtcaagcgttcccacctttccgaggtcattgccgcattgctgggctaccgcacgtatgcggcactggccgtggaagaggcggatactcgactcgactaccacctcgacgatgccgaagtcatcgtgctcaacctgccgatggggatggcgcgggctgttgagcttggcattgagaaagctggtgcgacaccttccgtcgttgccacggcatgcgtcgaggcgctgaaggccgacacacgtgctgccagcgtgtacgttggcatggctgagttctacgattcgtatgcccgccaggcgctcgccgatgcgatctacgacgctgacgacgtggccagcgcgatggccgagagcaatgccatgttccccgatgaacccgagatggacgttgagtgcccgcagacggcagacctgtgggcggcggtcgaggaatggacgatcgaggcggatggggtgatgacgggcgagtacgaccctgacggcgatcgcatgttcaacggagacacgctgaactgccgcgggtggctgacctaccgcaaggcgggtcgcgccgggctggtgttcgtcgaaggcggcggaactggtggagccgacgacagttggcgcgaccaggatttcgaagacgaatgggcgtatcagcggggcgtggaaagcaaccaggcgacctga

SEQ ID NO: 366605 - DNA, 2727 bp, Pseudomonas aeruginosa; identical to SEQ ID NO: 346669

SEQ ID NO: 366606 - DNA, 1638 bp, Pseudomonas aeruginosa
gtgttctcctacctggccagtgaactgcgctcgggtgatctgtgcgtgcagggatcggaatccttcgccgactaccgtaaacagttgctgccttgggaagagtgtctccagcggctaccggcatactgcgagaaggtgggccttcctaccacagcgaaggagtttgtcgcctcgctcaagagccagttggaggaaaccgcgcaacagttagatgacaagttcccttcctgtcgaggggatgtgtcgatcaacgatgcaggcgagccggtactgcggcgggtgatggcgcgggacatcccgccttcagccatctcgctacagacggcgcttatgcagcgtatgccagccaggcacgtgctggacattatggccaacattgagcactggattcagttcacgcggcatttcggaccgatgtccggcaacgagccaaagctcaaagagccggccgagcgctacctgatgacgatcttcgccatgggctgcaatctcggtcccagccaggccgcgcggcatctggccggtaatgtcacaccgcatatgctgtcctataccaatcgccgccacctctcgctggagaaactggacaaggctaatcgcgagttggtggagctctatctgcaacttgacctgcccaagctttggggcgatggcaaagcagtggccgcagacggtacccagttcgacttctatgacgacaacctactggccggctaccacttccgctatcgcaagatgggggccgtggcgtaccgacacgtggccaacaactacattgcagtgttccagcacttcatcccgccaggcatctgggaggcgatctatgtgatagagggactgctcaaagtcagccttagcgtcgagcccgatacggtctactccgacacccagggccagtcggccacagtattcgccttcactcatctcctgggtatcaatctgatgccgcgtatccgcaactggcgcgacctagtgatgtgccgaccggatcgaggcgtatcgtacaagcacataaaccgactgttcaccgacactgccgactggcacctgatcgaaactcactggcaggatctgatgcagattgcgctgtcgatccaggccggcaagatttcctcgcccatgctgctacgtaaacttggctcttacagccggcgcaacaagctctacctcgcagcacagacgctgggcagtgttatccgcacgattttcctgctcaattggattggcagccgagagctgcgccaggaggtcactgcgaacaccaacaagatcgagtcctacaacggcttctccaagtggctctctttcggcggcgatgtaattgccgaaaacgatccggacgagcagcagaaacgtctgcgttacaacgacatggtggcttcgtcggtgattctgcagaacaccgtggacatgatgcgcatcttgcagaaactagcccgcgaagggtggcagtttaccgatgaggacgtgtcctttcttagcccctacctgaccagtaacgtcaagcgtttcggcgagttcaaccttaagctcaaccgaccgccggagccctggatcaaggattcggtattccaacaggctgccggctcgttgcgagtcaactcgaccagtaaggccgcggccgaggaggcaatatga

SEQ ID NO: 366607 - DNA, 696 bp, Pseudomonas aeruginosa
atgcgggcaccagcggccaccgcaccgcccacgcccgtcgcggcagcaccgacagccactgccgttccggctgcgccgatagcggcaccggccatcgcgcccgcgccgagctggggcgcaccggacacgaggcccgtggcgatgccggggccgaagatcccgagcgccagcaaggtgagcgaggccagcatgatgaccagcgcgtggtcgatagaaggctcgtcaggatggacttggaactgcgcgaaaaggcccgagccgataccgacgatcacagccagaaccagcaccttgacgccagcggataccacgttgcccagcaccttttcggccaggaacgaggtcttgttccacagcgcgaacggcaccagcacgaagccagccagcgtcgtcaacttgaactcgatcagcgtgatgaaaagctggatcgccagcacgaagaagcacagcaccacgactagccatgcgaggaacagcaccaagatggcatcgaggttcaagaacacctcgggaaatcccatcaggtcatcgagttgcaggaagatcggcccgcccgcatcaaggccggccttcgccagccggcccggctgcaagaagtcttccatcgtgatagtcgagccggtggcggtgatacccagtcccgcgaacgagcggaacacgatgctggccagccagttgaagttgttgatgatgtag

SEQ ID NO: 366608 - DNA, 321 bp, Pseudomonas aeruginosa
atgcatacggtgattgaagagacatccagcacgatcgatgatctgttggagaaggtatccggtccaactggccggtttgggcatgtaggcgctagagccgcaaccatgctcgatgagggcgtcagcgaggaagtgattgcggcgcagctgacggcgaccagcaagaatggccatcgctacagcggcgaattcgtggcacagctgaataatctctacgaggactgccgctccgggacgccgatcccgaagagggtggccaaggcactcatccaagatcagcgcaatgtagaagggcaggatggtgacctgttacctgcctga

SEQ ID NO: 366609 - DNA, 621 bp, Pseudomonas aeruginosa
atgagctgtcgccagtttgatgcattcagggtgacagtcccgtctcaacagcgtgtcccaaacatcaatggttctaatcttgtacatcagcggacttccctgggtccgaacaacacttcccaagcagcttcgaactgcttgagcgtgcgcagcagcggagccggaaagcgcgaggccatcgcgctaagacggtgccggggtactcggggaatattggctagacgctgctgctcatctctcacgtactcagagaaggctttatcgcagaattcgccgatagctgttctgtcgacagtcggtccatccagcgatacgtccacccagtttctaaacgctgacgacgatgcgtcccacgagacccaagcctcggccgtctttagcgcaccagcctgcaaccgagcaagctcggtccgatcattcaagaggcgacgaagcgttgtgacgacaccatccatgtcgccacgatgcaccacacaggcattttgtccatcgacaatgtactcatcatgtccggtgacgtcgaacacaatggccgtcccgccgcagtggaagatctccagtggtggaccaaacatgccttcgacggtgctcaacttaaccagaatatcgcaggaccggtag

SEQ ID NO: 366610 - DNA, 924 bp, Pseudomonas aeruginosa
atggctggttgcagaactggttgcgcggcaagctgggctgcgcgcgggttggccgaggaagccggccggcagcagttgcaggcaggtggcgatggtcggcatggcccagccgccggtggccgggttgacgtagcgcagcttgtggccttcccagggatcgggccgttcgaggcgcgccaggcgctcgagggcctcgcggctgcgcgcgtaggggtaactgaacagcggcgaggtcggcgtcgtcggctggtggcgcagcggcagcatgttgctgccgtagcgggcgaggctgtcgccttcgccacgtcgcaacggctgcaccggttcgccgtagctctcggcgaaggtggcgccgaagaaacgcagcatcgggatgtccaggccgtccagccagaccaccggctcgccgccttccgcggcggggcggttgccgtggtcgtgccaggtccaggacggagtgatgatgaagttgcccggctccatgcgggtgcgttcgccgtccaccgaggtgtaggcgccgtagccctcgacgacgaagcgcagggccgactgggtgtgccggtggctgggggcgatctcgcccggcaggatcagttgcaggccggcgtagaggctcggggtgatcgccgactggccgggaaggtccgggttctccagcaccagcacgcggcgcaccgcttcctcggcgctgatcaggtcgcctgcctcgagcaggaacgggcgcagttcgcgatagcgccacagcgccgcctggcagccgccggcgggttgcgccgggaccaggttgtgcagggcttcccagagcggggtgaggtgctgctggcggatgcgtcgatagaagtcggcgcgcttctcggtggaattgtcgttatgcataccgatgaatctccggcgggaggaggcggggccgcctcggtctggtag

SEQ ID NO: 366611 - DNA, 177 bp, Pseudomonas aeruginosa
atgaccgccgccaagctacgcctggcgatggccagcatggggcaaccggaaaccaaggtgggcgatctctgcgaagaactcgggattacccggcagacgctctaccggcacgtgtcgcccaagggcgaactgcggccagacggcgtaaagctgctctccctcggttcagccgcataa

SEQ ID NO: 366612 - DNA, 1140 bp, Pseudomonas aeruginosa
atgaccaagttgaaagagcttggtctcaaatggcatcgtgagggtattcactgggagctgctcgaaccctctgagtctcaatttcgcttcactgaactcgatgacaccgtgaaggcagccggcgagaacggcctgatgagcacgatgtatctggttggttctgcacggcaccagaccactgccccgtccggggtgagcaacccagatcagtatccacctcagtctgccgccgcgtacgccgatcgactggccatgcttgcggagcgttacccgtctgttaaggcctggcaggtctggaatgagccgaacattccgagcttctggcaaccgagtgaagatcccaatgcctattcgactcttctgcgcgaaagcattgccgcactgagctcgcgagcgccggctgcgcaccgggtcatcggtggtatggcgtactacagtcagatgcccttggtcggcggtctgatgttccaggcccttgccggcactggtgatctgacgccagatcgtgttgtggcctaccacccgtacacgaacagcgccgaaggtgcgactccggccgatcgagacttcatcgacacctcgaactggctcaacgcaaatcttcgccaggctggcgtgaaagacatatgggcaaccgagttcggctggtcgagctactccgggccggttgagttgcagcccatcgtaggtgagtctggccaagcagacctgacgatgcgccgcgttgcgctgatgagcgccatggacttcaaccgcattttcctgttcacgctggctgatctcgatgagcgggctactgtccgagatcgaagctatggcctcattcgccaggatggaacagccaagccggtcttcacggcactgaagcgcttccttgcagccactggtccgtctctgagccccgctccggtaccgacctactcgatggccccggcaagcctgatctcgatcagctggaaaaagcctgacggcaaacgtgtgctgatgttctgggctaacgagacgggctcactcaagttcgccaacactggcagcgtggtggttagcgatccgctcaccggcggcaaggtgactgtttcaccggctgatggtgtggtggccttgagcgttgggaagacgctgaagattgcgacattctga

SEQ ID NO: 366613 - DNA, 1545 bp, Pseudomonas aeruginosa
atgaacaacggaacattagcgctttcaatagatgacttcacttctgggcgatttaatcaggttgctcaattcattcgtgaaaactggccgtatggcaatcggccttcggggaatgaaacgcttgaaatcctggcaaagagcctcggttatcataactatagtgaagcaatgtcgtcggctaccagtgtgccgccccctatgttcacttttttccataacatatccgaaaacttcggccgacttgggcttgctccgaaggacgagcacaggcctgattcaattacgtcactagatcgaattgctatcgcgtttcggggcgatacgttcggtgcaaaatttgttgaaacgtggccagttagtctagttgggcgctggaatttcgatgggaagccctgcacgttcgataatgaatttcttgcaagagctgaaaattgttttgtgcaatatctaacgcgtacgactccgatgggcatggcccctaatggtagaagaaagaacacgcactccacagcatttttggtcgctgggctatatcagaatttaactctgaacgagctgagtgctaagtcaattggcgaccttatagatgcagaagctgctgaggccttattgcaagacgtgatgcctattgtgcttggtgaaatcctttgtgtgaatattgatcaggctaacaaaatcattcataccactgggatgagcatggcagatgtttgggctctgcctcgctcagaagccgggttcccgaatttatatgcccgcatgcgtgcctgtatgcctgcaatcttggagcgcaaggctgttgaactctatatagcgccccgaaagaagaatggatattacctattttcggaaggtgaattttaccagcagccagatatggctacacaggttgacgagggctcttttagcttctctgtgcaacgtgacgaaatagagtcaccgctattcaagacttactcttggctcgggcagttgaaagagccctgcggtcgagttgttgctcaaatcgatgggacttacattgctggtcttgcgaggcaggacctacctgcatttgatttgatttctgcgcttgatgagatgggtgatgcgaatgtagaagttgttgatttcgtccttgagagacttcaagaggaagcgtttcaggatatgcgtatcggtattccaaggggtgatttgaatactaatttgattttcgatgacgccaacctggtcaccattttgcgctgggagcggcatgaggattcaaagccagggattggcgcatctttgcttagatattgccttgatgaattgaaacgtaaatataagcgcaacatgcacattgcttgctcggttcagccttaccaatactaccgtggctctgaaatgcttgcttctgtgcgtgagcaacgtgatcaagatatagataaaatatgtaaatccatcactagagttgctgagcgttgtaatgtggttcgagtgtttctaaaggggcatgtgtttgctgagccagattccactttccagcgttattacggtgaacattaccaaagccatgtctag

SEQ ID NO: 366614 - DNA, 699 bp, Pseudomonas aeruginosa
gtgagtcgcctttcaagcctcccgcagctcgccggtgaccaagttcaggcctaccgcctggtcaactcaaagttccctccgatcgccctgtttgatgacgttgccaacgcaaaggacttcgaggttttgttccaagctcaagcactgaccaatcctcgcctgctaaatgaggttggaaagcttgagctgatccctcgcgctgagatcccttttggaatcaccggctgctcttacgccactgcaccctttacccacgtaaatccggacggctcccgtttcagcgacgggcgatttggcatcctctatgtggccgatgacatggataccgcagttgcagaggttcgccatcatcaagcacggtactggtcgaacgtacctggcctacgctttgagcgcttcgtgttccgcgggttgcactgcacctttaccgacgaaggaatgcgtgacgcctgtggcgtcgcgatgaatgatccgatctacagctccgacgactacagcgcagctcagcagctaggccgagaagccaagaaggccgcatgcactggcctgcgatacaactcggttcgtgcacctggccatgtgtgctgggcactgatgacgccacgccttgttacctcgatcatccaagccacgcactatgaaatggtctggaatggctcgattaccagcgtcaacaagctgcaaatggtcaaggggtaa

SEQ ID NO: 366615 - DNA, 396 bp, Pseudomonas aeruginosa
atgcaagccatcgccagatcaccagccttcaccaaggaccagagccgcgtcgtgttgaacaccgcgctcaacatcctgaccaagtgggccgcatcgaccgagcagtcctgcaacatcctgcgcgtgtcccgcagcacgatcgcgcgcacgcttcagggaaagggtgtggagctggacagcgatcaactggagcgcgccagcatcgttctgaactgccacgctgccctgcgtttggtgttcgataacccggagaacgtctacggctttcctcagatggagaaccacaacgacttcttcaacggtcgtcggccattggaaatcatggcccaaggcgatctgatgtccctgttcgagacctacaagcgcatcgacgctctgcggggggctggctggtga

SEQ ID NO: 366616 - DNA, 336 bp, Pseudomonas aeruginosa
atgcgcaaacacaagagcatcgggatgcatacagccggcgttgcgcttggcacggtagcggcctcgctgaatcacagtgagcagatgaacatttcgacctatgcggaggcgacgcccgagcagatggaggccgagttaggcacgttctggcaggccatgcatcatgctgccaacatcgtgcgcgagcgtagcgagaaagcgacaggagatgagatcgcaacagcggcggggcattgcgatgggttcaatcagccgatccctgtgcgcgacctggaagccattgctatcgagccgaactgtcgcacgcaatatggctgcttgtactgcgaacactag

SEQ ID NO: 366617 - DNA, 954 bp, Pseudomonas aeruginosa; identical to SEQ ID NO: 325134

SEQ ID NO: 366618 - DNA, 207 bp, Pseudomonas aeruginosa; identical to SEQ ID NO: 324746

SEQ ID NO: 366619 - DNA, 159 bp, Pseudomonas aeruginosa; identical to SEQ ID NO: 324252

SEQ ID NO: 366620 - DNA, 2328 bp, Pseudomonas aeruginosa
atgagttggaaaataacgcgaattgaagtttctagcttcaaagctttcaaacatatagacttggatttaggtatctcatccctgttgaccctagacggtccaaacggatatgggaagaccagcatctttgatgcactagagttgctgctgactgggcagatcaagagaattcaaaatcttttttctacgctaatgacggcgaacaagaaaaattatgatgacagcttgttttggaatactcgttccggcaagaaagacctatcaattaaaatagagttcacaagagacgagagcaagttagttctagccaggcatgctccaattaaagcactcgaaaataaaacgaacaaccgagcagacaaatttcagcatttctccctgtatgaattacccggattcgggtccgaagcctataccgacgtcaataaacgagataatgatttccttgatcaggtttttggaaaaaacttcagggagaacttttcatttttgaattacttggagcaaggccagaacaagttgctccacacccgggtggatgagcgtaaggatgctctcggaaacttattcaatattagcgatatcgcagcagagattgacaactgtcgttcgatagcagccaaattcacgaagttcataggtgatgaaactcgtaaggctaaggaggactcactcggagccgagtgcacttccctgcgtgaaatgctccaggctgacctcggcagtgttgaatataaaaaaatctctaacgttgatcctgagccaagttgggacaaggaaaacccctttcccacttatgatataagctctcacacccagtatcttgagtcgatccgtaaactgagcgaaatgcttgctcagaaagcagccattcgcatacgagcagacaatgaagctatcgaagctgatatccagcagcagactgagtcactgggtagtctggccaagttgggcacggatataagcaagctcgatgacctggacaaagcaaaaaaagagatcgaccagctcgcgaaagccacggccatcatcaaaaagggagcctcggctatcacggcggagcaagctcacacactaccggggtgggcaactgagcggctgaggtggtttgaggagcagatcacaacgcgcgataaactccagacacagaacacagcgaatgagagcgccgcagccgaactcgctcgtttgaaacaacagctcctcaaagagcataccaagatttatcctgacgatgaactgtgccccctttgtggtaacgactggaaatctcacacgtcgatgctcgaagctgttgaggaaagaacccagaagatcggtggtgcattgagcaaagatggtagaaacctcgttactctgatcacttcaatgactaccgaactctctgcgattgagaactacatccaaggacgagaggcaatcctaaagcctggctacaacgacgcacttcataaagcattgatagcagtcaagccccgtctacctacaatccagcagttagacgaacggctcagatctgaaggcatccagaccacctttacgttcagcgatgacgacatggtcgtagcggctcgcctcgaagacctacgtaattcgatgcaagccaagaaaacagacgagaccgtggcactaccagacgactggcgccagatcattggagcggttttcaaagatttgcaggggttctacatttttgaccctcaggatctgaagaacaaagaactctatataaaaattaaggccaatgaagcccagagcagtaggcttcagaaatgtcttgatgacctccagaaaattcaacgagagaacgaggcagctaacaaagcaaaagataaggtaactaagctgcgtacgactttagagaaagccgaacaaaagtacgccgatcaaaccatctcggaaattgagcttatttttcacatctacagcgggcggctcatccaaaactaccaacgtggcctcggactctttattgagagtcgggatggtaagcaactgcggttcctgactgcggaaaagtctgatcacgatgcagtgatgtcaatgagcacaggtcaggtgtcagccctcagcctggccttcttcctatcactcaacaaggtctatgcagacgtcccactgattctcatagacgatccatctcagtctctagacgatgtaaatattgcctcgctgacggacctgctccgttgtgagctcaaccattgccagctcatcatatcctcacatgaagaggatatctcggcttacatgcgataccgatttgaccgagcgggattgacgaccgcctcgcttaacatgcaaaacttgacgaaacacgtatcgtaa

SEQ ID NO: 366621 - DNA, 666 bp, Pseudomonas aeruginosa
atgataaataagataatagatgaagcgttgattgcccacgacttcaataaagagcatggaaacgatttaacgagcttttatatacgcgaatcaggctccgcaatcagatttgcgattttgcataagctagacgagctttccgctccatccgaactgaatgctgtgatcaatcatgcggcaccggccgccttccttgaacaccctgctttcaggaagaactgcgacctcatctgcatccaccatctaaataaactggcagagttcaaaaatcacgaagagaaaatattttcgatcgaagaagatccgcacttcttcaaaaaatacattctttattacagtgataccgaagatattgcaattcagaattattcatatgccgatctcgtggaaactatatcggacaagagtcaatttagtagttacaagaatgacccactggaggctacacaatacagtgtggcggcaaagatattcataaaacttcctttccttgagcttccattcaaccgaagggagctcgtctctttgcgcctgcaagcaggcgaggcggtggctgaagaaggtcttgacgcaacatatgcagccattcagagactcaccgccaacaatatggacgaattactcaaggagctgattgataatgagttggaaaataacgcgaattga

SEQ ID NO: 366622 - DNA, 1233 bp, Pseudomonas aeruginosa
gtgagcagtgaagtggatgaaaaatatccagcgactgccgtgtctacgtggagtgggtacgtctatcaagggaaaattgcgctctaccattgcctctgtctaatcaatcaaggcgatgcggatttcgagctccagctagacagcagtgacgatttcgcagtctataaaaatggcaccctagcaagcgctcatcaagtaaaggccaagattggcaagtaccgcagtggttatatcgaagccctggagaaagcttcagctatcgaatttgaccgtgccaaaggtgtttcacgttacttccatgtatccattcagctagatgacactagcgactacacgggagcaaatggagaactcgttcaattctatgactacggagcaaataagcattgcggtctgggcgaaatagaagggctgacaaaagagattattaggcagatctgtattagcaggtctattacgcttagcgaagaccttttaaactataactactgccttctctccgaaaaaataagctccgaggccgtggcaatacatcgtttagtgcaagacgaccacgaaaaggccaacaaagccgcctacgaaaatcggattactgcgcaatgcttgctagacgacatattgagcaaaaacccatacaacagcacggagtatttctctgttgaccttaaggcaaggctgtgcagctacttagaagaccggctagatcaagctttgccaagcataaatgatgaaacttatggcagagcacgacgtctctttgaacatatccgcactactgacgccaacgagttgaagtcgctctgccagttaatgaagccctcggagcgattttcatccattcaaaaagcggatataaggcgctattccgggttgattgaggctatgaatgttgaacctattctaaaacagtttcctcactacctggatggcgacaacaaattttatttacccactgctctcgatctaccatcctctgcggatcatgaaggctgcacttcggatttgctgagtgaaatggaaagcaacgaaaatcttctcaagcttcttttcgaatacaacaacctcattgcaagcagatccacaacgacttttgttattaatacaaaatacacgcaccctgatgatctgactgatcagcaagttaaagatcgcattgatagcaatatcatcaaatcattatgcctaagcataattaccaaggaagacgcagaggctcaactcaatgataaataa

SEQ ID NO: 366623 - DNA, 534 bp, Pseudomonas aeruginosa
atgaagcactttgtcatcctctcaggctgttctggcggcggtaaatccacgttactgtctgaacttcatcagcgcggccatgccgtggtcgaagaacctggccagcgaatcgtccaggaagaaacccgcatcggcggccaggccctgccatggatcgacatgaccgcgtttctgcgtcgggctatcgacatggcgttggatgaccatgccaacgcccggcacagcagccagtggacgttcttcgatcgggggctgattgatgcagcgtcggcgcttgaagagctgaccggcgaaccgctgctggcaaccctcggacagacccaccgctatcatccacaggtgtttctggtaccgccttggccagaaatctatgctacggatgcgcagcgccgccacagcatggacgtcgcattggtcgagtacgagcgactccagcgtgtatacccctcgctgggctatgaggtcacgctattacccaaagtcgatgtggtggcgcgtgccgattttgtactgagtacgttagcgaaacagtga

SEQ ID NO: 366624 - DNA, 303 bp, Pseudomonas aeruginosa
atgtggtggcgcgccgccggcatgggatttctttcgggtattctcaacccgaagaacgcgctgttctatgccagcctggccgcgatgttgacaggaccgtatgccagcgtgggctggaaaactgtctatggcgcgtggatgttcagcattgtgctgctgtgggatttactggtggcgactatgatcggaaaccaggcggtgttacggcgctttgcacgtgcactaccgtggttggagcgtatctcgggtgccatgctgatcatgctagccttgggcgttctcgccgctctattgatgcgttaa

SEQ ID NO: 366625 - DNA, 561 bp, Pseudomonas aeruginosa
atgttgcatctggacgcagcctggctccatgccgtccggcaggaatatgctcaggaaggcatgaacgactgggatagagagccggcccgaatcgtggccgatccaacggtctatgcgcgcttctgccgcctcaatatactgttgttctcccaggccgatccacgcgataaagaagcagcgctgatcgagttctttggcgaatgcgatgaggcgcaggggctgcgcttcgatgctccggccatctcccctcgtcttagcgaacagatccaaccggtgcgggatttcttgcagggcgggccagccagcggcaccaccttgagcgatctggcgcaattggccggtatgagccgctatcagttgatccgggctttccggtccaccacgggtatgacgccccatgcctggcaattgaaccagcgtgtcaaccttgcgcgagagtggatacgggagggtgaaggcatcgcagaggtggcctatcgcctgggttttgcggatcaagcccattttcagcgcgttttcaaggcacatacgggcattaccccaggtcgtttccgaacttag

SEQ ID NO: 366626 - DNA, 351 bp, Pseudomonas aeruginosa
atgaccagtgcccttgtcaccgaggaacagcacgcccagttactggcgaatgggcaggccatcgcaatgggcaagcagagcgacccgctgccggtggtgcgcctgttcaccccagacgcacacgtcacctggttattggcatcgctcgatcctgccgacagcgatacggcctacggcctcatcgacttggggctaggcatgcccgcgctgggccatgtgaagttgtccgatttggcgtctattgtcggcccacgccagcagccggtaatgcgggatcggtatttccaggccacgcgcacgctgtcagactatgcgcggctggcgaaggccaacggctccatcgttgattga

SEQ ID NO: 366627 - DNA, 4506 bp, Pseudomonas aeruginosa
atggcactacagcgggagcagcggatctttactgctgaggattcacaatggcatgcccgcgaagtcgttcaccacgaccccgcaacgcgtcgtgccttttcgtttgttcctctagatggacttgctgcagacgctggtgtcgcagcactttcgacccaactcaagacgctacctgcaagcattcggaatgctctggccaatgctgaatcgagtgctggtcatatcagcgatgatcggctgcaagggcttgctgagctcattcaaaatgccgacgatctcggtgcaacatctgcagagtttgtagttgacgtgaacgggtcgcgcctcatgtttcggcacaatggggccgggcttactcttcacgacgtgtgggcactcgcgattccctggctaagcctcaaattcgacgatccgaaccagttgggtcgatttggaattggcttgaaaacgcttcatgcgctgtcagagatccttgaggtccatcagggccattttcgcgttcgttaccaggcaaacgatctgtcggttgccaaaagcgatgtgacgtggccgggcgaagagccaacggacgccatgaccacgttcgtgatcccattggaggctgacgcatcaaccgcagcgatcgtggcccagtggctgaagcattggagtgatgccggattggttttcttgtcctctctcaatactgtgacgttgcgaggggctaccggtgatgtgctagccagacttcacatagatcgcaccgctcctgagactgtaaagagcacgggtggtgagatgactcggcgtattgccaaggcctccgactctcgcgagtgggtcatctattcacgatcagtcccggtgcccacgggccacgctcgagcacgcaaggcccagacgcgttacacaccaatcgctattgcgttttctctcgtcgggttagacgccggacatttgcatgttggccttccggtacgtccaatcggcctgccatttcgaatgatggcccagtttgatccactgaccagccgccgagacatctctgacgatccatggaatcactcattagttgagccgctgagcgccctgtggcttgacgctgtgcttgaacactttgagcgcaatcctgctgtcgcatgggctgcgattcccctgaacagcgatttggatgacgacggacaaacaattggactactgcgagccgaaattgaccgtcatttgatggaaaatgccagaacgacatttgccaagaaaattactctacaggacggtcagcagcgctatcaccttcatgaactatcgtacgaagtccctgaacttgagcatgtcttgacccctcacaatgtcaagaccgtcgcaggcaccgctggaacagttatcgcggcagtaagatcaggcgacaaccgttggcgagatgcccttgaagagctccgcggcatcggagcgcaagcgccaacactcgtcgaggtggtcgacgcccttcaactactcgacgacgtccattgctctcctgcattcgtggcggaccttgtcgctatcgctgtagagaaaaactccacgaatgaactggaaaatcgtccctgcctcgttctgaatgactccgcccgagtcacccccatagatgtcatcggacttggcgtgctgctgcctgaagaagccgcaaatttgtgggacattctcgacatcggtcgacgacttcatccggcatacagggagcggccgggatggaagagcgtgcgggaatggctccacagaggtgatcggcttctgatcgaggccaccgataaggtggcattgggtgtgctcgcgaaagcaggcaacaacggcgttgaactcaatacaccattaaccgacgaacaggctgacgggttacgaaaagcgtttgagcaactgtcaattggcgatcgccaaacgttgggagaaggtatcggtcgggcggtccgattcgctgctatcacctacgacgaggccggaaagaaaatactcatggccgcgagaccgagtgaggcctacatcatcgagcgtgagacgaacgcatggaaagtggccgcgggcaaaactcccggcctggtctggcttcacagtcgatatgcggagaagtttcgcgccgagtccggccgtgaagggatcggggctcagcgtctgtttcgctatatgggggctgagactgctcctcggctgaccaagcattcagcgcacgttcaacgttttgcatatatcgagccgggagtccctcgcctcagcactagctcaccgcaacgccgaaatctccagatgaaggatgccggggcaacgtatacgctggcggatctagtgtcaccccacctggatgcagtgctttcgaacattgcacatgaaaagaaaaccaccgacagggtccgccgcgcaagcgcagtcttgaacagtcttaatcgagcctgggatcgtctcgtttcagataccaaagtgcgcgcagtcagcgattaccgctcctggcaggataggggtcatgtcgatgcgtggtgggtggcgaaggctgcttcgattccttggctcacttctgccagcggggccgctgctgcacccgaccatctccggatccggacggcagctaccgaggcctttttcggaagtaaccctgccggatacctcaatggccaacttgataatgtcgcgtatcaggaagtgcttgccactctgggggttgcgggtgatccacgtcctgaccaactcctcgataaactctgcgcgattcgggacgagttttttaatgatgcgaccgccgctgcagatcatgcagcacctctatatcgcgcgcttgcaacccagctctccggtcgaggaacatcccgccgacctggccaattgaccctcagcgcactgcgttcagagttcgggaagggtgaggggctgattgcaaccaacgtcgggtggcggcggccgtcagtcgtccgaagtgggcgcgccgtgtttgggccaatgcagccgttcgttccggccatcgatggtacagatccgctgtggaaagcgctggagatccgcccaccggatgtaacagacgcaaaggagacgctccgtaagttagccaagcgaaatactcttaccgaagaccaacgccttgtgatgctcgaagcattgcgcattcttgctggagcaccgatcgatcaacgaggaaagctagctagaagccctgtgtgggtaggcgatcgctggttgtcggtacgccccatcttcgcggttgaaaatccgcttatcgctggcggtttggcaggccagattccggtctggaacccaggcggagcgctggcgcaactagaagcgctggtcgaaccatacgggcttacgcgcatcgacgcctcccaggcgtgggtcaagggagccgagcatgcagagtacgatcccgaactcacccacctattctctaatgcggtttccaacctgcgtagagacctagcgttgagtgactcctacagtgaagccagcatacgagtgtcatgggacgcgatatcgcgattcaatgtctgcgttctgcacgacctaaccattgaattggccgatcttctacccggtaaggtcttgtccttcacgccgaaggcttggatcgacacggatgcagccacgttttacatctctaatccggacgatctcggcgatccagattccggcgcgtacgcgatcgctacagtctttgccagcgatatgcggaggatggctcatgattggctggctgcttgggcggccgcaaaagcggggcaccgagcggaggcgatcaaaacagccgcgagtctggaggctgagcaaaagcaagctcgggccgagcgagaggcatctgctggtgccgggcttttaaagctgtcagaggagtgggagcgacgtcgtcagaagaagttgagtgcaaagctgggaggcaagcagatcgagagtgcggaagaagaaaccgcgcggaagcagtctcccaagaccctggtagatctttcgaaactgaaactgaagaattccgccgggcagattcttgagggatccaactcgaaaggctctgtgcccccagacaaccggagaaaggacagtcctctgctgcaggaagtcgataaaaacaggcctaaagcgaagcgaaaagcaggaactggggcgtccccgcgtaactatacgcaagaagagcaggagagccttggcgcagagatctgccgctgggttcttgggctcgacgaaagcgagatcgtcgacattcgcaatcaacataacgtcggagcagatgctatcgacatgttcaacaacctctatgagtacaaggtgtatgcgggcgccatcccagacgtgattcgacttgagcccagccagatagaaagggctcggactactcccaatttctttctcgttgtgattggaaatcttcaagcaggggtaggcgatcccgaggtgcggataatcacaaatcctttggacaagctcgcattgcggccaaccgcatctgttcagttcgcgggcgtgctcgctgctaaagcgctgacttatcgattcacatcagaaaatagcggcgaggagtag

SEQ ID NO: 366628 - DNA, 3105 bp, Pseudomonas aeruginosa
atgttcatgctattgctggcgggcatcaccttaacctccacagccataagttggtggaatgggaagcgcttggacgacgttaacaccgagattgaagcgttggaggctgaactggccgccattcacgcgatgcatgaacgcaaaagtgctgcccttattcgtccgtacctgattcaactcgtgaagatgtttgaaagtgagctggcgatgcgcgtggaaatcgccagcgagctggagcgggcacacgctcgtgcaaggtacatattgagaaatcagttcggcgctcgtgagtccgccaattttcgtcggatgatgcttgaaatcgagcttgcccgcggccgcatcactgctgagcgcgcctatctccaatccacagcacaatacattcgtaccttgtatggcgaggtgccggcgcagttgccgaccgttgcctggctcgaaatgccggcggattatccctgtgagggcgcagtggtttcgctgccacagggtttacctggacgccttcaaaattacatcatcgagtctgaagtctttgatggccgaggggtcttttacgcagttgaccatgagacacgcttcgcccgcattggcagcgacaaggtgaaactcttggacgcggcgacagcaagcggtggcgagacgctgacaggcaccgtcgtgcgcctggacaacaatgaagcccaactgcagatggatgatgtcatcctgcgtttgccacttggcagacaggaagggcaatggataaaacccggcatggagctgcaggtattcgctgacggttggacactcactgacgtactcggcgactcgcagtcccaaaatttgcttgtgagattgcacccccgcatatcagggctcgaggagtactggtggccggtcgcgcttggcgtcaaagatgatcaggtagcgctgatccaaaacatgtggggctattttcagacaccggtaatccaggacaggccttggcatatttatgagaacgatgacggccgtctcgtctttcagctggggcgctatgccttggtcaccgaaaccgatgctcaacagcgatgttttcgattgctgcatgtgctagaggatagtgagtcgcctgaagacgttttacgcagctacgtcgccctttcccctattttgatagggagtgaggatgacgaattgaccaaacgcaatcgcttccagtctttcgtgtgtgccttgaatgaagagcggcttggccagcgaaacgctgcccgtcagcgagaagtcgccttgcatttacgcaagctgtcattggtgtaccgtgagcagcagctttacttggagcagagcgcaagctgtggttttcttcccggccaggtcgaggagaatggacgcaaagtgacaggcctgctgagctcgcaaggcattcccaactggttgaaaactgcactgagcgagcaaggtgcacctcgtttgcgggccgtcggacgagatcgagtatggtctttgcaatcgttcaagcttctagatccccagcttggtatttgcgaatttacgctggccacgcataaacggatgaatgaagctgagatcaaccccttcgatttgtttaggcttgaactagtcagggaaggcagtcaaaaggaaacgctctccaaagcacttgaaaaggcgatttccggcgattttgtagcgccttcggtgcacagtgcgatctttacacttgaccctgagcccgtcgagacgtcgaatctgggacaggaagcagtactccaaatcttggcgtcaaaagagcccgtactggcagtctggggacccccgggggctgggaagaccaccaccttggtgcagtggctcaaaaccctgtttccagaacaagcaccacatctctggccacgcatactgatcaccggccctactcacgtagcggtaactaagctgattgaagatctactcaaggccgcagagtacttacggcctgtcacggttcgctacggtaaggaggacaagatcagtgaagcgcttgaagccaactggcatcaaatcaaaatcgatgcactgagcgcaggagatgcgcaaatcaatccccagctgcacgatacttggttgtccctcctgaagtctcgcaaggggcgcgaagcggcaagtcgctggacgttccgcgacaagttgatccacggtgccacctgcacagggatggcgcgtactgactttgctttgattaaggaacctttcgattgggtgatcgtggatgaagcaggcaaagcctttgctgccgagctaatgatcccggctgccattgctcggcggatagtccttgttggggatcacaaccagctgccacccacggtgactaccgatgtgttggatgagcgcattggctatacattgcctctggcggaggtggaaaccctactgcgcaaaaatttcttccaggaattgtatgaagggttggaaccacaggccaagggaatgctgaccgtacagtaccgaatgcatgaagatatcggtgacttggtcagcgcgctattttatgaagaccaactgcgatcgcaccgcaagggtggtacctgggcgctgacggcggcccgcgcattatttgtagacttttccaagatgcagaactatcggcacaagaaggcaggtacaggagattctccttcatcgctggttaactccaccgagcgcgctgcgctctaccaactgctgaatgcgctgcacaaaaaggtgagagcaacaaaaactcccttgaagctattgattgtgtgcccttacaaagggcagctggaaatcgtcacccaagatacggaaggcaagcaatacgcattcgaattgtctgttgcgactgttgatgccgtacagggcggagaagccgacatggtgattctgctgatgacccgcgcaagcggagacactcagtttcttctggatcgccatcgcctgaatgtggcgctatcaagggctcgtgattcagtcattatcctaggtcacctggattgcctggcaggcgatggtcaaggcccagttgcggagctggtcgcggtggggcgagcaaagaaaagcttgaaagtcatttcactgcccgctgaggcaaagtttcacaaagacctagtgccggcggtatttccgagcgcaacggcttag

SEQ ID NO: 366629 - DNA, 495 bp, Pseudomonas aeruginosa
atgtccaatgagcgattcaaactgccggccagcctcgccaaacccagcgcagtcagcaagtcgagcgatgcccttgaccttgccaaggaaaaaacattgcaggagcaaatcaagcgtgaaaccgcgtttagtggagatcgcgcccaagtgctgactgaaggcattgggctgcttcgcgacctggttggtgtgctgcaatcagctgtcgaattgaaaaaaacgtctactgagtggaagcaacgcgtcaagttagctgaaaaagaagtgcagaaagctcaggcagacctcgaaaaagtcaaagcacaaacggcgcctgagctccagcgattgaaccaggtcgacagtgtcctcacgccggttctgaaagccttcgagaaactcgaagcggtcatggatccttcgttgatcgacgacgaccatcaacggcagattcgggcaagcattgaggtcatggtcggtcgtatggtcgacttggtccagccagggaaacgctaa

SEQ ID NO: 366630 - DNA, 1398 bp, Pseudomonas aeruginosa
atgggtcgagagaattgcggaaggattgtcgcaggcagcgtggtaaaaattttgccaaagtctgtgctcgtaaagtatcaggacacatctgtcttgattcctcagcatgaattgttgagcacaaacgccaaggtcgaaaacccagtaagcctatttagcgtgggcgaccacctggagttcgtattaaccagccttgatgaaaagggctggaaggggagtgtccatgcgctagctgaggctcggctacgcaatgctttgagcaatctgcaaccaggcactatcgtgaaggcgcaggtagagcgttttgatgatcgaggcgcatggctgatggccggacaactgcgcctctgggtaccattggccgagatcagttggagctggattgatcatccttctgaagctctgaatatcgctcaagagcacaacgtgcagatcagcaatcttctgcttgaggagaattggctcactgacaaacgtgcccgcaaggggcgtgttaccgcaagcatcaaggcttgctcgctgcgaccagagtcaccgtgcatcacgttgtattttaaagcgatggaatttcaggtgcgcacatttgcccgggtgcctcgacgttgtgatgccgtagggctttttgtccttgaagcactgggtcaacaattgaacgtcaatgaaattgccgagctgactggcttgccgttgatttcagtccaagacatcgttgagttgcttgtcgaggaagacctggtagagggacaaatcatcacgcgctcgggcgaacgattgttggcaggcgtggccacctcaaaactgctcaatgacgctggcgtcggtggattgtttgcaagcgcagcacctgccgatcagcaaattcacccaaatcatgcagtggctcaaacataccctcgccatcttccagcgcccgtattcagccataaacagcagaagcgcttcatgcgtttaaggggcagcgaactgccggataatttgctgatgcgcgctcaaatcagcgaggcgcaaggcgagcaactgactgccatgctccgaaatccccacgttcgcgtgttcttgtctcaaaccccaaactggagagccctggaacttgatgtgccgttgcattgggtgcttgcaggcctgtggaaaaactttcaaccagttggaaaaccaccgttcaggcctgcgcccagagagaaggggtgcgacgcgttgcttatggttcgttatctggaagcagggcaaccactcttctgggagcccgcaacccgcaccgtatgggcgccacgggatggtcgcatcaaagcccaagaggctgacgtgtgtgaggaggacttcactcaacacatgtctcctgacatcgcccagcgtgtggcaaaggcaggcactggtacatggtgttgggtacagctttga

SEQ ID NO: 366631 - DNA, 261 bp, Pseudomonas aeruginosa
atgtcattgcagtgccccaaatgtcactccccaaaagtcgcttccttccatcacgccatgaaagtcggcgcggccatcggcgctatcgcagggccggtcggtatcaccctcggctccgtgtcgggcgccatcctcggcggcctgtcctgtggtgtcggtggctgcgccctcggcgctcagttgggtgagtcgctcgaccgtcacgtcctcgcccacaacctctgcctgctctgcggtcaccgcttcaacctgccggcctga

SEQ ID NO: 366632 - DNA, 210 bp, Pseudomonas aeruginosa
atggcgctactacggatcttggctgccgtgtttatgttcgttggtattctcgccggctgcctggcgctcgtgctgttggtgattctgttggtgcgctttccgccactgctgatcgccgtgctgctggcgtgctggatcctctgcagactgctgaaacttttccggacgtcagaggcagcaccgacaaagccgcccacctctttgcagtga

SEQ ID NO: 366633 - DNA, 306 bp, Pseudomonas aeruginosa
atgaacagacaatgtttaatctgcgagtccagggccgtaatgccccgtgacgccaccaagggccttgcgctgttggtcgggctggtcgatggtgcggctcaaggggctcgaagcgcacccggagaatgcaatcgcgacatgctcatgagcggactggccgcgattaccccgacttaccctgccgccttggatgcggctgaggatgtcgcccgcttcctcttcgggggcttcgattgcctgtgcctgcgctgtggcgcgctattcgacgcggctgtcgcggaccaggaaagcctcagctgcggctga

SEQ ID NO: 366634 - DNA, 354 bp, Pseudomonas aeruginosa
atgaacgtcattactggactgaacgaagcgcagatcgaaagccttgtgcgcagccgagcgtccttcgagatcaatggcctcaggggcaacttcacagccggcatcaaactggtcgaaaccaagattgagagacttgggatgaaatgccgcgtcaagagcgatgtgaaaagtgccgccatacaaggcggcatcttgggaggcgtgctgggcatcgcttccatgccaataacattgacagcagcaactatcgcagccgccgccggtgtgggccacacactcgctacctacgatcccgactacgaaatcctgaaggactatgtgaacaagcggctcagggtcatatacaaaaagtag

SEQ ID NO: 366635 - DNA, 792 bp, Pseudomonas aeruginosa
atgaaacggatactcagcgtcctgctactcgccttctgtgccaacgccaacgccgtcatagaccattacgcttggggcagtatcgccttcccagacgagacctccaccaatggcctccccgaagctattccgtgtatcacgaagaaagccttcaacggccaacccatgatcaagtgcacctggctggagacctcccgcgaggtgctcatctgggatgcccagcgccagcaggacatgcgctatgtcaaccaggtcagtggcacatgtctgcgcggcaagtgccggacgaacaccgccatcgtgggtgaatggaaccaggatgtcttcttcgcgctgtcgatttggtaccgcatcggcaccagtaccgacggcaagccggtagcctaccgcattgacgcctcccgtcaggtgtcgtatgccgaggcaggttctattctgtaccagttctatctggatattggcgtacctgatgaccagctagttgccacaatcaacgggcgctatgaaggtggttacgcagcgtggcaagcacagaaggaaagtacacaagcgtcgtcacagcagtcacctgccacctcggcccaatcagaatggccggaagtgaaaagtgcctggtgtaacccacgcatggatgacgactgctacataaacgagaagaaggtgcctatcgctgaccttggcaagtggttgcctgccgttgctgaatcgaacatcgaccagttgggcgggtactgcgaggccatcctctgcttcgatagcaaagatcaacctctgggttacatacttcagtaa

SEQ ID NO: 366636 - DNA, 651 bp, Pseudomonas aeruginosa
atgagtgtcgcccccgtaccgccacatcctaaaatctatcacattgcccatgtagatcgtctgccatctatcgtggcagacgggtttctatggtgcgattcggaaattgtgcgccgcgcaccagcgggcacgaccatcggtatgagcggtatcaagcagcgacgtttgaacgaattgagtcttagcagtcaccatgacctccatgtcggcgattgtgtgccgttctatttctgcccacgctccgtgatgctctacctggtctatcagggcaaccatccagagatggtctatcggggtggacaagggccgatcctgcattttgaggccgatctaaatgcggtagctgcgtgggccaacctacagcctttgcgttgggcattcacactgtctaacgctgggtcgtacttttttgaagaccgtaatgatctcgcgtgcctggacgagatcaactggactgcggttcaggctcgcgactggcgggcacacaaggaaggcaagcaagccgaatttttgctggaacaccactttccatggcatttgatcgaacgtatcggcgttcgagatcgcactacctaccaacaagtggtcaacgcccttccggcgcatggacatcggcccacggtcgaagtccgcccggattggtattactaa

SEQ ID NO: 366637 - DNA, 627 bp, Pseudomonas aeruginosa
atggccagagcaacagccagcaccccttcgccgaaagcgcgtgcgcaaataccgcacacgcttggctttggtgtgcctgctacgtccgatccgcatcacttcatggtgatcatccccaaggccagctcgggcaaggtgcaaatcagtgagcacctcggtctacaggcggcaagtagcgacaacgcggtgatcgatcgcgttttgttggatcgcccgcgctggaccgctatccgcgcagaggtgcaacgcgctttcaacgcccgcttagctgtgcacggcatcaaagctggcgcttggaaagtgggtgaaaacctagtggatcgcttgcttggcaaggagctgtgtgtgctggcttgggccgttgagcagatggagatggagaaaattccggttgccgtgcgcaactggctagcgctccgccccgaagagcggtggtggttgttcggcatgaccgctatgagcactggtggggtgatggacacggacaagggttggcgcgcggcacttaaacatgccctgggcgatgtggcgcagagtgagttgcttgcgcccagtgcacgacgagccaaggcagccacggaagtcgtccagccctcgttggggctgttcggagacgaagtgccatga

SEQ ID NO: 366638 - DNA, 1002 bp, Pseudomonas aeruginosa
atgactaatcgcaagatttacacccacctttcccagtccgaaattgctcttcagattgagcgacttgtccaggccatcgaagattccgattcaccggcatttcgcatcaagcaagcccgcacagggtacgaacgcgtccaagagaccaagctctctcggtactttgatcatatccagcagatggtcgacctattcgaaggccgtatcgaatatagctacagtgagcacctgcaagcgttcagggctgcatgtcaggacgtcgggctggagcgccaccctgatggccctgtctgtctgaatgaggagggtacggcctacctggatcatcatcacagcatgagtgtcttggtcgcccggatccgtcagttgactcgtgagcggtggtatctccgtaggaagcatgacctccgccatcagaccaaggagcaggagatccaggtctgcaactacgccgatgccttatgtgagatctattcgcgcatcactatcgtcagggtcgacttccactaccgttcagaggcgcaggccaggctacgagtcgagcgcgtgttcgatgacctgaatgaactgaactacgagcacaggcgtaacccactcttcgagcaccttatcggccacatttattcggtggagcagggagacaggaatgatggcgggggctaccacatccatgctgcctatttcttcaatggcaacgaggtgcagggtgatgtctacaaggccatccagctatgcgagctatgggaagacatcacgcatggccagggctacgtgcacagctgcaaccacgacaaggatcggtacggtgacaagtgtggtatcggtcgcatcctgaggagtgatcgagcaattcggcgccatgtgcataatgcggtgaagtatctggtcaaagacgctcagcatctgcgcttgaagcctgagggagcgcgatgtctgcgactgggccaactgaagcctccccgccattggggaaggacgctagtcgtacagggtgcgaactga

SEQ ID NO: 366639 - DNA, 852 bp, Pseudomonas aeruginosa
gtgaagactgacaatcacgcgcgcaccaaagatgccgacaggctgagcgaactgctccaagaacctcatcgaaaccatcgccacgacatctggctgtggctgcacctctaccattgcaaagaggcgaggcttgacctcagaacctgcaacggcctaaccatgcgtgacgagatagccagagccctgagggaccataggctcttccagtcccgcatcccccaagagaaagatcgactcttacttccaaacgaaaagctggagtggatcgaagaggatgaacggcagcatcaatggctgatccgcgagatcgagaaaatgactgacttgcgcctacctcgcggcctagtccacctcaccggcagagatagcctcatcggcatgatcgacctttgggatatcgatattgtcgaaaaggcatcggaggtcgaacagcttcaccgggactggctcagacacaaggcgaaggacagtgaattcgaatggttcaccgataagaaagagagcgaaaagcgctgtgcctgcgcctgggagtggcttaaaaagaatcatctgccgtcgcactctaggcaaacgccaatcagcaactaccaagagctgctgatgttcttcgaccaagaagatgtaggccgtcacgaaaggaaggccatacttcgagagatcaaaaggcgatggagtcgtaagcaatttgacgagcgtactgccgacaagaagcaggtcaacgtcattctctcgaaaacggtgatcgcccagcttgatgcgctagcgaaggcgcacggcctgaagcgtgctcaaattattgagaacctggtgaggatggaggctgacgctggcgtatacctagccgaaagctag

SEQ ID NO: 366640 - DNA, 663 bp, Pseudomonas aeruginosa
ttgtacctcctcgacagtgacgttgcacgcaagctctgccagtaccagctcgtccacgaactggctcgtgccctaaagtgccccctggctgggtttgcggtgctgccgcagcttgcgtttcagctgaggcttagggatccccatgccgcactgaaaaagctcggctccgtagaggccgttacgctggccacagagttggtgagccttgcaaatgttgtggagctgaaggtcgagcaatctaactacgcgttaaacattgagcgaccggacatcgattccggcgaggcagtcctattcgccgcgcttcaccagagtgatcaggacagtttgctcagtggggacaaaagagccttcgtagcgttatctaagatcaatgacgagctagtcgccggctgcatgtgggcgcgcatgatctgtctagaggaggcgatcatgatcatcctgaaaggggagtccttcgagcttgtatccacaaaaatacgggcgaggactgatgtagatagcgcattgagctcgaccttcggacgatctcaagccttggcacaagaaggcgtcatcgaggctctatcgagctatgtcagggcccttgagcgtgacacggatggcaaatgggtgactctctgcgtgaaacatccccactgctctacgggtgctacaacctaa

SEQ ID NO: 366641 - DNA, 147 bp, Pseudomonas aeruginosa
atgaacaaggcacgtcgcaagcaactgcccgaaggcctgcaacaaggcgagcgtggccaggcaatggagcaagccgccgagcagatgggcaccgcactggactcgatagacgaagccgtgcaggccctggaagaagcccaggcgtga

SEQ ID NO: 366642 - DNA, 267 bp, Pseudomonas aeruginosa
atggtcaccgtctacacgtaccacgtaaaagccttcgcgcctgaccctcgaaatgagggtaactacttcacctatgacagtacggttgatcgcgattcacctctgaacaatggccaggagtacgacgcactggcgaaggggctgtcggatcacgtttacaccgaaacgtgtgttcgggtaggtcagggaagctttgtgattcaaaacgtcgagctgctcggtacgcgggaagagaagaaattccccgcgtccggtctagctaagtaa

SEQ ID NO: 366643 - DNA, 486 bp, Pseudomonas aeruginosa
atgaccaccatagtcgatccgcatgttgggctcatcagctaccaacaagcgcttcttgacggcagcatccgccccgttcggtgcgatagccatcccgagcttttcgtgatgcacgatgagccggagcaaggtgtccagcgcctcacctacgccttcaacgcaggcgatgtagcgaaagcctatgccgtctacatccaggccgacttcctggagggaaagccgtgctttggagtcgggtacgcgacggccaaacagttccgaaatcagggcttggcgacagaaatcgtgaaggcgagcctggaggagcttcgccggggtatggagcggcacctacgtgagccgggattctacgtcgaggccatcgtaggcttggataacctggcatcgcagaaggtcgccgcccgcaccctaagcgacacccctgaatcgaccatcgatagcgtctcgggcaaacctgcgttgcattacgtcaaacaggttggctga

SEQ ID NO: 366644 - DNA, 666 bp, Pseudomonas aeruginosa
atgagcactgatcagcagagcatcttgaagtctgccatggcagtcatccaggacttgggcggttgttacaccgtagaagaggccgataagcacgtggagcagttccgtggctacgtgcgagcgatcaccgaacatggtcttgtgccgatggagtcgcgttcacaacttgagggagaaatcatcgcagctcggagagcatggtcctccgtccgcgctgttaccaaaatgcgggatgagctacgggaggtgtctgaagccatcaatgagctgcctactgctgccaccgaacgagatctcttcaccagcattctcggtgtgaaaaagcaaatcgggtatctccaaaacgagggagcgttgtcggtagcagacagcgaaaacctgcgaacgcgtgtgcatgctgctgcaaccgaagccggcaagcgcttcggcattgcagacccaatcaaggccctccaagaacaagagcctccaagcactgtagtgacggtgcgggaaatgcgcagtcttctagagacagtgcctgatagctatcaggatttgcctctggtgagtgaagatcaaacgttctacttcgactgctccaacgattggacgctcactacccgcaatcgccgcacacatagctttacgagcggagatgatcctgagcaagtcattctgatctag

SEQ ID NO: 366645 - DNA, 1761 bp, Pseudomonas aeruginosa
atgcccgagcggttaaccctgacccagaatgctcagttttatcgtgaagatgtggcgctgacaaacgaagccattcgtaatattttggatgcggcttctgataacaaaacgcttggttctgtttttcttatcgaccagatagacgcagtacgtgagcttgaggacggcagtcaatttcggttcagtctgagagtattcccaaccgcgagacctgtccacttctggggcgagcctctatcagacttaatccatgcgctcattttgatcatccagattgacggctatgtggcggtactgaagaagtcctgcgcaagcgttaccgaggttctagaaagatacctcacccccatcaagagttcagagttaacggcttcattcagcgatgaagaagctgagtttcaaaaaatctcgatgcggaacatgactgtttcggaacgagcaatgcgcagtaaggcttacgaggcagcagatctgaaaggtctgctttccttacacgctgcgggaaggtcaattccctactttttcaaacttaagctcaatgggcaagttaaaactatctcggcacaaagtggccgagtagtggagtcctccgagcgaaaatcacttaacgacgtcgtgaagtgggttcgcctgcaaattgagcagatcaaaaatccttctggtgaaaaagaattcttagaagcattcgcacagatggttgagctagatatcgtatgggatgccacgcaacctactgccgcattaattgagtcatctttcatcgttgataatttgctagagaaggatgtgccgttaatctatacgacaaaaagaggtcgatctttcgagctgacaggaaagcaaattagcgcattaattcaccaacttgaaaaggtatacgaagttaacccagcaccgggctttgaactaaatggcacgagcaggtcggccagccttaagaaaaataaaaattcaatttccttgagttccccagctttacggaagatcaagcttgaggaaaatgggaaagagcgcaccctacaggcatttataaacaagaatgacctgattactattagttttgccaatccgcaatatatgtactttatggggcagtgctttaaggatggggcgggcctaaatgaaataccgagccttctcaaatcgtttgtggcgattgacgatctagcgctagcgatctctgaaaagggtgattacaaacccgccaggaaaaaatttgacgcaaattccgttttcggaattatcgaaaagcatttcagcaagaatgactacgttttctgtgacgatctaggtgatgaatgggcagatcacatcgccttcaacaaaaaagagcactcagtaagttttattcactccaagcacggagatgtcagtaagtctgctagcaatctgcatgatgttgtaggtcaagcgataaaaaatatcggaaacatggacctagacttgcgcacattcattcgaaagtacgacgaaaagattctaacaaactaccgcgacggcacaatgctgcggataaggaagaaaattccaggcgactttaaaatctaccttactgaacttagacaggattatcgattcaacaagcgctgcataatctgctgctcgtttctatcaaaggcacttattgagagcgagtttggtaaattgcacagaggagtgcgagtgcctggaaatataacccagatgttttggattctttcatcttttgtgcatgcaacaaaagaagcaggagcttcacctattatctattgtcggccataa

SEQ ID NO: 366646 - DNA, 882 bp, Pseudomonas aeruginosa
atgagcaaaaaagaagataagacagctcaaatttcttttgattacaagaacgtgattgaaacgctctcgcgggtggaggaagcattcgctgcgcgccgattaaagtgccactccggtagcgcacttggctcgttgttttcctcaatacgtcggatagctaaaaaatcagagaaactgaatgaaagacagtggaggatatcgtttattaagtccactgaggctatacgtatactaaacgctgtcgaggccgtgcttgatgacattggagcgaaggaggcgattcatcgtattacaacaagtgacatgaatcttggcacccgacaagagtctaatggaaaggattcgttatgggagcttgatttgtatagacgtttcaaactaggaggcgtacccgtttatttcgaagagccggatttagtagtgtctcttggtgagagctacggcgagtacgctatagcatgtaagaaaatatattccagagccggtgttcaagaatccctcaagggggggcgtaatcaacttgaaactcatggaaagccaggagtgattgccttcaatctagatgatattctccctaggggtcctttgtttgagttttctacagcggctgaactcaagcagcgcattgataagtttaatacaaaatttatacgggaaaatgaacgtcactttgtacgtatggcaagtcaaggggcatgtgatggcgtgctggtctccacgtcgttcattgctcacgtgccagatatgaatccgccagttaatgtgattcggacatctgcagcatggactagtcgaaaggaaccgaatgtacaggatcgcttcaacgccttcattgagtgtcacgacagaatctatgagaatgctcgcgtgcgatcctgttga

SEQ ID NO: 366647 - DNA, 906 bp, Pseudomonas aeruginosa; identical to SEQ ID NO: 339158

SEQ ID NO: 366648 - DNA, 609 bp, Pseudomonas aeruginosa
atgattgaattgtttctggaaaccggtatccgccgcggagagcttctgaagctctacaccacggatatcaaccaaggttctcagcatgcctatgtcagcatcaatgaccgcgaacatgacccagacgacccgcgtactgaagagcctgcgctgaaaacacacggacgaaccgtaggtatctccgcgcagttgtatgaggtctacgagcactatatccagagcgaacagcgccctctgcgtaacggcaaaccgatgaaattgctgtaccgctatctgttcatctctgacagaggccgcccgctgtcgattcgcgcattgtcgaatgtccttgaccggctgtttctgaccattgaactggctcatcccgggttgttgcctagtctttctgcgcatgactttcgccacaccttcgccgaccgtttcttagcttacctgatcgagcaacgtgggcacgatctggagcgcgccacggacgaactccgacgagtctgcggttggtctgacacttcggcgatgccgcgccgttatgcgagtcgttatctcgccgagtcggccaaccgccataacgcgcagcgtgcctcggcagcctggagccgacttgaaagttaa

SEQ ID NO: 366649 - DNA, 402 bp, Pseudomonas aeruginosa
atgcctggcatcacccttcaattgtctggacaagaagatgctgcgctggccacccgattggccagtgatctcaccatcttgacttgcgcggtactggacaaacgggcggaacatacgatggtgctcgtccgtttcgtaccgcacgaactctggtttatagacggccggtcgctggccgaacacggtcgaaattcgttccgcctggaagtcacaatcactgacgagaccaataccaaggcgcagaaggcgcgttaccagcgtgaagcgttcgatcttgtcggcggaattctgggcaacctgcacagccactcgaacatccacatcatcgactgtcgggccgccgcgtatggctatggcggtgtaagccaggaataccggcatcacaatccggaagtggcatag

SEQ ID NO: 366650 - DNA, 813 bp, Pseudomonas aeruginosa
atgctgatgcgcgagaagggtggggcgctgaccgagcttaagcagtgggcccacgagtattacccctacaacgacccggcggtgaagagcccggccgataccggcgactttgaagccaagatgctctacgacgtgttgtccccagcatcgcgcgcgggcgagatgtacctggtgcacggttacctggataaaccacaggactcctggatctacttcccaggccagcgccgcgtgcgccgtgcgccgtcatttgcctatgacaatccgatcgccggcaccgatagcctgtacttcgtcgaccagatcaacatgttcaccggggcgctggaccgctacgacttcaagctggtcggcaaaaaagaaatggtgatgccgtacaactcctacaagttgatcgacaagagtaacaagttcgaggacctgatcggccaggactacctcaaccgcgacgttcagcgctatgagcagcaccgcgtgtgggtggttgaggccacggtgaaagccgacaagcgccactcctttgccaagcgtgtgttctacatcgacgaggacagctgggcgctgttgcacgtcgacatgtacgacgccaagggcaacctctggcgcgcgcaggaaggcagcatctgggccaacccgcagacccagtcctgcacaggcttcgagtactcgatgtacgacctggtcgcacgtcgttacctagtcgacggcttcacccaggaaggtgaggtgctcgacataaccgccggcatcgaaggccgggtcagcgacaagatgttcaacgccaatgaactgcgccgccgcggcgaacgctaa

SEQ ID NO: 366651 - DNA, 1005 bp, Pseudomonas aeruginosa
atgagtgaatcgaacctgctggccccgtgggtcaggcgatttctggtggagtatctggtcaccgtgagatgcatggccagaagcacccagctcagctaccgcgacacgctcgccaaggtcattcggtatgctgcgcacgcagtgggcaaacgacctgacctgctcaatgtggacgatctcagtcgggagctgatcacccagttcctcccgtcaacggcgagtaacaaggacctcaccgcgaggaccatcaaccagcgtctggcagcgctgcacacgtttgcccgcttcgtcggcgagtacggcccggaacacctggaatggtctgggcgcattctctcgattcctttcaggaagtttgcccgccctcagatcccttacctggagaagccagagatggacgcactcttggctgcaacggatatgcagacggcgcagggaatccgtgaccatgcgctgttgctgttcttgtacaacaccggatcccgcgccgctgaggccgcgcagctcaaggtggcggatttgcaactgcaggtggcgggcggcacccgcaacgcgttcgtcaagctgcaaggcaagggtggaaaggcacggctctgcccgctatggatgcgtaccgccgatgagctctcatcactgatttcaggacggtccccggagcagcacgtctttctcaaccgttgtggtcggccgataacgcgcttcggcgttcacgccctggtggagcgctatgccaggcaggtcgccaatcaattcccggcgctcaaagccaagcgcgtaagcccgcacacgattcggcacaccacggcaacctacctgttgcgcgccggggtcgacatcaacaccattcgagcttggctcggtcacgtctcgctcaacaccacaaatgtgtatgcgcaaatcgatctcgagatgaagtcgcgtgctctggcacaactggagcctgcgggcaagtcgccgcggcggccgatgggatcagacttgatgcagtttctgcgttcgctgtag

SEQ ID NO: 366652 - DNA, 942 bp, Pseudomonas aeruginosa
gtgaagctcctacacgcattaacgctatacacagagctcatccaggccaatggctgcgacggcgcaagtatcgcaagcgtgttgcgcctgttcgcgaaggctgtcggcggtgaccgtgagctggactcgattgagccttggcaggtacgggcatttctcgacggcaatcggccactgacgcggtactggcaccgcaagcattccgccttgctgggcttctttcgcttcgccctcgcccgtggcctgctgccgtgcattccgctgccgctcgatacccccaggtgccggcagatcttccagccctatgtgtacaccgagagcgagatggttcggctcatcgacgcaatcgatggtttgcgcacgactcggattacgccgcgcacctttcgtacgctgctactgctcttgtacggcaccggcctgcgtctgagcgaggcgctgcacctgtcccttgccgacgtcgaccttcagcagaacttgctgaccatccgagacacgaagttctacaagacacggtgggtaccggttgggccgcaccttgcacaaatcctgcgagactacgtccagacctttcacgcaacgcgcgacgccaagtcggcgtcgccgctgctgatctgcagtgacggtggtccgctcaaggcgagcggtgcacggcgcgcctttgctcgactcagatcgaaggccaacatccgacgtagcgactgcgcccgctaccaaccacgactccacgacctgcgggccacctttgccgttcgccggctgatcacatggtatcggcagggcgccgacgtccagaagctcctaccgctgctgtccacctaccttgggcacacgagcatcgcagccacccaggtctatttgcccttgacaccagaattgctcgtcgaggcatcgacccgctttgagcgctacgcaacaggacaggaggatcaccatgagtga

SEQ ID NO: 366653 - DNA, 795 bp, Pseudomonas aeruginosa
atggtcgcagcgctagggcgcgatcccagtaggctcgattgggaagccgtcgatcaggcccttgccctgaagggacgccgtgatggtctgacgcgatcctcgatgcagacctatgcctacaacctgcgagctttccttcgtttcttggaggagcacgaacagtgccgaccaggattggcggcggccattcggcccggccggatctatcaaggtgaaacgctgccggccagcccttcctgggaagcggtctgtcaactgctggacgggatgcaggatgaacgatccggcgcgatccgcgatcgcgccatcgttttgctgttcgcacagtatggtctgcgggcagccgaggtgcgaagactgtgcctggatgatctcgattgggagcaggccatcattcgggtacatcgctccaagcagagcccgcgcgttgagtgttatccgttgactggtgctgcagccgacgctcttgccaagtatctccaactggtgcggccaaagacaccactgcgcgaggtgttcctgcagttgcgtgcgccgtatcagcccgtcagcggcagcgccctctggcaggtcgtgagccggcggctgcggccgatgaacctggccatcaagcaccacggcccgcatgccctgcggcacgcctgtgcgacccgcctgctttcccgcggactgagcatgaaggaaatcggagactttctcggtcacagccaccccgcaaccactgcgctctacgccaaggtcgacatcgtcggtctgcgccgagtggccgacgtcgatctcgggaggttcctgtga

SEQ ID NO: 366654 - DNA, 711 bp, Pseudomonas aeruginosa
atgtccggtcacgatctaccgaaacagccggtcacggtgggccgaaatacgcacgaagtcaaggagatggttgagctctacgcccaggcggctcggaatgctctcgaagctgggttcgacggtgtcgagatacactgtgccaacgggtatctggtaaaccagttcatctccgcccacaccaatcaccgcgacgacgaatacggcggttccctgcaaaaccgccttctcttcctgcgggaagtcacccaggccgttgctgatgtcgtcggcaaagaccgcatgggtgtgcgtttcgccccgctgttcaccagcaccgaagaagaccgcgtgtatcttggcctggttgaggaggatccacacgagacttacgtagaggcagtgaaagttctggacgacatcgggattgcttacctgtctattgcggaggccgactgggacaatgcgcctgatctgcctgaaaccttccgcgccgacgtgcgaaacaacttcaaaggcacgattctctacgccgggaaatacacggcagatcgtggcctgcggatggtcgagtccggctgggctgacttgattgcattcggccgcccgttcattgcgaatcctgacctgccgaagcgcatcgccaacaactggccgctcaacacggtagacccggccaccatgtatggcggaaccgacaagggttacacagactatccgacttatcaggaataa

SEQ ID NO: 366655 - DNA, 687 bp, Pseudomonas aeruginosa
atgaaactgtatcagcccagcacgatcccctatcaacagcacaaaggttttcagacaactttcaagtctggccgtcttagtcttggtctgttcttccccatcgaagccttcgagggcgacaagcccactatgctcgaccaggttgcgctggccaaacgcgccgaggaactgggcttttcggcactttggttccgtgacgttccgctgcgagaccccaccttcggcgacgtgggtcaggtattcgatccatgggtttacttgggcttcatcgcagctcaaacaaaagaaatttccttgggaacggcctcgatcgtgctcccattgcgtaatcctctgcacactgcaaaagcagccgcgagcgttgatcagctgagcaatgggcgactactgctgggagttgcgtcgggagatcggccggttgaattcccggcattcaacatagatcccgagaggcgggaccacatttcccgcgagagcctagaggtactcagacaagcccaacgaaccagctttgagccgttgtattggagcgatggtgtgctggccggagctgatttggttccgaaacctacaacgactgaagttccgtactttgtgactggcatagccgacaatccctggattggattgcgagcaacagttgcggctggattaactatcctcgcccaccaaaaatgcagcagctaa

SEQ ID NO: 366656 - DNA, 306 bp, Pseudomonas aeruginosa
atgagcatcgatatcaacgaagcactgaaggccctagataaccccacccgcttggcaattctcgcctggttgaaggacccgcggacgaactttccagagcaggaggtcgaccctgagcaagtaggtgtatgcgtgagcatcatccaggagcgtgcaggcctttcccagtcgactgtgtctttgtacctggcgtcgctgcagcgtgctcagttggtcacttcgcagcgcatcggcccttggacctactataagcgccatgaggagaacatctctgccttctttgagaaactccaagctctaatctga

SEQ ID NO: 366657 - DNA, 123 bp, Pseudomonas aeruginosa
atggaaattctggataacgaaagcaacctggctgcctatcttggaaaacagagcggaaagaggattatgatcgtttcggccttcgcaagtagcaccgaatcgctagtcaactccctcctctag

SEQ ID NO: 366658 - DNA, 204 bp, Pseudomonas aeruginosa
gtgaaacccctgcggcctacttaccagcgcaacggcttctgcctgtggctcaagcgcttggaggctgagcgcttcaagtcgcatccgcagcctggcgacgatgcgatcgtgctgacggcccaggagctgaactggttgctggacggtatcgacctgtggcgcaaccggccgcatcaggtgttgaccccgcgattcgtggcctaa

SEQ ID NO: 366659 - DNA, 1230 bp, Pseudomonas aeruginosa
gtgcagcgaaaagcattcgagataccgaagtcgctggtgtggatggcgtatcaggatgtacgccgcaatcgtggcgcgccgggctgtgatggtcagacgctcacggactttgatcggcaacgcgatcataacctctaccgcatctggaaccggctgtgctcagggtcgtatttcccgccacctgtacgggaaaagcgcattccaaaggacaacggcaaggagcgcatccttggcatcccgacggtctccgatcgagtggctcaaggggcggtgaaacgttatgtggaggctgtgatcgatccgattttccatcctgactcatatgggtacaggcccggaagatcggcccacgatgctttgcgtcaatgttccattcggtgccgtcgaaagaactgggtactggaagtggatatcagcgcgttcttcgaccacgttgggcacgacctgatcatcaaggctctggaacatcaccatatgccgaaatgggtgatcttgtactgccgacgctggctgcaagcgccgatgcagagcgagacggggttgcttcaggagcggggacgaggcacacctcaagggggtgtgatctcgcccttgttagccaatttattcctgcattacgcctttgatcgttggatggacaggacgcatcgtggcgtgccgtttgaacggtatgccgacgatattgttattcactgcacaaggatgagcgaggctgttcgaatcagggagagcctgacgcgacggatgagtgaagtgggcctgaccatcaacgaagaaaagtcgaagattgtctacatcgacacatttgagcggcacaacgtcgcgacgagcttcacctttctcggatatgacttcaaggtgcgaaccctgaagaactccaagggcgaactctttcgtaagtgcatgccgggagcgtcgatgaaggcgatgcgcaggatggtggacacgatcaaacactggcgcatccatcgatccacgacggatgacctgagggatttttctcgcaggtacaatgctgtgattcgaggatggatcgaatactacggtaaattctggtacagaaacttcagctatcgattgtggagcgcgttgcaatcgcgcctgctcaaatggatgaagagcaagtaccgaatctctatacgtcaagcggagcatcggctgcgtcttgttcgaagagagaatccggagctgttcgcgcattggtatttactacgtgcatcgaatgtgtga

SEQ ID NO: 366660 - DNA, 384 bp, Pseudomonas aeruginosa
atgggtgtggaggtgctttcagcggttgcagacagagcgtacttcaaaggcgaggaaatcctggcgtgccatgaggctggcatcaccattttcgtgcccaaggcactgacttcgggcgcgaaagcgaccggccgcttcggcaaaggtgatttcatctatgacgcagcaaagaatgagtaccgatgcccggctgggcaaagctttatctggcgtttttctagcctcgagaaagggctgaagctgcaccgttactggagttcgcactgccaaggttgtgcgttgaatgagcactgtacgcctagctcagagcggcgggtcaaccgcagggagcatgaggcagtgctcgaggtgatgccgcgtcgcctggatcaaaccccgagatga

SEQ ID NO: 366661 - DNA, 270 bp, Pseudomonas aeruginosa
atggctcgcctcggcttcataacgcctagcgattttttccagggctgcggccgtggcgggatactccgactccagtgcttcagcccatttccggaacttagccatctcggcccgttcaagcgcaccaccatcaccaagcagcctggtcgtgacccctcgccggtctatctggccgaccagaaatccgtccaggagcgttttgtcctcgaactgttcgatgacttcccgcacggcttctgccggccaaataccgtctgcgccaaccggtga

SEQ ID NO: 366662 - DNA, 261 bp, Pseudomonas aeruginosa
atggaagtgaaagcccgcgacctgagtctgagcgatgttgtcgcgctttggcccgatgagctgcgctggttctgggttcagctctacctcaagggcaggctccaggcgttaggcgcgttcctcctgcacctgctcgggaagatgttcggcgcggtatgcatcctggcctttgcctatgccctcggggcttccctgacggcaggggcgcttagcgccgtcttcaattatccgtttcacctcaacgccgggttcggccaatga

SEQ ID NO: 366663 - DNA, 141 bp, Pseudomonas aeruginosa
atgaccgttgatagaggtgtaaccatgcgccgagcactgatccccatcggcatcttcctggtcctcggcctactgctgatcctggccggtgatgccctgatgctcggccgccgcctcattgcctggcagtgggggtgctga

SEQ ID NO: 366664 - DNA, 861 bp, Pseudomonas aeruginosa
atgatagcgacttcggtcatttccacgaagggtggtgcaggcaagactaccaccaccgccaacctcggtgcattttgcgccgatgcaggcatacgaaccctcctcatcgatctggaccccgtccagccctccttatcctcgtactacgagcttccggaagttgcccagggcggcatctacgacctgctcgccgccaacataacggacccggcgaggatcatctccaggacgattatccccaatctggacgtcgtgatttccaacgaccagaacaatcagctcaacaatctactgctccaggcgcccgatgggcggctacgcctggcgaacctgatgcccgctctgaaagaaggctacgacctggtgctgatcgacacccagggtgcgcgttcagctttgctcgaaatggttgtgcttgcatcggacctggttgtttcccccctccaacccaacatgcttaccgcccgtgagttcaaccgcggcaccatgcaaatgctcgacggcctacgcccctatgagcgtctcggcatgcggatccccaatgttcagatcgtcatcaactgcctggaccagaccaatgactcccgggcaattcacgagaatgtgcgtgccatcttcgatgagcatcaggacatttctgtgctcgaaacgactgtcccggatgccgtcgtgtttcgcaacgcagcatcgcgcgggctaccagcgcaccgcctcgaaacgcggcaaccctccaatcgcacatcggcgcccgcgctggaaatcatccgcaacctggccatcgaggtctttcccgagtggactgatcgcttcctggcgctgacgccggaggcggttgcagcactggtcaagggagggcgctga

SEQ ID NO: 366665 - DNA, 729 bp, Pseudomonas aeruginosa
atggcgaagactcctatcacccaagcccgcgacgtcgacgcggaacttgtgctgcaactgaacaagttcggcagcgccgccgaccttcggagccagcaggccaaattgaccggcgctgcgcgagaaatacgcaagctgactggtggcggtaccgacttgttcgggaagctgggttgctacttgagcttcgaacaaaagcagctcctacaagacgctgcgcgcttgctcgactcggtgaacaagcaggtcgagcatgcgaaggaaaagcgtgatcgcgacgagaaacaagccaagaaacggcgtgagctgcgtgggcgcctggccaagcaactggtcgcctcgaactacccgcttccgggaaatacgctcgaagagcggctggagatcctgcagatcgcgttgatctacaaccgtgccaaggtgttcgatctccagtactccacgcaccaactccactcaaaactcaaacgctggttggagcgtcccaagcagctcatcgggtggcgcagtgaagccgagtatttcgctagtaaggtggggagcctgcgatgtgacttcattagccatctgactaacgaaatcgcgtacgacgatggcagtgaagtcgaggagcgcctgcgcgtaatcaagcagaaggtcgctgactgcaccgctctgaccagcgaggagcaggaaacccttcggctctggaaagacgctctgcaatcggctccggagggcctcatatga

SEQ ID NO: 366666 - DNA, 813 bp, Pseudomonas aeruginosa
gtggacctcgcaatccagacactcaacggcacagttccaggcaccagagtcaaactgctcgggttccagcatacgaatgttcgtgctgccgcagagcgggcagggcttgagcaatggcgtgcgcgacagataatcgcggcgaacgatgccgcgttcatccctggcctcaattcgataggctaccggctcctgcttctcctgcttctcctgcttctccagttccgccagcttggactcaagcgaggcgacccttgccagggcggcgtcgcgctgattcaaggccttggcacaagcctcgctgagcaggcgctcatgctgttctgctgccgcatcaagatcgattgggctgaggctctctgcgaggggcctcacgtactggcacaccgggccgttctcggtatcgtggatagacagcacgaaccaaccggagccttcgggccgcgttgggatccactcgctgtatcgttggtccgatcgtgcagagtcgtagaggcgaggcgcatccgactccatgaagacggtctgcaactcaaggccaagccggcgcagcgtttcctgcgcttcgttggaagagcagttgtcggccaggtccggatagttcggatgggtccagaagccgaactgatcgcgctcgaccaggtgggcctgaatcataggtttcatgccaggcctcccacgctcatgccgagcaccgcacttgcctcggcggccagttgctggccttcagtgcttgatgagctgccgacgaagagcatcagccgttcgatgaccctcacagtgtcctgcgagggttgggcgaactcggccaggtga

SEQ ID NO: 366667 - DNA, 702 bp, Pseudomonas aeruginosa
atggacaagcaaaaagtcctcgccaaggtcgagaagctgatggccctggcgaatgccaagggggccacgccgaacgaggcggaaaccgcattgcgccaagccgcgatcctgaagcgccagttcgacctcagcgaagcggagatctcggcccacacggtggaaaccgcgtgcgtacccacacgtaccaggcgctctccagcaccgtggctgcatgacctggccgggatctgcgccagttccttcggctgcgactacctggcggcatacgcgatgccagcgggctggacgttcaagttcatgggtcgtgggatcggccctgaactcgccgctcatgcctactcctcgctccaccaccaactggtggcggcgcgctcggctcatgtcgcccaacagaagcgctgcaagctgtcgaccaagcgccgtcgcagcaagctcttcgtcgaaggctggcttctcgcagtgcgttcgctggtacgtgactttgccggcaggccggacgagtcgactcaagcagccatcaaggcctacctcgaactacaccatccggagctgaaactcctggagccggcagcgccgacgaagcccctggcctatgaccaggcttcgctgcacgcaggctgggagcacggcaaaaacactcgcctgcaccgcggcgtcagccggcgagttcatggcgcgctcgagcagggaggttcccgatga

SEQ ID NO: 366668 - DNA, 696 bp, Pseudomonas aeruginosa
gtggccaacatcatcctctcctacaagggcgagacacggaaacttcaaggattgggcccgcagacgctggtgaaaaagtccctcccggcggaccttcctcaccgcactttcattcaccgcaccgttatcggcgtcatcgagaatgccctgcagctggtccgcaatcatccggagcccaaattccactgggtaggcggtatcgacagttactcgctgcgcgacctggaggatctgtacgcattcagccgaggcctacgccaaaacgtccagaacaagaaactgctccgtgactaccgcgactacacccagtacgtggagatcgccgagatcagccaggacggtgagatgcttcgctcgatcaagatcatatcgacctaccctgatctgcctgcgcggatccttgagcttcgctcactgacccttgacgatgagctggacgcaacaatcaccctgaccaccgcacacaaggccaaggggctggaatgggatttcgtttgcctgtacgacgacttcaacgcggacccgctgtcccccgacaccgacccaggcaagcgcgacgatgagttgaacctgatctacgtcgcagtgacccgagcgatgaagatcctcgccatcaacagcttggtgctgtcgatcatgcagcggtacgtggacgacagacaactgaaggagcagatagctatctgtaaaaaatga

SEQ ID NO: 366669 - DNA, 234 bp, Pseudomonas aeruginosa
atgcacgtcactggcgcgcagctcagtggccttacgaatgatcttgaccacgcgctcctgcatctgggtggcgcgctggccatcgctatcgaccaggccgtccatggcgacggcgcggtagagctggtgaatggtctgcaggtcggtgaggttgagctggtatcggaagccacggcgatcgagacggtcgatgaacgacagaacgtgaatgtcgttctggtggctctccgatag

SEQ ID NO: 366670 - DNA, 234 bp, Pseudomonas aeruginosa; identical to SEQ ID NO: 366669

SEQ ID NO: 366671 - DNA, 1890 bp, Pseudomonas aeruginosa; identical to SEQ ID NO: 328713

SEQ ID NO: 366672 - DNA, 423 bp, Pseudomonas aeruginosa
gtgctacccggttccgcagtgccgctgaggctgctgccgttgctcaggttgacggtcggcgtggtcggcgccacgccatcgacggtggtgctgccctggccgctggtgttgcccgccggatcggtggccgtggcgttgaccacggttccatccgccagcggcgtggacggggtgaagctccagttgccgctgccgtcggcggtgacctggccaatcgggttgccgttgccgtcggtcagggtcacggtggcgcccggctcggcggtaccgctgagcgtggtgccgttgctcgggttgagcaccggagccgccggggcctgcgagtccacggtgacgctggcgcccgggctgctattgccggcggcgtcctgggccaccacgttgaccacggtgccgttggcgatcggcgtggacggggtgtag

SEQ ID NO: 366673 - DNA, 228 bp, Pseudomonas aeruginosa
atgatttccgccctgtcctgcgatggctccatctcgattgcgccggatggggcacccctgtgttcgggcatgtgggtcttgacccatgtgccggagcagttcgacccgtcgatgctggacaccgaagcactcgcccaggcgttctcggtcgggttcggtcttgtcgcgacggtcttggtcggcgccctgggcgtcaaggccgtactcgacttcattaaaagagcttaa

SEQ ID NO: 366674 - DNA, 237 bp, Pseudomonas aeruginosa
atgagcgcctacagcctccagggcgtgtccctatcttccagcgagcgtcggtcgctccagcttcgccagcaggcccgcgccgctgtcgatcgcagcgtgttgcaacagaccgtcgcccaagcgctccaggcgctcgaaaagcacaaggaggagggcggcaaggcttccaatccttggatcactgtcatcaacgaaaagggcacgccgtgggtcggtgatgcattcgggtggtcgtga

SEQ ID NO: 366675 - DNA, 501 bp, Pseudomonas aeruginosa; identical to SEQ ID NO: 341455

SEQ ID NO: 366676 - DNA, 192 bp, Pseudomonas aeruginosa
gtgctggaactgctgcaaagccgcgagatgctggcccgccttccgttcgccctcgggccgctggaaggccatcggctcgccatcgacgtgccggcgctgaccttggcgctgggttccctgatccgcagtgacgtgctcaccgcctatccatacccggccaagatctggacgccggaagtggtagcggcctga

SEQ ID NO: 366677 - DNA, 900 bp, Pseudomonas aeruginosa
atgcgagagccgctcctacagccgggcggcggaggaaatggcccggccctgacccagccggcagtcagcctgcagatccgccaactggaagagctggtcggccagccgctgttcgagtacgtcggcaagaagctctacctgaccgatgccgccgaagccctgctgaagaccagcaccgacctgttccagcgcctggaaagcctggacatgcagctctcggacctgaagggctcgctgcagggccagttgcgcctggcggtggagtccagcgccaagtacatcaccccgcacctgttcaaggcgttccagaacctgcatccggaagtcagcctgagcctgacggtggtcaaccgcacccaggtgatcaagcgcctggccgacaaccgcgacgacctggtgatcatgtccctggtaccacaggacatggccctggagttcctgcccttcctgaacaacccgatcatcgccgtggcgccgccggaccatccgctgtgcaacgccgcgaagctggccctgaaggacctggagcccttcccgctactggtccgcgaaccgggctccggcacccgcaaggcttgcgaggagttcttccagcaacgccgcgcgcacttctcgcagatccaggagatcgcctcgctggagtccctgcgcgaaggggtgatcgccggcctcggcctggccctgctgccgcgccatgcggcgcaccaggaactggccaacggcctgctgcgcgaactaccggtggaggaattgccgctctatcgcagctggtgcctggtgcacgccaagggcaagcgcctgagcccggtggcccaggcgttcgtcgccttcgtccgcgaggagcgggcgctgatcagccagctcgctgggcgcttcgccggccctggcggttcgagctga

SEQ ID NO: 366678 - DNA, 630 bp, Pseudomonas aeruginosa
atggaatacaacgagagaaaatgcccgttctgcgccgaggtcatcaaagccgaagcagtaaaatgcaagcactgcggttcaatgttgagcgctggacctgcctcaggtaaaccgaccaagaagggactcggcccattgggcggaatagcgatagctgtcctggggggaggggttttgtttcttggatatggcttttatgtaggttcgacgccggaaggcatggctcgcagtcaggcacgtgctgccattgatcaatgtcataaggatctagagcgatgggcgcaaggaagccgagagtggcagatgatttatgacacctgcgaggtgctggaccgcgaacttcgcactggaaacctttccaggtacagcgctaggcaatccagcgaatcgaggctggaagcatatccttcggcgaagggagccaagatggttctgcagattggtcagcaatcggctccgctcaagtcggcagcgccgttgcgtgattcaccggatattgccgcagcggttatccgtagagctgcggttggtgagcgtttagtagtgcgcgagatcaaggacggatggatccaggtgtctgaggaccctgctcgcaaagagtgggtgatgcctgagctgctggactggtag

SEQ ID NO: 366679 - DNA, 1077 bp, Pseudomonas aeruginosa
atgcgcgttccgatctatccgaatgatttgcagccccgtggatccttcaagagactagccggcttcctcaaaaagaagtggccaggccatcacccaatccagcaagcattggccaacgaaattctgtccaaagggttggggtatctcagttactttcaagtcagaaacacatccctcacctgccatcctaaggcgcctagaccttcagaggccgacgtacgcgcgcacatagcagctgagatttcttcggctttgaaccaaagcaacgacacctccgtaccgcgtagtactgtggatcgcttcgtcgacgccctccccttgaacgcgctctccgcgtacaaaaaagcaggctccccaacaatccccaagtttagtaccgaacacttcaaagtcgatctcgcaggcaatcagatttgcccagtgagcgatgagcgccccgcagcccacgtgtcaaattacacctgcccggctcccgttcaggttccagtaccgacgatatcgttcaagagatcaaggttgcccaggaagccagccaaatcggtacctcaatcctatatcgacgcgatcagcaaggtagttgagagctcaggcaatcttcgtcatcaaagccttcttgctctgcttgaaacgggagtccggtggcatgagatcgctggagcgaaggttctgcgaatccacaatctcgataccagcccgcctttcagtcttgatgtcaaaaaatcgagaatgccgttgccggttcccgatgtagcagtcgttcgcaggtacatcgcttcggagggactgacgccaggtgactatctcttcccatcccaaaacgatcgtacccaaccaatgcgggagagtgagttgtttaacacctggagatcctgggaagcatctgcaggtctgccatctgaaaatctcacgcccacacatatcaggattgcgttcacccatcgcaaccttcaaagcgcgatggatctggcagagaagaaagtgatcgccactaaactgggtcacgacagtaaggccatgtctgcccattacaccgttgatccaaaaggggttcatgtcattcgcaaagacaactcctga

SEQ ID NO: 366680 - DNA, 678 bp, Pseudomonas aeruginosa
atgaccgcccagcaggtgctcctggcacaggtaagacttcttcatatgcccaccaaattcgtgctctttgacgccttcggcacactcctcacgatacccaagggtcggcacccctaccgtcagattttgaaagaaggtatccggcaaggccgcagacccaggccggatgacctacgccaaatcctcactcgcaacctcgatctgatcgaggcagcgaagctatttgggatcaaaatccaacctgcccagctggccgacatccagggtgatcttgagactgacatgaacagcatcgaggcctacgctgacggtcttcgcgccgtcgaaacgcttcaggccgcaggcatcaaaatagctatcgcttcgaacctggcatctccctacgccgacgctgttcggcgcctttacccgagtgtcgacgcgtgtgggttcagcttcgcattaggggccatgaagcctgaacccttcttttaccgagcgacatgtgagctcctaggcgctgataccggtgactacttcgggaacaataaagtggtcatgatcggggattcgccaaggtgcgaccgagacgggcctcgggcagtagggatccggggcgtcttgctgaaccgccagagtgggaacgatttccgcaatctcgttgaattcagcgatacggtgttatccagccaatcgtag

SEQ ID NO: 366681 - DNA, 357 bp, Pseudomonas aeruginosa
atgctgatcgaactcgacctcaatacaaatgactcagaagctctgctgcgccactgtctcgatttccaaccgagctcaggagacgtccgggaagacgccaggctggcagacgcgctagaggctttggcctttgcgatcaaaacctcaatgaactccaggcatccaagcgacgagccagtggaggcggttgatcctggcctgctccaggcagcgatcaatctctttcacgacaaggcactggccatcaactggttatccaggccgatgggggctctagggggcaagcgtccaattgatgtacgtatcgatgaagcactcacgctgatcgcgcggctggagcatgggatcgtatcctga

SEQ ID NO: 366682 - DNA, 183 bp, Pseudomonas aeruginosa
atggaaaacttccttcccgatgacgaagcatgcaagcaacccgaagaagatacctgccgcccggaagatcatgagcagacccagggcgagcagtggctgaaagagaatctgcatgccatagaggcgtacaacgttcgtgttgtggcaaacggtctttttggagacggcttgaaaacgttctga

SEQ ID NO: 366683 - DNA, 729 bp, Pseudomonas aeruginosa
atgagggtctgcgtgctgtccgatctgcatctcgaatttgagcggttcgagccagctgtattggacgccgatctcgttgttctggccggggacatccacaccaaagagcgcgagattcagtgggctaatgaggtgttttcatccgaggttttgtacatcctgggcaaccacgagttttactccggccattttgatcggacggtggagaagtccaggcaaaaggcagcgagccacattcacgtgcttgagcaggacgtcttcatccgcgatggcgttcgcttcctgggttgcacgggttggacagattttgcagcgacaggagatgtgactgcggcctctgcagtcgcgagggacacgatgacagacttcaaggtcatacgcgccgggtcaaattaccgacgtctgcgtaccgacgacgtcgccacgcgcagtcgccaggcaaaggagtggctttcaactgaattggacaagccattcgcaggacgcacggtggtgataacccatcactcgccgctggttggagtgggaggccatgagcaagacggacatctcacgggagcgtactgcaacaactggccttcgctcgtgatgaaggccgatgcgtggatttttgggcatacgcatcactctatcgacgttgaaatagggggctgccggctcatctctaacccgaagggctaccccttggaacagactggatttgatgcttgcaagattgtggagatctga

SEQ ID NO: 366684 - DNA, 483 bp, Pseudomonas aeruginosa
atgtcactcaagaccgagatagcggcaacgctcagagctgttcgcgagcagagacaggtcagctatgagaacctgtccggcggctccctgcgcacgaccatcggttaccttgaacgggcggaggccagcgtgactctcgacaagctcgaagagatagcgcatgccttgggatttaacctggtcacgctgatcgcactgtgcgtagcgagtcagcagaaactcagcgctgaagccgttcttgaagaggcgacaatcgaattacagagctttctggcggcagacggcatggagcttatccagaaccaccttcgagacgggaagctggtaaaacgcgctgctggcaagcctctcaaatcccgaaaccgtgaagccgtgcttgcgcttaaggctcagggcaagacgccggctgaggcaatcaaaatgttgggtctgtctcgtaccactgtgaaccgttactggcagcacgaaaccaaggacgaatag

SEQ ID NO: 366685 - DNA, 2223 bp, Pseudomonas aeruginosa
atgactgaagtttatgatgcagccaagacgagcttgggcgctgatgggttttctgcattccgctacttggcagcggtcaactctctcctgtccaaccccgtctccacacctctggggcgagacttgacgattcgggcgctggatgcccgtgagaaattcatcgaccacgtcggcattctgcgcaacatggtcaggaaggctgggctgttcccgtatctgaagaaagaattttccgagctatcccatggtgaccgggttgcgctcgacgtttaccgcacgccgttctcggaagattatgttttccactcgatgcagttccggatcttcgatctgctcaaggatggccgcaatgtcgtgctcagtgcgcccaccagcatgggtaagagtgccatcgtcgactcgctgctggggctcggtcgcttcaatcgtgtcgttctggtggtaccgacggttgcgctggctgacgagacgcgtaggcggcttcaggagcgtttcggagaggtctaccagatcattcaccacagctcgcaagaatgtcgtagcgagcgggtggtgtacgtcctgactcaagagcgagtcaacgagcgtgatgacatcaaggccatcgatctcttcgtcatcgacgaattttacaagctggccttccagcagctcaaaagtggcagtactgacttcaatgatgaacgggttatcgaactgaacattgcccttagcaagctgctgaaggtatccaagcagttctacctcaccgggcctttcgtcaacagcattcgaggcctgaccgagcttggttacgaccacacgttcatctccgccgacttcaacaccgttgctgttgatgtgcagacctttggcgtagatgccaacgacgatgacggtaagctcgcgatgttggcgaagatcgcaccccagtgcgaaggcgccacgatcatctactgcaagtcgtccggcgtggccggcaaggttgctcgcgagctcgtcagactggggtatggccagccgtttcacagtgaacacatcgactgggttgcacaggagttcgatcctgagtgggactatacctatgccctcagaaacggcattggtctacattttggcggtctccccagagcgctccagcagtacaccgctgaccgattcaatgccggcgaccttcgcttcctactgtgcaccgccaccatcattgagggggtgaacacgatcgcgaagaatgtcgtcatctatgacaatcgtaacgggagccgggggatcgacaagttcacccatggcaacatcaaaggtcgagcgggcaggatgggcatccacttcgtgggcaaggtgttctgcctggaagatgttccagaggacaatctgaaccaggaggtcgatgtgcctctgggaattcaggatgaagatacgccgttgaacctgctcgccagcgcacagccgagtcacctgtctgagtactcccaggataggtttgaggctgccttttctcaggatcgtttttccatcgatctggttaagaagcactccttcttcaggatggagcagttcgaacagctctacagcatggttgagatgctcgacgaggacgagttcgagtccctcttgtttcattggtcgccggcgccaggtttcctgacaaccttggccaagatcagcagcaggcttgtgcccaaggcgttctccacgaatgggctgcagaccaaaacccccgataacatcttggccaagctgactaattaccagaaagcagagagctactcggcctacctgaaaggccagatcgaacacaccaagcagcggatcagggatgacgaggagcgggtcagaacgggtcaaaaaagggtcaaagctgatgagaagttgaccctatctagtgggctcaacaacgacttgaaactggtgagcaacactttcggctacacgattcccaaggtactggggctgttggaggacgtcgttcgcctgcacgcgatcaagaagggaatccgcagcacgattgactacagcaacgtcaggatcaagttcgagaaccttcatttgccgccaggggtaaacgcccttgaggagatagggatccccatccagacactgcaccgtatgtgtgagctgctggagtttccagaaggcgccggggtggatgagttggccgactatctgcgccagaacaagcaggcttggggttctatgggatacgttgatcagagcttcgtgaagcgggcgctgggggctgtgtga

SEQ ID NO: 366686 - DNA, 1617 bp, Pseudomonas aeruginosa
atggaacctaatgatgccggcggagtcgctgccaagcacggcttcatcttccaggattgtgtcgctgcctactacgtcacccagatgttgcgggacaaaacaattcaacgtgttcgctgtgaggttaccgacgacattgatgtcgtttgcgatgacttcgtcgagttcgtacaggtgaaaaccacggccaagacactctgggcaaggaacgacctgaccgctctcagttcaggtgccggcaagagaaagatcaagcacagttcgatcctgcataaatccatgcaatgcgagcccacgctctcggtgcctaggaaatttcggatcgtcacgcagcatgcgaccaacgttacgcttgaatacctgctcattaagcgtgaagagcgcatgggaaagcccgggcgcaatgatctgatcgattacctgaattccaaaacctctgattacgtcgcgcccagcggggtggacgtagcgacatgggttgacgcggcgttctgggagatctttcacaccatgcgcgagattgagctcatgggcatcaggaacattcgactcgcttcgtatgatcttcatggcgtcatcttgagtaacgaagtcgcggctgagaacatctggcgagggattctagatacggtcacccgtaaaggtgcgctgtcccgcagaattcactccgtcgacagcaaatcctatttacgcgccgatctgaacgcctggttccaaggcctggtcgaggaggatcagaagcgggcaggtcgcaaggtctacgttaaacgccaactgcctcatatcttggttccgtttcgcagtgcattggctaccccctgcgctaagcgaaatggtcgcgtattgcatcagcaatactcactcaaaaaatatcgctacaagcacatcgtcgacaacgtgtgcaaatggctggatgaggtcttcctgcgtcccaatgagcttgcggatattcacaagctgtccttggtcgagcaagcgcagcgcctgaaaagcacggtttttgcttcattggctgatgtgcgctcattcctcgggcgagtgcttctccatgccaccatacggcaaacgcatgcgagccagcccatcccgtgtctgctctaccttgacggtggggacgaagagaagatccttgaaaacgtccatatcgtcaggcgagaccctgagggcgatcagctatgggttggcttcagtgagctggtcacggcagcgaacatcaccaagcgcctgcctgagatacgccaggagctatacgagcaaattgcggagtgtttcaacaacgccaggggcaagattctcgacatcaaggatgatgattacctgctgcgtcatgacatcgacgtgatcctggacgagagcaacccgttcgatgcacacctggatcggttcagatttgtgttgttcgtcggatacgactcttcgttactgaccgaccctgagacacccgggcacgaggacgatctggagcgggaaacggcagccctctttgaggcgtttgctgatgacctgaatcatgacgccacgtttgctgaactcacgatcgatgtgttcatttaccccgcaccaagcttggatacgctgacgcagttgctggacgataaggtcagggaggccgtatga

SEQ ID NO: 366687 - DNA, 1167 bp, Pseudomonas aeruginosa
atgagttatactttttattacgatgaatctaataacatacgttctttatatttgaccggtgggcgttttaacaccgattcgcatgataatccttcgccgtgttttgtcctggcgggtatcgtacatcgaggtggtcaggctaatagcaagtgtgaggagcttattgctgcgctagcgttgccgcccaccgccaaagaacttaaattcaaccaggtggcaaaagggcagtttgttgacaatttgaagtcggcaaagctcaagcaggttctcacttggcttgttgattcagattactatctgcactacatgaatctgaatatggaatactggtcgatagtggatgtcatcgacgattgctgcgaccacgtcgaccgctatggcttgctgaattatgccccggcaggtggtcgtcgcccctatgtggattaccacaaagacgccctctactacttgatgcgtaagtataagtccgactttctagctgcgcttaccaaatatcgataccccaatgtcacctctaaaaatgccgcaccatttatcaagaggctgaacgagatcgccaagaaaaaccggcaggtctctgcccgcattggtggcaaggtcagtaaggaggacttgtcgcgcacaatcagcctttctaagcttttcgatatgtgtaggaatatcgagacgttggatatggtgtacaccactgagccgtttaagctaatcgacggtttgtctgtattttatcgtcacaccatcagcctgttttcttcttccagccatatcttcgacaatgagtacgggatcgaagaaagcttcaagagcataaaattccttgatagcgtgttgggatcaagtgatttcaaatttgtcgactccaaacagtatccagctgtgcaggtgtcagatgtaatcagcggcttattcaagaattacttcaccttcatcgccaaatcgagtgtttccgagattgtggaggctaggaattccctgacagaaaaacagctggaatgccttgcaaaactgaaggagctcattgaaaaatctgatgatgagcaacctgagttcttttatcacgtgatgtctcagatggagcaccacaagcacatggtgttcatgttcgggaaagacgccagggacgagttcgttcaagtggtaggcggcggcgcccgcaacgcctga

SEQ ID NO: 366688 - DNA, 1455 bp, Pseudomonas aeruginosa
atgaataaatcgacgattagctcggtaggccagcgccgaaaacccttctccaaaagcgcccgaaagcagctcgctcccggcaccagcatccaagagatgaacagcctcacgctagtcaaaggcgagcctcccaggctttacgaggcagctacaggcaagccgctggatttctacaacgagttcacccagtacctttggggcgagattgacaccagctactcaggaaactcagttcttggcatggagagggggggacgtttctttaccgagttcctttatgaaaccggcgccctttcaggccgcctagaccctgctaccgcttccgctaccatgcagcttttcccgtcttatctcatccacggggcggacgccaaagacccgattgtccgccaggcattcattcgaacaggccggaaaaccatctcccgcaagtctgcgggcccatacatcgcaggcgccaacctgatgctgagagtctgcagtgcgatcacgtttgagcaggcagagttgagcgctttacttggggatcgactgtccctggagcagataaacgcattgccggagctcagtccccgggtgcgcagcccccaggaattggctcagatccacgccaacaccctgcaggtcaaaccctctcttggaaaaagcgcaaagaaaggccaaggaggcctgcgcgcgcccaagaacaagaaaaagcgggaggccaaacacatcggcctaccacacattctgccgatgcttgaaaacgccccaactccgctggatggcttgatctggtgcctcgggttggggagtctgagggtgtcggaggcaatgggaattcgcctggaggacattaaggttgacgcgaaaaccgtccgcgtcgaagacccccagggcttgcgtgatacgactaacaaggaaagcttcggtttcaaaggccgcaagacggctattgtgaagatgttcgagccgttcgaatccatcttttgggaaaaactggctgagtacatggctgtgcgcccctcctccgacagtccttggctgctgctgtcattggatgaagacacgtacggtgtacctctctgcgaactcaacgccaacagcgttaacagggcgatcaatcgcagcattcaagccacgcagaagaaactgaagttcgtagcgcctcaaggaaactactcgtcccaccaattccgccacctgtacggcgtgtgggcacgtaactgtgtggtggtgcctggccgacctaaacctggcttcgacctgcctgagatccagttgttgatgggccacgctgacctcaaaagcactgagatctatgccgctgacctgggcatcagcaccctcgtggacgtcgatgccgccaatgaactcgtgtaccgcaaaggcaagggtgaaggcatcgactactaccgtggcctggcctatgcgcgcctgggcgagcagctgctggagcggggcccagaagcgtga

SEQ ID NO: 366689 - DNA, 3240 bp, Pseudomonas aeruginosa
atgcaggccagacaccgtctggccgtgtcgatcttcctacggcatcgtaaaggccgggcgttaacctactcagagctaaccacactctataacctctgcctcatacccgacaaacaactcgatgccgcaatgcctctgtatgccgagctcacgggcgaacatacgccagagctgaaagatgtgagcggagttcgcgtccctgtccgggcgatgttcgtactcttgtgggctcaaggaaaagccaccctcccccacaacttcaatttgagtggcgtgtgggctaagtacccggagctgatagacagctctcagggtttcattgacgagatcgctggacttggccaatcgaatctgcagcgtagcgctcgacgctttcagtatcgcgtgaactggaaatgccctgaggatgtagtatttgaagaactgtgggatgtggctcctgcagttgtagataaacaacgggaaatcaaaaacacagcgacgaagggtagtaaaggtctggatttttcctatttagcctggcttcatctgtttgctacaaagtatccaaaaattgtaagtcctgatcaggcgcgcctgcttgaggggtatcacaaacatttactcccgagcagagtcgaggtgtccagcgccgagatcaaaaaatcctattcggagtttgcaaaacattggggctcggtaagccccagccagccgaaaagcgagaacttaaaatctagaagagcacgttatgctgcagggcttgatggccgcaagaagagcaaccaaaagaagtcccaggaaagaattgcccaagtggaggccgcaaattgggatgcgcaaagcatcctctctcctgagcagtacgcgattctgcccggtcgcacgaggtcttccaagaacggttacggatgggtagatggttattacaacacaccagaaaaccctcatattgaggacagtttggcgtcatgggtaaaagttggaaatctgcatcttggtcatattgaagaatttacgataagcactaggcggatagagaccggctacatccacatcctgatggattatctgggtaggtatctgcctgcctggctgagcaaacacccggattgcggaattcagtatcccactaatattgaggaatttcaccgctccatattctggcatcgtacaaataaaaatggcaaacacattagccccaacgataagtcggagctcgaactgccgcttacgctgatgcagttttacgatctcaaacgaagtgctaaaaccaaagcaaaattcatatatacgatttggagatactttgaaattgcgatagctaacggcgatgaactgctgccggatggtagagcactggtcagtggcccctgcaaaaatccgatccatccggaattggactcacctgggagcggcccggcgggtaaaagtgataaaatccccttgcccatcaattcgatgatgatggttgaggcctacatgttggcgctggatgcaatcggagtggagcttcagaacaagtgtgtcaatggtttactgagcttccaagactctttagacctaagaagcagcacctggatcgatcttgaaaaatacggaatctcatattccatcaaactgcgcaatcctgacgacattaatgaaatactggaaatacccattaagaaaatcattaatgcttattcttggaagattgaaaacttcaaatccagcaatcgtgaagcttgtgcgccatggttatctcaactgagaatgctgacagtggctcttttctcaggactacgcctgcaaaattgccaatggctggatgttcgcagttttgcaaaatactatgatcagtctctgatagacagcctgagcagctgcatactttatgtcaacacggacaaaagcggcaacagtcgcccagtaacacttccgtacaaagtcatggatatcttaatccaagaacgtaactttcaaactaaattatatggcaagaaatacaagcctgttcattatgaaaacgatgcctcaagcaccaagaagtatggcaaaatccatcctctttttcgcagcccgtggaacgcggacggcgcaccgttttctgacgcctcctacacgctgaagtggacgtcgattcttcggggttttcaggaactgtacaacggcttcgtaccccctgaaaaccgccacgaattcgtagagcaaacagtctctggggactggtctgcagtacatacaccgcatgcgttgcgagcgacttggattacccatcgccgtatttatgcattccttgattatgccatcatcggagggcaagttggccatgcccagccgtacacgagcgcacattatgtagtcccgactcagcaagagacactggcactgattgattccgccaacaagtcggtctcagcgcaagcctttgctgctttgaccgggaggcccatgaacccgtcatcgcctgactccgcgttggtcaaaggctgggaaaagcaccgcgataagaccgtgcgcgatcagcacctgatctccgtgattccagatatcttggacatcgaagaaacggggctggatttgatcgctagcaccaaagctcagcgcgtgaaatttctagacaattgcatttgtgcactagatggcgattgccctaaaaaattgatggattttaccaagacagcgcgcacgtgtggcatttgcccttatgcagtattcggcgtcgatcatctacccgggctaaacgcaaaagtccgcgatcttgccaaccgtgctgatcacctccaacctaggctgcagaatgtaatgaaaaaccagccccactcgtctaacgccgagataatgtgcaaagagctttctctgtgcaagcttgaattagccgggtaccgtcaagtcgtacagatccttgagaaaaactggcgggaagaaaagcttccgaaagggtacatcactcgtcatcgcgaccttgctaatgttgtacggcacagcgttgatatggacgacccgaaacagcggattctctccatgatattagatatgtcccagtttcctgcgctggcgtcagagcactacccgctaattcttggagagatggcacgtaacccggagttattggatgtcgtcaaccaatcagtagacgaaagggagagctacattggtcaaattatttcaattatgtatggtgcaaacgtttcattcggggatattgctgcgtacgccctgagtaaaccttctgccctctcccgcaaagaccaagctttgatggcgatggtgcactga

SEQ ID NO: 366690 - DNA, 318 bp, Pseudomonas aeruginosa
atgcatccggccatgatccgagctgcgcagttggaggaggaaaacaccaagcttcgcaacatcgtggacgatctgtcgaaaaggactgtcagggccgcaccgtctcacgaggttgccgccaaagccagcgtacctgagtaccaacgcgaatacgaagtgacctgccagctcgtagacagaatcctcgaacacaggccgggcattctaatctccgacgacaccctgacagactttgcaactttcagcgggattcctgagcaagttgcggattccaagctaatcgccccctacctcaaatggaagaattcccgtgcgtga

SEQ ID NO: 366691 - DNA, 9459 bp, Pseudomonas aeruginosa
atgccgctgagtccgaacggcaagctggatcgcaaggcgctaccggcgcctgaagtaagcgtggcgcaggcaggctacagcgcaccgcgcaacgcagtggagcgaaccctggcggaaatctggcaggacctgctgggcgtcgagcgggtcggcctggacgacaacttcttcagcctcggcggcgactcgatcgtctcgatccaggtggtcagccgtgcgcgccaggccggattgcaactgagcccgcgcgatctgttccagcaccagaacatccgcagcctggccctggcggccaaggcgggtgcggcgacggcggaacagggtccggcaagcggcgaggtggcgctggcgccggtacagcgctggttcttcgaacgggcgattcccaaccgccagcactggaaccagtctctcttgttgcaggcgcgccagccgctcgacggcgaccggctggggcgtgccctggaacgcctgcaggcgcagcacgatgccctgcgcctgcgtttccgcgaagagcgcggcgcctggcaccaggcctacgccgagcaggccggcgagccgctgtggcgccggcaggcggggtccgaggaggtgttgctggcgctttgcgaagaagcccagcgcagcctcgacctcgaacaggggccgctgctgcgtgcgctgctggtggacatggccgacggcagccagcgcctgctgctggtcatccaccacctggcggtggacggggtgtcctggcgcatcctgctggaagacctgcagcgtctctatgccgacctcgacgccgatctcgggccgcgtagcagttcctaccaggcctggagccggcacctgcacgaacaggccggcgcgcgcctggacgaactcgactactggcaggcgcaactgcacgacgctccgcatgcgctgccatgcgaaaacccgcacggcgccctggaaaaccgccatgagcgcaagctcgtcctgaccctggacgccgagcgtacccggcagttgctgcaggaagccccggcggcctaccggacccaggtcaacgacctgctgctgaccgccctggcccgcgcgacctgccgctggagcggcgacgccagcgtgctggtgcagctcgaagggcacggccgcgaggacctcggcgaggccatcgacctgagccgcacggtgggctggttcaccagcctgttcccgctgcgcctgaccccggccgcggacctcggcgagtcgctgaaggcgatcaaggagcaactgcgcggcgtgccggacaagggtgtcggctacggcctgctgcgctacctggctggagaggaggctgcgacccgcctggccgcactgccgcagccgcggatcaccttcaattacctgggccggttcgaccgtcagttcgatggagcggcgctgctggtaccggccacggaaagcgccggcgccgcccaggatccgtgcgccccgctggccaactggttgagcatcgaaggccaggtctacggcggcgagctgagcctgcactggagcttcagccgggaaatgttcgccgaggcgaccgtccagcgcctggtcgatgactacgcgcgggagctgcacgcgctgatcgagcattgctgccaggagggcaacgtcggcgccacgccgtcggacttccccctcgcgacgttgcgccaggagcagttggatcgcctgcctctggcgcggatcgaggacatctacccgctgtcgccgatgcagcacggcatgctgttccactcgctctacgagcaggcttccggcgattacctgaaccagctccgagtcgacgtccatggactcgatcccgcgcgcttccgcgccgcctggcaggcggcgctggacagtcatgacatcctgcgcgccggcttcctctggcagggcgatctggagcagccgctccaggtgatccacaaacacctcgaactgccgttcgccgagcatgactggcgtggtcgcgaagcgctcgccgaggctctcgacgagctggccgcgagcgaacgccggcggggtttcgagctggagcaggcgcccttgctgcggctggtcctggtgcgtatggacgaagagcgctaccacctggtctacacccaccaccacatcctgctggatggctggagcagcgcgcagctgctcggcgaggtgctcgctcgctacaccggcgaacaggccgagcgcacgggtgggcgctaccgcgactacatcacctggctgcaggcacaggacaagcgcgtcagcgaagcattctggaaagaacaactggcggaactgctggagccgacacgcctggcccaggcggtcgccgccgagcgcgagcaggtcggcagcggccagttccagcgcagcctgccgccggcacgcaccgcgcgcctgaagacgttcgcccagcggcacgcggtgaccctcaataccctggtgcaggccgcctggtcgctactgctgcaacgctacaccgggcaggatacggtggtcttcggcgccaccgtcgccggccgtcccgccgaactggccgggatcgaaaggcagatcggcctgttcatcaataccctgccggtggtcgccacaccgcaaccgggcatgcgcctcaccgactggttgcaggaggtgcaggcgcgcagcctggcgctgcgcgagcaggagcacacgccgctgttcgagatccagcgttgggccgggctcggcgaggcgctgttcgacagcctgctggtattcgagaactaccctgtggccgaagccctggaaaaggggtcgccaggcggcgtgcgcttcggcccggtgagcaatcatgaacagaccaactacccgctgaccgtcgccctgggcgtcggcgacagtctgtcgctgcaatacagctatgaccgtcaggcgttttccgatgccgcggtcgagcagttggaccggcacctgctgaacttgctcgaaggcttcgtcgacaacgccgaacggactctggtcgagctgagcctgctggatgccgaggagcgcgcgctgatcgattcgctgtggaaccgcagcgagtcgggcttccccgcttcgccgctgatccaccagcgggtggcggagcgcgcacgcctggccccggacgcgccggcggtgctgttcgacgaccaggtgctgagcttcgccgagctggacagccgggccaatcgcctggcacatgcgctgatcgcccgcggcgtcggtcccgaggtgcgggtggcgatcgccatgcagcgcagtgcggaaatcatgattgccttcctcgccgtgctgaagtccggcggcgcctacgtgcccctggacatcgagtacccgcgcgaacgcctgctgtacatgatgcaggacagccgcgcgcacctgctgctgacccagagccacctgctcgaccgactgccgattcccgacgggctgtcctgcctgtgcctggaccgcgaacaggagtgggccggtttccccgcccatgatccagaggtggcgctgcatggcgacaacctggcctatgtgatctacacctccggctccaccggcatgcccaagggcgtggcagtgtcccacggcccgctggcggcgcacatcgtggctaccggcgagcgctacgagatgaccccggcggactgcgagctgcacttcatgtcgttcgccttcgacggctcccatgaaggctggatgcacccgttgatcaacggtgcgcgggtgctgatccgcgacgacagcctgtggctgccggagcagacctacgcgcagatgcatcgccacggcgtcaccgtcgcggtgttcccgccggtctatctgcagcaactggccgagcacgccgagcgcgacggcaacccgccggcggcccgggtctactgcttcggcggcgacgcggtggcgcaggccagctacgacctggcctggcgcgcgctacgcccgcaatacctgttcaacggctacggaccgaccgaaacggtggtcaccccgctgctctggaaagcccgcccggacgacccctgtggcgccgcctacatgccgataggtacgctgctgggcaatcgcagtggctacatcctcgatgcccagttgaacctgctgccggtcggtgtggccggtgagctgtaccttggcggagaaggcgtggcgcgcggttacctggagcgtccggcactgaccgccgaacgtttcgtgccggatcccttcggcgcgcccggcagccgcctgtatcgcagcggtgacctgacccgtgggcgggcggatggcgtggtggactacctgggacgggtagaccaccaggtgaagatccgcggtttccgtatcgagctgggcgagatcgaggcacgcctgcgcgagcaggcggcggtgcgcgaggcggtggtggtcgcccaggcgggtgccagcggccagcaactggtcggctacgtggtcccgcaggatccggcgctggtcgaggatgccggtgcccaggcggcctgccgcgacgccttgcgcaaggcgctgaaggaacgcttgcccgagtatatgttgccggcgcatctgctgttcctggcgtgcatgccgctgacccccaacggcaagctggatcgaaaggccctgcccaagcccagtgccgaccagcagcaacgcgactaccaggcaccgcgcagcgaagtggaaagacaactggcgacgatctgggcggaggtgctgaagctggagcaggtcggcctggccgacaacttcttcgagatcggcggcgattccatcatttccctgcaggtggtcagccgtgcgcgccagctcggcatccatttcactccgaagatgctcttcgaggcgcagaccatcggtgccctggctccgctggccgagagcggtacgcaggtgctggcgatcgaccagggaccggtgaccggcgtcacgccgttgctgccgatccagcagggtttcttcgccgaagaggtcgccgagcgccactggtggaaccagtcggtactcctggaagcccgcgagccgctcgatgcccggcaccttgagcaggccctgcggggcgtgctggcgcaccacgatgcgttgcgcctgtccttcacccgcgaggcggccggctggacggcgcgccaccggggtgtggaagagggcgctgcggcgctgctccgcgtcgctcgggtcgccgacctggcggcgctgcgggcgcttgccgacgaagtccagcgcagtctcgacctggccgatgggccgttgttgcgcgccctgctggcgactttcgacgacggcagccagcgcctgctgctggttatccaccatctggtagtggatggcgtgtcctggcgtattctcttcgaagacctgcagaccgcctaccggcagttgctggcgggtcaggccgtcgagctaccggccaagaccagcgccttcagggattgggccgagcgcctgcgggcgtttgccggtgacggcggcctggatggcgaactggcgtactggcaagggcaattgcagggcgcctccagcgacctgccgtgcctcgacccgctgggcgaccagagcaaccgccatgcccgttcggtcagttgcggactggacgccgaggcgacccggcaattgctgcaggaagcgccggccgcctaccgcacccaggtcaacgacctgctgttgaccgcgctggcgcgggtgatctgccgctggaccgggcaggtcgatgcgttgatccagttggaaggacatggccgcgaagaactcttcgccgagatcgacctgacgcgcacggtgggctggttcaccagcctgttcccgctacgcctgacgccggccgagggcatcgccgcatcgatcaagggcatcaaggagcaactgcgcgcggtgccgaacaagggcatcggcttcggcgccctgcgctacctgggcagcgcggcgagccaggcagccctggccgggttgccggtgccgcgcatcaccttcaactacctcggccagttcgacggcagtttcgccatggaggagggcgcattgttcgttccggccggcgagcgtgccggcgacgaccagagcccggacgcgccgctggccaattggctggcgctgaacggacgcatctatggcggcgaactacgcatcgactggagcttcagcggcgagcgcttcgaaatcgccagcatccagcgcctggccgacgcctatcgcgacgaactgctggcgctgatcgcccactgccgcgtggccgagggccagggtctgacgccctcggacttcccgctggcgcgccttgaccaggcgcgtctcgaccaattgccgctggcgccctgcgaagtcgaggacctctacccgctatcgccgatgcagcagggcatgctgttccacagtctgtaccagcaggaggccggcgattacatcaatcaactgcgggtcgacgtcgacggtttgcatccggagagcttccgcgcggcctggcaggcggcgctggacgagcacgatgtgttgcgcagcgggttcctctggcagggcgccttcgagacgccgctgcaggtggtgcgcaagcgtgtcgaggtgccgttcagcgtacttgactggcgcggtcgcgaggacctggcggcggccctcgacgagctggctgccggcgaaggccggctgggcttcgacctgagcgaggcgccgctgttacgcctggtactggtgcgcacggacgaagagcgctaccacctgatctacaccaatcaccatatcctgatggacggctggagcaactcgcagctgctcggcgaggtactgcagcgctaccgtggcgaaacgccgccgcgctccggcggccgctatcgcgactacatcgcctggttgcagcgccaggacgccgcgctcgccgaggccttctggctgccgcgcctgcgccaactggacgagccgacccgcctggggcagtcgatcgcccaggccaagcagcgcggcaagggctacgcggaacggttgcgcgagctcgatggcgagcagacccggcgcctggccgagctggcccgcgagcagaagatcaccgtcaataccctggtccaggccgcctggctgatgttgctgcaacgctataccggacaggacagcgtggccttcggcgctactgtcgccggtcgcccggcggaactgaacggtatcgaggagcagatcggcctgttcatcaataccctgccggtcatcgctaccccgcttccgcagcagagcctggcgtcgtggctgcaggcggtgcagggcgagaacctggccctgcgcgaattcgaacacacgccgctgtacgacatccagcgctgggccgggcagggcggcgaggcgctgttcgacaatatcctggtgttcgagaactaccccgtttcgcagatgctccagcagcaggcctcgcaaggcctggctttcggtgccgtgggcaaccacgagcagaccaactacccgttgaccctcagcgtaagcctggggcagcgcctggaactgcagttcgcctatgaccgcgagcatttcgacgacgccagcgtggcgcgcctggatcgtcacctgacgcacctgctggcgcagatggtcgagcgtccggccagcacctgcctggccgagttccagctgctggaagcagcggagcggcgccaggcgatcttcgactgggggcgcaacccgggacgctatccggacgagcgcagcgtcgagcagctgttcgccagccgcgcggcgatggagcccgagcgggtggcattgctcttcgaggagcgccagctgagctacggcgagctcaacgcccaggccaaccgcctggcccaccgcctgatcgagctgggcgtggggcctgacgtgctggttgggatcgccgtcgagcgcgggctggaaatgatcgtcagcctgctggcggtgctcaaggccggcggcgcctacgtaccgctggacccggaatatccgcaggagcgcctcggctacatgatcgaggacagcggcatcgccctgttgctcagccagagccacctgctgcaacgcctgccagcggcctccgggatcgcctgcctggcgctcgaccaggcgcgggactggcaggaccgtccggcgagcgacccgcagttgcgggcgcatccgcagaacctcgcctacgtgatgttcacctccggttccaccggccgtcccaagggcgtcggcatcagccgagagagcctgtcgcggcatacccacgtttcgctggagttcttcggcatcgggccggacgaccgggtgctgcaattctccaccttcaatttcgacggcttcgtcgagcagctctacccaccgctcgcctgtggcgcctcggtggtgctgcgcggcaccgagatctgggacagcgagacgctgtaccgggagatcgtcgagcgacgcatcaccacggtggacctgactaccgcctactggaacatgctggccaaggacttcgccaaccagggcgtgcgcgactacggcgcgctccgtcaggtccacgccgggggcgaggcgatgccgccggaaagcctggtggcatggaaggccgccgggctggagcatgtgcgcctgctcaacacctacggccccaccgaggcgaccgtcacggtcaccaccctggattgcgcgccctacgtcgacggcagcaaggcgatcccggcgaccatgccgatcggcaaggtgctgccgggccgcgccatctatctgctggacgatgccgggcaaccggcgccggtcggggcggtcggcgagctggtgatcggcgccgagctgctggcgcgtggctatttcaagcgtcccgacctgacggccgcacgcttcattcccgatccgttcgacgagcagggcggcggccgcctgtaccgcaccggcgatctggcacgctacggcgccgacggggtgatcgagtacgtcggccgggtcgaccatcaagtcaaggtccgtggcttccgcatcgaactgggcgagatcgaggcctgcctcggcgagcacccggcggtgcgcgaggccctggtcatcgccgtcgagggtgctgccggggcgcagctggtggcctatctggtgccgcaagcggaagcgctggctagcgccacgctggaggtacaggccgcgctgcgcaacgagctgaaggccctgctgcgcgacagcctccccgaatacatggtgccggcgcacctgctgttcctcgaacgcctgccgctgagccccaacggcaaggtcgaccgcaaggctctgccggcgcctgacgccagtctccttcaggaggcctacgtggcgccgcgcagcgagctggaatgccaggtcgcggcgatctggcaggaggtgctgaaactccagcgggttggcctcgacgaccatttcttcgaactcggcgggcactcgctgctggccatcaacgtgatttcgcgcattcaactggagctgggcatgaagctcaccccccaactgttgttccaattcccgaccctggggcttttcgtcagcaatctggaaaaggccggtgggcaggtcgacacatcgaaactgaacaagctggaagccctgcttgatgaaatggaggaagtttga

SEQ ID NO: 366692 - DNA, 264 bp, Pseudomonas aeruginosa
atgaccgaggtggaacacgtagaactcgtccaggcggccggcacgttcgcattccacgtacatacgcttgagcaggtcagcgtcgcctttcgggtcgaagacgatcaccacctcgtagtccggctgctcctctgcgcgccggcgtcgtacccggcagtgagtgcggcgaatatcctgggtgatgaacagctccgcgagtcgcgtcttacccacccgcgtggtgccgagtaccagtgtgtggccgacgcgctcgcccagttgtag

SEQ ID NO: 366693 - DNA, 489 bp, Pseudomonas aeruginosa
atgagcgacagcacctgggtgcgctcctggatgaacaagaacgtctacaccggcggcgagatgaaggcgggcaaactcaccgccgagggccggacggaagtcggcgaatacctgcagctcaaaggcgtggccaccgaaggggccgactgctcgccgaacgggctcgccggcattaccagcaccggactctggttgtcctgccagaacggaaagtgggggcgaaccgccgcctccatgcgcatgaataccactgcgggcgtgatcaaggactggtgtacgttgcacggccaggacagcggcatgatgtactacgactatgtccgctacgcgatcacctgcggcggccgcttctgcgcggtgggcttcaaccagacctttggcaccaactactcgttcggcctgatcaccgagatcggcccgggcttcaactatccggagccctacaagacccccgactcgaccaacgtcaccgttacctgcgtgaactag

SEQ ID NO: 366694 - DNA, 363 bp, Pseudomonas aeruginosa
atggagcgagagcttcgtgagctggaagaactggggtacatcgagatctcaaccacccaggccgggaccctggtggtcactacgcgcgctccggggcaactgctttcggcctacttctggtcggtatggatcccgcgacacatgttcagctgctcgctgaaagtgagcctggtgccgcacctctgctgcggcactcaggactcacagcacctcaccgccgtgttccgcattgcaggcagcaaggacgccgcgcgtgagttcctgcatcagttggccaacaactatcccgggcatgagccggagttgcccgaactggtggccgttcaggtcggtgatgcactcagcaaggaggccgaatcatga

SEQ ID NO: 366695 - DNA, 363 bp, Pseudomonas aeruginosa
atggagcgagagcttcgtgagctggaagaactggggtacatcgagatctcgaccacccaggccgggactctggtggtcactacgcgtgctccggggcaactgctttcggcctacttctggtcggtatggatccctcgccacctgttcagctgctcgctgaaggtaagcttgatgtcacacctctgctgcggcactcaggactcccagcacctcactgcggtgttccgcattgcaggcagcaaggacgccgcacgtgagttcctgcatcagttggccaacaactatcccgggcatgagcccgagttgcccgaactggtggctgtacaggtcggtgatgcactcatcaaggaggccgaatcatga

SEQ ID NO: 366696 - DNA, 1458 bp, Pseudomonas aeruginosa
atggaaggcgccgggcacctcggcgaaagcgcgcgtcgccaactgctggcgccctaccaggggcgctgcctgggcgtcggccagctcaatgcgctgctcaaggccgtcaccgaccattacctggatcgcggctacgtcaccacccgcgcctacctgccacagcaggacctggcctccgggaccctgcgcatcatcgtcgtcgaaggccgcctggagggcctggacagctccgcgctggccagcccgcgcgaactggcgatgagctttccgggcaggaccggcgagctgctcgacctgcgcgaactggagcaactggtcgaccagttgagtcgcctgccgtcgcgccaggcgcaactggagctagtgcccggcagcgaggtcggcggcagccgagtgcgtctcaagggcgagcgcgacaagccctggcgggtctccgccacgcgcaacaacgacggcgacgtcagcaccggcgagcagcagatgggcctgggcctggactgggacagcccgctgggcctggccgaccagctcaacctgcgcgccaaccgcgacgcggtgaccgaccgctggcgccattccgacagccagagcctgttctacagcctgccctggggctggtggaccttcacctacggctacagccagagcgactaccgcacgcgcaacgaggccagcggcttccccttcaagctcgatggcgacagccgcagccaccagttccgcgccgaacgcgtgctgcaccgcgacggtgtgagcaagaccgccatgagcctggggctcagccaccagcgcaccaacaactatgtcgaagacacccgcctggaagaccagagcacgcggatcaccgagacccagctcggcttcaaccatggccggcggatcggcagtggcttcgtcaacctcgacctcggctggcagcagggcatcggcgcccttggcgcgcagggtcgcggccacccgcaggcgggcgatccgaatgcgcgctacgacaagtacagcctgaccctcagctacctgcagccgttccagctatggggcgagcgcttcagcttcgacagcctggccaccgggcaaaggagtgaggacgtgctgttcagcccgcagcgcatcagcctcggcggcaacagctcggtgcgcggcttcaaggaccagaccctgaccggcgacagcggcggctactggcgcaaccagttgcgctggcggcgtgcggtggaatgggcgccgctgcggccctggctgcaggaatacggcgtggccttcgcctacgacgtcggcgtgatccgccacgaccgctacaacgacggcgccagcgggcgcatgagcggcaacgccatcgaactggatgcccgcggccgctatttcgccgccagcgtcggcttcgcccgctcgctggagcggcccagcgccatcgagcggcgcgagcacccgatctatttccgggtcgacgcgttcttctga

SEQ ID NO: 366697 - DNA, 348 bp, Pseudomonas aeruginosa
atgctcgtcgagtgcggaatctggacgcaggaacaggtggacgagatgcagaagacggtgactcgattccgcaattcagaattcgtcgacgaccgcgcgctagcgatggctgttgctgacgcaggccagtgcaaggctccagagatatcgctggccgagctgctcgccgccgcgcccgtttgccgtctgagccgaagcgcacttaccgatgcgcagatgcgccggctctacgatagcagcaccgagacagaaaatgagcggcttggattcgcagcgttcgcgcgcctgatccgccgggccgaggccgtccaccagatcactgccgcgcccggcaaggagggggtgtga

SEQ ID NO: 366698 - DNA, 1509 bp, Pseudomonas aeruginosa
atgaaccatcaccaggaactcgacttctgcaccatgtgcagcggcatcgaggcgcccagcgttgccctggagccaatcgggttccaagcacgctggttcgccgagatcgaaccattcccatctgccgtgctggctcaccactaccccagcgttccaaaccatggggacatgacaaagctcatccgacgcatcctcacaggggcgatcgaggctccccccctggctattgccgggactccatgccaagcattcagcgtcgcaggttggcgcgaaggcctgaccgacccgcgcggcgccctgaccatcaagttcgtggagaccatcgatgcaattgaccttgttagaacccgccgcagtgagcccgagtgcatcgcatggtgggagaacgttccaggcgtcttctcggacaaggaaaacgccttcggctgcttcctcggcgccctggtgggcgaatccgaagaactccagccgccagggggcaaatggaaggacgctggttgtgtgtatggacccaagcgaacagccgcgtggagggttctggatgcccaatatttcggcctggcccaacgacgccgtcgtgtgttcgttatcgcaagtgctcgagcaggattcgatccatgcgaagtactttttgagcgcgaaggcatgcgccgggatactccgccgcgccgaggcgaggggcaagacattgccggacacgctcctttcggcactgcgctccagtgcggctgcgggcacctcttcgacctgagccttggtcagtggggttgcccgaattgcgagggcgacgaagggcctgctgtcgaagtaatgaccggcgtccccgccttcggtggggagaaccagagccggtctctattccaggccggcgccctgaccgcgcatggcgttcggaacgacttcgcatccgagacgttctgcgttgcgccggccgtggccggcaccctccaggcgaacgggaaggcagccggcagcgcgacacaacaggacgcagagtcgggcctgctggtcgtacacggcacgcaagatcctgacgtcgtccaggattgcgcccacacgcttggccggaaccacgggcaggagaacgcggtgtttgcctttgccgagaacagcaggtctgaggtgaggctggagggtggggatgggcagatcgttggaaccctgtctgccggcggtggaaagccaggacagggccagccctgtatagcgttcagctgcaaggaccacggcgcagacgcgggagagatatcgcctacgctccgcgcaatgggccacggcgccagccatgcaaacgctggccgccaggtcgcggtctgcatcaccggcgacatcacccacaccctgaaggcggaaggcttcgacgccagcgaggatggaactgggcgcggccaaccgataacacctgaagctgctggcgtccgtcgcctcacccccccgggaatgcgagcgcctgcagggattccccgacgactacacgctgatcccttggcgtgggaagcccgctactga

SEQ ID NO: 366699 - DNA, 123 bp, Pseudomonas aeruginosa
atgcagatccgcgccaaggttcagctttggaatgaagacggcacgcctgttctgaccaagaagcggaagcataaggtcgagtggcagcagttcggccaccaaccagggagggccgcagcgtga

SEQ ID NO: 366700 - DNA, 654 bp, Pseudomonas aeruginosa
atgtgccgccggatcttcgggctgcgccccgtgctacttttgccgtcacggctattcggcttcaatccctcacgccttcgagccgacgctttcttccggggggggggggcggttgtggggctacgccccggcttgctgcggcaggttgagccaaagcgtgccgtcctcgacgctggcggttcgcgcctgtacgtcacgaaggacggtttaccgacacgccacccggcctcgctatggagcatccacgccacgcctcaagcccgtcgccgtaatctgcggcaaggagcgttctcgcttgtcgttggggtgttggccttgccagtgccagggtgcaagccggtgaagccgtcacgcggggatgccgagtcggccacatctccattcgggagcgggcggcctgtgcgtccttggcttgtcgtgaatcctggcgagggaacggctgcgccttgggcttcatggccgcaaccttccagcgaaaacaatttcccctgcgctacgcgcattcctctcgggacaaattcttttcgcttccaggctctccacggtgttgcgaccgctgcgcggtgcggccagcccatcccccgccggccggatcacaacaaggacgcactggcgcgacctcgttcaacccgaaaggagaaacatcatggctaa

SEQ ID NO: 366701 - DNA, 708 bp, Pseudomonas aeruginosa
gtgattagcgacgagcatggcaacaagctcgttctctcggagggaaccaaccatcaactcctgcgcgctcagacagggggtatatccattgagtacacatacgacaaggaacagcgactcacttcggtaacacgaacagatgggcaatacagcacgaaaacacagtacctctatgacgacccgaggaacataaaactacttacaggcatccaggataacaacaatcgccgcttcgccacctggacctacgacgaccaaggccgcgccatctccagcgaacatgccaacggcgccgaaaaggtcaccctcgcctacaacgatgacggctccaccaccgtcaccaacgaatacggcaagcaggccacctaccgcttccaggtgatccagggcatcaagcgcatcgtcgccatcgaaggcgaaccctctcccaactgccccagcagcaattccaccttcacctacgacgaacgcggactgctcaccagcaaacgcgacaacaacggcaacctgaccacctaccagtacaacgcccgtggcctggagaccacgcgcaccgaggccgccggcactgcgcaggcgcgcaccatcacaaccgactggcacccgaccctgttcctcccggtgcaggtcagcgagcccggccggatcacccgctaccagtacgacgccgagggacgcaagaccggcgagaccgtcaccacccgctga

SEQ ID NO: 366702 - DNA, 207 bp, Pseudomonas aeruginosa
atgcccttcgacgaaagccccgcagtccgccgcataaacgccctctgcgcccccgcgccggcccgatacatccacctcccaacgggcattcactgggtcgtcatcgacagcctgggcaatgtcctgcaactcgaaaacatcgagcgccggcgccgactgataaccgtttctgacctcgaaaccgaggcctggagaaagctcccatga

SEQ ID NO: 366703 - DNA, 360 bp, Pseudomonas aeruginosa; identical to SEQ ID NO: 352176

SEQ ID NO: 366704 - DNA, 291 bp, Pseudomonas aeruginosa
ttgctgctggtcgagcaacgcggcgagatcctgcaggttgcggcctccttgctgttgctgctggtcgagcagcgcgacgaggtcctgcaggttgcggcttccctgctgttgctgctggtcgagcagcgcggcgaggtcctgcaggttgcggcctccttgctgttgttgctggtcgagcagtgcgacgaggtcctgcaggttgcgacttccctgctgttgttgctggtcgaggacagcggccaggtcctggaggaactgccggcccttctgctgttgttgctggtcgagtag

SEQ ID NO: 366705 - DNA, 294 bp, Pseudomonas aeruginosa
ttgctgctggtcgagcagcgcggcgaggtcctgcaggttgcggcctccctgctgttgctgctggtcgaggatagcggccaggccctggaggaactgccggcccttctgctgttgctgctggtcgagcagcgcggcgaggtcctgcaggttgcggcctccttgctgttgttgctggtcgagcagtgcgacgaggtcctgcaggttgcgacttccctgctgttgttgctggtcgaggacagcggccaggtcctggaggaactgccggcccttctgctgttgttgctggtcgagtag

SEQ ID NO: 366706 - DNA, 759 bp, Pseudomonas aeruginosa
atggaatggctcgccagtcctgaaatctgggtcgcgttcctgaccctgaccgccctggaaatcgtcctcggcatcgacaacatcatcttcatctcgatcctggtcgggcgcctgccgccggcccagcaaccgaaggcgcgcttcttcggcctggccctggccatgggcacgcggatcctgctgttgctctcgatcacctgggtcatgcgcctgaccaccgacctgttccacctgttcggccagggcatctccgggcgtgacctgatcctcttcttcggcggcctgttcctgctgttcaagagcaccatggagatctaccacagcctggaaggcgcggaagaagagcagaagagcggcggcaaggtccacggcttcatgggcatcatcgtccagatcgcgatcatcgacatcatcttctccctggactcggtgatcaccgccgtcggtctggtgcagaacgtgccggtgatggtcgcggcgatcatcgtcgcggtactggtgatgatgctctgcgccggcaccatcagcgacttcatcgagaaacacccctcgctgaagatgctcgccctgtcgttcctcatcgtggtcggcaccgtgctggtggccgagtccttcgaagtgcacgtgccgaaaggctacgtctacttcgccatggccttctccctggcggtggaggcgctgaacatccgcttgcgcggagccctggcgcgcaagcgcggcgaagagccggtgaagctgcgcaagggttcgccggactga

SEQ ID NO: 366707 - DNA, 534 bp, Pseudomonas aeruginosa
atgacgcgagagtgtcacgtacggttctgcgagcggctgcgggggcagttcccgcggccgactcaccacttcggcatgaaggcgcacatcggtgtcgatgatgagtcgggcttggtgcacagcgtggtgggcacggcggccaacgtggccgatgtcacccaggtcgataagctgctgcacggcgatgagaacatggtcggtgccgacgcgggttacaccggcgtcgagaaacgccctgaacatgaaggccggggggtcatctggcagatcgccgcccgccgtagtacttacaagaagcttgataagcgcagtgctttgtacaaagccaagcgcaagattgagaaggccaaggctcaggtacgagccaaggtcgagcatccgttccgggtgatcaagcgccagttcggttatgtgaaggtgcgcttccgtggtctggcgaagaacacggcgcaactgatgacgctgttcgcgctgtcgaacctgtggatggcgcgccgacatttactggcgaatgcaggagaggtgcgcctgtaa

SEQ ID NO: 366708 - DNA, 219 bp, Pseudomonas aeruginosa
atggaaaaaatgaaaaccctgttccgcaacgcttccatcgccaccgtcggcctggccgtggccaacgtctccttcgccgactcgctgatcgacgaaaccaccaaggaagtgctgacccaagccggcaccgacggctcgtccgtggccaagctggtgatcgccgccgtggcggtgctggtcggcctcgccctggtcatcggcgcgatgcgcaaggcctga

SEQ ID NO: 366709 - DNA, 174 bp, Pseudomonas aeruginosa
gtgctggagaaccagcgcgcgctgtaccagatccgcgaggaactggcgcaggcggagaccgcctcgttcgtcaacgtcatcgcgctctacaaggcgctcggctggggcagcggcgacctggcgccgggcgccggccaactggccgccggcgaaaccgccggggccaaccgttga

SEQ ID NO: 366710 - DNA, 1362 bp, Pseudomonas aeruginosa
atgagcgctaagattcattttaacaaagccttcgctatcaaacacctcgaaagcatatactctgcgcacattgttctctcacgcgccaccggcattgacaatctaacgcagaggcagttttggcgcacccttcaagaccagatcgccatcatttcaaggaaagcgaacgccggaaactataccttcacaaaatacaaacttaaattagttagcaaaggtagaggtaagccgcccagagaaatatctatccctacgattcgcgatcgtatttgcttgcgggccctttgcgaggtcctgaccaaaacataccaatcgtcaatttcttttgacctcccgcaggacaccgtccgcaccgttaaaggttgcgtagagtcgggaaaatatgacagctttataaagctagatgtgagcgatttttacccttccatcgaccaccacattcttttaaaaaagcttcgctcaaaaattcgatctcccattgtgctcaaccttattaaaagcgcaattgcaacgccgactgttagtaaatccagcaagtccgacagtgcaaataaaaaaggcgtgccacaagggctgtcaatttctaacgcgctcgctgccatttacttaatagacatcgacaaaaagttttcaaacattccaaatgcgcaatactttcgctacgtcgacgatattttgattctgtgcaacgacaagcaaaaaaacaatattaaacgacagatcatcaaagaattcaagagcattggcctaacagttcacgaccccatcgagtcacctgctaaatcctccatgggaaaactaggtgagagattcgactatttgggatatgaattccgaaacgacaccattaagaacattataacccccatcacaaccgctcgtgccggatccatcgaaaagctaaaagagtcgttggcttcaatattcacaggctataaacactcaaaaatcaaaagcctagattttttaacatggcgcttaaatatgcgcataaccggatgtgtattccaggaaaaaagtcgcggctggttgtttttcttttccgaaattaaacacgaaacacttctgcaccaattagacctatacgtagaccaactaataaaaagattcaatgtaaaaatatcgcccaaaagcttcgtacgcgctttttatgaaatcaatcggcgacgccatattacaaactacgtaccaaattttgatcgttacactatcccccaaatgacggccgtactgaccgattacttcaacaaatctgtaaccggccttaccgatgaagaaatcgaatacgaattcaaaaaaaggatcgacagacaatcacgcgagctactagttgacttagcaactaacagttcagcctcatag

SEQ ID NO: 366711 - DNA, 369 bp, Pseudomonas aeruginosa
gtgatctcgtcccgtgttgtctcggtcgcgctgggctgcctgctgctggtcggcctcggcgccgccggcggtgtctggctcggcgcgcggcattaccggccgctgctcgatgccgcgcggtcgggtctggttgcctgccatgccacacagggagagttggagtccgcagtggcggagcaggtccggcaggttgccgcgctgcgccaagccggggaacagcgggccagggaggcagctcaggcggtggagaagggacgacagcaggccgcggagcagtacgccgccgccaaccgcctgctgcgtgaccgcaccgccggcgagcagtgcgcggccgctgaggcggtcattgatcgggagttgggtctatga

SEQ ID NO: 366712 - DNA, 780 bp, Pseudomonas aeruginosa
atgaaacagaagcgaatcctggtgaccggggccggcagcggcttcggtcgggaagtggcgttgcgcctggccgcccgcggccatcggacgatcgccggcgtgcgcggcgccgggcaggccgccgacctgcgcgaagaggccgggcgacgtggcgtcccgctgcgggtggaaaccctcgacatcaccgtcgccgccgatcgcgaacgcgcctgggaatgggatatcgacgtgctgctgaacaacgccggcagcgccgaggccggggccagcgcggagatcccgctggaactggtgcgcgcgctgttcgagaccaacgtgttcgccaacctggaactgacccagggtttcgtccggcgcatggtcgagcagaagcgtggcggcaaggtgctcttcgtgtcgtccatcgccggcctgatcaccggaccctataccggcccctactgcgcctccaagcatgccctggaggccttcgccgaggccctgcatgccgaactgaagccgttcggcatccaggttggcaccatcaatcccggcccgtaccagaccggcttcaacgatcgcatgatggaaacctggaaacgctggtacgacccgcagcgccacttcaccgaccacagcggcgtgcgctttcccttcgagcagtacgatccggaggaaatgatcgcgcggatggtcgagctggccgaggccgacgaaggaccgttccgcaccctgttgccggaagctttcgtcgaggtggtcaaggacgagcaggcgcaggcctggcagcgccgcctgtag

SEQ ID NO: 366713 - DNA, 126 bp, Pseudomonas aeruginosa
atgcatatcgtcgagaggttattcaatggtgagtggagctggctgacgcggtatctcggttgtctggcggagttgttctatatgttcgaacttggctttgcccgttgtttgaagtttgcggagtaa

SEQ ID NO: 366714 - DNA, 1029 bp, Pseudomonas aeruginosa
gtgctggacagccgccgcggcggtgccaccgcggtgggcatggggcacctggtggcgatggacgacaacccggccgaactggccctcagcgactactcgatccaggcctggcgcacctgggcggcggatctgccggaagactgcgcgtaccgcaattgcggcaccctctggctggccgccgacgccgccgaactcgccgaagccgagcgcaagcgccaggccctgctggccgccggcgtcgcctgcgagatgctcgacgccgcgcgcctgcgtgacctggaaccggtcttgcggccaggcctcgccggcgccctgaaggtgccgggcgacggcatcctctacgcgcccaacgcggcgcgctggctgctcgaacgagccggcccgcgcctgcgtcgattgcacgccgaagtcagcgaagtggacggcagccgcctgcgcctggccgacggccgctggctgagcgccgaggcgctggtgctggccaacggcatccatgccggcgagctgtgcgcggagctgccgatccgcccgaagaaaggccacctgctgatcaccgaccgctatcccggcaccctccgccatcaactggtggaactcggctatgtcagcagcgcccacgccagcagcggtacctcggtagccttcaacgcccagccgcgccccaccgggcaggtcttcctcggctcctcgcggcagttcgacacgctcgacccgcaggtggaaggcccggtgctggcgcgcatgctgcggcgtgccctggactacctgccggggctcgccggcctcaatgcgatccgtgcctggaccggcttccgcgccgccactccggacggcctgccgctgctcggcgagcacccggcgcagccgggcctgtggctggcggtcggccacgagggcctgggcgtgaccaccgcgccgggcagcgcgcgcctgctcgccgcccagttgttcggcgaaacgccgccgctggataccacgccttatctgccgcaacgcttcctctccagctccgggagtgcccggccatga

SEQ ID NO: 366715 - DNA, 375 bp, Pseudomonas aeruginosa
atgtccaccagcacaacccaagcgatcaacttcgccgccaagctcgccctgttcgacgaccgctggcaacccagggtgatcgcccagatgaacgactaccagttcaagctggtgaagatcgaaggcgacttcgtctggcacagccacgccgacaccgacgagaccttcatcgtcctcgccggtcgcctgcgcatcgatttccgcgacggcgcggtgcacctgggccccggcgagatgtatgtggtgccgcgcggcgtggagcacaagccgttcgccgagggcgaggtgcgcatgctcctggtggagccctgcggcgtgcgcaacaccggcgaccagggcggcgagcggacggccgtcaacgatctgtggatctga

SEQ ID NO: 366716 - DNA, 372 bp, Pseudomonas aeruginosa; identical to SEQ ID NO: 334662

SEQ ID NO: 366717 - DNA, 1272 bp, Pseudomonas aeruginosa
atgagccaggacgacacccccgaccgtgccgcgccgcaggtgggcaaggtcgcgcccgaggcggtggcgctgcgcgcgcagccgcgcccggtcacgcgccttaaccggcgcacgctggcgatgttcatgggcggcctgtcggtcgccgtgctgggtgcgaccatctggtcattgcagccgcaccggcgcggcgcgggcgagcagaccgagctttacaacgtcgatcgcgtgtccaagtccgaagggctggacggcctgccggccgactactcgaagctgccgcagaaggtgcccgagctggggccgccgctgccgggcgaccttggccccgccatcgtggcctcgcagcagccggtcacgccgacctatgtgccgcccggccacgaccccgaggacgccttgcgcaaggaggctgacgccgctgcggcctcatcggtgttcttccgctcgggccagcagggcaatgccgcagcgccagccacggcccaagccgctgcggctgcgactggcaacgccttggcaggcttcgacccgctggcggctgggcctgcctcgatggcggcccagcctgccgacccgactgccacgcagaaccggcaagaccagaaggaggcattcctgaaaggcggttctacggaaacccgcaattccggcaacctgcaaatgccggcctcgccgtatcaagtcatggccgggacagtgatcgcggctgcgttggtgacgggcatcaagtccgacttgccgggcgacgtgatcggcacggtgacagagccggtctatgactcggccacgggcaagttcctgctgatcccgcagggatcgcgcatcctcggcaaatacaacagccaggtcagttacgggcagagtcgcgtgcaggtggtgtggaaccggatcatcctgccagacacgtcttcgctgaccatcgacaacctggtgggtaccgacccggccggctactccggcctcgaagatggcgtggactaccactggggccgcatcgtcgccggtgcggcactgacgacgctgctgggcgtaggtgccgagttggccgcgcccgagaaccgccaagacggcaaccgcatcgtgatcgcggggcgcgacagcgcccaagacagcatcaatcaggttggacaggagatgacccggcgcaacatgaacatccagccgacgttgaccgaacggccgggcctgccggtgcggatcatcgtcaaccgcgacttggtgctgcgaccgtaccagccgatgttcttcaaccggggagcgatgcgatga

SEQ ID NO: 366718 - DNA, 729 bp, Pseudomonas aeruginosa
gtgagcgcgaacggacgatcgatcctgctggtggacgatgaccaggagatccgcgaattgctggagacctacctgagccgcgccggcttccaggtccgcagcgtctcgcggggcgccgacttccgccaggcgctgtgcgaggaggaggcgagcctggcgatcctcgacgtgatgctgccggacgaggacggcttcagcctctgtcgctggattcgctcccaccagcgcctggcctgcatgccgatcatcatgctcaccgccagttccgacgaggccgaccgggtgatcggcctggaactgggcgccgacgactacctgggcaagccgttcagcccgcgcgagctgctggcgcggatcaaggccctgctgcgccgcgcgcagttcacccaggtgcgcggtggcgacgtactggccttcgaggactggcgactggatacggtcagccaccggctgttccacgaggacggcgaggagttcttcctcagcggcgcggatttcgccctgctcaagctgttcctcgaccatccgcagcagatcctcgaccgcgacaccatcgccaacgccacccgcggccgcgaggtgctgccgctggagcgcatcgtcgacatggcggtcagccgcctgcgccagcgcctgcgcgacaccggcaaggcgccgcggctgatccagaccgtgcgcggcagtggctacctgctggcggcgcaggtgcggccgcacctgcagccatga

SEQ ID NO: 366719 - DNA, 186 bp, Pseudomonas aeruginosa
atgaatctgctgaagaactacatcgcgcaacacggcagcattgtcgtggagaaactctacgagccgccgttcgacagtatttcccacgagggtatcgacggcgtcttcgcccccgaggatgtcggcgagttggtcgccgtgctcaagcccttcctgcgcggggatgtcccgccaagcagtcactag

SEQ ID NO: 366720 - DNA, 252 bp, Pseudomonas aeruginosa
gtgattgagcagcagcagacccaagtcttcttcgctcctacggcgcgccgccgcttcctgacccgccgcgcggctatcaacgccgaggccagggcgatcatcaaggagcacttcccgagctaccggggcggatgggttggccctcagccctgggactacgaacccggttggagcttggaagccaacgagcctgagcgcttcgcgcgctactaccggctgctcaccgcggccctgaagaaggtgcagccatga

SEQ ID NO: 366721 - DNA, 339 bp, Pseudomonas aeruginosa
ttgctgaccacgcgccagcgggtcaagggtagcccgttcgtgttctcgtcctggggcaaggctgggcacatcaaagacccgcgcgacaccatgaagaaggtcagcgaggctgcaggcacgaagatcacgccacacgacctgcgccgcacctttacgaccatcggcatcgccaattgcgggatcgacttgcacaaggtcgaattgctgacgaaccatgtgccaaagggagttaccgcgcgccactaccttgagacgagtcacctgcaatatctcaagcctgagacacagcgcatatccgactggatcgaagagcaagcccggctctccggcacaagttga

SEQ ID NO: 366722 - DNA, 1449 bp, Pseudomonas aeruginosa
atgcacagcacgcatagcgtaggacaagccaattctggcggctcggagaatttgcagggagcacagccgccgctacagcaagcggagcaccccagccagtaccccaatggcggcaaccttgcgatctcggccccagcgcccgcgcagccgcccgcatggttgcagcaagccgctgaacgtaacccgcacctcacccccgaggtagcgcatgctcaagcagaggctgagcgtgtgaaggggctggccgatttcgcgcgcgagtcgaccaaggccgaggaaacgcgcctcaagcaagaggaggtgaagctcaagcgtgaaatgctcaagaagggcttaggcatcgaggacagcacgaacggcccccggtcgctcgttgggcgcacgcttggcaccgtgcagatgcgcgccatcgactggctatggactggctggattccgaaggggtacataacgcttcttgctggggagactggcgcaggcaaatcgacggtgctggcggacgttaccgcgagggtcaccacaggggcaccgtggccgggtgagtatgaaccgcgccagccgggccgcgtcctatggcttggcagcgaagacagcatcgaagaaatgactgccccgcgtctggtggcgtgcggcggcaacctaaatcacgtcatcgagattcaaggcgtgacgcagcaagggaagcgcaacaccttctccatgcaagatgaccttggcgagattcggcgctggctgacagccgcgagagatgaaggattcccattcgccatgctcgtcattgaccctgtgaccagctacctgcccgggcagaagctgcgcaaggtcgatctgaacgacgcggggcaactccgcaccgtcctagagccgtggctggtgctcgcgcaggagcacaacatcgcaatcgtctgcgttacccacttcgccaaagacaccacgcgctcaatgctgcatcgcgttctcgggtctgctgcattcacgcagacctgccgtagcttgatggcgattgtcagccgggaggacgacggcccccacgccaaagcgatggtgcaggtcaaagtgaacctaccggagcatccgggcggctcgtggaagttcagcacggtgaaagtcgatattgcaactgacccccgcaatggcaaacccatcagcgcgacgcgcccgaattgggaggaactggacagcgcactgaccccgcagagcatggtgggcaacacgcggggccccgtcagcaagtacgaggcggcttttggcatgtggctgaaggcgtactttttgaccacgcctgcaacgccgtggcagccgatcagccaagtgaagcaagcagcggcgtccgcaagtgttgtctctgaacgctggtggaacgaacacagcggaagctacatggacaagcagaacgtcggagggatttggtattgccgcccgaagaatttgtatgcagaaactacgtaa

SEQ ID NO: 366723 - DNA, 228 bp, Pseudomonas aeruginosa
atgagcgtcagcagcgccaagggtatgctttcccgactcaagaagctcgaaaggtcgcacggtgccaccgacgagatgcgcgagtgggtcagtgactcgtttggcgctgccattgcgggaggcagcatgtgccccgctgatggccctgtggtgctgcactgcctgctgaactggatcagcgacggcaccgcgcgcagcgggatcgctggggagggtctgctgcgatga

SEQ ID NO: 366724 - DNA, 534 bp, Pseudomonas aeruginosa
gtgtccagcaagtcccgtgaagagcttggcgtagccctcagcgcgttcaacctcacgttcaccacactcaagcacaaccgcacgttcagcgtggagtgcgcttatcagggcagcaaggtattcgagcgcggtggccccttcgtcgatatgttcggcatgacctcgcgcgaggcgaagaaggacgaccggctgcgctcgtcgggccgactgactggcttccggttcttcggcaccgattgggggctggagccgcaaactgcgttctacgattggctctatatcaatgccctgaagaagcagcccagcgtgaccgagcagcttctggaatactcggccttcaccgatattgagttcaaccccgagcgctcgatcaactgccaagcgtattcggtcgcgctctacatctccctgcacaagcgccacctgctcgaagaggccacgtcctccaaggaagcattcctccgcactgtgggtacagccgcaatcagcaacgcccgacaagacgagaccgtgcaaggcggcttcaagctctga

SEQ ID NO: 366725 - DNA, 642 bp, Pseudomonas aeruginosa
atgccaaggcaggcgatccaagcacacgcgacagcgattcaagttccttacttgctgcatttcacccgcgcggtgaacctgccaaccatcatggctcatggcctgtaccccatcgggcgcgctcatgaagttggggccgcaccagccatcaacgatcagtaccgattcgacggccatcgcaacagcacttccgtctcaatcggcttcccgaactgccagatgctgtacaagtaccgcatggctgatgctgctgtggattggtcgattctcgttcttcacccttcgatcttgtgggcgaagaactgcgcgttctgccgccacaatgccgcagacgggcgcatcagtggccagcttcttgcgaacctgatgactccccaagcctttcaggggatgtacgaggaaattgaaggtctgacgacacgcgaggaacagaagctcaagccctacgacccgactgatgtgcaagctgaggtgctggtcttcgatgtcatcgaacctcagtacgttgctggcatcatctttgaaaagtcggcagtccgcgatgcttacctgccccatctgggagaacgaaaaacctacatccacgcagacaacaaagggatgtttgcgaatcggaagtatgcgaggacatggggcaattaa

SEQ ID NO: 366726 - DNA, 180 bp, Pseudomonas aeruginosa
atgagccagcagcgaaagattttcgagaaagtgacccgcgaaaccctggttttgcacgacggcaacaacggcgaatggtggttcatggatgagaaaggcgttttcataaaaggctatttctcttcgcctatcgatgcttaccagtgggcagtcaagcagggctttgcgctaagcgaataa

SEQ ID NO: 366727 - DNA, 297 bp, Pseudomonas aeruginosa
atgaccgtgcaaccgatcagtgacgagcagttggtggaggtggaaaggctaatttcccaacgcgaaccgagctatgaaaatcggaaaatcatgaacgccacgatttccgccattatcgcccgcctgcgcgctgctgaggtcgatgctaagcgctggcgtcatgcgcgtgacatcctaactgtcgaggcgattgagtcggctcaatgtgacttcatcaacttcggtttgccacctgatgaaagcgaaagcatccgcgcagatcaggctatcgattccgcaatggagagcacgccatga

SEQ ID NO: 366728 - DNA, 147 bp, Pseudomonas aeruginosa
atgcttttcgtggaccctcacgtattggctttcttcttcgctccacataatgcctcttggcaccgtgtgtatctgttcgaacgccgcacgctcatccccgcctacctgctctaccgcaggatgtgcagtttccagcgctccagataa

SEQ ID NO: 366729 - DNA, 423 bp, Pseudomonas aeruginosa
atgagcgaaaccgcagaaatgaagacctgcgagcttgagggggcagcgcttgattgggccgttgcaatggctgaaggcgaagaggtcattgtccatggcattggacagtaccgttatgacgtgagaggcggcattcactgctgcaaatatggctgcacctttggccctcgctcgattactgaagaagtcgagcgatacgaaccttcggactcatgggctcaaggcggaccactggtcaccaagtacctcatcgagttcgcagtcgagcacgcacggacgatatgcgcctgcctttgcgacgagaacggaatgtacatcagtggttgctcatatggagatacgtacctgatcgccgcatgccgagccatcgttacagccaagctaggggaaaccgtcaacgtccccgccgaactcatcaagtaa

SEQ ID NO: 366730 - DNA, 306 bp, Pseudomonas aeruginosa
atgagcaagaaatttacccgtcagcaactggttgaacgtgttgtccgtgctggcgccgatctggtcgccgctgagtcggtattccgcaaggcccgttacgagatcaaggcgatgtacgacacctacttccgggcgcatgggcgtccggagggggaatttctgccctatgccgaagagtttcagggagtggtcgagttcaccgctggcgcgaatgctcgccgggctcaggcacgacagcaggtccacaatgcccgccgtcgtctggagcgcgcggtgctggcgctgaagcgggagggatgggcatga

SEQ ID NO: 366731 - DNA, 765 bp, Pseudomonas aeruginosa
atgactgatctgaccggcttcggcggccaggccgccaccatgaccagtatcgatctgcgggacatcatcaacgaggcgcgggccgctgcgaatgaaccccgcgtcaggaatgaccagttcatcgcccgggtgcaggatgagctcggcgatgagcttggggtatgcaaaaaaattgcacacccccagagcggcgttttgatggagtgttacgagctcactttggaccaatgcatgctcgtcggcatgcgggagtccaagggggtgcgccgcagtgttctggagaggctgaaggctctgcgtgcgccgatgacccaggctgagcagatgctggctcatgcgcagattcaggtgcaactcgagtgccgacagcagcagatcgagcaacagcaggcccagcaccaggtcgctattgagcgcgtcgagcagcgggtcgaggacctgtccgagtcccgtgtttgggaccactgcccgcagaactgcatgccgatcactcgcatccgtgaggtgatcaatgaccgttatggcctgtcggccaccgtggtggacgcagtggttcggcagatgcctatcagccctaagccctggggcatggtccgcaacggccacgagaacgcccagggcagccagtacgcggtctgggcgaccagcgatatcactgcggtcttcaagcgcttcgtcagcgagtgcgagcgggttaccgagacccaagctacccatccctatttcccgggccggttccggctgcccccgaaggtgaacgtatga

SEQ ID NO: 366732 - DNA, 1026 bp, Pseudomonas aeruginosa
gtggcaaccattcgagcccgaaagagcgcggacggctcgctccgctacaccgtacaaatccggatcaaggagaatggcgcgcaagtttaccaagagagccggacattctcccgcaaacaggctgcgcaggcctgggccaagcgacgagagactgagctgagcgagccaggtgcaatcgagcgggcgaatcgctccggggtcactgtcgcatccatgattgagacttaccttcgggagcacgccaaggcacgaccgatcggtaagaccaagaaggcaaccctcgaggccatcgccaagacccatctgggtgaatgcgaggatcgcagtatcactgctcaagtgctggttgattacgctctatggcgtatgagtgctgaggggggaggggttaagccgcagaccgttggtaatgatctcgctcatcttggcgctgtgctttccgtcgctcgccctgcctggggggccagcatcgaaccgcatgcgatggcggatgcgcgaaaagtgctggccaagctgggatataagctcaagagtcgtgagcgcgaccgccggccttcgcttgaggagcttgatcggatttttacagagcttgagaaaaccctgtcgaatcgacctacctcgatcaacatgtttaaggtcgcaggcttcgccattttttcaacacgccgacaagaggagatttgccgcatccgctgggatgacctggatgaatcgcggcaagctgtgatggttcgcgatatgaagaatcctggtgacaagattggcaataacgtgtggtgccacttgcctgatgaggcctgggcgattgttaaaagtatgccgcgtacatgcgacgagatttttccatacaacagtgagtcggtgtccactgcctggagtcgagcctgtgagcgtgccggagtgaaggatcttcacttccacgaccttcgccacgagttctcccaacattgcaaatgtttcgcaaaacacagctattaccctgtagggggcgagcctgaccgcatcggcctcatgcgttgcgcataa

SEQ ID NO: 366733 - DNA, 285 bp, Pseudomonas aeruginosa
atgaaaacactgtttttgctgatggcgcagtacgacgggcaggcaataatcccacttgatcgagtttgccaagactacttttcgcaccttagtcccgatatgttccagcgcaaggccctaagcggcgcgctgaagatccccattgtgcgcatggagcagagccaaaaatctgccaagggagtacaccttgaggatctggccacttacctcgacacccagcgcttggaggcgattcgggaacgggatcaactcagtggcggccgccgcgtcgggagagaccattga

SEQ ID NO: 366734 - DNA, 1239 bp, Pseudomonas aeruginosa
atgaaaaccatcaacaccgtagaggtactgctcgctggaatacctgtgggagagctggtcgccagccgacagggcatttactttgcctatcatccgcagtggttggcgcaaggcttcaacctgtcgcccctgaacatggacttcaccacccaaccacagaaagctgcagatccagtcctttttgctggcctaccaggagcgcttgccgactccctaccggacggttggggcatgctgctcatggaccgctatttccttgccaagcatggaaaagaccgtagagacatttccccgctcgatcggctggcttacatggccgacaggggcatgggtgcactggagtatcgcccagtcctcgagcacaccaccgacgaaggtgaatttgacctggcccaactctatcaggagtcccaggctgtctacgaaggagaaacctcgtccatccttgatgccctgcgcctggctggtggctcccctgccggcgcccggcctaaggtcgtcgttgccctgtccccagacagaaggcagtgcagtacgtctttccagcagctcccgactggctaccagcactggctagtaaaattccgggcaccaacagagcatcgtgacaccggagccatcgaatacgcctacgcactgatggcagaacgtgccggagtgaagatggccgcgagcaatctgctcacagtcaactcctcaactggaaccgagcgtttctttgctgcccagcgtttcgatcgacacggcaacagcaaaatccacatgatgacggctagcggtattctttatgccgattaccgtgctccatcgctggactattcagacctgctgaaaacaaccaacgctgtcaccaaccatgcggcagaggtcgagcgcatggcgaggctcatggtgttcaatgccctgacccacaaccatgacgatcacgctaagaacttcgcgttcttgcacgaccaggggcgatgggtactggccccggcctatgacctaacctatgcccctgtccggggttatgcggatgagcacacaacctctttcaacggtgccggcttggccacccgcaagaagctaaaacaagtctgtgcgcccttccgctatctaaatccggatctctacgtcgagcagaccctcgatgctctctccggatggccgtctctatgcggtgaacttgagatcgcccccgatcagcagaaagtaattcagcgggcattcgacgagatccgcaatcgcctcggctga

SEQ ID NO: 366735 - DNA, 297 bp, Pseudomonas aeruginosa
ttggccctgacccattccctgctcgcccccggcgaactggcccagaagatcggtgccaacgcccgggaggcgcgtctcgcacagaacctctcccgcaagtccttggcgcagatggcgggtgtttccgagtcgactatcaagcggttcgagtccaatgggcagatcaccctcgatgctctggtgctcatcgccacggcacttggcgccacacgccaactcgctgaactgttcaagcatgagcgtcctgtctcgcttgaagaaatcaaacaggcaggacgtacccggggacgccaatga

SEQ ID NO: 366736 - DNA, 1293 bp, Pseudomonas aeruginosa
atgagtgcgacggacgcaagccaggacgcggcgccagcgccgctaccgcccaaggtggccccggaatccctcgaattgcgcgcacagcctcgcccggtcacccgcctcaatccccgcatgctcgccgtgctcgccggcgggttggccagcgcggtgctcggcgccctgctgtggtcgctgcaaccgcagcagcgccgcgaagacgcggagcaacgcgagctgtacaacgtcgaccgcgtgacccgctccgaggggctggatcagctaccggcagactactcgcagttgcctcctcccgttgcgcccgcagtgccgcagctgggtccgccgctgcccggcgacctgggtggacccatcctcagggccgagcaggcacagggctacgactaccgccactctggtgccgacccagccgaagccgagcgcctcgcccggctcaaggaggctgaggaagtcgcgctgtcgtcggtgtttttccgctctggtggcgggcggacatcgggcgccgcgcctgctggtccgaacctggccggacaggggggattcgatcccctggccacgggttctgcatcgactactgcagcaattgctgacgcagcggctcctcaaaatcggcaggagcagaaagaagcgtttctccgtaaatccgcaaatgcacaaatccgtaattccggatttctgcaaatgccggattcgccctaccaggtcatggccggcaccgtcattgcggcggccttggtcaccggaatcaagtcggacctgccgggcgatgtcatcgccacggtgaccgaaccggtctacgacagcgcctccggccagcatgtgctgatcccccagggctcgcgcctgctcggccgctacaacagcgaggtgagctatgggcagagccgcgtgcaggtggtgtggcagcgggtgatcctgccggacacctcgtccttccagctcgacaatctggtgggcagcgacaccgctggctatgccggtctggaggatggcgtcgactggcactgggaccggatcgtcgccggtgcagccatgaccagtctgctgggcatcggcgccgaactggcggctccggagaaccgcacggatggcgatcggattgtgatcgccggccgcgacagcctgcaggactcggtgaaccaggtcggccaagaggccacccgccgcaatctcgatatccagcccacgctgacccagcgtcccggcctgcccctacgggtgatcgtcaaccgcgatttggtgctgcgcccctaccagcccttgttcatccagcagaggaacccgcaatga

SEQ ID NO: 366737 - DNA, 1179 bp, Pseudomonas aeruginosa
atgaacgacgtcagcgtgatcgaccgtttcctcgccgtgttctcgctctacatcgattcgggcttcggcctgctcggcggcgaggtagcctttctcaccctgaccctggtggccatcgacatgaccctggccgggctgttctgggccatgggcggcgaggatgtcagcgccaagcttatccggaagacgctctacgtcggtgccttcgccttcatcatcggcaacttcaacgcgctggctgagatcgtcttccgctcgttcgccgggctgggcctgctggcctcgggcttcgcgctgagccagggcgagttcctgcagcccggacggctggcgtccatcggtatcgatgcagggaatcccttgctggaacacatcagccggatgagcgggttccccgaggtcttcagcaacctgcacagcatcgtcgtgctgctccttgcttggctggtagtggtggtcagtttcttcttcctggccatccagctgttcgtcaccctcatcgagttcaagctgaccaccctcgccggcttcgtcctggtgccctttgccctgtggaacaagactgccttcctcgccgagaaggtgctgggcaacgtggtggcctccggcatcaaggttttggtgctggcggtgatcgtcggcatcggcagcgggctgttcgccgagttccaggccgtgccggacgccccttccatcgaccatgccctggtggtgatgctcgccgcgctggcgttactgggcctgggcattttcggcccgggcatcgccactggcctggtttccggcgccccgcaactgggggccggtgcggccgctggtaccgcgctgggcgtcgcgggcatggctgcaggtgcggccgccgtggccactggtgttggcggcgccgtgctggccggcgcccgcatggcgcccggcgcggcgcgcctggccctcggcggtgcccagccgctggccgctggcatggcacctggcgctgcgactgccggtgcagcgccaggcggcgcgacggcgccggctggctcctcggtgtcccccgccagccagcccgactgggccaggcgcctgcaacgcaaacagcagctcacccaggccgccaccaccgtcgcgcacaccctgcgcgctggcgacggcggcggctcatcctccgggccgcaagtgcgcgacccgtcgaattcgtga

SEQ ID NO: 366738 - DNA, 192 bp, Pseudomonas aeruginosa
atgaaaaccttggcactgctgcccctaatgctcgtgctggcggcctgcggccagcacgatgacggtggaaagccccggtcagaactctccccgcaggcgcgcttttactccggttgcgctcgccccggagaattcttcacccccgagagtctgcccgcgatcccgccgagcttcgacgaggacgtgcgatga

SEQ ID NO: 366739 - DNA, 738 bp, Pseudomonas aeruginosa
atgactcttcgtacctgccgttttccgctcgtcaccctgttgacgtggggcctgctggcattccagccggccagcgccctcaccgtgatcgaccccaccaacctcacgcagaacaccctgaccgcggtgcgcaccctggagctgatcaacaaccagaccagccagttgcagaacgaaacccagatgttgctgaaccaggcccgccacttggcgaccctggactacaacgtggtcaatcggctgcgcgtgaacctcgccaacaccgagcgattgctggccgaggcccaggggctggcgtacgacgtccagcgcctggaccaggagtttgcccgcctgtatccggccgagtatgcgggcagcgtcaccggcgaacgtatggcgcaggaggcgcgcgagcgctggcagcaggggctggacggtctgcacaccgccctgcgggtacaagcgcaggtggcgcagaacctgggccaggacgagagcgtgttggccgatctggtgcagcagagccagctggccggtggtgcgctgcaggcgacccaggccaccaaccagttgctggccctacaggccaagcagtcgatccaggcccagcagctgcagatcacccagaaccgcgccatcgccctggagcttgcccgccaggcggcggcagccgaggaggcccgcgaactgcggcgacgcttcatgggcagtggcacgccctacacgccctaccccgtgcagttctaccggcagtga

SEQ ID NO: 366740 - DNA, 1008 bp, Pseudomonas aeruginosa
atgagcgcgcttgcctcctcagtgccgagctcggcggcggcgtcgctggagcgccgcacgcgcatgctgcgcacggcgatggggccgctgatcgctgccgccctggatgatccggatgtggtggagatcctgctcaatcccgacggcgccctctggctcgaccgactctcgagtggtcgcgcccaactgggcacgctgcccgccgccgatggcgagcggattatccgcctggtcgcggcgcatatcggcgcggaagtgcaccggggcaagcccttgctcagcgcggagctgccggacaccggcgagcgtttcgagggggtgctgccgccggtggcagccgggccgacgtttgccctgcgcaagcgcgccgccggcgtcatcccgctggaacagtacgtggccgacggcatcctcaccgcctggcaggccgagtacctgcgcggcgctgtgcgcagccgacagaacatcctcgtcgccggaggcaccagcaccggcaagaccaccctggccaacgccctgatcgccgaggtggccagtaccggcgaccgggtcctggtgctcgaagacacggtcgaactgcagtgcccgtccctcgatcatgtcgccctgcgcacccgacccggtgtggtgtccatggccgacctggtgcgtaccacgctgcgcctgcgtcccgaccgggtggtggtcggcgaagtgcgcggcggcgaggcgctggacctggtcaaggcctggggcaccggccacccgggcggcattgccaccctccacgccggctccgcccaaggcgcgctgctgcgcctggaacaactgatcctggaggtcgccctggccgcgccacgggcgctgatcgccgaggcggtcaacctggtggtgttcctcgccgggcgtggccgcgctcgccatgtccagcagctcgctcgcgtcatctgccacgacgaccgcggctatcagctcgcctccatcgacaccttcctttcctcgtcttccgtctcaggaaatcaaccatga

SEQ ID NO: 366741 - DNA, 597 bp, Pseudomonas aeruginosa
atgactcggaggaacattctgatcgccgccagcgagttgttctctcgcgatggcgtgaacaatacggcactggaaaatatcgccaaagaagcgggcgtgacccgtggcgcgatctattggcacttcaaggacaaattcgccctgctggaaacgctgctaaacgagcagaaactcccactggagcgatcgattcccgaaggactggatttcgaaagagcctggcaactgttgcacaggtccctcgttgaaaccgtcagcggcgaagcctccaggaaactgtcgggaatcatggtttaccagagcgcgcctgcaatcgggacgcccacggtccataaatgcctgacgcaaacgaagtcgcgcttcatgcgccaggtcgagcggttgctggcgggtgccgcgaacagcggcgagctggcgcaaaacctggacctggatgcaaccggaatactcattcaatgctgcatcagtggcgtgctgtatgaatgcctgcagaaaccgggagaccattccggcttgatttcgtcagcaatggaatctctgttctttctcttgaaatctccgcccctccacttgttgaagttcagccctccccattga

SEQ ID NO: 366742 - DNA, 783 bp, Pseudomonas aeruginosa
atggttcagactgacctggcgagcgacgccggcaaacacagcggcattcaggtgattgcccgggcggccgcggtcatgcgtgcccttggcagcaacccgcagggcctgagcctcgccgcgatagcccagatcgtggatttgccgcgctcaacggtgcaacgcatcatcaccgcgctcgaggccgaatttttggtcgaggcgctcggaccgagtggcggttttcgccttggcccggcgctgggacagctcatcagccagacccaaaccgacatcatcacactgctcaaaccgcagatgctcgagctttcggaacaggtccgggaatcgatctgcgtatgctcgctggtcggtgacaaggcctacgtcgtggatcgcatcgtcgcggagcgcgagctccgggtggtgttcccgatcggcatcaacgcccccgcctatgccatcgcaagcggcaaggccctgctcgcggcgctgtcggaggaaagcctcgggcaattgctgcaggatccgctgccgatcctgacccccaacacccccaccatcgcgtcactccgggaacagctagcgcggattcgcagcggtgaggtggcagaggaccatggcgagctcatcgaaggcctgagttcgttcagcgtcatcctggatacctacctcggccgctactccatcgccatcgtcgcgccctccgcgcgggtcgccacgcagcgggaggtattccagcgagcacttctaacgtgcaagcagaacattgaaaaagcgattgggcgggctcctcacaatgcttga

SEQ ID NO: 366743 - DNA, 1149 bp, Pseudomonas aeruginosa
gtgaaacacccgaaagtaatgcgtgccagacagtctcttcccctcgcgatgctgttcgtgctggctggttgttccggaggcggggacgtggagaccgctgcacgggtgccagaagtgggcgtctactccgtgcaggcccgaccgctgaccttgaccaccgacctgccggggcgtaccagcgccttccggatcgccgaagtgcgtccgcaggtgtcaggcatcttgcagcggcgcctgttcaccgaaggcagcgaagtgaaggagggcgagccgctctaccagatcgactcgcgcacctatgaggcgcggctggcccgcgccgacgccaatctgagcgccgcggcgaatctggcccgccgctatgagcgcctgctccagaccagcgcgatcagccgccaacagtacgacgatgccagggccgcctggaaacaggctcaggcggaggtccaggtggcgcgtatcgatgtgcagtacaccaaggtgctgtcgccgatctccgggcgaatcggccgctcggtcgttacggaaggcgcgctggtgaccaacgggcagccgcaggctctggccaccgttacccaactcgacccgatctatgtggacgttaatcagccgatcaccaggctgctggagctgcgccgcgcgctggagtctggtcggctgcagaggagcggagaggatcaggcgcaggtcagcctgaccctggacgacggcagcgcctatccgttgcccggcaccctgaagttctcggaagtcagcgtcgatccaaccaccggctcggtgaccctgcgcgccgaattccccaatccggatcgcaaactgttgcccgggatgttcgtgcacgcgttgctcaaggagggcacacagccaagtgcgatcttgctgccgcagcaggccgtgacccgcgactcacgtggcgtgccgagcgtatgggtggtcaagtcggacaacagcgtcgaacagcgcgaagtcgagacgttgcgaaccgtcggcaatgcctggttgatcggcaagggcatcgtcgatggtgaacgggtggtgaccgagggcatccagcaggtccgcaacggcctcatcgtcaagccagtgcaggccggcaacgtgaatctggtcaccgatttcgccccggcaagcaccaccgcggccaactga

SEQ ID NO: 366744 - DNA, 1428 bp, Pseudomonas aeruginosa
gtgagactcaagcatctgacggtcgcaatggccctggcactgggcggctgcagcctgattcccgacttccagaggcccgaggcgccgattgagtcgcaatggccggagaatctgaccggcggccaggtacagcaaggcgacaggggcgccgcagacctggcctggcaggagttcttcctcgaccccggcctacgccaactggtcgggctggcgctggagaacaatcgcgacctgcgccaggcggccctgaacgtggaggcctaccgggcgttgcaccgtatccagcgctccgagctgttccccagcgtggacgctggcgcaagcggtgtgcggcaacgcctgccggacgacctggcgccaacgggtgagtcgggcgtccagagccaatatgacgtatcgctcggcgtggtctacgaactggactttttcgggcgcatccgcagcctgacccgtgcggccctggaggaatacctggccaccgcggaggcgcagcgcagcgtccacattgcgctggtaagcgatgtggcgaatgcgtatttcacctggcgtaccgaccaggccctcctggaactgaccgaggccactttggacagctatcggcagagcctggaactgatcgaatccagcgcggaagcgggagtcgcctcggagctggatatacgccaagcgcgaaccctggtcgatcaggcgcgcacgcagaaggcgctttacacccggcagatcgccgaagacgcgaacgcaatgcgcctgttgctcggcaccggtatcccggagaacctgcccaccggcagcaagcccagcatgtctctactggccgacttcccggtcggtctgccggcggatctgctgctgcgccgccccgacatccgtgccgccgagcaccgcctgctggctgccaatgccaatatcggcgcggcgcgggccgccttctttccgcggatcagtctgaccggcgccgctggcaccgccagcagtgaactggatggcctgttcgagggcgggtccggcatctggagcctggcgccgcgcatcgagatcccgatcttcaccgccgggcggctcaaggccaacctcgactacgccgaactgcgcaaggacatcgatgtcgcggcgtatgagaagaccatccagaccgctttccgcgaagtggccgatggacttgccgcgcgcggcacctacgaccggcaggtgctggcgcagcgtgatctggtcgacaacaaccgggcctactaccggctggcccggcagcgctatgaccagggggtggagacctacctcaccgtgctcgacgcccagcgcgaattgttcgcctcgcagcaacgcctgttgagcgactacctgttgcagctgaacagggaaatccagctctacaaggccctaggtggcggctggaacacacctgaacggcttttcactgtgagtcgatga

SEQ ID NO: 366745 - DNA, 519 bp, Pseudomonas aeruginosa
ttgaactactacatttcgctggccgccgtgctcgcgttcgggatttccaccggcctcgccaacgccgctgacgtgtccggttcgattggcgtgaccggacagggcgacatgacctttcgcgccggcttgacgcaggcctggagtaagcgctggtggcagagcgagacaggacatctcggtggttactgggatgccggctacacctattgggaaggcggcgacgacgcctccggcgctcattcgctgtctttcagcccggtgttcacctatgagttaagcggctggcgttacacgccctacatcgaggccggcatcggcgctgcgttcttttccaagacggatgtcggcgagcagcagctcgggtcctcgttcaacttcgaggaccgcctgggcgtcggcctgaagctgccgggagacaagcacatcggcctgcgcgtgatccactactcgaatgcgggtatcaaggacccgaacgacggaatcgagtcgtactcgttatcctaccgacaaccgttctga

SEQ ID NO: 366746 - DNA, 372 bp, Pseudomonas aeruginosa
atgggcatcatcatgtatacgccggatggctacaggtccgcgcaattgatgaagtccggttgccagaacttcgcggtcaacgatttctatgagggcacgctggaagagtacaaggcagctggtccgacctatatcgcttatacggggcccttcaaggtcgacgaagaacagcgcacgctgacccacagcatgttcatctccctgttcccgaactgggcgcgtaagacccagccccgcgtgatcagcctggaaggcgatgtcttgaccttgggcactgcaacgccgatcaattcgaaaggaaaggccgtcaattcgaagctggtatcgcatcgagcccaacctgaacaacgcctgatgctacggtttcggtga

SEQ ID NO: 366747 - DNA, 1530 bp, Pseudomonas aeruginosa
  misc_feature (1513)..(1522): n is a, c, g, or t
atggctcagatcagtaagcgccgaaagagtagcaatagtctcgtccaccagggtgaggcattggccgaactggcgcgcctcaaccgggtccttaggacgctgagcgcgggtcatcgctggcttcttcgctgcggtgatgagcagcaactcctgcaagggatgtgcgaggtggtggtggtccaggggggctatcgctacgccagtgtgtggtatgcgagtgatgatgaagggcgcactctcatgaaccaggcccatgcactcggcctgccacatacgccagaggaatcgcagttttttgaatccttggagctgtcgtgggcctcgccagaaggagggggagctccggctatcgccgtacttaccggcacgtcttgcatcggtcgcaacctcttgacggatcctgaccacaagacatggcgggaggacgctatgcgcctcggttatggctcggtgagtgcgttcccgattcgcgttgattcaatggtcatcggcgcattgactatcgccgctagcgaaccggatgcatttgacgcttcggaggcgtcactattggaagaattggcagaggatctggcatacggcatagaaaatatccgcatacggaccaagaactgccaggccgaagaaactatccgtcgtatggctttctatgacgcgctgacggaccttcccaatcgccagcttttttatcaaaaggctcaagcaacaattgatggtttcaagggaaggcatcaatcatttgcaatattgcttctgaaagccaggcagcttaatgagataaatgaaactttcggatttcagcagggtgataagtttttgctggagactaccagtcgcctgtgcgagaccataggaatgttcggagagattgcacgagtaggcgaggcagagtttgcattcctactggctaatgctgacgtggattccgctgtcgtgtttacgcagcgagtaatcgctcagttccaagagcaagacgaatcttcaggggggagtcagtatacgagactctcagtcggcatcgcggtctttccagggcatggactgaatccagatctgctagttaggcatgcccgagctgcaatgagtgaggccatacgctctgggcgagattatgcagtcttttcggctaggcttgatgagggctgtagccggcgtcttgcgctgaccacagagttaagatctgctatcaagacaggacagttgatgctttattgtcaacccaagattcgattggaagattctgctatttgtggcgcggaagctcttgttcgatggagacagcaaacaggtgaaatggtgccggcaggggagtttgttgcacttgcagagtttacaggtctaattaccccgcttacttattgggtgctcgaggctgcgttcagagaacgatttatgtggtccgagatgggcattgatcttccgctttcggtgaacctgtcagcgcaagacctgcgtgacccgaggctggtcagtaaaatagaaggattattggcaacatggggtggggtgccgnnnnnnnnnncaatttga

SEQ ID NO: 366748 - DNA, 978 bp, Pseudomonas aeruginosa
atgtaccgtcgactccttccaccggacagggcaagtggcaacacttggttcgccttggccaccttatccctactggccgtcgctctgtggccagatgccgcccttgcgcaggcagcggtcgtgctcgaccccacgttccgcacgccgcctccacccaatgacagtttcccgcagaatgccgagcacgtgttctacgcctcgctcgccatgctcttcgccgggctcgtcatggctgcggtggcgatggtcgatgcgatccgcctgaagacgacggtaccattgggcatcgtgctcgctgccgccgtatgcgtctatccagaaagcgtcgacaactacctggccggggtctactggtccacatcccatgacccggacaaactcttgtatttcctgatgggccgcgaattcgactactacgtcatcgcgatgtggtggcccttcggcacgatcctgggatacatcttctacatcgggctgcagcgcaatgtgtcgactggcaagctttggctctgcttcgccctttctggcgtggccgacatcatcatggaggagctgctgctgcgttacggtggcatctacacctacttcggtcatcagccgctggtgctgctcgggtatttcccctggtggtggctgttcgtgaacgtctcggctatctatctcggcgtggcgatcgcctatcgcttccgcgagtggttcaacggctggaggagcgtcttcattctcgcgctgataccactgtgctacatcggtggtttcacttttgccgggctgcccgccatctatgtgattcagggcgatttctccccgatggtgacgcaggcggcgggtatcctgtcctgcgtcctcgccttgatccagacttgcggcgtcctgtatttcattctcgggcgcgacccgctcacctttgcggcgcgggaaaaccaggcccaagccggtgcgacgagcggcggccggcagacgccgctgccgtattga

SEQ ID NO: 366749 - DNA, 243 bp, Pseudomonas aeruginosa
atgactttctgcatcggcgttgaccgcacctcgttctggcttctggccgagatcgccgcggtgctggtactgatcgagctagcgcggagcagtttcctcttcatggcgatcctggtccaagccatggccctgaacctgggcgcctactgcatcaatctgccactgcaagcgcgcatcctcaggttgatgcaccgccaccggccgcaggcgctgaacgcaggctctggccttcagcattgctga

SEQ ID NO: 366750 - DNA, 732 bp, Pseudomonas aeruginosa
atgctgagcaaccgctatggccagcggtccattaacgaagccgtaacagtcaacgagaacgaggttccgatgagtcactggattacgatggtaaccccccacggcccgatgaacggatggtctgccgaacctgacgacaagcccgtaggcggcgtggttctggtccacgaagtattcggcgtcaacgacgacatgcgccagattgccgaacaatatgcagaggatggctacctgacggtcgtgcctgcgctatttgacaaagtccaacgtgaggtcgaactcgactacagcctcgagaacatcctgctgggcagcagggtggctaccgaggtcggtctggagacggccgcggagctggtcgcgactgccgtcgacgcgatagctcatgctggcaatgtggcaatcgtgggctacggttggggcggcgctgtagctctgcgagcagcacaagctgtatcagcaccctgtatcgtttatgacggtatgcacgacgtcttctggcccaacgagcaaacgtggattccgatactcgtccattccagcaacagcgccgcaggtagcgagcacctgctccgcgaaaaagcaccgaatctgcaagtgctgacctaccctgcggagaacggcttctaccgaatgggcgatgcgcagcactatcatcccgaaagcgcgaatctggcattgcagaaatcactggagtttctacgcacacatatccgcagagatgagtactga

SEQ ID NO: 366751 - DNA, 759 bp, Pseudomonas aeruginosa
atgagactgaaagacaaagtcgcgatcgtgactggcgcggcaactgggattggcaacgctatcgcgcgtttttaccttgcggaaggcgcgaaagtggtcattgctgatgtgaaaggggccgaggccgctgcggcggagctgggcgacgacatcgcgctaggtgtcttcgccgacgtttcggatcccgatagcaccaagcagatggcaaaggcagcactggatcgcttcggcaggatcgacgtgctcgtcaacaatgccggtatcttcaccggcctcaactatgtcccgatggaatcaatctccgttgccgattgggacaagctctacagtgtcaacgtcaagggtccctggctatgcgccagtgcggtgtcggccgcaatgcgcgagggtggtggtggcaagatcatcaacatcgcctcggtgattgcccacatcggagcgcccttcatgttgcactacgtttccagcaaaggagccgttgcggcgatgacacgcgccatggcgcgcgaattcgcggcgaccaaggctgggatcaccgtcaactctatctctcccggctacacccattcggaaaatgcgctcgccaacgcccagcagcacgagcagttcgagggcgtttccgcgtccatgcgggcaatcgaccggccgcaagtgccggcggatattgcaggcgtcgcgctttggctggccagcgatgaatcctcctacgtcaacgggcagaacatcgtggtggatggcggcatttacatgagcctctga

SEQ ID NO: 366752 - DNA, 1485 bp, Pseudomonas aeruginosa
atgagcgctagctcgaaattcaatgtggacccggccgggtttcgcaatcgtaatctcatcggtgggcagtggaaggaggccgtttccggccagaccatcgctgtcgagaaccctgctaccgaggaaatcatcacccacgtgccgcaaggccgacacgaggatgtagatgatgcggtacgggttgcccgtgccaccttcgaatcgcctacctggcgaaaaatccgaccgatcgatcgaggtcggattctggagaacatcgcacgcaagattgaagagcatgccgatgagctggcgtacctggagtcactggataccggcaaggccgtgacgttcgccaaagccatcgacctgccttcgacgatcgatgtcttccgctatatgggcggctggtgttccaagctgggaggaacgacccctccagtttcgttcgatgggcgtgaataccacacctacacccgtcgcgaaccgattggtgtcgttggcgccattacgccttggaactacccgctcgcgctaggctcgtggaagatcgcctcggcgctggctgccggctgcacgatggtgcttaaacccacagaactcacccccctgagcactctccggcttgccgagctgtgcctggaggcggggttgccggaaggcgcgctcaacatcgtcaatggccatgggcacgaagccggcgaggcactggcgcgtcatccgggggtggacaagatcaccttcactggttcgacggtagtcggcaagaagattgtcgagtacgcactgggcaacatgaaacgcgtcacccttgagctggggggcaagtcgccgagcatcgtattcgccgatgcggacctggaccaggtcggtctgggcgctgcgctcgccgtcttcttcaactcgggacagatttgcttcgcggccagccggctgttcgtccaggacagcgtgtatgaccaagtggtcgaagccgtggcggcggctgcggggcaattcaaggtcggcaatggtctggatcccaacaccatgttgggcccactggtgtctcgcaagcagcaggagcgggtgctggggtacgtgcagtccgggatagagcagggcgccaggttgatctgcggcggacaggcagtcggagacaaaggatatttcctcaagcccaccgtttttgccgatgccgacccatcgatgaggatcgcccaggaggagattttcgggcctgtcgtcagcgtcattcgattcaaggatgaagccgaggcgatccgactggccaacgactctgcttatggcttggccgccaatatctggacgcgggacatcaagaaagcccaccgagtcgcgcatcgcctccaggcgggttcggtgtggatcaactgtcatggcgtgatcgatccggctgcaccgttcggaggattcaagcagtcaggctggggccgtgaggtctcggaagaaggactgtcggcttatacagagaccaagacggtctgtgcgcttctcgatgactga

SEQ ID NO: 366753 - DNA, 1131 bp, Pseudomonas aeruginosa
atgtgggaatacatcaagtactacttcgcacccatggtgcaagtctttgcgatcctcgggttctactggggagggcattacacctggattgcaatcggcgcttttccggccattgcgatcctcgacatgctgctgccgctcgatctgtctgagcgcaaaatgaagaaccatttctgggcctacctgccgatctgggcttcgacgctgttattgccggtcatgtacttcggcttcgcgtggtcggtagcgaataacgacctgaccggattgcaaatggcagccggtgtgctggggttggcatggctgtcggtcgtgcctggcgttcctgcaacccacgagttgtatcactcgcgcgggcggttggctcgtttcgttgggcgctatggccagatcgcatttctcgatgtcatgcgcatggaagtgcacgtagtcggccaccaccgcgacgtgggtaccgccgaggacattgataccgcagcgcgtggtatgaatctgtacagattcgtcgttcgtgcggttgtggaatccgttcgctgggagttgaagctggatgccgacaatctggagaagcgcggttacggtcgctattcgatccgtcactcggtgtggcgcgcattgctggccatcgtggtgttcctggggggcatctatgcccttggcggctggacagcggtgggtctttgctcaatctcgatgatcatcgctcgcttctgggtcgaggctttcaactactaccagcattacggccaagtccgtttagtcggttcgcccatcgagaagcggcacgtctggaatcactttggaacgctctcgcgcctgtatgcgttcgagatcaccaaccacgcagaccaccatctcaattcctacatcccgtattacaagctggtgccggatcgtgaggcgatcgtcataccgagcatcattgcgtgcttcttgtcagggttcattccgcccctttggtacagcgcgatcatcaagccagcgctcaaacgctgggacaacgagtacgcctcatcggcggaacggtcccttgcgcaggagcagaatcgccaggcaggttgggatgactggttcgatgatcagagtggacgtggcaggaaggctgacggtccttccctggtccatggctga

SEQ ID NO: 366754 - DNA, 495 bp, Pseudomonas aeruginosa
atgaaccaggaagagtcctcactccggggaacccagaaatggatgatcgggcacggcctgctgatattgctgatcggcctgctggctggcgtggggctgctggtcagcctgattggtgggctggaagtgttcccgggcaggctggtcatgctggagttgcctgggaacagcagcggttgggtgcgattccatatcggacagttgctcaatgcattcctgatcatcctggtagccctgtctctgcccgtcctggcgatcgattctcgaaaagccggtcgccttggcggatgggtcatcgggatcggttgggcgaacacattgttctatgcggccgcgctgcttgcaccgaatcgagcgctgaccttcgcggataaccgcctgggggtcgccaacctggcgtcggtgatcggcttggcgccggccctggtgtttgcagttgtttccatcgttgtcgtgggcgtgttggtcaggcacgccttctatcgcccaatgtga

SEQ ID NO: 366755 - DNA, 1050 bp, Pseudomonas aeruginosa
atgcgaaatttcatccaatccatcttcggcaaggcaccgccgaaacaactgcgaatcctgccccaggatgtaacgatcgagctcgctccaggacaaacgctgctggaagctgcgttggcaaatggtatcgcctatccacacgactgcacggttggcacctgcgcctcgtgcaagacacgccttaaagacgggcgcgtccgggaggcgacaccgttcggctacaccttgtcgaaggcggagctggacgcgggctacattctggcctgccaggcgttcccgcgcgacgagctcaccgtagtcgagatcgatccaccgtcggccgacctgccggcagccgagcaattcgctgccactatcgtggcgacggagccgctcacccatgacatcctcaaggtgactatccagcccgatcgcccggtccattacctggctggccagtatgtgaatctgcgtgtcccaggttcctctcgctttcgctcgtattcgtttgccaacgcacctcagcgcaaggggcggagcagcctcgagttctatatccgcaaggtgccgggaggcgaatttaccgaagccttgttccgcggcgagctggatggtcagtcgctggaaatggaagctccccacggcaccttccatctgcatggcggcgatgcgccgatggtgtgtatcgctggaggaagtggtctggcgccgctggtaagcatcctcgagcatgcgcgggcaaatcgtatcaagcgcgactgtacgctgttgtttggtgcacgcacccagggcgacctatatcaactggatgtcatcagcaatatcgccgccaactggcagggcgagttccgcttcatcccagtgctttcgcacgaaccggaatacagcacgtggacaggtgcacgtggcctagtgaccgaacacattgctgctgagtcctgcgaaggggcagagggctatctatgtggaccaccaccaatgatagatgctgccatcactcgtcttgcggaacatgggataccactggaaaaggtcttctacgacaagtttacggatggtcgaaatccctga

SEQ ID NO: 366756 - DNA, 1383 bp, Pseudomonas aeruginosa
atgaaaaaaacaatatacagctttagtgccagcagtttactgacgtgcttgtactgtggtgtcgcgtgtgcaacagatgctttcaacctcgtgggggttggaccagtttcccagggcatgggggggattggtgcggccttcgatattgggccgcaaggcatgatgctgaacccggcgacgctgactcagatgcaagaaggtacgtatctgggcgtgggaatggacatcatttctgcggattatgaagtcaagaacaccactaccggcgaaacagcccgctcccatagtcatgggcgcaacaacgggccttattttgcgcctgaactttctttcgtgtggcgcggtgaccagtacgcgctgggggttggtgccttcgcttccgatggcgttggaacccagtttggagacagcagctttctctcgcgtacctcgactaacaatatcgatacggggctggatagttactcccgcctgatagtactgcggataccgttctctgcagcctatcaggtgaatgaaaaactgtctgtcggggcctcgctggatgccgtgtggacatcggtgaacctgggactcttactggatgctacgcagattggtacgttggccgggcagcaacgggtgtccggatcattggtgccaggcctgctgagcgtgccagcgttatcggcaggatatctgtccgccaataatggtcgtgccgccggtggtgccgtggattcgtggggtatcggcggtcgggtcggcctgacctatcagttgaccccccaaacacggatggggatcgcatacaacttcaagacccatgttggagacctgtctggcgatgccgatctgactgcagtaagtgctgtcgcgggcaattttccactctcagggaaggtcaagttgcgcaacttcgagatgccagcgtccttcgtggttggcatcagtcatgagttcaacgataagttcgctgttgcgttcgactacaagcgggttttctggagcgatgtcatggaggacatcagcgtaagcttcaaacagtcgggcacgggtgacacgctcgatctgaagttgcccttcaattatcgggacaccaatgtgtactcattgggggcgcaataccgctacaacgataactggacgtttcgtgctggcgcgcactatgcccaattggcaagcccttcggccggcacactgccgatcatcccttcgacgccgaccaccaatctcacgggaggcgtctcatacgccttcagtcctgaggatgtcatcgatttttctctggcctacgggttcaagaagaaagtttccaacgacagcctgccgatcacagacaagccgatcgaactctcgcattcgcagatagctgcatcgattgcctataccaagcgcttctag

SEQ ID NO: 366757 - DNA, 1950 bp, Pseudomonas aeruginosa
atgagttactcgagtgtattcgtccgtccagacgaagcggagaaagaggatcgttatcttgatctctatcgctattccgtcgacgatcctgaggggttctgggccgaacaggcgcagcgtatccactggcacgttccgccgcagcgaatcctcgaggtgtcaaacccaccgttccgacagtggtttgtcggcggccagaccaacctctgcttcaatgcgctcgaccgccacttgccggagcgcgccgaacagttggcgctggttgctgtttcctcggagacgggcagtacccgggaggtcacctatgcggacctgtatcgagaggtcaatgccttcgccgcggtactcaagcggctcgacgtgggcaagggagaccgcgtcgtcatctacatgccgaacatggctgaggcagtgttcgccatgctcgcttgcgcgcggatcggggcgatccattccgtagtgttcgggggcttcgctgcgcgtaacctggcgacgcgcatcgacgattcgcagccaaagttgctgatcgctgccgatgcggggatgcggggtggccgagtcattccgtacaagccactggtggaccaagcatgtgcggagtcgaagtcgccgccacccaaggtgctgatcgtgtcccgtggtttgcagccagagctgacctgggtgccggggcgtgatgaagactatgagaccttgcgtgccgccgttggcgatgcgcaggtaccggtggagtggctagagtcgaacgatcccagctacctgctctacacgtctggcaccaccggcaatcccaagggggtgcaacgcgatgtcggtggctatgcggttgccctgtcactgtcgatggagacgattttcgacgttgctcccgggcaggtaatgttctcgacctcggatgtcggctgggcggtcgggcattcttacaatgtctatgggccgctgatcgtcggtgcgacttccttgttgtacgaggggctgcccacccatccggatgccggcatctggtggtcgctatgtgaaaagtacgcagtgcgtaccatgttctcctcaccgacggccgtccgtgtgttgaagaagttcgataccgacgccatcgctcgccacgacttgagcgccttgcgttacctgttcctggccggcgaaccgctggatgagccgacggccaactggattaatggggcactgggcaagccggtgatcgataactactggcagaccgagaccggctggccggcgattaccctccatcccggcctggaaatgaagcctgtgaagttcggctcggctggcctgccgaacctgggctaccggatcaaggtgctcgacgagcacagcggggcgcccgttgcggcgcaccagaaaggcgtgctcgtttttgaaccgccgctgcctccgggcttcatgacgactatctggcgcgatgacgatcgctactgcagtagctatttcgggcacttcaaggagcaggtttacagctcgctcgactgggcgatccaggatgaggacggttacacctacattcttggacgtaccgatgatgtcatcaacgtcgctggacatcgtctggggactcgtgagatcgaggagtccgcagccgaaactcccgaggttgccgaggcggcggttatcggtgtgcctgatgaggtcaaggggcaggtgccaattgtctttgcgacgctgcgcaagactgcgaccgatgaacttcagcgccaagaggctgcggcaaaaatacgccaggttgtagagagccgtctgggtgcgatcgcgcggccggcccgggtgtatatcgtcaatctattgccgaaaacgcgttccgggaaattgcttcgtcggtcattgcaggccctggcgctgcaggcggacccgggggatttgtccactctggacgatcctggcgcactcgatgagattcgcaatgctctgaagcgcggtcccgacgcggggagctga

SEQ ID NO: 366758 - DNA, 1209 bp, Pseudomonas aeruginosa
atgggcgaagacatcagcaagatcgtgattatcggtgccggtcaggccggagcgacggtggccttcggcttacgccgcggcggattcgctggcgaaatcaccctggtgggagaggagagccacttgccgtacgaacggccgcagctatccaaggaaatgctgcggcctgaggcgagcgaccaccagtcgatcaagacacgggctgactacgaggatcagcgcattttcttggagctcggtcgcaaagttgtcagcactgacgttcaggcgcgcagcatcgccttggatgacggtcgccagcttgccttcgaccggctggtgatcgccacgggtgtgcaaccacgccggctgtcctcggcttttcaggatgcgcatcggatccactacctgcgcacgctcgaagatgcagctcgcttgcgcgccgaccttgaagccggcaagccactggcgatcgtcggtggtggcgtaatcggactcgaggtcgctgccgcagcgcgtgcgctgaactgtccggtgaccctgatcgaagccgcggaccggctcatgtcgcgcagcgtggatgaggtggtttccgcctatctggatcgggcgcaccggcgcaacggcgtggacattcgctacggcgtggctgccaccgagttgctggacgatgggcgtctcaggctttccgacggcagtgccgtaccagcggcggctgtgctggtcggcatcggtgttacgccgaatatcgagggttttgaacacctggatatcaccgatgccactggggtgcgggtcgacgcatacagccagactgccattcccggcatcttcgccactggcgatatcgcctcgcagcccaatggcggtggtttcggacgcatcgagacctgggccaacgcccaggaccatgcactgaacctggtcaagaacctgatgggcgaagcggtgccctacgaagccccggtgtggttctggtctgaccagggcccgatcaatttgcaggtcgtcggggacgcggccaatggccggcagattatccgcggggatgagcatggagacgtcttcagcatttttcgactcgacgccaatcagcaggtcatcggttgcgcgacggtcaactcaccgaaagacatggctgtggcacgtcgttgggtgaagcaacgcagtagcgtcgatccgcaacggctggctgacccaaccatcccattacgcgactgtgccgtctga

SEQ ID NO: 366759 - DNA, 1305 bp, Pseudomonas aeruginosa
atgaataatgacaagaatctggtagagatcgacgatgagaacctcttgttccgtgtggctcgcgagtcgttcgtgagcgaagaggtcctggccgaggagtacgagaagatcttcgaccgctgctggctttatgttggccacacatccgagttcaagaagccaggcgatttcgtcactcgcaccgtcgcgcgccgcaatctgctggtgacagtgggtacggatcagacgatcaacgctttcttcaatacctgcccgcaccggggcgccactgtttgccgtgagcgatcgggcaactccaagaacttccagtgtttctaccatggctgggtattcggttgcgatggcaacctgaagagtcagcctggcaaggaacgctattgcgctgacttcattagtggcggcgcgggcaacctagtgccggtgcctcgtttcgacatctacgccggcttttgcttcgtcagcttcaatgctgaggtggaaccactgcccgactatttggcaggagccaaggaatacctcgacctggtttccaagtattccgagagcggcatgggtattaccagcggcacccaggaatacgccatccgtgcaaactggaaattgctagttgagaacagtattgacggctatcacgctgtcagcacccacgcgagttatctcgactacctcaaaaacatcaatgctggcttttcgggcgccaagctcgaaggcaagagcaccgacctcggtaatggtcatgcggtaattgaattcagtgctccttggggacggccgattgcctcctgggttccgatctggggcgaggagggcaagcaagagatcgaccagatctatgcacggttggtcgaactgcatggtgcggagatggccgaccgcatggcctacaagaaccgcaacctgctgattttcccgaatctcatcatcaacgacatcatggcaattacggtgcggaccttctatccgcaggcgccgaactacatgcatgtcaacggttggtcattggcaccgaacgaagagtccgactgggcgcgcaagtaccgcctcagcaacttcctggagttccttggcccaggcggcttcgcaactccggacgatgtcgaagcgctggagtcctgccagaacggcttcagcaactaccgacttgtgccgtggagcgacatttccaagggaatgggcaaggaaacggccaactacgacgatgagctgcagatgcgtgccttctggacgagatggaaccaattcatcggtggcgcacccacgcccgactccggcgttcaacacatacctaccatcgctttggcctga

SEQ ID NO: 366760 - DNA, 543 bp, Pseudomonas aeruginosa
atgagtgccgttgccctagaaaaagaacttctgcgtatcccatcgtcccaggacttcgccgccttcgtcacccgcagcgaagtggaggacctgctttaccacgaggctgaactgctggatacctggcagttgcacgactggctggccctgttcaccgaggactgcagctacttcgtaccgtcgaccgacctgccgcgcaccgctagcgccgacgacagcctgttctatatcgccgatgacgccgtgcgcttgcgcgagcgggtgatccggctgatgaagaagacggctcacgccgagtacccgcgctcacggacgcgccacctggtcagcaatgtccgcattctggctgccaatgccgaagagattcaggtggcctccgccttcgtgacctaccgcatgaagctcggcaacagcgatgcctatgtcggtagcacgcactatcggttgcgtcgtatcgatgggcaactgcgcatcgttgagaagcgctgtttcctggatctcgaagcgctgcgcccgcatggccgggtcagcatcattctgtaa

SEQ ID NO: 366761 - DNA, 939 bp, Pseudomonas aeruginosa
atggatatcacacttcccttccgctacaagaagctggcctatgccgcgatcaatgtgaccgacctgtccaggtcagtgccgttctatcgtgacatcgtcgggctcgacctcgtgcagcaggatggcgacatcgcctattttcgctgcagtcgcgaccaccacaacattgttctctaccaggcgcccggacacggtctcaagcgtgtgggctttgagctggagcaagagagcgacgtgcgtgccgccttcgagcatttcgaccagcgcggcatgcaacccacttgggtgtcggcgaaggaaagcaagcagcttaggcagggactggggttccgcgtgcgtgagcgccacagcggactactgttcgaactgttcgtcgggaacatgcacctcagcaatccgttcgttccgacagtggccaagatcgcgcgtatcggccatgtggtgatcggcagcgagaacttcgaaggatcccgcgattcactggtcgatgacttcggtttccgggtctcggacctgatcgaagaccgcatcgtcttcatgcgctgtcatcccaatccgttccaccacacgttcgcagttggcccagcgagcagcagccatttccaccatgtcaatttcatggtcacggacatcgacgatatcggcaaggcgctgtatcgcatcaagcaacacgatatcaaggtggtcttcggtcccggccggcatccgccgtcggacagcgtctttttctacttcctcgaccccgatggcatcaccgtggaatacagcttcggcatggaggagttcgctgagcacggcgctcgtccgccgcgctacatggaacctgtgcctgagtcgctggatgcatggggagcagtgccggacggtcagttcggtcgcagcggaccgatcgaacgcgagccgacgcccacaccccatgcaaagggggtaatggcatga

SEQ ID NO: 366762 - DNA, 780 bp, Pseudomonas aeruginosa
atgagcacgctgagcagaaacgccttgcccttggagggacaggtcgcagtagtcacgggcggggcccacggtatcggtctggggatcgtcgagcggctgctggatctgggtgcccgggtcaccgcctcggatatcgatgagtcgggcctctcgttgctttgcgagcgtctggccgccaagcatgcggacgctatagcggtgcataccgccgatctctccgaagagcagggtgcccagggactgcaccgggctgcggtcgagcgcttcggctcggtacagatactggtgaactgcgcggggggcggtgtgatccggcctttcctggagcatacgcccgagaccttgaaggccaccatcgatcgcaacctgtggactgcgttgtggtgcagccgggtattcctgccggacatgcttgctcggaagtacggccggatcatcaacatcggcgccgactcggtacgcaacggtctgccggaccatgcggcctacaacgcagccaagggcggcatgcacggactgaccaccggcctggcgcgcgagttcgcccgccagggcgttacggtgaataccgttgcgccgtgcgcggtgaacaccgaagtgtgggtcaggatcaaggacgccaaccccgctctcgcccagcgatttctggatgtcattccgatgggccgggtgggcgagatcgaagaggttgcctcgatggtcggctacctggctcagccggaggcggccttcgttaccggtcaggtgatcagcgtcaacggcggcagcacaatgctgtga

SEQ ID NO: 366763 - DNA, 357 bp, Pseudomonas aeruginosa
atgaataacatcatcgagacggttgacctgactgacctcgtgggcctgtgcgcgaccgatgacgtggctgagggtgagattcttcgcgtcaagctgccatccggtcacgctctggcaatctactgcgtcaacggggagttcttcgccaccgacgacatctgctcccacggcgaggcatccttgtcggaggatggttcgctcgatggctacgaggtcgagtgcagttggcacttcggacgtttcgacattcgtacagggcatgcctgcgcgatgccatgtgagcacccgttgcgaagctggccggtcacagtcgagggtgggcagatcttcgtcgatatgggggcgcaccctgtatga

SEQ ID NO: 366764 - DNA, 732 bp, Pseudomonas aeruginosa
atgagcggcgtcgatatttccactcttgaacagcgcgtgcgcgtggctgcgcgcgcgttgggccgacatggcctggttcaggcctgggggcactgcagcgcccggatcgatgcagagtccttcctggtctgcgccgcccgccccatgggccgtatcgaagtcggtgagccggggacgatagtgtcgatcgaaggggcgctaccgcccggtgtgctgggcgaggttcgcatccaccagcagatctaccggcgacgtccggacgtgggcggtatttgtcgcttcatgccgccacatgtcgtagcactctccacactgcgcagcgtgccgaagccgcgtcatggtgtaggtgcattcaatgcggcgtgccgcttctgggacgatccgcgtttattgcgggacgacgctttggcggcggagctggcggcgcaccttgggcaagccccatccctggtcatgcgcgccaatggcgcggtgaccgttgggcctaacatcgaactggccaccgggttcgcttggtgcctggaggatgccgcccgcatcgaaacgctggtgcgctccatggccgatgtggccgagcgtgatgatgcttgcctgactgccgaagagatcgatgcgagacaagtcagttcgggcgcggtcttcgagcgactgtgggattacctgacggcggacgacccggagagcctgggcagcggggccgcattcccagttccacagtggggacggccatga

SEQ ID NO: 366765 - DNA, 624 bp, Pseudomonas aeruginosa
atggcaaaatatcccgcgcaacgcagaacccaggccgagagacgcgaagaaacacgctcccggataatcgaagccgccatcagcgagctgttgcacaacggctacgcaggaatccgtgtcgacaaggtggcgattgccgccaaggtgtcgcgtggggctcaatcgcatcattttccgaccaaggaaagcctcgtcctcgcggcactggagacgctgtaccaggcctcgaccgaggtcagcatgaaagtcatcgacaacctggcttccgaggatgtgctggatgcgctgatgcaggagtcggccaagttctatctggggccgaactttactattgccatgtcacttctgaacttgggcgacagcaatcccgagctgcggaagaaggtgcgcattatggcccgcaagtaccgcttgcccatcgagaaggcatggctggatgcgttggctcgctccggtctggacgaagagcctgcacgcacggtgttgagcatcacccagagcgtctatcgtggcatgaccacccggcgcttcttgcgcaacgatccggaatacgcgagcttcacattcgagcagtggtcgaagatagcgcgtgcgttcatggaccagcactccctcaaacgttaa

SEQ ID NO: 366766 - DNA, 867 bp, Pseudomonas aeruginosa
atgagtctttggcttgatctgcttggcgcggaaatccgtttcgtcgacaccaaaagcttcggcacgatccggattgccgaggcgggcaaggggaaccccgaaactatcattttcctgcatggcatcaacggccacctggaggcctacgcaaagaacctgattccgctgtcgaaggatttccatgtcgttgcgtacgactatgtggggcacggtctgtccagcaaacccgttcgtgactacgacccgctcatgctggccgagcaactcggcgagctgatggatgcgctcggtatcgagaaagcgcacctgtcgggcgagtcgctgggtggttgggtctccggtcatttcgcagccaagtacccgcagcgcgtggggcggctgatgcttaatacttctgctggtatcccgatcgtgacggaaaaggggcgagcggacctggagcacttcatcgcgttgaacaggcgcaacatcgacaacactccgacttatgaatcggtgcaggcacgcttgcaatggctgattcatcccaacaatcgtcatctggtggacgacgagctcatcaatctgcgtctgcgcatctacttgcagccggagagtcgagcgatgctgccgaagctgaacgaaatccttgtgcatcacgatgactacctgatcccgctggaaaagcttccggccggcacgttgttcctgtggacgcatgacaaccccatccatgacaccgagtcggtcaaggcggcgcaggccagggtgccgggcagcagcctctacttcgtcaagggcgaatcggcgcattggccgcagtacgagtcgatcgacgagttcaacactctggcgctccggttcttcaagtccggccaggtggagtga

SEQ ID NO: 366767 - DNA, 789 bp, Pseudomonas aeruginosa
atgaacgaagccaacgtgattgcgaacctgttatgggatgcgcagcggcaaaagctgccctgtgcacccgtgcgggaatatttcgaggggaagagcgaggttgaccaggcgctattggcctatgccgtgcagcaggtgaatgttcagcgccaggtggagggcggccgacgtattgtcggtcgcaagatcggcctgacctctccggcagtgcagaagcaattgggtgtagatcggccggacttcggcacgttgctggacgacatggcgatcgtcgatggcgagccgatcgacacttcgcgtcttctgcagcccaaggtcgaagctgagatcgccctggtactcgagcgtgacctcgatcgggagcgtcatacagtcgccgacctgatcgacgcgacagcctatgcactggctgcaatcgaggtggtggatagccgtatcgccggttggaacatccgctttgttgacaccgtggcagacaacgcctcgtcgggcttgttcgtactcggcactcagcctgttggcctgtcgaagcttgatctggccggtttgtcgatgcgcatggcgcgtggcgaagaacctgtatcgcaaggggttggagctgcctgccttggcaacccgttgaacgcagcgcgttggcttgctgacaccttggtccaggtgggcacgccattgcgtgccggagatgtggttctgaccggcgctctggggccaatggtcgcggtcgagtccggtcacacctatacggcatggatcgatggcttcgccccggtacgagcaattttctcctga

SEQ ID NO: 366768 - DNA, 945 bp, Pseudomonas aeruginosa
atgcaaatacatgatggcaagaccgcagtggccatcatcggttcgggcaacatcggcaccgatctgatggtgaaaatccttcgccatggcaagcacctgaaaatgggggctttcgtcggcatcgatccggagtccgatggcctcaagcgcgccgaacggatgggcgtgcccacggtgagcaccggcatcgaagggttattgtcccaccccgatttcggctccatcggcttcgtattcgatgccaccagcgccggcgcgcatgcacgtcatgagcaactgctgcggccgcacggcgtacgcgtgatcgatctgacaccagcggcgatcgggccgttcgtggtgcccgcagtgaatatcgaacagcatctggatgcgccgaacgtcaacatggtgacctgtggtggccaggcgacaattcccatggttgctgctgtttcgcgcgtcgtgccggtcgagtacgccgagatcgtcgcctccatttccagtcgttcggccggaccgggcacgcgggcgaacattgacgagttcaccgagaccacctccaacgccatcgttcgcgtagggggggcccagcgtggcaaggcaatcatcatcctcaatccggcagaacctccgctgatcatgcgcgacaccgtctactgtctggtgccgggccaagcggatcggcaggctatcgtcgagtcggtcgagcgcatggcttccgcggtggcggcatacgtgcctggctaccggctcaagcagaccgtgcagttcgatgagttcaagggacgcatgccgcaggagacagagagcacgcaagaaccccgcctcaaggtttcagtattcctcgaagtagagggcgcaggccattacctgccgagctatgccgggaatctggacatcatgaccagtgcggcgctggcgacggccgagcgcatcgctgcccgtcagccggtggcagcgtaa

SEQ ID NO: 366769 - DNA, 1053 bp, Pseudomonas aeruginosa
atgttcgacaccaacaagaagatctacgtctcagacgtgaccctgcgtgacggcatgcacgctgtccgccatcagtacagtctggccgacgccgaacgcatcgccagggcgctggatgaggcaggcgtggacagcattgaggtcgcccatggcgacgggttgcagggttcgtcgttcaactatggattcggcgcacatactgatctggaatggatcgagcgcgttgccgctacggtaaggcgggcgaagatcgccacgctgttgctcccggggatcggcactgtccatgacctgaagaacgcacatgcggccggggcaagcgtcgtgcgcgtcgccacgcattgtaccgaggccgacatatcccagcagcacatcgagtatgcccgcaagctgggtatggatacggtgggctttttgatgatgagccacatgacaaccccggcggcgctggctgtcgaggcgaagaagatggagagctacggcgctcaatgcatctatgtggtcgactccggtggtgcgatgaacatgtacgacatcgctgaccgcttcaaagcactcaaggatgtgctggatccggcgactcaaaccggtatgcacgcgcaccataacctgagtctgggcgtagccaactcgatcgttgccctggagcatggctgcgaccgtatcgacgccagcttgacgggcatgggagcaggggcggggaatgcgcctctggaggttttcatcgctgcggtggatcgcatggggctgacgcacggttgtgatgtgcgcaagctgatagacgctgccgaggaaattgtgcgcccgctgcaggagcggccggttcgcgtggacagggaaacgctcgcgctgggctatgcgggggtctattcgagcttcctgcgccacaccgaggcggcggcgcagaagtatggcttggacgctttcgacattcttgtcgagctaggtaagcggcgcatggtcggcggccaggaagacatgatcgtggatgttgcgctggatatgatttccagaacaacgcagggaaccatgcgtgacgtgatcgcccagtag

SEQ ID NO: 366770 - DNA, 1929 bp, Pseudomonas aeruginosa
atgcagcagtggtttgacaacctcagtgtcacctacaagctgggtctgggatttggtttggtattggtttttacggtcctgctcgcactgggcggctggagtgcccgcgagaatctgctggagcgaagcaaggctcaagaggtttatggcgaactcaacgagtcgctgtcggcactgcgtttgtcgttgcaggactatttgctggacagcactgacccggctgccgagcaaaacctggaccgtgctctggacgattatcagcgcaagcagtcggcaatgcggaacttgaggctctttgcccagccagagctcattgcacgcgaacagcggcagagcgagctagttgaagaattccgcagcgcgttggatgcactgcgaaacgccaaccgcgccgctaacgtggttcgcaacgagatgacggagcgcgccaaccgcgctttcggggcgctcggttctctggaggagttggcgcttggtctgggcgatcgtgacgagcgccgttttgcctactatcaggccagcacgaatcttatgcgggacctgctgttggtccgttttcgtgcagaagcctatgtaaacaacccaggcgcagaatccgaacggctattggacgagcagatgcgcctggcgatagaccgcttccctggcctggtaggtgtctttggcgagcacccacccagcgagttgctggcggttgctgaagatcagaaggaatatgccaagcgcatcgatgactaccgtgcctccattgcagcagtcgagcgggctcggcaagtgctgctcagtgtctccgacgaaacccgggaaatcacccactcactgaacaggcatcagcttgaacgccgggacgaggtagctgcatccagccgcatcacccagtctgccctgtcgctgctcgccctcctggtcggcatcctggctgctggtttcatcacccggcagattacccaaccgctgagcagcaccctggcggtagtggagcgcattgccgatggtgacctgacgaacatccccagcttccagcgccgcgacgagatcggtgtgctccagcagggtattcagcgcatggggaatgcactgcacgggctaatctcgggcatcctggacagcagctcccggattgccaacgcatcggcacacttggcgacagtcactgaacagacccgcgcggggggcaagaaccagcaaatggaggccgacaaggccgctactgccatgaatgaaatggctgctacagtgcaggaaatcgcacgcagcgctgccgacgcttcccaggcagccaccgaggccgaccaagaggcccgcgatagcaatcaaatcgcagccgaagtggtttcgcagattgacgggctagccgctgaggtttctcgctctatgacggccatggcacatctgcaacaagaaagcctgaagatcggcagcgtgatggacgtgatcaagtcggtagccgaacagaccaacctgctggccctcaatgctgccatagaggcagctcgtgcgggcgagaccgggcgtggttttgctgtggtcgctgatgaagtccgcggtctggcacttcggacccgacaatccactttggaaatcgaggagctagtatccggcctgcatgttggtacgcagcaggtggcgcagatgatgaagagcagccaggtgctgaccggcaccagcgtggaacttaccaacaaggctggaatgatgctggcgagcatcaccagcaagatttccgaaatccagaacatgaatctgcagattgccaccaccgtcgaacagcagagtgttgcggccgatgaaataacccgcagtgtggtgcaagttcgagatattgcggaccagaacgcagtggccagtggagaagtcgcagcagtgagtgtcgaattggcgcatctaggtggtcaattgcagatactggtcggtcgtttccggatctga

SEQ ID NO: 366771 - DNA, 147 bp, Pseudomonas aeruginosa
atggccttgaacctgatcaatacgctctacggcatcgagtgggatcacaaggtcggcagcgataccgagcgccggcgacgcagccagcaaaaccttcatccgctcgagacctggggcgggaagacccaaggcaactcatcgtcctga

SEQ ID NO: 366772 - DNA, 1071 bp, Pseudomonas aeruginosa
atgaccgacaacgagtctcctgtcctggccagcgtgcgcaaccgagttggccacctgacgttgaaccgtccggccggactgaacgcgctgacgctgcaaatggtccgcatcatgtggcaccagttgcaggcgtgggaaagtgaacccgaggtcctcgccgtggtgctgcgcgccagcggcgaaaaggctttctgcgccggaggtgacatccgcgcactgtacgacagctaccagaccggcgacgacaaacaccacatctttcttgaggaaaaatacgccctcgaccagtacatccacggctactccaagcccactgtcgcgctgatggacggcttcgtcctcggtggcggcatgggcctggtccagggcacagcgctacgagttgtcaccgagcgcgtgaaaatgggcatgccggaaactagtatcggttatttcccagacgtcggcggtagctatttcctgcctcgcctgccaggcgagctaggcctctatctcggcattactggtgtccagatccgtgccgccgatgcactgtacgcacgactggccgattggtgcctacccagcgaacagatcccggagttcgaccgccgtctggaccaggtcagctgggctcacccaccgcgggaaatcctcgcaggactgctttccagcctggccagcaaccgtctcctgggggccgaactcaaggccctgcatccagccatcaacgaacacttcgcgcaacccgagctggctgcgatcctagcctcactgcaggcagaaaaccgcgccgagtatcaggattgggccgagcagaccgtcgaactgctcaataaccgctcgccgctagccataagcgccaccctgaaactgctacgccttggtcgcaccttatctcttgccaactgcttcgagctggagctacacctcgaacggcagtggttcgccaaaggcgacctcatggaaggcgtgcgagccctcctcatcgacaaggacaagactccacgctggaatccgccaaccctggagcagctcgatgctagccgcgtgaacgagttctttgacggcttccagcctgcccaggcatga

SEQ ID NO: 366773 - DNA, 897 bp, Pseudomonas aeruginosa
atgcatatcggattccttggcctcggcaacatgggcggccccatggccaataacctgctcaaggctggccataccctcaccgtgttcgatccctcccccctggccaccgcttccctggtcgaattgggagcacgccgcgccgaaagccccgctcaggtcgctcgcgatggtgttgccgccatcatcaccatgctgcccaccgcggcccatgtgaaggaggtctacctgggcgccgagggcctgctggccaacgtccggccgggtgtgctgctgatcgacagctccaccatcgacccgctgagcgcccgcgaagtggccaaggcggccgccgcccagggcaatccgatgctcgatgcgccggtttccggcggcaccggcggcgccgcggccggcaccctgaccttcatggtcggtggcaccgacagtgctttcgaccatggccatcccctgttcgtcgccatgggcaagaacattgtccactgcggtgacagcggcaacggccaggtggccaagatcgccaacaacatgctgctgggcatttccatggtcggcgtcgccgaagccatggcgctgggcgtttccctcgggatggacgcgaaagtgctggccggcatcatcaacacctccagcggccgctgctggagctcggaaatcaacaaccccttccccggcgtgctggaaaacgcgccggcctcgcgcggctacagcggcggcttcggcaccgacctgatgctgaaagacctgggcctggccaccgaagccgcgcgccacgccaagcagccggtggtgctcggcgccgcggcccaacagctctaccagaccttcagcctgcagggtcacggcggcctggacttctccgcgatcatcaacctgctccgtcgggatgcctcggcatga

SEQ ID NO: 366774 - DNA, 774 bp, Pseudomonas aeruginosa
atggaattcgaaaccctgctggtgtcggtgcaggaacgcgtcggcctgatcaccctgaaccggcccaaggcactcaacgccctcaactcgcaactgatcgccgagctgaaccaggccctcgaccgcctggaggccgaccccgaggtcggctgcctgatcatcaccggctctgccaaggccttcgccgccggtgccgacatcaaggaaatgtctgccttcggcttcccgcagatctacctggatgacttcttcgccgccgccgaccgtatcggcgcccgacgcaaacccctgatcgccgcagtcgccggctatgccctgggtggcggctgcgagctggcgctgatgtgcgacttcatctacgccgccgacaatgctcgcttcggcctgccggaactgaccctcggcgtgatcccgggcatcggcggcacccagcgcctgacccatgccctgggcaagtccaaggccatggaactctgcctcaccggccgccagctgaccgccgaagacgccgaacgcgccggcctggtggcccgcatactgccggccgagtccctgctggacgagaccctggccgtggcccgtggcatcgccgccaagtcactgcctgccgcgatgatgaccaaggagtgcgtcaaccgcgccttcgagctgggcctcaacgaaggcgtgcgtttcgagcggcggctgttccactcgctgttcgccagcgccgaccagaaggaaggcatgaacgccttcgtcgaaaaacgcaccccccacttcacacatcactga

SEQ ID NO: 366775 - DNA, 243 bp, Pseudomonas aeruginosa
atgaacagagttccattgctggtgattgcgttgctgctgactgcgtgcgagagaccgatgccattcgagccggccgaagtgctcgctgaaaaccccgagaggctcgaggaactgcgactccagtgccgagctgatcgatcaaagctgggggatgcccaatgcaatgcagtcaccgatgccatgcgcttgcgcttcatgggcaagggcacaccctacaccccatacacggtcaaggggttctag

SEQ ID NO: 366776 - DNA, 1071 bp, Pseudomonas aeruginosa
atgaagatcctgatcatcggcctgggctacgccggcaatcgctatcgccgtaccttcgaacacatcgccaccagcaccggtatgccactaacgctggcctatgtcggccgccggcaccggcccaccgagttgccctacttcgacagcgtcgaccgtgcgctgacggagttcgcgccggacatagtcgtcgtcagtgtcaacgaccagagccatgtggccgtgctcaagcagttggcgggcttccagggcttcgtgatctgcgagaagcccctggtcactccgcaggacgacctgtccgaactcgccaccgcgctagggcaagtcagcggcttcgccctggacctggtggagcgctattcggaggccacccggcaactgcgcgaatgggtcgagcggcacgactggcaactagtgcgcgccaatttccactggggcaaggatcgcatcaacgactaccgccccacctgcggcgtgaccagcgaggtgatccatgcgctggacctggtcggctggatctgcccgcgccttggcccgctgcaactgcacggcgtcctcggcgtgcgctcggacttctcgatctccggcgaagcagtgctcgacaccgtgcagctcaccgccagcctgggtgatgcgccggtcaccggctacagcagcttcgtcaacatcgtgcgccagcgcacggtggacttcagctttgctgaccgagacgctcggctgatccatgcgcgcctggtgttcgacaccccgcgctgggaccacgaccagttgcgcatctggacgcgcggagccaacggcaccgaggaactgctgcacgagttcgccaccacccccgacacacctgggctggacaccctgcacaagctctcacggctgtgcctgcaagtggtgcgtgccgtggcgctcaaggaaacgccacgccagcctttcgccggcctcgataccgccttggcgctgcaacgcctgctcaatgagctcgacacccacgcccaaaccccacccccggcgcgttacgtccatggcgggacgcgcgtgctgctggccgaggacagcgatctggaaagcctcgggtaa

SEQ ID NO: 366777 - DNA, 504 bp, Pseudomonas aeruginosa
atggatcagtccttcctcatcgtgcgcccggcgaccctgaccgacctgactagtctggtcgaactgcgcgcccacctgctggacggcacctcggccagctactcgagcaagacgccggaggagtcggcacagtggagggcggcgtaccgcagttggctgagcaaccgtttgaacgacagcgactgcgtgcagatcctcgccgccgagcacaaggagtccggccaggtgctggggtgcgcgaccgccatcatcgaccagcgcgcccccgcccccggctgcctgaatggcctgtccggctgggtgcagtcggtggtggtggagccgcagtggcgcaaccacggtatcgcccggcagttgatgcagcatctgctgcgctggttcgccaaccgcggcgtcggctcggtggtcctgcaaagtacagaagccgccggatcgctgtaccaagccttgggtttcacagccagcgacgagcacctgatgatccgtcaggaggcctcggcatga

SEQ ID NO: 366778 - DNA, 870 bp, Pseudomonas aeruginosa
atgagcgcgccccgcacactggaacgtacccgggcagagttggccgaattcctgcgtagtcgccgcgagcgcatctcgccggaagaggtagggctacccgctggaagccgaaggcgtacgcccgggctgcgccgcgaggaggtggccgcgttggcgggcgtgggcttgtcctggtacacctggctcgagcaagggcgggacatcagtgtgtcctccaccttcctcgacaacctctcgcgggccctcaagctggatgccaccgagcgtcgtcatctgttcctgctggcccatcagcgcttgccagcagaaccgggacggacctggtgcgtagtgccgccgctgatccatcgcctgatggcggatatcccgacgcgcccggcctatgtgctgaacctgcgctgggacgtgctggcctggaacgccgccgcggaccgggtgttcggtttctccgcgctgccggcggatcggcgcaacctgttgtggatgttgttcaccagcccggccatgcgcgtgttgttcaacccctgggaggagcaggcgctgcagatcctctccagcttccggcgggacttcgtgcgagccacccaggatccggaaatcaccgcgctggtgagggacttggtaaaggcgtcgcccgacttcagggagtggtggcaacagcaggacgtccatggcccgtgccagggcattcgcgacttgcggatcgagccgatcggccccatggtgttcgagcacaccacgctgaccatcgatgaggatcggcacctgcgcctggtctactacgcagccaaggagggcagggcggagagccgagccttcgagcaatggctgcagcaggcgcccgaagcgactggagcgccgaccgcttaa

SEQ ID NO: 366779 - DNA, 1950 bp, Pseudomonas aeruginosa
atgagcaaggaacgcaatcaggaccacgagcaacgcttccgtccccggccgggggcgccgaagcaacgcggacaagccttcatcaaccaagtgctgcgtcaggccaacaaggctggcagtgggaaggcgggcaaagctggcaagcagcccggcgccggcctcggtcgcggccatgtcgcggcgcgcttcagtactcagcagcaatcacccaacgcgcgtcgggtcaccatcaagacccgcctggtcaacctgcgccaggccggcaagcgctcgaccctgagccacctgcgctacatcgagcgcgacggcgtgagtcgcgagggtaatcccggtaaagcctacggcccgctgaccgaccaggccgacgtggaagccttcgaggcgcgaggccgggaagaccgacaccagttccgtttcatcgtttcacccgaggacgccgagcagctcgatgacctgcggacctacactcgccatctaatgagtcggatggaggctgacctgggcacccgcctcgattgggtggcagtcgatcactggaacactgacaacccgcacactcacatcgtcctgcgcggcaaggacgacaccggcaaggacctgatcattgcccgcgactacatcgccgacggcatgcgcaaccgcgccgcggaattggccaccgaatggctgggcccgcgcaccgaactggaaatccggcgcagcctgcagcgggaggtgcagcaggagcgctggaccagcctagatcgcaccctgctgcgcgaacgtgaggcgggcgtgctgcgcctgaagactctcgccgaccatccgcgcagacagctgttaatcggccgcctgcagcacctgcaacagctcggcctggcgcgagaagatcgtcccggccactggatcctgcgcgacgacaccgaggcgaccctgcgtgccatgggcgagcgcggcgatatcgttcgcacgctgcaacgcgcgatgggcaacgcacagcgggagttagcagtcttcgagccagatcgcggcagccttgccgtggtcggccaggtggtggccaagggactggcagatgaactgcacgaccgcggctacctggtggtggatggcctcgacggcaaggcccactacctaaccctgccggcccgcacggaactggccaactaccccatcggcgccgtggtggagacacgcagcgtcggcgagcctcgcgcggtggatcgttcgattgcttcgctgacggcgaatggcatttaccgcaccgaccatcacctcgcactggcccggtcgcacgccgccgaagggcacgatccccaggcgctggtcgaacgccatgtgcgacgcctggagaccctgcgccgtgccggaatcgtggagcggttggatgagggtatctggcgcgtgcccgctgacctgcccgaccgcggtcgacagcatgacgtccgccggcttggcgatgtctccgtcgaactgcgtacaccgttgtcagtggagcgacaggtccgtgccatcggggcgacctggctggatcagcagttgatcgggggtagccgtgggctgtcggataaaggcttcggcagggaggtgcgcgaggcgctgaagcagcgtgcggacttcctgatggaacagggcctggccgagcgtcaagggcagcgcgtcgtgctcgcgcgcaacctgctgtctactttgcgtgaacgagagctatcggcgacggcgcgcgagatcgcagcgcaaaccggcctgcactaccggccacccgttgatggcaaacgggtcagcggggtctaccggcgcagcgtgcaactggccagtgggcgcttcgccctgctcgatgatggtgtgggctttagcctggtgccctggaggccggtgatcgagtccaggctcgggcaggacctctctgccgtagtgcggggcaccagcgtgtcctggcagttgggccgccagcgcggaccctccattggttaa

SEQ ID NO: 366780 - DNA, 729 bp, Pseudomonas aeruginosa
atgacggactgcaactacgatccaggtcgcagcacgttgcctgcgcaggcggataacgacaagcaagtgccagcgtgtgtcgccaagatcggcaccatcgaggccctggggcaagcaccggacgaggtcgtgccctgttgcacgcgtgctgggcagtcatttggatgcccgcatgcggctgttcgtggggcgcgcgccgcgatggtgacacgtactcgctgcgttcaatggtcgctggcgcttgctactggcggtctggtcgcgctgggttgggtggcactcgacacgtcgccactgcagatcgtctacaacgcctcagatagtgttcccgcaggctggtaccgcatcacctcgactggctcagtggcggtcggcgacattgtgctcatccgccttcccgtacatgcggcgacactggcggcaaagcgcggctatctgccgaagcatgtcccgctgctgaagaccgtggcggcagtaccaccgcagaacgtctgcgtacggagtgaccaagtgttggtcgacggccagattgtcgccaagcgccttcaccgagatcgacaaggtcgagccttgccaatatggcaaacttgccgacacctggctggcgatgaattgttcctgctcagtaccgccaacccggagtccttcgacagtcgctacttcggcccagtctcggccagcgcggtgatcggtcgggcgcagccgttgtggttggagtcgcgtcgatga

SEQ ID NO: 366781 - DNA, 207 bp, Pseudomonas aeruginosa
atggccgacccgcaggccgctgcctggatacgcgagggcgtctccatcgataacggcaaggtcgagcgctacacggcacggctgacactggatatcacgccagcactgcgcacgcgcatcaagctggcggctttcagccagggcgtcacggtggcggagatgttgcgcgaactactggaacgtcagttcccggaggtcacaccatga

SEQ ID NO: 366782 - DNA, 639 bp, Pseudomonas aeruginosa
atgatcgttgccctgctcaaccagaaaggcggggtcggcaagactaccctggccacccacatcgccggcgaactcgccctgcgtggtcacaacgtgatcctgctcgatgccgacccgcagggttcggcgctggactggacacagcgacggagccagcagggcctgcccaggctattcagtgccgttggcctggcacgggagaccctgcaccaggaggcgccggagctggcccgtcgcgccgatcatgtgatcatcgatggccctccgcgcatcgccgccctcgcccgctcggcattgctggccgccgaacgcgtactgatcccggtgcagcccagtccctacgacctgtgggcgagcgcggagatggtcagccttatccgcgaagcgcaggtgttccgccctaccctgcgcgcggcgttcaccatcaaccgacgcataagtaccaccgtgattggacgggaggcccgcggcgcgttggccgaccagccgctgcccgctctgcaggccgaggtgcgccaacgcattgtttttgccgagagcgtggcggccggtcggctggcacgagagctggcaccggatagtgctgccgcacgcgaggtcagcagcctggtggacgagctcctgcggtggtcgccatga

SEQ ID NO: 366783 - DNA, 372 bp, Pseudomonas aeruginosa
atgccgcactcacccgacttctcacgtcattctcgcctcatcgacctcgactccccagtacatcgcaaggcgggcccttcggcacacgccatgagcccaactgcgcgcgataacgcagcgccgatgcctcagggctcctctgccccgcgctatctcaccaacgacgaagcggcggccttcctgcgcctttcaccccgcaccctggagaaacagcgggtgatcggtggcggaccgcgcttccacaagttcggccgccgggtgatgtacgcgatggccgacctccaggcctgggccgatgcgcgcagtttcgagaccaccttcgatcccgagtacgtcgaccgccaccagggagccagccaacatgaccagtga

SEQ ID NO: 366784 - DNA, 513 bp, Pseudomonas aeruginosa
atgagcaaagcaatcaggatctacgttgccgacctggcggcctacaacgccggtcatctgcatggcatctggatcgatgcgaccctggacatagatgacatccaggcgaaggtcgacgcgatgctggcagcttcgcctgtcgagggtgcagaggagtatgccatccacgatttcgagggcttcgacggctaccgcctcggcgaatacgaggcgctgcaggacgcccacgagatcgcctgcttcatcgaggagttccccgactttggaggcgccctgctctcccagttcaacgacctgaagcaagcgcgcaaggccgccgaagaggactactgcggttgctacacctcgctggccgactatgcccaggaactcactgagcagaccaccagcattcctcaacatctcgcccactacattgactaccgagccatggcccgcgacatggagatcggcggcgacctgttcaccctggagaccggtttcgagcaagtgcatgtgttctggaacagataa

SEQ ID NO: 366785 - DNA, 447 bp, Pseudomonas aeruginosa
ttgctgctggcagtcggcgcggcgctggcgcagtgggacctggagtcgatactgagccgtgccgagcagcgctacggcgagctgggcgcggcgaaatcacgcctgggcgactggggccgcctgctcgaacaaggcggcacgctcgacgaagcggccaagctgcgcgcggtcaacgacttcttcaaccggtcgctgcgtttcaccgacgacatcgagatctggcaacaggaagactattgggcgactccggtcgaggcgctggtcaagggcgccgccgactgcgaggactacgccatcgccaagtacgtgaccctgcgtcgcctcggcgtcgccagcgacaagctgcgcatcacctacgtcaaggccctgcgcctgaaccaggcgcacatggtgctgacctggtacgccagcccgggcgccgacccactggtgctggacaacctgtag

SEQ ID NO: 366786 - DNA, 705 bp, Pseudomonas aeruginosa
atgagtaaccaagtggtagagccggaaagcggcactcgccgtcacggcgggcgtttcatctacgaagaactccgcaagcagatcctcacactcaagctcaaacctggggcaccgctcgatgaggtatctcttgccgcccagttcggcctttcacgctcgccggtcagagatgcgttagcgcgactcattaccgaaggcctggtcaccatcctccccaaccgcactacgctggtgacgcctttcgagatcgaagagtttcccaactacgtggccgcgctggatctgatacagcgtgcagtatctcgactggcagctctgcagaggaccgaggaggaaatggcgcggattcgtgcggcggaggaagcctacatgcgctcgataaccttgggcgattttcaggcgatgaccgagctgaataaagctctgcatatggaaatcgctcgtgccggcaagaatccttacctcaccagctattacgagaagctcttgggagaggggcagcgtcttctccatcttcacttcgattttattgtgagctcagccagtcaatcgaagttgggacgtgatcacgaagatatagttgaagcaattgcggcccgtgatgcagatgccgccgaaaatgctgctcacgagcacactatgctattccagcgccgttttttggactacatgcagcaaaatctaacatcacagatgaaactgtag

SEQ ID NO: 366787 - DNA, 909 bp, Pseudomonas aeruginosa
atgtctagcgaagcatttccacggcagctggctgtactcgtattggcgagcttggcttgtgcttttgccggtaatcacatcgccgcccgtgtcgcattcgattccggtgcgggtctcctgctcgcgattctctttcgttccggcgtcaccatggtggtgctggcggcattggttctttggcgaagagaatctcttcgactagccccatgcaccgtctattggcagattctgatggggcttctcatcgccatccaaagtttctgtatctactcggcagtggcgctgattccggttggactggcattgctggtggtcaacctgtcaccggcgttcctcgctcttctcacggttctgctgggtgggcccgcgcctactcgacgagatatttttctcatggtcggtatcttgttcgggctgtgccttgctctggatattctggcactgtttgtcgggcatgcgggtgtggatggtcgctggcttgcaggcgtgttgttcgccctgtgcggggccgcaatcttcgcaggagctatgtggatctcagaaaaccgactttcccgcatggctggcaccgtacgcagtttgctgaccatggtcgtcgtatttctgagcgcagctatcgtcggtgccgttggcttggttcctggtggcttggctagtccgaccgggaatgctggatggctttctctgggggttcttgcgctgctttatggtgtcgctttctcaacgttgttcatctgcatgcccagactagatatcgcacgcaatgcccccgtgatgaatgtcgagccagttgcgggcttgattctgggttggttgctactcgatcagcgactcagtgcaattcagcttcttggaggggggctagtggttgcgggcatcgtactgctggcctaccgacataggacatag

SEQ ID NO: 366788 - DNA, 708 bp, Pseudomonas aeruginosa
atgggcgtagcgacgttagatccgcaaggcagcgttaagaagcacggcggtcggttcatctacgaagaattgcgcaagcagattctcactctgcagctgcgccctggcgttcaactcgatgaggtctccttggctgcgcagttcggtgtttcccgttctccggtcagggatgctctggccaggctgatcagcgaagggctggtcacgattctgccgaaccgcacgacgctagtgacgcctttcgagatcgaggagtttcccaactacatcgctgcattggatctgacccaacgggctgtcaccagactggctgcactccatcgaactgaaggggatatcagacgcatacgggaagccaacgcggcgtacatcggtgctctggaaagtggcaattttcaagcaatgtcagagaccaacaaggcttttcatatggagatagccaaggctggtcacaatccctatctaacgagctactacgagcgtctccttggtgagggccagcgcctcctacacctgcatttcgacttcatcgtcagctctgcgaatctcaccagccccgagagcgatcatgacgagatcatcgaggcattggtgctgcgtgacgctgacgcagcggaaaaggcctcgcatgagcatacgctactgttccgcgaccgcttcctagaattcatgaagcagaacctgaccaaaagcatctcggttctctag

SEQ ID NO: 366789 - DNA, 1029 bp, Pseudomonas aeruginosa
atgcgctggaagaagactctgcagcttgtggacgtccactgcgaaggtgagatcggcaaggtcatcaccggtggtgtagtcggggtccccggtgaaaccatgctggacaagatgaactacatcaacagcgtggacgacagtcttcgccgcttggttgtgctggagcctcgcggctgcttgcagatgtcggtgaatctgctgcttccgccaacccggcccgaggctcatgcaggcttcatcgtgctgcaggcagacaaagctcatccgatgtctggcagcaactgcatctgcgttgtgacggcgctcctggagctaggcatggttcccatgcaagagccggaaaccacggttgtgctggatactccggcaggactggtcacggcaacggctcgctgttccgaggggcgctgccagagtgtttcgctggacatggtgccggcctttgtcgaacagctggatgtacccatcgagacggaggagttcggcaccatcagggctgatatcgctttcggtggtgtttactacgccctcgtggacgtcgagcagacagggctgagtatcgcacccgagcatgctcgtgagctggcaaccgcaggtgtggctctgcgcgatgtgatcaaccgccaggtcagcgttttgcatccgttgatcgactctctcaacgaggtcgcttacgtgatgttccgaaaccgcctagatgcgcgcacttaccagacctgtaccactctgccaccgggccgcgttgatcgctctccatgtggaacaggcagctcggcaaacctggccacgctggctgctcgtggaaaagtacaggtgggagaccagctgacctctcgctccaccatcaatggtgagttccagatccagctactgggacatacagaagtgggggaccgccctgcagtcctgccccgggtgacggggcgcgcatggatctacggcattcagcagcttggtgtggatcccgatgatccgctcgcagaaggcttcatgctcagcgatacctgggggccagcctttccccaatag

SEQ ID NO: 366790 - DNA, 1482 bp, Pseudomonas aeruginosa
atgaacttgtacgaccagctctatatcaatggccagtgggtcgctccggtccacggtggaacctttgagaccatcgatccgagcagcgagagtgtgatcgccaaggtggccgcagcgacggccaaggacgtcgatctggccgtgcgcgctgcacgtcgcgccttcgatgaggggccttggccacagatgagcggaacggagcgggctgttgtacttcgacgcattgctcagggtatccgtgatcgccagcatgagttggccgaactggaagtgcgagacaatggtaaaccgttgcccgaagcactttgggatatcggcgataccgctggctgcttcgatttttatgccgatcatgcagaggatctggacgaccatcgtgagcaatcggtcgttcttgccgacgagcgattcagctccgtggcgcgcaaggagccggttggtgtggccggagccattatcccctggaacttccccatgctgatggcggcgtggaaagtcgcgcctgcgttggcggcaggctgctgcatggtgctcaagccttcggaactgaccccgctgactgcactggagctggcgcgcatcgctgaacaggcaggactgccggcaggcgtactgaacgttgtcacgggcatgggagctgatgccggcgcgccattatccgagcatcccggtatcgacaagctggccttcaccggaagcgtgctgaccggtagccggatcatgcaggccgctgccaaggacattaaaaacatcagcctggagctgggtggcaagtcgccgtttatcgtgtttgccgacagcgacatcgagaaagccgtcgaatggatcatgttcgggattttctggaaccagggccaggtctgctctgccacctcgcgcgtactcgtccagcgcgaactctacgagccgctgctcaagcgattgaaggaagctgccgagcagatccagattggcaacggactcgaggatggggttctgctcggcccactggtcagcaagggacagtacgacaaggtgcgcgaagccatcgcccgcggatgctctgaaggcgcgcagttgctctccggaggcgagcggccagccggcttcgacaaaggttactacctgcagccaacgatctttgtagatgtcccggaaaacagctggatctggcaagaagaaatcttcgggccggtcgtttgtgtgcgagcgttcgatgacgaagctgaggccgtccagtcggccaacaactctcgcttcggcctagcggccgcagtgatgtccgaggacctgccgcgagctgagcgcgtagcacgcaagctgcgcgccggtatcgtttggatcaactgctcgcagcccacttttaccgaagcgccctggggtggctacaagcagagcggtatcggccgggagctgggcgagtggggactgaacaactacctggaaaccaagcaaattactcgttacgagagcgagcagccctggggctggtacatcaagtag

SEQ ID NO: 366791 - DNA, 1284 bp, Pseudomonas aeruginosa
atgaactctttacccgcttcatccccagaaaaggcagtggttatcggtggcggtatcgttggcgtctgctgcgccctttacctgcaacgcgaaggttatcaggtcaccctgatcgacccggcggcacccggcgacagtacggccaaatggagttgcgggcagatggccgtcagtgaggtcatcccgctttccaagcccggcatcctgaagaaaattccgacttggttgctggatcagaaagggccgcttgcccttcgcccgagcgcgctgccgggaattctgccgtggttcctgcgtttcgttgctaacgcacggcattcgaagatcgttgagatcgcccaggccatgaccacgctgaccgagaaggtctacgaggactatgcgccgctgctggacgcttgcccggacaaaaccctgctgggcaataagccgatcattgaggtgttcgactcgcaagacggtgtaatccacgagcgcccccatctggagctacgcaaatcgctgggctttgcttccgaagagcttgatgcggcggccatcgcggatcttgagccgagccttgcaggcaaattcaagcatggactgttgtttcctgactggcgcgcagtgagtgacaccgaaggtttcatcgccgcgctgacgcagagcttcatcgatcagggcggcgtgcgcgtacgtgagcgcgccaagcttatagacagcgtcgacgaccgagcgactggcgtgaccctggccaatggccagcgccttccggcgcagcatgtagtagtggccgccggtactggttctcgcgagttctttacgcaactgggcgtcggcatcccgctgaccggaattgccggttaccaggtggtgcttcccgatccaggagtagaggtccgtcactcggtgatctatgccgatggcggattctgtttctcgcccatgacacgaggtctgcagatcggcggcaccatcgagtttgccggtgccaacgcagaacccaacttcaagcgcgccgagatcatcttggaaaaagccaaacgtattctgcccgagttgcggacggccaacttggaatacggcgtgggttaccgcccgttcctgccagataccaagcccgtgatcgaccgctcaccccgcctatctaatgtccttatggcttttgggcacggtcagctcggtctcactctgggcgcgactaccggtcgcttgatcgcagacctggcagcccgccgctacacggcccaggacctgacccctttcagcgccaagcgcttcgctcttgttggaggacacgcatga

SEQ ID NO: 366792 - DNA, 879 bp, Pseudomonas aeruginosa
atgcaactcaaaggcattcttcccgccatcgtcaccccgttcgacaagaccggcgctgtcgatcatgaaatcctggcttcgatcctggagcatcagctcaaggccggtgtcagcggcttcgttccgctggggtctactggcgaatactacgcgctaaccaacgaggagcgccgccagatcctcgccaccgtcaaggaggtagttggtgaccgtggcaccctgatcgccggtgccaatggctcgtgcacccgtgaagtgctggagcaggtccagcagaccgtcgatgccggctataccaatctgctgatcgcgccgccttactacgcgttgccttcccaggaagagctgctcagccactacaacacgattctggagacgttccctcagatcaatgtggtgctctacaactacccggtacgtacaaacgttgaagtaggtatgggtgttatcgaggcgctcaaggatcacccccgtgtcatcggcatcaaggaaagcagtggcaacctgctgcgcgcgattgagatcggtgaaaactacaagggcaagatccagctgtcctgcggctctgacgatcaggcgctggacttcttcatctggggcgccaccagctggatctgtgggccggccaacatcttcccggagaaggtggtggacttctacaacaagttcactgcaggcgacctgtccggtgcccaggatgtaatgcgcaacatgttcccgatcatggccaacctggaaagtggcaaattcgttcagaaggtcaagtacggtgccgagctggcaggcttcaaggctggcaatgctcgtgcacctctgctgccgttgaccgatgaagagaaggccgagttccgccgggtgttcgaggcatcccagcgctga

SEQ ID NO: 366793 - DNA, 666 bp, Pseudomonas aeruginosa
atgaatatcgattttgccgtcgttttcccttactggcacatcctgctcaagggcctgggattaacgattgccatcaccctgagctgcgccttgatcggcagccttgccggcttcgtcctgagcctgctgcgcggtgtgcgcaatccgttaatccgcctgccgattaccctctacgtagagttttttcgcggcacacccctgctgatccagttgttctgggtgttcttctgtttccctgttgtgttcggcctgacgctgtcgccctacatatcagtgatgctcgcgctggtcctctacatggctgcgatcaccagcgagacctttcgcggcgcgctcaagtccatcgccagcgagcagcatgatgcctgcacagcactcgggctgacttcgaaggtgaaggtgctctatgtgatcttcccgcaggcactgctacgggcgactccgccgctgctatcgaacgtggtcagcctgttcaaggagagtgcgctgatttcctccgtgggcatcgccgatctgatgtttgtcggacagaacatatccaacagcacggcccgaccagtcgagttcctctctgcggtcgccgtcatttacttcttcgtggcattccccttgacgcgcctggtcggcgtgatcgagtcgcggatgctgcagcgctacgcctactaa

SEQ ID NO: 366794 - DNA, 672 bp, Pseudomonas aeruginosa
atgaactaccaattcgatttccacttcctaacaggcagcttcgacgccatttgggagggcttgaaggtaacccttgagctggccctggtttccaacctcatcggtctggtgtttggcttcgggctgtgcctgatggcaatgagtcgctgggttctgatccgctggcctgcccagttgttcatcgagttcttccgctgcacgcccgcactgctgcagatcgtctggttcttctactgcgtgccgatgttgttcaacgtcttcatcgatccagtggcaatgggatttctggcactgggcctgaacctcgcggcattcaactctgaagcctatcgagccggcgtacaggctgtaccgagggagcatctggacgcttcgattgccctggggctacggccgtggcagcgcaccttttatgtcgtgcttccgcaggctttgcgtagcgcgttaccggtgttgatgaccaatggcataggcagcctgcagcaaagtgcgctggtcgccatcgtcgcggtatccgacctgatgtacgtgggcaaaagcctggcaacagaggcctatcgccccttggaaacctacaccctgatcgcgctgatctacttcgccttgtccctgccgattgcgcagttggtgcagtacatcgagcggcgccaagaggctgcggctgcccgctga

SEQ ID NO: 366795 - DNA, 822 bp, Pseudomonas aeruginosa
atgaacactccccgtttggtggcagcacagccacagtcccttcacgcccccaattcgccgcagggaggcgatttcatccagctgcgtggtgtctgcaagtcttacggtgcgcagttggtggtgatggacaatctcaacctggacatgcgtgccgacgacaggctggtaatcatcggcccgagcggcagcggcaagagttctctgctgcgggtcatgatggggttggagagtattcagggcggcaccatcagcttccagggcaagccgtacatcaacggcgggaagggccgcggcaagcctctggatgagagcctgcgcactcaggtcgggatggtgtttcagcactacaccctgtttccacacctgtcggtgttgggcaatttgattctggcccccaccaaggtgcacggaatgtccaaggcccaagccacggaaaaggcccgcgcttatctcgcccgacttggcctggagaacaagctgcacgcctatcccagccagctttccggtggccagaagcagcgcgtagccatcgcccgagcgctgatgctggaacccaagctgatgctgttcgatgaggtgacatcggcgcttgatccggaaatggtcatcgaagtccagaacgtcatgatgcaactggccgagcagaagatggccatgatcatcgttacccacgacatgcatttcgcccggcacatcgccacccgtgtggtgttctgcgccaacggcaaagtggtcgaacaaggtccgccagagcagatcttcacccagccgaaggaagcccgtactcgcgagttccttgaaaaagtcctgcacctggactga

SEQ ID NO: 366796 - DNA, 846 bp, Pseudomonas aeruginosa
atggctcggttcttccctcgctccatccgtaacgtcatcgcttgcgcttccgcgatcggtgctttgctcacccaggcgcccgtccaggcagccgaaacccagatgtggaaagacattcaacaggccggcgtattgcgttgcggcgctgctgttgcggccccgtatgtcatgcgcgatgccgcctctggtcagtacagtggctacttcgtcgacctttgccgtgactttggcgagaaggttctgaaggtcaaggtggagtttgtagataccagctgggacaacatcgttgctggtctgcaaagcaacaagtgggatctggccatggcgctcaaccaaacgcctgagcgtgcccttgccgtggctttctcggtgccggccaccgagtaccaagtctcgctgctgatgaacaaggaaaacccgaagtttgttggcgccggcaacagcgtggcagattacgacaaggagggtgtgaccttcgcagtaatgtcgggtaccgccggagacaagctgatcactgctgcggtgaagcacggcaagatcatgcgcctgccgggcatggatgagacccggatggcggtcatgtcccgccgtgccgatgtgctggtcgacgccaacgacaccaatcacctgttcgctctggccaacccagactggaccaagcatgtgctgcctgagcctgcccttgccaagcagggtgtctccttcggtctgcgccgcgatgtgtcggccgccgacctccaggtgctgaacatctacctcactcagcgccgcgagactggtgagatcgatgccctggtggacaaggcttccgccgaagtcaacgccgcagccaagtccgctcagtaa

SEQ ID NO: 366797 - DNA, 912 bp, Pseudomonas aeruginosa
atgccgaagaaatcccccctgagccaggtcagcgatttcgatctgaaactactgcgactcttcaagacggtggtcgagtgtggcagcttcgccgccgcagaaagcgccttgggtatcagtcgctcagccatcagccttcacatgagtgatctggagaagcgggtcggtatgaggctctgccagcgaggcagagccgggttcgccctgaccgacgaagggcgtgaggtgttgcgagccagcgaggcggtcctcgtcgccatcgagggctttcgcagcgaggtcaaccagatgcatcagcagctgcgcggagacctcaacatcggcatcgtcaacaacctggtgacccagcccaagatgcgtatcactcgcgcgctaaaagctgtgagatccgaaggggcaggggtgcgcatcaacctcagcatgagtacgccaagcgaaatagagcgcggggtactcgacggacggctgcatgtgggcgccgtgccgctgatcacgccgttgtccggtctggactacagcctgctttatgaagagcgctcgaacctgtattgcagccacgagcacccgtttttctccaaggcggagatggtgaccaatgaggagttgcagagcgctgatgcggtagtcccaagttaccgcattacggccgaggcgataggcctccatcagctgctgaacttcgccgcctccgcaacggatcgcgaaggcagtgcgttcttgatccttacaggaagctacatcggtttcctgccagaccactacgcagcgacctgggtggagaaggggctgatggcgccgctcgcaccggaccgcctgttcttcgactcgaaactggcgatcgcaacgcgcaaagggcgtcgtgccaacctcatcctagagcgcttcctcggggctctgcagcaaaccacctga

SEQ ID NO: 366798 - DNA, 1347 bp, Pseudomonas aeruginosa
atgaaccaggccctgcagcagctaccgtccctggccagccagctcaagctggatgcccactggatgccgttctccgccaaccgcaacttcaagcgcgacccgcgcctgatcgtcggtgccgacggcaaccacttcatcgacgacaagggtcgccgcgtgttcgacagcctgtccggcctgtggacctgtggcgccgggcacaaccgcaaggaaatccaggaggccgtggccaagcagctcggcaccctcgactacgcgccgggcttccagtacggccacccgctgtccttccagctggccgagaagatcgccgagctgaccccggccggcctcgaccacgtgttctacaccgactccggctccgagtgcgccgacacctcggtgaagatggcgcgtgcctactggcgcctgaagggccagccgagcaagaccaagttcatcggccgtgcccgtggctaccacggcgtcaacatcgccggcaccagcctcggcggcatcggcggcaaccgcaagatgttcggccagatgatggacgccgaccacctgccgcacaccctgcagccgcacctggcctacacccgcggcatggccgagaccggcggcgtggagctggccaacgagctgctcaagctgatcgagctgcacgactcttccaacatcgctgccgtgatcgtcgagccgatgtccggctcggccggcgtcatcgtgccgccgcagggctacctgcagcgcctgcgcgaaatctgcacccagcacaacatcctgctgatcttcgacgaagtgatcaccgcctacggccgtatgggcaaatggaccggtgctgagtacttcggtgtgaccccggacatcatgaacaccgccaagcaggtcaccaacggtgccatcccgctgggcgcggtgatcgccagcaaggagatctacgacaccttcatgcaacaggccaccccggagcacatggtcgagttcggccacggctacacctactccggccacccggtcgcctgcgccgccggcctggccaccctggaactgctcaagcgcgaccacctgatcgagcagtccgccgccctggcgccggtgttcgaggagaagctgcacagcctcaagggcagcaagcacgtgatcgacatccgcaactgcggcctggccggcgccatccagctggccccgcgcgacggcgacgcggtgatccgcccattcgaggccggcatcaagctgtggaacgccggcttctacgtgcgcttcggcggcgacaccctgcagttcggcccgaccttcaacactaagcccgagcaattggacgccctgttcaacgccgtgggcgagaccctgaatgccctggcctga

SEQ ID NO: 366799 - DNA, 1497 bp, Pseudomonas aeruginosa
atgaccatcgtcactcatttcatcaatggcgaaactgtccagggcaacggccgttcggcccaagtcttcaacccgtccatcggcgagcccgtgcgccaggtcgaactggccgaccgcggcaccatccaggccgccatcgactccgccaaggccgccttcccggcctggcgcaacaccccgccggccaagcgtgcccaggtcatgttccgcttcaagcagctgctggaagccaacaaggacaagatcgccgcgctgatcagcgaagagcacggcaagaccctggaagacgccgtcggcgaactgcagcgtggcatcgagaacgtcgagtacgcctgtggcgctccggagctgctcaagggcgaatacaaccgcaacgtcggcccgaacatcgacagctggagtgacttccagccgctgggcgtggtcgccggcatcaccccgttcaacttcccggccatggtgccgctgtggatgtacccgctggccatcgtctgcggcaactgcttcatcctcaagccgtccgagcgcgaccccagctccaccctgttcatcgcccagctgctgcacgacgccggcctgccgcgcggcgtgctcaacgtgatcaacggcgacaaggaagcggtggacgcgctgatcgaggcccccgaggtcaaggccatcagcttcgtcggctcgacgccgatcgccgaatacatctacaccgaggccaaccgtcgcggtaagcgcgtacaggccctgggcggcgccaagaaccacgccgtggtgctgccggacgccgacctcgacaacaccgtcaacgccctgatgggcgccgcctacggctcctgcggcgagcgctgcatggccatctccgtggtggtggcggtgggcgagcacgtggccgacgccctggtggaaaaactggtgccgaagatccaggcactgaagatcggtgccggcacttcctgcggcctcgacatgggcccgctggtcaccggcgccgcgcgcgacaaggtcaagggctacatcgacgccggcgtggcccagggtgccaagctggtggtcgacggccgtggcctgagcgtgccgggcaacgaggccggcttcttcatcggcggtaccctgttcgatcacgtcaccagcgagatgagcatctaccaggaggaaatcttcggcccggtgctgtgcatcgtccgcgtcggcagcctggaacaggccatgcagctgatcaacgaccacgagtacggcaacggcacctgcctgtttacccgcgacggtgaggccgcgcgcctgttctgcgacgaaatcgaagtgggcatggtcggcgtcaacgtgccgttgccggtgccggtcagctaccacagcttcggtggctggaagcgctcgctgttcggcgacctgcacgcctacggtccggacggtgtgcgtttctataccaagcgcaagaccatcacccagcgctggatcaagcgcgccagtcatgaagctgctcagttcgccttccccagcaacgggtga

SEQ ID NO: 366800 - DNA, 441 bp, Pseudomonas aeruginosa
atggaagaagaagtttatccggtgtgttcgccccgcctgttgaccgaggcgctccgtctgcacaaccttgcgggtctcactcagcacacgctgattcacgacctgtcgatggacaaccataccgagttccccacctgggacgcctggctggacaaagcaggcctggcggagatttccaccgctcgcgggatgaagatcaataattcggcagccgtgctgcaagccgccattgatggtcagggtatcgcgttggctcgcagtgtgatggcgcgagacgatctggctgctggtcgactggttcggctttttcccgacatccagttcgagtcggccctggcttattacgtggtttatcgcccggagtgtgccaacctgcctcgcctcaaggcctttcgtgattggttatttgaggtcagcgctcaagagcacggcaagccatga

SEQ ID NO: 366801 - DNA, 660 bp, Pseudomonas aeruginosa
atggttaccagccgtggcgacaaggaaaacgtggtccaggcgatccaggccggcgtgtccgactacataggcaagcccttctccaacgatcaactggtcaccaaggtgcgcaaggcgctgtcgcgcgccggcaagttgcaggcgctggctgcgtccgctcccagcgtgaagacgatcaattcgcctttcggcaacgattccctggcggcgctcaccggcggcaaggccgaggtggtacccgccgctcggcccgtggcgccggccacgcccgccgttgccgccgccccggtggtttcggccaagccggcggcacagtcggccggtggccgtggccagggccagttgcgcctgccgagcggtacccaggcctgcgtgatcaaggcactcagccttaaggaagcgctggtggtggtgcgccgcagcgaggtgctgccgcaggtgctggaaagcgcagtgctggacctggagcagggcgagggcggcgagatcgcccgcctcaatggttacctgcatgcggtggcggcgctggagccgaaacccgatagcgactggctgcaactgaccttccgtttcgttgaccgcgacccgcagaagctcgattacctctcccgcctgatcgcccgcggcaccgcgcagaagcacctctcgccgggcgcctga

SEQ ID NO: 366802 - DNA, 450 bp, Pseudomonas aeruginosa
atgaagcaatggcgccggtcgttactgatgagtgcctgcctgttcctggcagcccccacgctggcggcccaggagtactccgccgcggtgaactatcagctgcgctgcgcgggatgccacggccaggacggcatgggcgtcagtgaaagcggtatcccgccttttccaggcttcatcgatggcttcttccagacgcccgcgagtcgcctgtacctgatgcacgtgcccggcgtgaacagcgccagcctgtccgacaaggagatcgcggcggtgatgaactacgtcggcgagcgctggggcgagcccggcgcgcggcgcgcgcgcttcaccaccgacgaggtagccgcgctgcggcgccagccagtcgaggatgtggtgaggttcaggcgcagcgtggtgcaggacctggcggcggcaggctggccgataccagactatccctggccctag

SEQ ID NO: 366803 - DNA, 441 bp, Pseudomonas aeruginosa
atgcgtagcacgaccttccacggcggggcgctctgcgccctgctgctggccctcgccggccctacccaggccggccaggcactgttccagcagcactgctccagttgccacggcggcgatgccgaaggcattcccggcctggcaccgccgctacggcatgcgcagctctggcaaggcctgggcgaggatgccggacgctacatcaccggcgtcatggccggcggcatgagcggccagctgagcgcccagggtcagttgtacatcggcctggtcatgccgccacagagccatcttcccagcgcggaactggccgccgtggcggactacctgctgcaactgaacggcctgcagcagtccgtcagcccggcggacgtggaaagcgcacgcaaccagccccccagccacgcggcgctgcgcgccctgcggccgaagaacctgtag

SEQ ID NO: 366804 - DNA, 546 bp, Pseudomonas aeruginosa
atgttcaagctgttagatcgcctgctttccattgtcgacaaacgtgccgaggccggggtccgcaagaccgcgcagcagtacggtcggcgctccttcctcgccaaggcgggggtcgtcatgatcggcagcatggcgataccgctactgcccttcgaccgctcgctcggcggcctggcgatggccgccagcggtaccgatgccgatgacgaacacagctgcgagtactggcgccactgcgcgctggacggcaacctgtgcagcgcctccggcggcaccctgacctcctgcccgcccggcagcgaggcctcgaaggtcgcctgggtcggtacctgccgcaaccccaacgacggcaaggactacctggtctcctacaacgactgctgcggcaaggcgaaggtcgaaagcgccaccttctgcttccgcagcgagcgcgagcgcccgggctaccgcatgggcctgcacaacgacatcaactggtgcatggccaacgccaacaagggctatcactgcaccgtgtcggtcctggtggggctcgccgatgcgtag

SEQ ID NO: 366805 - DNA, 591 bp, Pseudomonas aeruginosa
atgtccctactcattttttccgtatgcgtcctcagcgtgctggtgctcggcctgatcgtgatggtcttcgccctggcgcggcagatcggcatcctcttcgagcgcatctcgccggtcggcgcgatgatcaacgacagcgggccgaaactgggtgaagtctcgcccgccttcaacctgccgagcctgaccggcggcctggtgcagatcggcgccgcctcgtcgcgctacacgctgatcttcttcctgtcgccgacctgcccgatctgcaagaagctgctgccggtactcaagtccatccgccagaacgaggagtgggtcgacgtgatcctcgccagcgacggcgaacaggagcgccaccagcgcttcatcgacagtgccgacctgagcgccttcccctacgtgatttccgagcagctgggcgtgacctaccgggtctcgcgcctgcccttcgccgtgctgctggacggcgaaggcgtggtcacggccaagggcctggtcaattcccgcgagcagctggaaagcctgttcaacgccgcggagaccggctacgcctcgatccaggacttcgccagccgcagcgcccattcctga

SEQ ID NO: 366806 - DNA, 546 bp, Pseudomonas aeruginosa
atgaacgcgtccgtcctgcatctcgccgccctcgccgccgtggtcttccaggcgctgctgttcctgcgcgccgcctggcacaaggcacacgactacggccgcttctatggcttcgtcgccgactaccgactgctcccagaggcactgctggggccggtcagccgcgcgctgatcggcaccgaactagcgatcgtcgcgctgctgctctggccgccgctggcggcctggggcgcgctggccgcactggccctgctcgggctctacggcctggtcatcgccagtgccctgctgcgcgggcggacccgcatcgaatgcggctgcggcggcccggcacagccgctgtcctggctgctggtcgcgcgcaacctcggcctgatgggcctggcggcgctggcgatgttcaccccgcctgcgcttggtgggctgctcgccaccagcgtggcgctgctcgccggcctgttcgccttctgcctctacgcgatcgccgagcaggtgctggccaaccccgcgccgctgctggcgcgccgggccgatccgctttcctaa

SEQ ID NO: 366807 - DNA, 1146 bp, Pseudomonas aeruginosa
atgcaagccttgggtatcaagctgggtgcaatcttgagtgtgctgaccgtcggcatcgctcaggcggcggagaatttcgttccggaagtcctgaccgtcgagaaggccatcaagcccggcgccaacctgttcgtcctcgaccagacctggcgcggcgccagccgggtcaacgtgctctcggtggacgacctgcagcacaagggaatcctcagcgccggcctggtcgcgcagatgacctacagcaaggactaccggacggcctacgtcatgtccgccttcgccaaacgcatcacctacggcccgaccgaagcggtgctgcaggagtacgacgtcgagacactgaccctcaagcgcgagatcgccctgcccgagaagatggcccaggtcgccccttccagcgccattctgcagctctccgccgatgacaagctggcgttcgtgcagaacgcgacgccggcgacctcggtcaccgtggtcagcctggaatccggcaaggtcgtggcagaagtgccgacgccaggctgcttcggcatcttcccggcggccaagggccagcgcttctcggcgttgtgcggcgacggcagcatggccagctacgacgtcagcgccagcggcgagtactcggcaccgctgcgtagcgcgaagatcttcgatccggacgaggacgccctgttcatcgtccccgagcgcgttggcaaggacctggtgttcccctccttcaagggcaacctctaccgcatcgccgacggcggcaaggtgccgaagctggtcgagaagttctcgctggtcgagggcatcgacggcgactgggcgccgggcggtgtggacgtcacggcctacaacgcggcgcacaacatcctgttcctgaccatgcattccggtgccgaggaaggcagccacaagaatggcgccgaggaggtctgggccgtcgacatgaagcgccagcgcgtgttgtaccgctccgccgtcgagcatctggcatcgatctcggtcaccagcggcaagcagccggtgctgttcggcctgaccgaagacagcaagctgatccgctacgagatcgaccccgaggcgcgtttcgcggccaagccgacgcagaacatcgaagggctcggtgactggaccatcttctcggtcgcgggcgagtag

SEQ ID NO: 366808 - DNA, 141 bp, Pseudomonas aeruginosa
atgaaacaggggcgccccaagccaatcctcaagggtgcggaccaactgaccgaccgccgcaggggtgacattcagctccgccgccgccgcagaaaagctctggtgccgagcactcgcctcgaacgcacgcagggcatttag

SEQ ID NO: 366809 - DNA, 774 bp, Pseudomonas aeruginosa
atgagcgtgcaattcaaaggtaagaaactgttggtcgtcggcggtacaagcggtatgggcctagaaactgcccgcatggtgctttcccagggcggcagcgctgtaattgtgggtagccgcccggagaagaccgaggaagcccgcacggagctttctgccttcggcccggtagtagctctagttgcggacctcaccagcgatgaaggcttgcgcgacctgatcaacaccatcagcaaacagcacaacgacatcgatctgctcgtcaacgcggcaggcgtgttcttccccaagccgtttctggaacatcaggatgctgactacgaccagtacatgagcctgaacaaggcaaccttctttatcacccaaatagtggccgcaaacctggtcgccagtggtcgctccggcgccatcgtcaatataggttcgatgtgggccaaacaggcgattgctgccactccctcctcggcctactccatggccaaggcaggcttgcattccctgacccagcatctggcgatggagctggctgccagcaacatccgtgtcaacgccgtatcgcctgcggtagtagaaacccccatctacgaggggttcattccgaaggcagaggtgcacagtgcgctacagggcttcaacagcttccaccccattggccgcgtgggtaccccccaggacgtagccagcgtcgtgactttcctgctctccgagcaggcaagctgggtcaccggcgcaatctgggatgtcgacggcggcgtgatggcaggccgcaactga

SEQ ID NO: 366810 - DNA, 534 bp, Pseudomonas aeruginosa
atgatctgcggcgcagtctcgtacatgctaatgaacttcttgatgaccgccgcaccgctggctatgcaactgtgtggccattcccaggaaagctccaacctcggtctgcagtggcacgtcatcgccatgtatgcgccaagcttctttaccggccgtctcatcagcaggtttggcgccagcaaggtggtagtcacaggcctgctgcttaccgggctatccattctggtgggcttgatgggcgtggatatcgcacatttctggctcacgctcattctgcttggcgtgggatggaatttcggctttatcggcgcttcggcactggtgctggaatgtcatcgcccggacgagaagacaacggtgcaatcgctcaacgactttgtcattttcagcaccatggcggtcggctcattcgcctccggcagcgtgctagcagcctacgactgggccaccgtgctgtgggtgtcccttgccccgctgatggtagccctggctgctctcttcgctatgccatccacggcgaaagttagggcctaa

SEQ ID NO: 366811 - DNA, 1533 bp, Pseudomonas aeruginosa
atgcctgttatctcgcccaaacgctggttgatcctcactgcggttatgctggcatttctgccagtggtcatcgacatgaccatcttgcatatcgccgtgccatcgctgactcaggccttgaaggcttccagcactgaagtgctctggatcatcgatgtctacccgctgctcatggctggcttgctggtgccgatgggtaccctggccgatcgcctgggcaacaggcgcctcctgctgatcggtttgaccgtgttcgggctggcttccttgctggcggctttttcccagacccccgcgatgctgatcagtgctcgcatgctgctagcgctgggcggttcgatgatcatgccctgcgtcttgggcatcgtccgtcggactttcgaggatgagcgcgagcgagccatggccctgggcatctggggaaccgtcagcgcggctggagcagccgtggggccattggtaggcggggccttgctggagcatttctggtggggatcggtgttcctgatcaatgtgccgctgatggcgttggttattccagtcgcattcgtgctgctacctcgggcagaagcctccggctccggcgagtggaaggtcgggcaggcagcgatgctcatcgccggcatcatcgcggtcgtgtacgccatcaaagccgggatcggtgcgaccacgtcatgggtggcaatcgtcgcaatcatgctggtaggactcgttctgctatccctgtttgttcgcaagcagttgcattcgagcacgccgatgctggacttggcgttgtttgcacatcccgcaatcctggctggaatcgtcatggctctgttcgtgaccggtgcgttggccggcgtcgagctgaccttggcgatggagttgcagtacgtgttggacaaaactccgcttcaggccggcatcttcatgattcccatcatggtagctgctgccgttggcgggccagttgcgggtttcctctccaacctgttcggattacggctggtggcgagtttgtcgttggctgtatctgcaggttcgcttttactgttgccctttgtgggcttccagcacgcaagcctgatcgtcccgctgctgctggcagtgctcggccttgcgctgagcatcgggctgaccgcctcgtcgatcgccatcatgggggccgtggatgccaccaagggagccgccgctgggtcgctcgaggctacggcctacgaattggggtcgggactggggatcaccttctttggcgtgttcatgtccagtgttttcagccgctccctctcgctccctacagagcttgaccctgcgctcgcagcacgtgccgcgaaatcgattggtgacagttacgtcgtggccgatgaactcctctcaggccaggctgccgcggtcatcgaggcggcgaaggttgccttttcatccactacttccattctcttgagtatgtgcgctgcgctgttggggctactcgcagtggcagttttcgttttgctgaaaaactaccgaagacccgggggtgacgacacagtgatcgcttcgggccgctag

SEQ ID NO: 366812 - DNA, 1419 bp, Pseudomonas aeruginosa
atgccaatgcatctttctgtcataccgaccctgttgttggcactcgccttgagcggttgctctctggcaccgacctatcatcgccctgtagcgccagtggccgagcactggagcgccgagcacaactccaagactgtcgtcggccacacgctgcaatggcaggcgttcatcgccgacccagagttgcaccggctggtcggcatagccctgagtaacaaccgctcgttgcgtcagtccctgctggacatagagcaagcgcgtgcgcagtaccgtatccagcgtgccgatcgtatccccagtctcgccgccagcaccgagggaagccggcagcgggtgccgtcgagcctgtcgacttcaggcaactcggatatcaccagcagctatcaggtcgggctgtcgttgcccgagtacgagctcgatcttttcgggcggatcgagaatctgacggatgctgcgctcgaagagtacctggccaccgaggcggcagcgcaagccgcgcggatcgcgatgatcgccgaagtcagtcaggcctacctgacctatgcaggtgcgcagcagcgcctggagcttacccagcacactctgctcagccgagagaactcgttgagcctgatctcgcaacgtcgcctcgccggtaccgctaccgctctggactatcaggaagcgctcgggctggtcgaacagacccgcgcgcaaatcgaggttgctcagcgcgagcaacagcaggccttcaacgcactggtgttgctgctcggcacgcctgacgcagcctcgaacatccccgcaaaacctcgggatgagcgacgtctgctgcaggatataccccccggagcgccttcccagctgctgcagcagcgtcccgatattcttgccgccgagcatcgcttgaaagccaggcatgccgatatcggcgcggcacgcgccgcgttctttccacgtatcagcctaaccggaacttacggtagctccagcgctgagatgtccggcttgttcgggggtggtgcccgctcctggaccttcgtgcccacgctgtcgctgccgattttcgaggccggtcgcaatagcgccaacctggatctggcagaagcgcggcgagactccgcagtcgcagagtacgaaggcagtatccagactgcgttcaaggaagtggccgatgctctggcagcaaccgacacccttcggcgcgaggagcgcgcacgtcgcgccctcgcaaccacaagtgccgaagcattgaagctggcacgagcgcgttatgagggcggtgtggacgaccatcttcgttacctagacgcgcagcgcacgagcttcgtcaacgagctcgcgctgatcgagaccgccacgcagcgtcagattgcgctggtcagcttgttccgtagcctcggtggcggctggacggaaagcgccgaactaaattattga

SEQ ID NO: 366813 - DNA, 3132 bp, Pseudomonas aeruginosa
atgtccctgtttttcatccgccggcctaattttgcctgggtggtcgcattgttcatttcgatggcaggcttgctcgtcattccgatgttgccggtttcgcaatatcccaatgtggcgccgccgcagatcagcatctccgcgagctatcccggagcgtcggcccaggtgctggccgactcggtgacaagcgtcatcgaagaagagcttaacggtgccaagaacctgctgtatttcgagtccagcagtaacgctaatggtattgccgaggtcaccgtgactttcgcgcccggcaccaaccccgagttggcacaggttgaggtgcagaatcggctgaagaaggccgaagcacggttgccgcaggcggttctgaacctgggcgtacagaccgagcaagcctcctcgggttttttgatgatttacgcactgcgctataaggcggactcggctcgtgacgacactacggcgcttgccgacttcaccgtgcgcaacatcaaccctgagattcgccgccttccgggggttggcaagctgcagttcttcgactccgaggccgccatgcgggtgtggatagacccgcagaaactggtcggttttggcctgtcgatcgatgatgtcagcaatgcgatccgtggccagaacgtacaggtacctgccggtgccttcggcgctgctcccgctgatggcgagcaggagctgaccgcgacgctggcagtcaagggcacgctggatacgcccgaggagttcggtcgtatcgtgctgcgcgccgagcaggacggctctaaggttttgctgagccaggtcgcgcgtctggaagtcgggcggcaggattacaacttcagctctcgccaggatggtcggccatccgtagcagcggccgttcagttatccccgggtgccaatgccattcgcactgccgaagcggtccgcatacggttgaacgaactggccgcgaacctgccggacggcgtcgaaatcacggtgccctatgacacgtcccgctttgtcgatgtagccatctccaaggtcattcacacgctgttcgaggcgatggtgctggtgttcatcgtcatgttcctgttcctgcagaacgtgcgatacaccctgattcccagcatcgtggtgccggtgtgtctcgctggcacgctgacggttatgtacttgctcggcttctcggtgaacatgatgaccatgttcggcatggtgttggcgatcggcattctcgtcgacgacgccatcgtagtggtcgagaacgtcgagcggatcatggctgaagagggcctgtcccccgtagatgcaaccatcaaggcgatggggcaggtatccggcgcgatcatcggcattaccctggtgctctcggcggtgttcctcccgctggcctttatggctggttcggttggcgtgatctaccagcagttctccatatcgctggcggtgtcgatccttttttccgggttcctggcgctgacatttacccctgcactgtgtgcgaccctcctcaagcctgtaccccaaggacaccatgagaagcgcggatttttcgggggcttcaatcgagcgttcggtcgactaacccagcgctacacagcactcaacggcaaactggtgccgcgtgccggccgcatgatgattctgtacgtcgtagtcgtcggactgatgggcttcttctacctgttcctgcccgaatccttcgtgccggcggaagaccagggctacatgatcgtcgacgtgcaactgcccccgaacgcaacccgcgaaaggacttccgaggcgggagagcagcttgaggactatctgctgtcgcgcccagcaatcgatagcaccttcctggtgctgggtttcagcttctccggtatgggtgagaacgccgcgctggcgttcccggtgttcaaggactggtccgagcgcggaccggagcagtcggcagatgcggagactgcggcggtcaatgcgcgcttcgctaaccttgatgacggcaccattatggccgtcccaccaccgccggtagaaggtcttggcaactcggggggcttcgcgctgcgcttgcaggaccgtggcaatctggggagggaggctttactcgctgcgcgtgatgaactcttggccaaggtgaatggcaatgagcacttcctctacgccatgacggagggacttgccgattctccgcaactgcgactgctcgtcgatcgtgagcaagcgcgggctttgggtgtgagttttgagtccatcagcagcgcgctgtcgactgcctttggttcggcggtgctcaatgactactcgaatgcaggccgtcagcaacgggttgttgtgcaggccgacgcggaagcacggatgacaccggaaagcgtcctccagcttcatgtgccaaacgacaagggagagctcgtcccgctgagtgctttcgttaccgcgaagtgggagcaggggccggtacagatggtgcgctacaacggctatccctcgatccgtatcaccggggatgccatgtggggcgtcagtactggcgcggccatggctgaaatggagcgtctcatcggtgagctaccggaaggcatcggctatgaatggacgggactttcgtaccaggagcgcgtcgcaagcggccaggcgctgacgctgttcgcgctggccattctggtggtcttcctcttgctggtcgcgctgtacgaaagctgggcgattccgctggcggtgatgctgatcgtgccgatcggcgccttcggcgcagtgctggcggtgatgtttgctggcctgtcgaatgacgtttatttcaaggttggtttgatcaccatcattggccttgcggcgaagaacgccatcctgatcgtcgaattcgccaaggatctctggtcccaagggtattcgctgcgtgaggcagcaatcgaggcggcgcgtattcgctttcgcccgatcatcatgacctccatggccttcatcctcggtgtagttcctctggtgatcgccagcggggctggcgccgccagccagcgcgcgatcggaacgggggtgattggcggcatgttcagcgccacattgctgggcgtgatcttcgtgccgatcttcttcgtctgggttctgtcgctgctgcgtcgtcaacccaaaggcgtcgatcaatccatccagactgcggagtga

SEQ ID NO: 366814 - DNA, 810 bp, Pseudomonas aeruginosa
atgcaggcccaggccacggtgcgtcgctatgagccgctggtgaaaatagatgcggtgagtcagcaagacttcgatgcggccaaggctgcgttgcaaagtgccgaagcggttaagcgatcggcgcaagccgatgtgcaaaccgcgaagcttgaactcggttactcgactgttcgcgcgcccatcgccggtcgcatcgggcgcgccgaagtgaccgagggtgcactggtaggccagggcgaagcgacactgctggcccgcattcagcagctggacccggtttatgtcgatttcaagcaacccgtcgccgacgctctacgtctgcgtcgaactatcactgacgcccctgatgcgggcccctccagatcactcagtgtcagcttcgaaggtgctgctaccgaaaaccatggcagcctgcagttcaccgacactgcggtggatcgcggtaccggggaagtcacgttgcgcggtcgtttcgataacccgagcggcgacctgttgccgggcatgtatgttcgagtccacgcaccccagtcgcagggagaatcaatcctggtgcctcaacgtgctgtactgcgtgacccgaccgggcaggccagcgtgatgttgctggggccggataacgtggtggagtcgcgcccggtcgtgaccggcgtcatgcagggctcgcgttggcagatcaaggaaggattgcaggagggcgatcagctgatcgtcagctcgctgattgccatccagccgggtgtcaccgttgtgccacgccagcatgtaacggcggctgatacctccacccgcccaaatcaggcgcagtaa

SEQ ID NO: 366815 - DNA, 552 bp, Pseudomonas aeruginosa
atggacgcttccgttgccgacgaaaaattgcttaaagcgctggctgtggccctcgttgaccatccgcgcggtaccttcaaggaaatcgcggaagcagccggaatcagcaaggcaacgctgaaccgcttctgcggtacgcgcgacaatctcatcgagattctgatgacccacggtagcgtggtgatgaatcaggttattgcgaacgctgggctggacgagcggccggttcttgaagcgctgcaccgcttgatctccgagcacctgctccaccgtgaggtattggcgttcctcgcgttccaatggcgtcccgattcgctcgatgaagataccggcggtactcggtggctaccttatgcagatgcgctcgatgcttttttcctgcgaggtcagagagaaaacgtatttcgtatcgatgtgggcgccccagagctaaccgagattttcatctctctcgtcttcggcttggtcgacgcggagcgccgcggtcgggtggcccgtgcggggatggcagcgcttatcgaacacttctttctcaaaggcgctgctggctga

SEQ ID NO: 366816 - DNA, 546 bp, Pseudomonas aeruginosa
atgagtcgcttcaaagatattgttgcaacaggcaagcgcttcagcgctttcgtaaaggaagggttggagtccgagaaactgtcggcagccggctttgcgaaaaaggcccgccggacgggtactttttcagcctctaccctggcaaggctggatcaaatcgaaggcagctaccatcttctggtcgcggcggagatctggtgccccgactgccacatcaacctggctgtaatggatttcatgtgcgaagcacagccgaacattgaactggcgatcgtttccaaaggacgtgccgagaatgatctccaggaatcgcttgggttggagcggatattggttccagtagttgccgtcttgaacgaagcctatgagctcatcggaacattcgttgagcgtccgaaagtcgtgcagaacgacactacaggccaagcaatgttgcgctatcgggcgggtgaccatatggatgacacgcttcaagacctgctcactttaatggaacaaaatgagcgcgttcatcccgtgcgtgccagcgggaccttgcctggctag

SEQ ID NO: 366817 - DNA, 222 bp, Pseudomonas aeruginosa
atggaccccaagcaagtgactatcgaagactgggatggcgatggcgctatccgcattccagatgaggttcttcaggagttggacgtcgatgttggcggcattctctatttgattgaggagtacgtcggcaatgcccggtgccttgtactcagcaagacacctcggatcccggatcgtaccgatgatttggtagaccactggaatcgttctgtaggcgaatag

SEQ ID NO: 366818 - DNA, 807 bp, Pseudomonas aeruginosa
atgaactgcttagacttgctggaaccagttaccgaaaaagtgcttttggccggccgattgttggccgcagagtgggatcgtcctggtggtccgagaggaagtggtgatgtggcagtggtcgatgcagagatcgaagctgtattgcgcgcggcgctgctagagatactgagctgcgacttctggggggaagagacgggaagtcgtctgactggtcatgagtattgctgggttgttgaccctaatgacggcactcgggacttcctgttgggtcgaaagggatctgctgtctcggtagggcttttgcacaacgctgttccagtgcttggggtggtttatgcaccagtaacttcggatcgtggccccgattgcatctcgtgggtaaaggggcttggcgccgttatgcgtaacggtcaagcgtcaccgagtcgcctggaccaactcagtctgggtgccagtagccaagtgttaatcagcagtgccgccgccatcaagccagagataaatgctgagctatgtgctcccgcaggttttattccaatgcctagcattgcctatcgcctggcacgtgtggctgcaggtgatgcagttgtcggtgtctctcttgttcctgtgtcagcgcatgatgtggtcggggggcatgcgttgcttattggcgctcgaggagtcctgcttgatcaggacggattccccatctcatacgagtccaaagaaaaaatggcaatcgtggcttcacgatgctttggcggtgctccttgtgcgtgccgagagcttgtgcaaaaagactgggggaggttgtttgcagcctaa

SEQ ID NO: 366819 - DNA, 159 bp, Pseudomonas aeruginosa
atgatgcaggtggagcgagttttgaaagggctgaaggcggatgagtcgatcgctagcgacatccgcagtgttgtatgccagattttgcgacattatcccgtgatggggtggatcacgtccgcccgcgatttctcgcgaatcatcaccctgctccaatag

SEQ ID NO: 366820 - DNA, 456 bp, Pseudomonas aeruginosa
atgtttcagacatatctacatgctcgaattccatcccactctgcgttcgctgagcctttgctgtgggctgaggttgagcacgacatccatcggccttggttctatgtgcatcttgtggagcacgggccggatctgcagtggcagcgcatgatcatgattagccatgagcgttccctgcaggcactccttcaggcccagaccccaaactgggttattcaaggcgttcagctgatgacgccagcccacgtaaacggggctaagcaatggaagctcgaactgctagagagtctgctctggtatggggatgtaggcatggatcctactctggcctataaggttcacaatggctccgtctacatcacgggagatatgactcttgcccaaagtggttgtccggtagaagttctctttgatcagtcgatgctcggtgggtccaccaatgacaacgcccattga

SEQ ID NO: 366821 - DNA, 180 bp, Pseudomonas aeruginosa
atgctggagaatgggggatcgtggaacgtcactctgctcaagattgaccagattgcggaagcacttgatgtgcatcctctaagcatcctcactgcggcatatcggtcagcaaacccggacgtcagccttcaggatctactgcagcgtatcgagaaagagctaaccgaaattgacatctag

SEQ ID NO: 366822 - DNA, 198 bp, Pseudomonas aeruginosa
atggccatcgagaagcacaacatcaagctggccaccttcatcgccgcgctcttctatgaccttttcacccagaaacaggtacgcattcccacccagatcgaaaaacgggatcgcgaactgtacgaactggtaaagaagagcaagcgcccgtggccctgctcgttgatgaaacccatgatctcaatggtcataccttga

SEQ ID NO: 366823 - DNA, 906 bp, Pseudomonas aeruginosa
atgagcgccgttaaacgcgccttcgagcccgatttgattacggtcgccctgccgcagattctgccatcgcgtcaggtcagtcatgacatgctgacctcggtcaaatacgccgcgattctggcctccattcgagagttgggggtggttgaacctctggcggttcatcccgagccgattcgggaagtgggcggcgagccccgctacctgctgttggatggtcatctgcgtttagccgcactaaagcagttgggcgcggcggaagcgctctgtctgctggccacggacgacgagggctttacctataaccggcagatcaaccgcctcacgccgatccaagagcacaagatgattctggaagccatccgcaagggggccactgctgagcggatcgcggaggtcttgagcgtcaacgtcgggcgcatccgcgaacgccagcatctgctgcgggggattgcaccggaggtcgcagagttgctcaagacgcggatggtcagtcaggcggtctttcgcgtgctgcgcaaaatgaagccgatgcgccagatcgaagtggtggagatgatgatctcggccaactgtttcaccggccgctatgccgagatggtgttagccgcaacgcgtcccgaacagttggtcgaaccgaagaaagtcagcgagggcgtgacggcggaagacattgcgcggatggaacgagaaatggagaagctctaccacgactaccgtttggtcgaggatacgctcggcgaaaccatgttggtgctcgtggttgctaaagggtacgtctctcgtctgctgcgcaatgaaaccatcgcaaactatctggagcgctttgagccagatttggcgcgggaactggcggtggtcatggacgcggtcaccgccgacgcccgtagtctggaacgcgaatag

SEQ ID NO: 366824 - DNA, 897 bp, Pseudomonas aeruginosa
atggccatgccgcagggaaatcatcctgcacgacatgttgcgcaggaggcgcccattgcccagatcccgctggcggatattcgcgtgctaaacccgcgcagtcgaaatcagcaagtctttgcgcgactcgtggagaacatcgccagtctggggctgaaacgaccgattacggtgacccggaatggtccgagcttcgatttgatttgtggccagggacgcttcgaagccttcaagatcttgggcgagtcgacaattccggcggtggtggttactgcgaccgaggcggatcgttacctgatcagcctggtggagaatctggcccgacgaaagcactcgaaccgcgatctgctgatggccatcagcgtactgcatgaacgcggctattccatcaagcagatagctcagaaaacttgcttggacggtgcgtacgttggcgggatcctgatcctgttgcgccaaggggaggagcgcttgatcgcagcggtcgagaaaggttggctgccgattaaagtggcgactgaggtggctcgggcggacgatgcggaggtgcaggcagcaatgctggaggcctacgaaagcggggtattgaagggggatcaactgatcaaggtgcgtcgtctaatcgaccgacgacgccttctgggtaaaggctatggactacgccaaggctccgaacgaatgaccacaccacgccagcttctgaatgcatatcagaccgaagtgcgccgtcagcgcctaatggtgaagaaggcggatgtcggcgagcaacgattgctctttgtggtgaccgcgttacgccggttgttggccgatgagtacttccgctcgttgttgcggagcgaaggcatcgatgacatcccgcaggtgttggctgagcgcattcagggggatgcatga

SEQ ID NO: 366825 - DNA, 1494 bp, Pseudomonas aeruginosa
atgtcaacggagcatcagcagtactccacggagaatcagctagacgccattcgcgtctacgcagcagcgcatgagttggacatcgtccgcgtgtacaccgatgcggggaaaagtgggttgagtctggacggccgggaagcccttcaacatttgcttcgggacgttgacgcgggccagtccgatttctctgtggtcctggtctatgacgtgagtcgctggggacgctttcaggatcctgatgtgagcgccagctacgaagtccgctgtcggcaggctggtgttcgggtcgagtattgtgccgaacagttcgtcaacgatggctcacccgtatccagcatcatcaaaagcgttaagcgcatgatggcgggtgagtacagccgcgagctatccgtcaaggtatttgcggggcagtcacgcctgatcgagttgggctaccgacagggcgggccagcaggatatgggttgcggcgccaactgatcgatcagaccggacagcctaaagcgctcctgagtcgtggtgagcacaagagccttcagacggatcgggtgattctgacgccggggccggaacccgagcagcaggtgattcagggcatttatcaggcctttgtcaaagaaggccgcagcgaagccgacattgcagcgcagctgaatcggcgtggacttcgcacggactgggagcgaccgtggacacggggcgtagtgcaccaggtgctgatcaacgagaaatacatcggcaacaatgtctggaatcgtacctctggcaaactgaagcagccccgtacccgcaacccgattgatcagtgggtgcgagccgacggcgccttctcccctgtggtcgaccactcattatttctcgcggcgcaggccatcatccgcgcgcgttcacggcactggtccgatgagcaaatgttggtcaccttgaaacagatttttgaggagcgggggtgcctgtctgggctgatcatcgacgagcaggaggactgcccctccagcagttgttatcgccagcgcttcggcagtttgctgcgcagctacagcctgatcggctactcccctgcacgagactacagctaccttgaggccaatcgccgtctgcgtgagcggcacccccatatattggtcgacacgcaggagcgcattcgtgtcgtaggcggtcgcatcacggtcgacccccagacccaactgatttgggtcaacgacgagttttcgatctcggtggtgctttgccgctgtcagtgccctgagtcagcgcgcaggcgctggcaacttcgcttcgacttcggcttgttgcccgacctgaccgtcgcggtacgcatgctaccgggcgagcaggaggtgctcgattactacctctttccgatgattgatttggcggcaccgcacttgcgtttgggagataccaacccccgcgagttggaactctatcggttcgacagcctggacatcttgtcgtccctgagtcggcgtctacccctgatgagcgctgcgtaa

SEQ ID NO: 366826 - DNA, 468 bp, Pseudomonas aeruginosa
atgaccaccgccgacctcaatcgcacaattctccctgacgagaaggagattgctgcggccgtggaatcacgtcgccagttggcagcatttctctcaaccaagctagagactcaacgcatcgagctggtcgatgagcagcaaaagcgccaggttgtcgagatgccagcattcgcgctgcgcttgctcgacaatattctcagtgagttggccctgggaaatgccgtcaaggtggtgcccatccatgcggaactgacgacccaggaagcggctgatctgctcaatgtctcgcggccgcacttggtgaaactgctcgatgagggggtgattcctcacaccaagactggccgtcaccgccgggtcaggttcgctgatctgatggcctacaaggagctgcgagaccgcgctagtcgtgaagccatggatgagcttgccgctcaggcccaggagttagggatggggtacgaatga

SEQ ID NO: 366827 - DNA, 1143 bp, Pseudomonas aeruginosa
gtgccccagctttccctcctgaaaagcccggccgccgtacaggccgcaatggacgagttttcgcaactggggcgggtggcgttcctcaagcgctacggcttcggcaaatccagggattacttggtacgcaaccctcggacgggggagctctgcgattccaaggcgatcgtgggtgttgccttcgggaagcaattccccaatcaaggcgtcctgggggcggaggatttctccggcggcgaagcgaccgtggtgcctcttcttcagtcattgggcttcgaagttcaccgcatcggggaggactggtcagaagacgaggtccagtcgacggtcgcagactatttcgaaatgctgcgattagaagctgatggtttggcctacaacaagtctgagcacaaccagatgctgcgcaagcaactcaacgggcgcagcaaggcatccgtcgagctgaaacatcagaacatcagcgccgtcctcactggtctggggttgcctttcatccaaggctacaaaccacgcggcaacagccagttgctattgcgcaaggctgtgcaggagtacgtcatccaacattcggtagcagtgggcaagatcgtcgatgcgttggaggaggtaaaaaccccggcggagaaatcttattcagccgtattggttgattctcctgccaaggaagaacgacagaagcttgttgtgccggcgcctgttcggcagcgcctgccgcgcaagctcgactacgccgcccgggacgaagcgaaccgcaagttaggacggtcaggagagcattgggtgattggctacgagcagcaccggttgtcggaaatgggccatcctgagctattccagcagctggactgggtctcggaaacccgaggcgatggcgccggctacgacatcctctcgttcgagaatgaggtgctacatcgttacatcgaggtcaaagccacgaatggaggtatcgcgacttcgttcatcgtcagccacaacgagttggaattctccagagaggcggacggccagttttacctctatcgggtgttccaactcagtagtgacccgagactctttatcctgcgtggagatctgtcgaaccagctctatctgacgccgttggatttcagggcaagctttcgcgagcattttaggtaa

SEQ ID NO: 366828 - DNA, 384 bp, Pseudomonas aeruginosa
gtgacgaacgcatccactccgccctcccctctggtcgacgtatcccagctcgccgaaaagcttgagcaattcgccaatgatcgaaattgggcccagttccactcccccaagaatctggcgatggccctgagcggagaggtgggtgaactcaccgagatcttccagtggatgactgaggacgcctccaaggaagcagcccgaaatccggaaacggcccaggctgtgaaggacgagttagctgatgtgctgatgtacgtcgtgcggctggcctcgacactgggcgtcgaccttaatgccgcagtgcaacagaaactgaaggttaacggcgagaaatacccggtcgagaaggcctggaacacaagcaagaagtacaaccagatctga

SEQ ID NO: 366829 - DNA, 333 bp, Pseudomonas aeruginosa
atggaacagtctggagtagtggggctcaccttcgaagggcatccagaacgcatcaccgatttccgcgacgcaccgttctgcacgcagctcgtgctggtcgagatgctgggcatcgatgacgtcaccgaagacacggtgctcgactgggtcgaaaccaagaccatcccaaccgccaagattggccgccgccgcgtcatcaacctccaccgcatccgcaaggaccgggaccggggaagacagtcttctgccagtgggactacgccgctgagtagcgtgctctccactcaattcgcccggctggccggcgcaacatcactactcggcggcgtctga

SEQ ID NO: 366830 - DNA, 831 bp, Pseudomonas aeruginosa
atggagttcgctagcatagttgcaagcattgtgtctggtgcggttggagcagcagctatttcttggcttctaagaacatggatagcagagcggctgaaacagtcaattagctatgagtactttcagaagctggagagttacaaaacggagcttaattctaagcttcaagcaatgcaccacgaacatcaagttagtcaaattagaacttctcttttcttcgattatcaacgtgaagcgtttgctggaataataggccttgttagaaaagtgaatgaggcttgggtaaatgcttcttatgtggagtatcatgggccggccgatgctgttccgtctggcgcatatcgagaactaaaagaatattacgagcagaatcagctttttcttgacgaggagtgtacgctcgcagtcgagcttgtgcttgagtattacagtgactcttttccattcgatgatggcacaggacagttgtatgaaagggatacgaccacagcttataacaatgtcgaggagctgcggccaattttggcagcgttatttagatctaagataggtgttctagataatggtgacgcccgtaaaactctattaggtgtaggcgctcttcgactaactaacagcttaagaatttacaataaaaatatcccaccaaaagcacctctcaaaatagataacactggctctgtagagctattaatgaagactgcgagaaatcatgaagccgagcttgtcgagtatttaggatatttttgctcggctttgagtgaggagggaagttttcaggactattacaggaaagccctatcctatgagcgcttactgagggcgagttag

SEQ ID NO: 366831 - DNA, 1104 bp, Pseudomonas aeruginosa
atggctaggcagggagaaatgttcgcgcttataagcgatgagcaaaaggcagaagcagagaaacagattatcgagagacagaaagaaacggacttcgatattcgtgaatacccgatcgaagtcatcgtctctaaatatacggataaacttgaggagacagacaaggctgagcttttcatccccgactatcagcgggagttggtgtggagtgaagagcagcaaggacgttttatcgaatcgatcctcttgaatctgcctattccttatttgtatgtcgctgacgtgcatagcggcgagaacgaagggcgcctagagatcgtagatggatcccagcgaattagaacgctggtgagattcttaagcaatgaattcaaactagatgacttgaaaatgttgccgatgttgaacggcttctatttcaaggacttcccagtttctcgtcagcttcgcttcagacgaaaaaccatgcgtatgatcgaattgatggaggtcgatgaagaggctcgtcgtcagctattcgatcgccttaatacgggcgggacgaagctgaaggatatggagcaacgctttggctcccaagatggcccattcacggacttcatccgcgaggtggctgctgacccgcgcttcagacatctttgtccaatcagcgaagtacggatcaatcaccgcgactatgaagagatggtgttgaggttctatgcctatctccaccgctatcgagatttcaacaagcgagtcgatgaatttctggacgagtatcttgagcatatgaatgagtcaggcttcgatcgagatggcttgcgcgaaaccttcgaaaacatgctcaacttcgttcagcgtttctttacgaatggattcaagaaagcacccaataattcttctgtacctcgaattcgtttcgaatccatctcggtcggggttgcgctggctcagcaagaggtgccagagcttgtgccggcatcaatgtgttggcttgccagcgacgaattcaaggttttgactcgctcggatgcaagtaactcaaggccgaaggtgatcaatcgcatacacttcgtcagggataacctgcttggccgagaggttgagtatgaccaacagtga

SEQ ID NO: 366832 - DNA, 738 bp, Pseudomonas aeruginosa
atgaccaacagtgaagttctagctattgaattgtacgacctttttcgccagcgctgcgctgaggttagtagatacatcgagttcataggcacgatcgctaacaatagatcagttactttggcgggcgagattgagggcgaaattttacccatccaaggggctgagctttctcgtgaactgaccaagacacttagggcgaatgcttaccttctcttgtataacctggtcgaagcgacaatgaccaatgctatagatgcaattcacaaggctgtggatggggataatttaggtttcgatcagttaagtaaaaatttacagaatgttgcgttaagtcacttcaagcgtgctatcaaggatagccacgaggcagctataacagggcgaatgcaccctatagaagtcgctatagcgagacttgggtacgatagagagaaaattttctcgggaaacgtagattgcaaagagatcaagtctacagctaagagatatggttttcagacagctgatcctaatcagaatgggcgccttatattgcgtcagctgaaagatttacgagataaaaggaacgcgcttgcacatggacgcttatcgttcgagcagtgtggtcaagataccgctcctgagtatttggccaaggttcactatgagaccacggtttatctgagatcggtgttgcggtctgtatcgcactatctgaggaaaagacagtatgcggcggtcctgacggaggcttcttga

SEQ ID NO: 366833 - DNA, 1059 bp, Pseudomonas aeruginosa
atgcatgatattgacgccgttgaccttttctgcggtgctggcgggctgaccgctggcctgctcaagactggtatcagcgtacgcgctggctacgacatcgatctcaactgtgagtatgcctacaaaacgaacaatggcgccgagtttgttgccgaaagcgtagaaattgccaagattgaggacgttgctgcctggtaccgccccaataagattaagcttctggccggctgcgctccttgccagcccttctcgacttacaaccaaggccgagataccagtactgatcgtaagtggcctctcctgtactccttcgaaaaactcatcaaaggcatcaagccagagctcgtgacaatggaaaacgtaccggacgtcactaagcatcaggtctatcgggacttcgcccaaggcttgcttgatgaggggtatcacgtctgggctgacaccattcattgcgtggattacggcctgccccagcagcgacgtcgccacgtattgcttgcctccaagctggggccgatcaccatgatccccaaaacgcatgtaggcaagccagttacagtggaacaagccatcggccaccttccagcaatagcggccggcgagtgccactccaaagatccactgcatcgagcagccacacttaacgctatcaatcttgagcgtatcaaacgctccaagccaggtggcacctggaaggattggccggaagagttgcgcgcagtttgccaccgcaaagcatccggaaaaacctaccctagtgtttatggacgcatgcggcacgacacccctagtccaaccatgacaacgctgtgctatggctttggcaatgggcgatttggtcattacgacaccactcagaatcgcgctatctccttgcgagaagcagccacgctgcagtcctttcctgatgactacaaattcatgccggccgatcagatcagctttaaggcggtaggccgaatgatcggtaacgccgtgcctgtgcgcctaggtgagatcatcggcctcagcattcagcgccacctcaaggaactggagcaggcaaagaaaacgagctga

SEQ ID NO: 366834 - DNA, 213 bp, Pseudomonas aeruginosa
atgtacatcaatcaggcctaccccaacgtcaccataacgctgctgaaagtcaaaaccgcaggcctcacacacaagcttaccgtaccttgtcatcgcttgcttcttcttcctctcgacaagggcacggctacgctccctgactctgtgaagacgggtgagcaccttaccttccgcggcttcgtggatatctggttcctcttgaaacccagctag

SEQ ID NO: 366835 - DNA, 195 bp, Pseudomonas aeruginosa
gtgctgtggcgatccgtgcatgtggagctgatctgggattttccctgcgtgtgttttcaggggcctggcagtgattttttgagcattgccatggggggggcgggtttttgcatcctgctcggacgctggctgattccactcgacgtgctcgtgttcgatgtcacttttactttgctgctgcatcgtttgttatga

SEQ ID NO: 366836 - DNA, 1311 bp, Pseudomonas aeruginosa
atggcctacatcacccgtcgcggagccgtctactacctgaatctcaggcttccgaagcacctctatccacgctgtcacactttgcgtttgagcctcggcattcgagaacgcagagccgcaacctttctggccagcacactcgctgaacgggtacaccagcacatagccgcacaaccactcacagagccccatagactgcgtttgctgtgcactgaatggcgtgatagcacccctgctccatcagacgaccaatcgccttccagaggccgtatcagcgtcactggaaatctctacagggaaggtccaacactgggcagtttgtcgaagctttatatagaggaaggcaaacggagtggcgcttggcggattggaagcactttggacgtagagcgggcgttacgagaattctttgagctaatggatgatcagcccgcccttgcctttggtgctgagcaagcacgaatgctcaaggaccgcttgagcagatgtccccagtatttcgcccaacggccagagttcaaaggcatgacgttgcgggaggtcgtggactccgcaatggtgtaccaaaccatcaccgcagtgacgatcaacaatcggctcaggaagctcacggccttcttcaactggtgcaaatccaatggctacatcaaacaaaatccgctagccgggattaaagtcatggctggcgctgcgaaggatgctcgcctttccttcgaccgatccgaccttctgacactgctggacctcaacacacttcgccaagaggctcgcaagcattcttggagattctggcttcccctactcgctcgtttcaccggggcacgattagaggagctttgtcagcttcacacggctgatttcatcgaagcacagggcactccgtgcatccgaatcgacgacaggcatgacgggcaaaaactgaagaaccaaagcagccgcagaactctacccattcacccggccctgataggtctaaagctgctagatcacgttgagtcaatccgggccagcggtgcaacgagagtatttcccgacttgaaacccacgcgaggcaaatacggccatgcgccatcgaagtggttcagccgataccggacgaaggttaacatcgacgatccccgcaagacatttcacagcttccgacacaccttcatcgacgaccttcgggaagctggcgtacaggactcattgattaagcagatggttggacacgaggatcactctgtgacgttccacgtctacggcagccgtttacaactgaacgcaatgctccgagcacttcggttcgtcgacgatggacgccgctcgtag

SEQ ID NO: 366837 - DNA, 1020 bp, Pseudomonas aeruginosa
gtgaatagagaattggatcagacccttcagcgcaatctggagcggctatacaattacctagaaaatccagaacgagaggaggcacagcgtgttctgctcgcagcggaaccagagcctatccgaattactcacggaattcctgacctctataccgactggctgtcatcccccagctactcagcacaaggtgggttgacggggcaactgacgcaggtcataagccagactgccgggcggcccgttctagtcttcgacgactacttcaaggttcatgaggtcactattcgtacggtcgccgaaaccggaggagccaacagtatttcggtgagcgacctccaggtgcaattgaaccagcagatcaatacctttatccaagaccgcatcgatggtgacaaagccgataaggtcagccgcctccagtccaatatttcctatctgattgaaatgggtattaatatcgatttcaccgcccgtcatgagcttccacctggtgggcgaggcaacagagctactattccgacctctgaccccaacggtgaatcaggtgtaacgattggctatggcttcgatgtcggccagcacgatgaatccggcattcaggctctgaacattgctgaatccacgcgcaaaaaaattcgccccgccctcggcttgaaaggagcgaacaccgcgaccttccaggcattagcccaactcatcccggtactcacagatgaagacgggctgtccctctttaccgccaagataatcaaggtcactgatcggatgaaggtgaagttccagcagtggagcaccttacctccggcggtcaaaaccatagtgacagacctgtattaccactatggtgagtattcctcgttcccaaactttgagactgctatttcccagagcgactggctagccgccattagggagttgaggaactggaatggtactcccaacagtaccgatccgagcgatggcatagccaggcgattgaacaatcgcgcggactatctccaacgatccctgggactctag

SEQ ID NO: 366838 - DNA, 807 bp, Pseudomonas aeruginosa
  misc_feature (770)..(779): n is a, c, g, or t
atggccaaggacaaagaaaacgataaagataaggacttttgcgatctgctgaagcggtacccccgcgccattgtgcacttacgatcccaggtccgtaagcaacgcttcggaacaatccttggtgcagggattagcgttgattttggggctccgcagtgggataaattaatcaatgatatcgcttctgatccggctgtggacgcaaaagatattgtagaaggtagagcgttcaaaggcatggcggccccctaccagaccgaaattctctatcaaaagtttcggggaaagttttatgaaaattcaacggatctatccccggcggaacagttaaactctgcaacggcagagtggctcacaatttgccaaaagtatttatacaagacgccaccgatcgacttggctactgaactgcccaagcatccgtatatggaagagttgatcccgctcgttcaaaatagcgcactaactgttaattttaacttcgatgactatctcgagcgggcactcgcggaaagaaagcgaaacaaagacaagagtaatcgcggcttcgaggttgtcactgatccttggccacaatttcggcggcaagactgtgtgatttatcatattcacggatatgtccccgaagggcttatggaaaaaactgtcgaccgatttgttttttcagaggcttcatactcaaagcaatatgtcgggtctcgtggccatgattcgtcatttcttctggctcacttagctagaaacacctgcctactaatcggttgttcgcnnnnnnnnnnctggaagcagaacttagaaatgttttaa

SEQ ID NO: 366839 - DNA, 1545 bp, Pseudomonas aeruginosa
atgaatgaagacaagattttgcgcgttgcgcttgactgggctgtggacgaggtcgatccgccccgatcattcgggggttggaatacaggccgcgtggttcatcaaacacatgaaagcctgtttgaagatgacttcggagagttacccgcttcggacggcgcgcccaccagcctcgttccgcgactagcgacccattgcataacgtcaccagacgcccgtcgttatacttttcgaatcagagaaggggttcgttttcatgatgggtgtccactcgacgcggaggctgtagttatcaactacgagagaatgtgttgcgcaacctcgccctttttctctccggttgttgcggacttcaatcgcatgggcgttggcctcattgaaaaagttcacgctttagactcgatgaccgtagagttcaagttttccgagccgtttcctgaatttctgcgttacatgacccaagaagacgcacccggtgctcagtcgctgattagtccggcggccattcgcaaactcggtcctgatggttgtgccgacaaagctcctggtaccggtgcgttccggtttcattctcgttttgagacggatggagggtctgcggtagagctgcggcggaacgatgactactgggccggcccgccacagatagaagggatccggttcctaccttttcctgaccgcaaggctcgcgtccgggcattggttgaggggaaggtggatgtcgcctatagcttagagggcgctgaccttgaggaactggcggcgctagggttcaccgtgccctcatttaacccaccatatctctggtatctggtatttaacttgcgcgatccgcttatcgcagatttgcgcgttcggcaggcaattgcgtacgctattgatagagagtcattatgcgctgagttatttccgggggcggctgttccggcgcatagtgcgctatctccaggctcccctgctcatgacccgcatgcagcaaatcgctatgtctacaatcccgagcgggcaagggagctcttggccgaggcaggggcaaacgatggcttggttttggatgtcattgcggcgcaagcggggtctgcgcagctcgatccaggggccatttatcagcggctcgcgctcgatctagccaaggttggtattcgcttaaatgtaacgctgcatccggattgggtagcttactgcaaccagtggcgtgagggggcgccgtctggcattgcattcagtgaaatgagctgggggatgtcgtgcgatctatggctatcacagatcctacatggggcaaatcagtctccccgaggtttcaacgctgggtataacaatgaccctcatctcgacggattcttggatctcgctcgtgctacgattgactcgtcgggaagagccgcgctatacagggcagctgatgcaagggtcatggaatcactcccgattcttcccctgttcacgtcccgtcgaggtatgatcgcgttttcgcccagggtgaaggggctcaccgtcgtaaaccagtgttggcaagacttccgaaaagttaggctcgaatga

SEQ ID NO: 366840 - DNA, 765 bp, Pseudomonas aeruginosa
atggtgtgggggctgcacacgagcaccatcaccccgtcgctaattctgacgatgcttgaaggcaacctagccgtgcgcgctggcccattgttgtcccttatgcaacttgccgactccgcgctgccgataggcaggcacgcccatgcgttcggccttgagcgaatgcttcgggataagcgcgtgaccacgccagacgcgctccgtgaaatgatcgtctcggccttgattcatggcagcgcccgcgcagacggtgcggggaccgcgttggctcatacggcatttgtggatcggaacttagaggatctgaaagcagtagatgcgcggcttgacctactgaagttgacggctccagcacaggtggcctcacgtcgctgtggaagtcgcctagcggtgttagcaccgtcacttcatgcagacccgatgttggcggaatacgctaccgcggtggcgggcaaggttacgccgggtcatctagcggtcatatcaggagccctggcggcggcaatgggggttagccgtgagaatgctgtgctagctgagctgagaggtgtggctacgatgattctttcggcagccgttcgcctggatgtgctttcggccacggcggcccaaggaatgatggtagctctttccacgcaaattatcgcagcggcagagatcgcgcttgtaactcgcctggatgagatggaaggtggcgccgctgtggggctagacatagcagctatgcgccacgctcgtgagcacggtcggctatttgcaacttga

SEQ ID NO: 366841 - DNA, 816 bp, Pseudomonas aeruginosa
atgggcgacggagtgctgtcgttgcgctttgctcgtgatcgacatggtcgaacgcgacttgctgcacgacaacagcgctacccgttgacgactaccgccgttttgcccatggagtcagaatctggtgcgctaatatacgtgcaaaacgcggcaggatcagtgtttggcggtgatcgcctgcatgttgccgtacaccttgaggctagcgctgaactttgtctctcaacaccgtccgcaacacgcctgcaaggtgaagcgctatcgatacagacgaccatgattgagctgagcgaaggagccttcttcgagtacatcccggatatgataatcccgcatgcgcaagcggaacacaggcagcacacatgtattgcactggcaaacggagccgaggccattttcatggagagtttcgcggctggccgggtggcgagaggcgaggagcacctttatcgaagcttctcgacgcgccttcaagtcagttttagcgcacgccctgtgcttgttgacgcttcgagtttccgtcctggggaggcgagtccggccttagagggggcgttagcgtcgagtggttttgttgggaccatattcgcgttgtcccaacagggcgaccatgaggaattggcgactcttatcagtcgacggttggcgtccttaccgggtgtgtatggtggtgcagctgcgttagcctcaggctatggtgcggtgggacgttttctagctgacgatgcgccaaatcttcggatggcgacgcaggtggcttgggatgtcgcccgtcgccacatgcgcggccgtcccgctccactactaagaaaatga

SEQ ID NO: 366842 - DNA, 612 bp, Pseudomonas aeruginosa; identical to SEQ ID NO: 129130

SEQ ID NO: 366843 - DNA, 1716 bp, Pseudomonas aeruginosa
atggctcagtctattgagcgctctagatatgtatcactgtacggtcctacggaaggagactgcgtacggctaggcgacactggcctttgggcgaaggtggagcgcgatttctgtgtagggggcgatgagttagtctttggcgcgggcaagacggtacgagggggcaccggttgtgacggtgtgctgaccgctgccgacggcattttggacctgatcataaccaacgctctgatcatcgacgccgttgcgggcatcatcaaggccgacatcggcattaagaatggccggatcgtaggaatcggcaaggctggcgaccccaatcttatggatggcgtaacgccagggctcacggtgggcgtgaacacggatgtccgggccgcggaaggacatatcgttacggcgggcggaatcgactgccacgtgcattttattgatccgggacaggtggatgaagctctttcggcggggttcaccacgctgatgggaggagggctcggacccactacggttcccattgcgtcgacaggcacaactaacctggggctaatgctccaagcagctgaggcctttccgataaacttcggtttcattgcaaaagcggcctcgcatgccgtcgagcctctgctcgaacagcttgctgcaggcgcagcgggtttgaaaatccatgaggattggggcgcgactccggccatcatcgatgccgccttgaaggccgcggagatcggcggtgggcagatccacttgcacgcagacactctgaacgaatcaggatttgtagagcacactctgcgcgccatggccggacggtgcattcacgcctatcacgtcgagggcgccgggggtgggcacgcgccagacatcatccgcatgtgcggcatatcgaatgtactgccctcatctacgaaccctacgaatccattcaccatcaacacgtttgatgaacatttcgacatggcgatgacgagccatcatctcaatccacgtttgcctgaggacgtggcgtttgcggaaagtcggattcgaaaagaaaccattggcgccgaagacgttctgcacgacatgggagcgatcagcgcgatcggttccgacagccaggggatggggcgcatcggtgaaaccatcgctcgctgttggcagcttgctgacaccatgcgcgagttacggggcgctttgcccgaggatagcggcagcggtgcggacaatttccgaattcgtcgctatatcgccaagtatactaccaatcctgcccttatgttcggcatcgcagatgaagtgggctcgattgagcctggaaagctcgcagaccttattttttggaagccggacagctttggcatcaaaccggaactagtattgaaatctggcttccctgtctgggctcccttgggcgaggctaacgcttctcttatgacctgcgaacctgtgcgttatcgcccgatgtgggggtactttggtcgcgctccgcagtcactcggcgtgcgttttgtctctccatctgccatcgcagccggggtggcccaacgactcgatttgaaagctaccttgcgtccagtggccgacacgcgccgtctcactaaacgcgatatggtgctgaatgatgtgttacctaaaattgacgtcgaccctgaaaactttcgggtttacatcgatggacaggccatcgacagccctcccacatcgcaggtctctctcggccaatcatatatgttgaaataa

SEQ ID NO: 366844 - DNA, 690 bp, Pseudomonas aeruginosa; identical to SEQ ID NO: 237816

SEQ ID NO: 366845 - DNA, 708 bp, Pseudomonas aeruginosa; identical to SEQ ID NO: 129133

SEQ ID NO: 366846 - DNA, 1794 bp, Pseudomonas aeruginosa; identical to SEQ ID NO: 129134

SEQ ID NO: 366847 - DNA, 837 bp, Pseudomonas aeruginosa
gtggaggctttagcgcttgacattttgacgactgccgcaattttgttcgtggtttcgacgggcctcatgatcatcctcggtgtaatgaagctcatcaattttgctcatggagcatttttgaccactggcggatacatagcttatcttgtcggcgctgctggcctcaacccatggctcgctgtcccggcggcggccatcttggggctcttggcggggctcgtgattgaacgaactattatcagaccgctttatcatcggccgttggatgcgatattggccacatggggactaggcattgttatcgggcaagtatttgcattgactttcgggcggggcgtgcagttcgtgccctcaccgattctaggtacgatagatgtttttggaagtgaatactctggatatcggctggccatgctagctattgccatagtgttggcagttgcgcttagtgctttgttgagcttcacccgcttcggattgaatgcacgtgcagtcattgccaatgaaccgctggctaggggcttaggtatagatagcgcgaatgttcgatccataactttcggcttgggtgcaggactagcgtgcgcagccggagcgttaatcaccccattgctctcggtcgatccaaacatgggactgccttggttggtgaatagctttatgctagtgatgatttcgggcgtttcgtttccgagcttgttggtcgcttcgctgctacttggagggtcgcaggtccttgtcagcacttacatcagtcccattctcggcggcatgactatcgttgttcttgctgcactgattctgcgtttaaagccgaaggggtttagccgtgcctga

SEQ ID NO: 366848 - DNA, 1155 bp, Pseudomonas aeruginosa
atgaaaatacgtacacttttacttggtatcggtctctcggtgggagcttcagcatatgcagccgaacctataaaaataggtataccagtaggtctaagcggcgcaaacagtgtcgttgcaccttcgatcgtccaagcctcggagttagctgtcgaggagataaattcgcaagggggagtcttgggtcgtcagctgcggcttgaaattgctgatgacggatcaggagctcaaggcgctcagcgcgcctatgacagtctcgtttttcaacggaaagttgacggcattgtagcaatggaaactacggctgccagaaatgccggcttaccaatcgtcaatcgcggcagggtccccctcatctacacatcattttacgaagggcgctcatgctctccttggatgtacatcaatgcctgggtgccagagcagcaggtcgccccggttgtcgaccattttatggccgagaacgaggccaagaagtttttcctgattggcagcgattatgcctttggtcgcggcatgctgcagtacactcgagagtacgtcgagagtaaaggaggcagtgtggtgggcgaggcgtacttgcccatggatggatcagattggaccgcaatcatttctcaactacgttcggccaatccggacgccttgattacgtcaacggccggcggcgcgccaaacgtgacgctcaccaggcagctgcgcgctgcaggtatctcgatcccctatggtaactacgccctcgatgaaggcacagccaaaagcatgggtgataacgccgaggggatatacatcgtcgcatcttacctctcaagcctagagaccgatgcgaataaagccttccttgaagcgatcgagaagaagttcggaagcagcgccgagacgccgaacgagttgtcggtgccgcagtacgaagccatatatgcgtacgcggcggctgtcgaaaaggccggctcgactgattctactgctgttatacaagcgctaggggaagtgactgtggaagggccccgcggctccgtcatcatgaataagcaacgtcatgcgtcgctcaatatgtatttgggccgcgtcgctgctgatggttcagttcagctcgtcaaatcgttcccaaaagttgacccgggcgaacagtgtccgcaattcgctaacaagtaa

SEQ ID NO: 366849 - DNA, 915 bp, Pseudomonas aeruginosa; identical to SEQ ID NO: 237821

SEQ ID NO: 366850 - DNA, 297 bp, Pseudomonas aeruginosa
atgtttacatgcatgctcccctttgccgaaatccatgtaatggagcacggcctatacgtgttggaaggcaaggcggtgtacctgctgaacaagcattgggtcgagttggaggccggcgactatatgtggctgcgcgccttctgtccgcaagcttgctacgctggtggtccaggcccattccgctatctgctgtacaaggatgcgaaccggcatatgaggctgccgacctacggccgcaggaacaagcttatcgacgatgggccaatctctaataaagcttcgctgttggcgctataa

SEQ ID NO: 366851 - DNA, 1503 bp, Pseudomonas aeruginosa
atggcgatgcacccacgtaaagactggtatgaactgaccagggcgacaaattggacacctagctatgttaccgaagagcagcttttcccagagcggatgtccggtcatatgggtatcccgctggaaaaatgggaaagctatgatgagccctataagacatcctatccggagtacgtaagtatccaacgtgaaaaggatgcaggtgcttattcggtgaaggcggcacttgagcgtgcaaaaatttatgagaactctgacccaggttggatcagcactttgaaatcccattacggcgccatcgcagttggtgaatatgcagccgtaaccggtgaaggtcgtatggcccgtttttcaaaagcaccgggaaatcgcaacatggctacgtttggcatgatggatgaactgcgccatggccagttacagctgtttttcccgcatgaatactgtaagaaggatcgccagtttgattgggcatggcgggcctatcacagtaacgaatgggcagccattgctgcaaagcatttctttgatgacatcattaccggacgtgatgcgatcagcgttgcgatcatgttgacgttttcattcgaaaccggcttcaccaacatgcagtttcttgggttggcggcagatgccgcagaagcaggtgactacacgtttgcaaacctgatctccagcattcaaaccgatgagtcgcgtcatgcacaacagggcggccccgcattacagttgctgatcgaaaacggaaaaagagaagaagcccaaaagaaagtcgacatggcaatttggcgtgcctggcgtctatttgcggtactaaccgggccggttatggattactacacgccgttggaggaccgcagccagtcattcaaggagtttatgtacgagtggatcatcggacagttcgaacgctcgttgatagatctgggcttggacaagccctggtactgggatctattcctcaaggatattgatgagcttcaccatagttatcacatgggtgtttggtactggcgtacaaccgcttggtggaaccctgctgccggggtcactcctgaggagcgtgactggctggaagaaaagtatccaggatggaataaacgttggggtcgttgctgggatgtgatcaccgaaaacgttctcaatgaccgtatggatcttgtctctccagaaaccttgcccagcgtgtgcaacatgagccagataccgctggtaggtgttcctggtgatgactggaatatcgaagttttcagtcttgagcacaatgggcgtctttatcattttggctctgaagtggatcgctgggtattccagcaagatccggttcagtatcaaaatcatatgaatatcgtcgaccgcttcctcgcaggtcagatacagccgatgactttggaaggtgccctcaaatatatgggcttccaatctattgaagagatgggcaaagacgcccacgactttgcatgggctgacaagtgcaagcctgctatgaagaaatcggcctga

SEQ ID NO: 366852 - DNA, 1371 bp, Pseudomonas aeruginosa
atgataaaaatgaaaattgccagcgtactcgtactgcctttgagcggttatgcttttagcgtgcacgctacacaggtgttcgatctggagggttatggggcaatctctcgtgccatgggaggtaccagctcatcgtattataccggcaatgctgcattgatcagcaaccccgctacattgagcttggctccggacggaagtcagtttgagctcgggctggatatagtaagtaccgatattgaggttcgtgacagcagcggtgcgaaagtaaaaagcagcacggaatccaataatcgaggcccctatatcggtccgcagttgagctatgttactcagctggatgactggcgtttcggtgctgggttgtttgtgagtagtgggctgggtacagagtatggaagtaacagtttcttgtcacagacagaaaatggcacccaaaccagctttgacaattccagccgtctgattgtgttgcgcgctcctgtaggctttagttatcaagtaacaccacaacttacagtcggcgcaagtgctgatctggtctggacctcactcaatctcgagcttctactcccatcatctcaggtgggagcactcgctgcgcagggtaatctttcaggtgatttagtcgccccactcgctgggtttgtgggtgctggtggtgctgcacatttcagtctaagtcgcaacaacccagttggcggtgccgtggatgcaatcgggtggggtgggcgtttgggtctgacctacaagctcacggataagacagtccttggtgcgatgtacaacttcaagacttctgtgggcgacctcgaagggacggcaacactttctgctatcagcggtgatggtgcggtgttgccattacatggcgatatccgcgtaaaagacttcgagatgcccgccagtctgacgttcggctttgctcatcaattcaacgagcgttggctggttgctgctgatgtcaagcgtgtctactggagcgatgtcatggaagacatcagtgtggatttcaaatcgcagtcaggtgggatcgatatcgaattaccacacaactatcaggatattacggtggcctccatcggcaccgcttacagagttaatgacaagctaactcttcgtgctggatatagctatgcgcaacaggcgctggacagtaggctgatattgccagtaattccagcttatttgaagaaacacgtttctctcggtagcgattatagttttgataaaaaatcaaaactcaatttggcgatttcttttggcctaaaagagagcttgaacacaccatcatacctaagcggcaccgaaacgttgaagcaaagccacagccaaataaacgcagtggtttcctacagcaaaagcttttaa

SEQ ID NO: 366853 - DNA, 177 bp, Pseudomonas aeruginosa
atgaagcagatgaccttcatcgacgccgagtacgcaagccagcgcaagcaaacccacaaggagttgctcctcatcgaaatgaatcaggtgatgccgtggaagggtttgatcgccgtgatcgagccgcattgcccgaaggctgaagggggtcgtcaggcctatccgtttctcgcgtaa

SEQ ID NO: 366854 - DNA, 840 bp, Pseudomonas aeruginosa
atggctaagattatcggtggtatcaccacttcccatatcccggcgatcggcatcgccatggaccggggtatcgaaaatacgccctactggaaagatttcttcgccgcctatccgccgatccgcgaatggctcaacgagcagcagccggatattgcgatcgtgttctacaacgaccacgggcttgagatgttcctcgacaagaaaccgaccttcgccatcggctgcgcagcgcggtacgaaaatgcggacgaaggctggggcatcgccaccatcccgcccgtcaccggcgaaaccgaactgtcctggcatatcgtcaacgagctgatcgagaacgatttcgacccgaccgtctgccaggacatcaaggtcgaccatggtctgaccgtgccgctgtcgctgatgtatcccggctacaactaccagcacatcaaggtcattccggtctgcatcaactgcgagcgtcatccgatgccgaagccctcgcgctgctacgcgctggggcaggcgatcgggcgggcggtcgagtccttcccgggcgaccagaaggtggtggtattcggtaccggcggcctgtcgcaccagctcgatggcgaacgcgctggcatcatcaacgccgacttcgatgaggagtgcatggacaagctggtgtccgatccggaagccttaaccaagtacagcaacgatgacttggtcgagatcgccggtgcccagggcgttgaactgaatatgtggatcgccatgcgcggctgcctactgggtagggttcgcgaagcgcaccgcaactacgtggcgccgatctctaataccggtgccggtacccagttgttgctgcccgagtaa

SEQ ID NO: 366855 - DNA, 366 bp, Pseudomonas aeruginosa
atggcatcgaccgggaacagacaaatccccggcaccgtcaatttcgatggcgccatggccaccaagggatacgcgctcaacaagatgtgctactcctttaacgacgcggccaatcgtgaggttttcaaggccgacgaggaggcctactgcgacaagttcggcctgacgccagagcagaaagcggccatcctcaggcgcgacgtgctcgcattgctgcgcgagggcggcagcatctactacttggcaaagttcgtaggcatgctggggatgaacatgcaggatatcggcggtatccagaccggcaggaccaccgacgaattcaaggcatacctcgacagccagggcagggggaagaagcatggctaa

SEQ ID NO: 366856 - DNA, 876 bp, Pseudomonas aeruginosa
atgatggatgcagattacctcccgtttcacccggcccccagcaagcccgaattcaaggcgccggcgggcgccgtcgatgcgcactgccacgtgttcgggccggcggacaagttcccgtaccaccccaagcgcaagtacaccccctgtgacgcgcccaaggaaaaactgttcgaactgcgcgactacctcggtttcgagcgcaatgtcatcgtacaggcctcctgccacgggactgacaacgccgcgctgatcgacgcgctggaaacggccggcaacctggcccgcggtgtcgcggttgtcgatccggccatcggcgtcgaagcgctggaggcgatggacaaggctggcgtgcgcggggtgcgcttcaacttcgtcaagcgcctggtcgacagcaccccgaaagaggtgttcctgtctatcgccgagaagatcaagccgctgggctggcacatcgtggtctatttcgaggcgccggacctggaagacctgatcccgtttctcaacgaattgaacaccaccatcgtggtcgaccatatggggcgtccggacgtggccaagggggtcgatcatccggatttccagcgcttcatccaattgatgcgcgacaacgataaggtctggaccaaggtgtcgtgccccgagcgcctcaccctgacgcagccggattacagcgacgtggtgccgttcgccagaacgctggtggagcagttcccggatcgggtcctttggggcacggactggccgcacccgaacatgaagtcccacgtaccagatgacggcaaactggtcgatgtaataccgcagatcgcgccgacggcagagcttcagcaaaagctgctggtcgacaaccccacgcggctctactggcccaaataa

SEQ ID NO: 366857 - DNA, 1065 bp, Pseudomonas aeruginosa
atgtctgacggcgtccgctgcatgtggatgcggggcggtacctccaagggggggtacttcctcgccgaggacctgccggccgatacggccgagcgcgatcgcatcctgctgcgcgtgatgggttcaccggacgagcgccagaccgacggcatgggcggcgccgacccgttgacgtcgaaggtcgcggtggtaaagcgctccgaacgcgatgacgctgatgtcgagtacctgttcctccaggtgttcgtcgatcaggcaatcgttaccgacgcccagaactgcggcaacatcctcgcaggcgtcggcccgtttgccatcgagcgcggtctggtggcggcgcaggatggcgaaaccgatgtgcgcatcttcatggtcaacacagggcaagttgccacggcacgcgtcagcacgccgaacggccaggtcagctacgtaggcgacgcccgtatcgacggcgtgccgggcatgagtgcggcggtgccgatcaccttcgccgataccgccggttccagttgcggtgcccttttaccgaccggcaaccctgtcgacgtcatcgacggggtcgaggtgacgctgatcgacaacggcatgccggtggtgattctgcgtgccagcgatatgggcatcaccggtaccgagactcgtgaagagctagaagcgaaccaggaactgcgcgcgaagctggagtctatccgcctccaggccggcccgctgatgaacctcggcgacgtcagggacaaatcggtgcccaagatgtcgatggtcagcgcggcgaccaacggcggcacgctgtcgacccggacctttatcccgcaccgctgtcacgcctccatcggcgtgctcggcgcggttagcgtcgccaccgcggcggtgctgcccggatcgccggcagccgaagtggcgcgcctgcccgagggcacgcgcaagtcgctgatggtagagcacccgatcggcgagatgaccgtgatactggatatcgacgaggccggcagactcggcccggcggcgcttttgcgaacggcgcgcaaactgttcgacggcgaagtcttcgcccataacaattga

SEQ ID NO: 366858 - DNA, 678 bp, Pseudomonas aeruginosa
atgagagagaacgtagtcgttcagaacatcgaacgtgcggaccagacggtcatcgacggcctggccgaatgcggcgtcgcgaccatccacgaagcccagggccgtgtcggcctgctggcgcactacatgcgtccgatccagcaggacaagtgcgtggccggttccgcgctgaccatctccggcgctgccggcgacaactggatgatgcacgtggccatcgagcagtgcaaaccgggcgatatgctggtgttcgcgccgacctcgccgtccgtgcacggtttcttcggtgacctgctggccacctctgcacaggcgcgcggtgtggtaggactggtgatcgacggtggcgtgcgcgatacccgcgacctgcgccggatggacttcccggtctggtccaaggcggttttcgccgaagggaccatcaaggaaaccctggggtcggtcaacgtgccggttgtctgcgccgacaccctggtcaaccccggtgacgtgatcgttgccgatgacgacggtgtcgtggtcgtgcgtcgcgagaaggcggcagaggtgctgcagctgtcccgcgagcgcatggatcgcgaagaggtcaagcgcgtgcgcctggccaacggcgaactgggcctggacatctacgacatgcgtccgcgcctgaaagagaaggggctgaagtatgtctga

SEQ ID NO: 366859 - DNA, 1014 bp, Pseudomonas aeruginosa
atgattatcgattgtcatggccattacaccaccacgccgccgcaggtaggggtgtatcgcgagaaacaggtggcggccgtcgccgaagacccgtcgttcatcggtgaaaagggccagatcgtcatcagcgatgatgagattcgcgagagcatcgtgaacaaccaactgcgcctgcagcaggaacgcggcaccgacctcaccattttctcgccacgtgccagctggatgggtcaccatatcggaaatgaatacaccagccagttctggagcgagcaccagaacgacctgatccgccgcgtctgcgatctgttcccgaacaacttcgtgccggtggcgcagctgccgcagtcgcctggcgtcgatccggccaagtcggtgccggagatcgttcgcaccgtcgagcagatgggcttcatcggcatcaacttgaatccggacccgagcggcggccactggaacggttcgtcgctggcagaccgttccttctacccgatctacgagaagatggtcgagtacgatatcccggcgatggttcacgttagcgcggcctgcaatggctgcttccacaccaccggctcgcattacctcggcgccgataccaccggtttccagcagttgatgatgtccgacgtgttcaaggacttcccgcagctgaaaatcatcattccccacggtggcggcgccgtgccctaccactggggccgtttccgcggcctggcgctggaccagggcttcgacctggaagagcgggtgctgaacaacatctacttcgacacctgcgtctaccatcagcgcggtatcgacctgctgctcgacatcatcccgaccgagaacatcctgttcgcctccgagatgataggcgcggtgcgcggtatcgacccggaaaccggccactacttcgatgacaccaagcgctacatcgatggcaacaaggcgctgagcacggagcagaagcaggcgatcttcgagcacaacgcccgtcgcgtcttcagccgcctgaaaatcccggcctga

SEQ ID NO: 366860 - DNA, 1224 bp, Pseudomonas aeruginosa
atgaacttcccgatacccaacctcaggcacctgcgggtgtttgtcgcagtctccgactgcaagagcatcagcaaggccgcaccgcgggtgttcctgtcgcagccggcgatcacccaggcgattgcaaaactggaggggttgctcgaaaccgagctgttcgagcgccattccgacggcatgtttccgacgccaccgggccaggtgtggcacaaccgtgtgcgacgctgcctcgactacgtcgaatggggaatccgcgaagcgttgaaaagtcgcacgggggcgcggcccgtgccggctgcgcagatactgacgctgctcaccactacgcaactgaaggccctggtggccgtgagcgaagcgcaaaacttcaccatcgccagccgcaaccttggcgtatcccagccctcgttgcaccgggccgcccgagagctggagcagttgttggccattccgctgttcgagaaaaccagcaccggtatcaataccaccaaggcttgccaggcgctggcgcgggccgtcaagctggccttcgccgaggtccgccagggctactatgaaatcagcgcgctgcgctcgcgcgaggtgggcaagatcgtgctcggcagcatgccgctggcacgtacatccatacttccggaggtgctgaatcgattcagcgagaaacaccccgatatcggcatcaacgtcgtcgacgccccctacaccgacctgctgcaccacctgcgccacggcgacctagatctcctggtgggtgcgctgcgctttcccccgccggcggacgacatcctgcaggaagaactgctcgcaccgccgctggcgatcgtggcgcgcaaaaatcatccgctgatgtcgtcgtcgcaactggatatcgccaccctggccgaatacccctgggtcgtaccatcgagcgggacaccgacccgcgcctttttcgattcgcttttcgtcgacaagggactaccgacgccgcaccgtctggtggaaaccagttcgcaaatacttatccgcgagctgctgggtggcagcgaccggctgacgctgatttccacgcaccagatcgagcacgaactgcgcctgggcctgctcggcgttctgccctttgcgctcagccacacccgccggcccatcgggattacgctgcgccaaaactggcagccgaccccgtcccagagcgagtttctggagatgctccgcgatgcagccggtcgctatgccgacctatag

SEQ ID NO: 366861 - DNA, 891 bp, Pseudomonas aeruginosa
atgtctaccgatgcagccctgcgcctcgcctttatcggtttcggagaagccgccggcgcgattgcccgcggcctgatcgagaccggggtttgcgttgagatgcgcggatacgacatcaagtccgacagcggcgacgacgcccagatccggcgcaattacgaggcggccggcgtcatcggttgcgccaccctcggagcggctattgcagacgctgaactgatattctcgctggtgaccgccgatcaggcggcaaccgcggcccgggcggcggcgccactgctgcgaccggggcagcattttcttgactgcaactcctgctcgccaggatgcaagcgcgaatcatctgccaccatcgccgcgaccggcgcccgctatacagatgtcgctgtcatggcaccgatctatccggcccgtcaccggacaccgctgctgatcgccggcgaccatgtcgcggcgctgcagccggcactcgaacgtctcgacatgaacgtaaccccgatgcccggagccgtcggcgccgcctcgacggtaaaaatgttgcgcagcgtcatgatcaagggcatggaagcgctcagcgccgaatgctttctcgcagcacgcagcgccggaatcgaagagcaaatactgcattcgctcgacaagagtttccctggccttggctggcgcgagggggccggctacaaccttgagcgcatgcgccgccatggtatccgccgtgccgcggagatgcgggaggtggccaccaccctcgaggagcttggcatcggcaacgacatggcccgtgccaccaccgcgtggcagcagcgcatcggcgacctgcagatccaagacgattcgaccgacctcgctcagcaggcggacgttttactgcaacgcctgagccggcgctga

SEQ ID NO: 366862 - DNA, 954 bp, Pseudomonas aeruginosa
atgagaatttgtatcgccggcgcttcgggcgcctttggcatgaaacacatggatgccgtcgcggccatcgacggcgccgaagtgacctccgttgtcggcaccgatgaaaacgcgatccgcgcctttgctcaggagcgcggcgttgcgcactactgcactgatctggccgacgccctggcgcgcgacgacgtcgatgcggtcatcctggcgacgccgacccagctgcacgccgcccaggccatccagtgccttgaagcaggcaagcacgtgatggtcgagattccgatggcggacaacatcgaggacgcacgccggctggtcgagacccagaaacgtaccggcctggtggcgatggcgggccacacccgccgcttcaacccgagccaccagtggatccacaacaagatccaggccggcgaactcaaggtgcagcagatggacgtgcagacgtactttttccgccgcaccaacaagaatgccctgggccaggcgcggtcctggaccgaccatctgctgtggcaccatgcctgccacaccgtcgacctgttccagtaccagaccggcgaaaccgccaccaaggtgcaggcgctggaaggcccgactcacccggagctgggtatcgccatggacatgagcatcggcatgaaggtaccgagcggcgccatctgcacgctttcgctgtcgttcaacaacgacgggccgctgggcaccttcttccgctacatctgcgacaacggcacctatatcgcgcgctacgacgacctggtcgacggtcacgagaacaagatcgacctcagcggcgtcgccgtctcgaacaacggcatcgaactgcaggatcgcgaattcatcgcggccatccaggaaggccgcgagcccaacgccagcgtggcccagtgcctgccggcgatggaaacgctggagcgtctggagcagtgtctgcaggaagacgcctga

SEQ ID NO: 366863 - DNA, 993 bp, Pseudomonas aeruginosa
atgcggatcgacaacccgctcttcagcaaccccggtatcggcctcggctgcatgaacctgtcccacgcctacggcgccccgctgtcggaaaccgaggcgatcaaggcgctcgacgccgccttcgaaatgggctaccgccactacgacaccgccaccctctatggcggcggcgccaacgagaagctgctcggcaaagcgcttaagaccaggcgcgcgcagctgttcctggccagcaagtgcggcatggcgatcgatcgcgaaagcggcaagaaagagatcgacggccgccccgaaaccctcaaacgccagtgcgaggaaagcctgcgccggctgcagaccgactgcctcgacctctactacctgcatcggctcgaccggcaggtcggcatcgaggaaagcgtaggcgctctggcccgcctgattgatgaaggcaagatccgcgcgatcggcctgtccgagatatcggcggcaacgctggcgaaggcgcagacggtgcatccgatcgcggcggtgcagtccgagtactcgctctggacccgcaacccagagatcgcgctgctcgacgcctgtcacgactccggcacggcgctggtcgccttcagcccgctggcacgcggcttcctcaccggcagcctgcgcgacatcggagccctcgaaccgaaggacatccgcaacaacatgccgcgcttcagccccgagcattacgcgaaaaacctgacgctgctgaccgcatatgagcgcatcgccgaggccgccggctgctccccggcccagctggcactggcctgggcccgcagcaagggcgacttcatcgtgccgatcccgggtacccgtctcatcgaccatatgcgggaaaacctgcaggccgagcacgtcgtgctcgagcgcgatgtcatcgctcacctggatgccctcatcaaccagtcgaccgtcgccggcccgcgctacagcgccgcgcagcaggccgagatcgacaccgaagagttcgtctga

SEQ ID NO: 366864 - DNA, 351 bp, Pseudomonas aeruginosa
atggcagttaaagcaatcaaagcgggggcaatagacttcttcactaaaccctttcgagaagaggacctgctcggcgccattcgtaccgctctaaaactggcccctcaacagaaagaaaacgctccccaaatcagcgagcttaaagcgagttacgaaagcctcagcaaacgcgaacagcaggtgcttaaattcgttttgcaagggttcctcaacaaacagacggctcttgagcttgatatatcggaagcaacagtaaaagtacaccgtcacaatatcatgaagaaaatgaaagtctcttcagtccaggatttagtccgagtaactgaaaggcttaaggatagtctgaaatag

SEQ ID NO: 366865 - DNA, 507 bp, Pseudomonas aeruginosa
atgtcgcaacctgtccacgcaatcgccgccaccctgctcgtacgtgacgatgaaggatgctatctgccagcatctgccgatcagatcctggaagccgcgcgccaggccatcgattgcaagctgcagcgtggtgccagcttcacttcgccggatgtggtcaaggactaccttcgcgccaagctggccggctacgagcgcgaggtgttcgccgtattgttcctggacgccaagcatcgactgatccagtacatcgagctcttccagggcaccatcgacagcacagcggtctatccacgtgaggtcgtcaaggaagcactgcgcctgaatgcagccgcagcgatcatcgctcacaaccatcccagcggtaatccggagcctagtgaagcggacaagtcgatcacccggcgcatcaaggaagcattggcgctggtggacgtgcgcgccttggatcacatcatcatcgcggggacgcagtcagtctctttcgcggagcgagggctcatctga

SEQ ID NO: 366866 - DNA, 297 bp, Pseudomonas aeruginosa
atgagcgagggcatcatgacttgcctcccgccgcatgatggccatccaggcatggagctcatctgggccgcggactgccgacaggccttcaaccagggcgtgggattggcccagacctggctcgacaacgcccgcagcggctggctctgggcgatcatgattgccgagcgtgacctcttgccctgtgcaatggaaagacgtgccttcgaggtcggtttcctgagccgcattcagcagcggctgtgttcactgcagtgcaatgagcagcgggtcagggatctgcctttgacgctgtag

SEQ ID NO: 366867 - DNA, 270 bp, Pseudomonas aeruginosa
atggctgagttcgaaaccggcgttgttcccttcccacggcggccaagtccgctgcacgaatccgagcgctctcccctccccaccgaggctgcggtcgaattgcgcgcaaccatgctcggcaatctgctggatcaaatgaccgggccggatggactccagccggagaacctgcgcctacggcttgtggcctactcggcccaggatctgctcgacgagatggtcgtgctgttccgtcgtgcgctttctgaagcacgaggaggtgcccgatga

SEQ ID NO: 366868 - DNA, 1200 bp, Pseudomonas aeruginosa
gtgcctcccgatttttccctgcgtaaccagtcccaggtgtttctcggcgtcttgctgctgtccgtgctgcttccagccctgatcggcctcgccatcttgtccgaccgcctgggcaagctcggcgctcccgtggaacggacctggctcattgggctgccgctagcggccggcgtgcaggcctggctgttcggcgcctggctggtccgacgtcggttggccgagcccctgggacgactgaccgactatatcgagcagctcagcctgggcgtgtccagcacggagctccgcctggatcgccgtgacgagttggggcgtctggcaaccgccgccaatgccctcaacgatcgcctgtcggacacattcgtacgcctggggcaaggcacgagacagttggacaaggccagcgacgaactgagcgccatctcggcctactttggccaaggcatccaggaccagaacctgcgcaccgaccaggtggcaaccgccatggaggaaatgtccgccgcggcccagcaggtagccggcgccaccgttcaggctgcacgtgcggcggacggtgccgagcaggccacccagcagggtgagcaggccatggtgggcatggtcaattgcatccacgatctgcgcgacgagatcaccgacacggccagagtcatccatcagttggaggccgacagcgggcggatcggtgaggtgctggcggttatccacagcatcgccgagcagaccaacttgctggcgctgaacgccgccatcgaagccgccagggctggacaaagtggccggggcttcgccgtggtggctgacgaggtgcgcaacctcgcccagcgcaccgccgagtccacggctgaaattaataccatcatcgccgccgtgcagaagggggccgccgacgcggtgcaggccattgaaagcggcaggcgcagcagcgagaaaggcgtggtgcagatccaactagccggccgcatcctcaatggagtgaccgacgcggtccagaccatccgcgacatggcgcaacagatcgccaccgccgccgaggagcagaccctggtggccgaagatatctcgcgtaacctcagccaactggtggcgatagccgccggcaacgaggaaagcgtccgcgagaccgaagcggccggtcgcaagctgcgcgaactatcggcctcactttccgggctaactgcgctgcaggcgcgttga

SEQ ID NO: 366869 - DNA, 369 bp, Pseudomonas aeruginosa
atgctcaataaacgactcctcgccgccggcctgacgctggcctcctccctcgccttcgcccaaggcgatgccgccaagggtcgggccctgttcaccgcccagtgcggcttctgccacagcaccgaagccggcaagaacctcatgggcccgagcctcaacggcgtctatggccgcgccagcgcccaggcgccgggcttcgcgtactccgcgccgctgaagggcgccgcgctccagtggaacgacaccaacctcgacaagtggctgagcaacccggccgccatgctgccaggcaatctgatgatgtacccgggccagcccggcgcccgggaacgccaagacctgatcgcctacctcaagagcctgaagtaa

SEQ ID NO: 366870 - DNA, 684 bp, Pseudomonas aeruginosa
atgaacatcgaacgtcgtaccctgctcaagggcatggccctgggcggcctggctggcgccgccatgggcgccttcggcctggcgatgaccaaggccatgctgggcgggcaggcccagccactgcccaccctcgtcctggtagatggcgaggcggccggagcggccttcctcgccggagtcggttccagcccggcggccagcaaggccgaggtgcagcgcaccgatctcggcctggacttcgtcttgggcctggagaagcgcctgcgcagtggtcagcagcaacgcatcatcggtctggtggatgacgccagcgccgctctgatcctcgacctggcccgcagcagcggcgcgcgggtgcagtggctcggccagcatagcgccgcggccggctcctcccggcaccgtctgctcagcgccgacagcgcccagggctgctcccttcgcctgggccagcagctccatgcctgcggcggcggcttcagcctgagcgaacagcaccccctgggtggccagcccctgaatctggccggtgccgcgcgcagcggcggctccgcgcaatgggcggccagcatcggccacgacctggccagcctgggcggcgctgacagcagtgcggccccacgcattgccaaccattacccggcgcttaccggccaattcgtttcgttctcgatcctggtttga

SEQ ID NO: 366871 - DNA, 336 bp, Pseudomonas aeruginosa
atgtcctcactcctcaacagccgagctgtgaaacggccactgctggccagccttgcactaaccttcgccctgctcgccggccaggccttcgccgacggcgacggcgtctggaaaggcggcgagaacgtctaccagaaaatctgtggccactgccacgaaaaacaggtgggcccggtgatcaccggccgccagctaccgccgcagtacatcagtgccgtggtgcgcaacggcttccgcgccatgccggcctttccggcctcgttcatcgacgacaaggccctgcagcaggtcgccgagtacatctccaagacccctgctactgtggccaagccctga

SEQ ID NO: 366872 - DNA, 1476 bp, Pseudomonas aeruginosa
atggacaccacccgccctgcctaccagaacctcgagctccaacctctcgccgggcaatggcgcgccggcagtagcggtcgcccgttggaggtcttcgacccctacaacgacgagctgctattgcgcatcgccctggccagccgcgaagacctcgacgcagcctaccgcaaggcccgcgacagccagcgggagtgggcgaccacggcgccggccgagcgcgcccgggtgctgctggaagcggtgaagatcttcgatgagcgccgcgaggagattatcgactggatcatccgcgagtccggcagcacccgcatcaaggcgcagatcgaatggggcgccgcccgcgccatcaccctggagtcggccagcctgccgaatcgcgtgcacgggcgcatcatcgcctccaacatctccggcaaggagagccgcgtgtaccgcgcgcccctgggcgtgatcggcgtgatcagtccgtggaacttccccctgcacctcactgcccgctccctggccccggccctggccctgggcaatgccgtggtggtcaagccggccagcgacaccccgatcaccggtggcctactgctggcgcgcatcttcgaggaagccggcctgccggcgggcgtgctcagcgtggtggtgggttcgggcgcggagattggtgacgccttcgtcgagcacccggtgcccgccctcatttccttcaccggctccactcaggtgggccgcaacatcggccgcatcgccagcggcggtgagcacctcaagcacgtggcgctggaactgggcggcaacagcccgtttgtggtcttggccgatgccgacgtggagcaggcggtgaatgcggccgtggtcggcaagttcctgcaccagggccagatctgcatggcgatcaaccgcattatcgtcgagcagcctttgctggaagatttcacccgccgcttcgtcgagcgcgtcaaggccctgccctatggcgacccgagcaagccggggaccgtggtcggtccggtgatcaacgccaggcagctggccggtctgaaggagaagatcgccaccgccaaggccgaaggcgccaccctgctgctgggtggcgagccccagggcaacgtcatgccgccccatgtgttcggcaacgtcaccgccgacatggaaatcgcccgcgaagaaatcttcggcccgctggtgggcatccaatccgcccgtgacgccgaacacgccctggagttggccaacagcagcgagtacggcctgtccagcgcggtgttcaccgccagcctcgagcgcggcgtgcagttcgcccggcgcatccacgccggcatgacccacgtgaacgacatcccggttaacgacgagcccaacgctcccttcggcggcgagaagaactctggcctcggccgcttcaacggcgactgggccatcgaggagttcaccaccgatcactggatcaccctgcaacacagcccgcggccctatccgttctga

SEQ ID NO: 366873 - DNA, 1836 bp, Pseudomonas aeruginosa
atgaccatgactcgcaaaccctcgagcaatcccggccgcagcatgggggatgaattcctcaagcagttgctcggccggcagaagagcctgatcgtcgaccaggccaaccagttcggcagcagcgggctgccctcggccgagcaactggcggagaccgtcgccttcgcgccccaggatggcaatatctggctctgcggccagcgcatgatgctgctgcagggggccgccttcggcgccatccgtcgcgagttggtggaggccctcggcctcgacaaggcccgtggccttctgacccgcattggctggcaggccggagcgagggatgccgctcaggtcagcgcgcagtggcccgagggcgaccacgccagcctctacagcgcaggcccgcgcctgcacatgctggagggcatggtgaacgtggaggtggtgcgcttcgacatcgactccagcatcgggcatttctattccgagttcttctggcacaactccctggaagccgacgagcacatcgccagctacgggctgggcagcgaaccggcctgctggatggaagtgggctacgccagcggctacgcctcctccctgctggggcgcctggtggtgttccgcgagcaggaatgccgctgcatgggccattcggcgtgccgcatcgtcggcaagccggcggagcagtgggaggacatcgacaccgacctggcccacctggatgccagcgacttcctcagccggagcacctacggctcggcagacgagacggaaatggccgatctggatgagccgcccgaggaccaggccatggtgggcatttccgccgcctttgtcgccgccagccagcagctctaccgcgttgcgtcgacccaggccaccgtactgctgaccggtgaatcgggggtgggcaaggagctcttcgcgcgcaccctgcaccaggccagcccgcgccgccaaacgccgttggtggcgctcaactgcgcggcgttgccggaaactctgctggaagccgaactgttcggcgtggagcgcggtgccttcaccggcgccgaccgttcccgcccggggcgcttcgagcgggccaagggcggcaccctgttcctcgacgagatcgccaccctgagcctcagcgcccagagcaagatcctgcgggtgctgcaggagggcgagatcgagcgggtaggtggtacctcggcgatcccggtggatgtgagggtgatcgccgccaccaatctggacctgcgccgagaggtcgaggccgggcgcttccgcgaggacctgctgtaccggctgaacgtgttccccatccatctgccgcccctgcgcgagcgccgtgaggacatcccgctcctgatgagctacttcctgcgcaagttcagtgcgcgccatgggctcaaacccctgggtttcagcacgcggctggtcaacgcgctgctgacctaccgcttccccggcaatatccgtgagctgcagaacctgatcgagcgcggcgtgatcgccgcaggcagtggcgagctgatcgacctggtgcacctggcagaggccggcgagccacttcgctccagcggcatcggcctgaccgccgaaggccgtctggatgccgtcggcggcgagccgcaggcgcgggctgaggtggttgtcgaggagcatgaaccggttgagctggggctggccaacctgcaggccttcctcgccgggcgcgaccgggtactaggcacatcactgaaggagatcgagcagcgcctggtgcaccttgccctggaacgcaccggcggcaacctcaccgcggcggcgcagatgttgggcatgagtcgcgcgcagatcagctaccggctcaagggggagtga

SEQ ID NO: 366874 - DNA, 246 bp, Pseudomonas aeruginosa
atggacgccaacgacggcaaccggggtggcagcttctccctcagcccagccgtgcagtacagcggtgaaggctggttcctcagcgccaagcggcaggacgaaagcggcgtgcacaaccgcaccgagggccagacctactggctgaaattcactacatgccgctctgagggctcctcgggcgccctcccccccccgggggcgcctcaccgccggctcaagggggatcactcccccttgagccggtag

SEQ ID NO: 366875 - DNA, 891 bp, Pseudomonas aeruginosa
atgaaaaccatccttcctggcattcccgtattcaagctctatggcgagagcctggactggccaaccccggacctgctgcactgcgagtcgatacccaagcgcagcagcctgcaccactgggaaataaagcctcatcggcatgccgacctgttccagttcctctacgtccagcgtggccaggcggtggtggaagtcgaaggccggcgcaacgaggtgctggaagccgcgatccaggtcacaccgccgctctgcgtgcacggcttccagttctcgcaggacatcgagggctatgtgctgaccatcgccgcgcctctggtggcccaactggaggagcaactgggcgccccgctgacggttcttgcctctgccggcagctatccggtcgggcgcaaccgccgctacatcaacaccctcttctccgcactgctccaggaatacgaaggcaacgcgcctgctcgcgatctgctcctgcaatcactggtcaaagtactgattgtctgggtcatccgctgcaaccagcagagcccgctgccggacagccacgatgaacgcaatcgacagttgctcggccgctttatgacattggtggagcagcactatcgcgagcacctgacggtggaaactttggcccaccgtctgggcatgtctagcgcgtccctcaacagcctgtgtcgccagttggccggacagacggctctgcaaatcatccatcagcgcctgctgctggaagccaaacgcagcttgatctatacgagcatgacggtcagtcagttgtccgacagcctggggttcagcgatccgacctatttttcgcgcttcttccgcaggctcagtggccagtcccccaacgcgttccggcacaccctcggccaggatgcccacctcggatag

SEQ ID NO: 366876 - DNA, 1188 bp, Pseudomonas aeruginosa
atgaatactcaagttgctatcatcggcgccggtccttcggggcttctgctcggccaactgctgcacaaggccggtatcgaaaccatcatcctcgagcggcagactcccgactatgtgctcggccgtatccgggccggcgtgctggagcagggcaccgtcgatatgttgcgcgaagccggtgttgcgcaacgtatggatgccgaggggctggtccatgagggggtcgagctggtgttcgacggcaagcgcgtgccgattcatctgaaggcattgaccggcggcaagaccgtgatggtttatggccagactgaagtcacccgtgacctgatggatgcccgcgtcgctgtcggcgcgcccatcgtgtactccgccgagaacgtgcagctgcacgaactcaagggcggcaagccttacgtcaccttcgagaaggatggccaatcccatcgcatcgattgcgactacatcgccggttgcgatggcttccatggcatcgcgcgcaagagcattccggccggtgtcctgaccgagtacgagcgtgtctacccgttcggctggctgggcctgttgtcagacaccccgccggtccacgaggaactgatctacgcccaccacgagcgcggtttcgtgctgtgcagccagcgttcgctgacccgcagtcgctattacttgcaggttccgctgaccgacaaagtcgaagactggtccgatgagcgtttctggaacgagctcaaggcgcgtcttccgcaggacgtggcggacaggctggtcaccggcccgtccctggaaaagagtatcgccccgctgcgaagcttcgtggtcgaaccgatgcagtacggcaacctgttcctagtgggggacgccgcccatatcgtgccgccgacgggggccaagggcctaaacctggccgcctccgacgtatgctacctgtatcgaatcctgatcaaggtctacaaggaaggtcgcaccgacctgctggagaagtattcggagctggctctacgccgcgtgtggaaaggtgaacgcttcagctggttcatgaccaatctgctgcacgacttcgacggtcaccaggacgcctgggatcagaagatgcagaaagccgaccgcgagtactacctgaagtcccacgctggtctggccaacatcgccgagaactatgtcggcctaccttacgaagacatcgagtga

SEQ ID NO: 366877 - DNA, 234 bp, Pseudomonas aeruginosa
atgggaattttcgattggaaacactggctagtgctgctcctggtcgtgctggtgctgtttggtggcaagaggctgaaggggctgggcgctgacctgggtgagtcgatcaagggttttcgtcggtcgatggcgcccgatccagagctggcggctaacgccgagccgccagcgcaggtcgctgtcgagagcaacgctgagcagatggccaggggcgccggcagtccacagaagtga

SEQ ID NO: 366878 - DNA, 186 bp, Pseudomonas aeruginosa
atgaaaaaagaacaactgacttggctacaacttgtgctgacgttcccgagtattgctattgggagtgctcttcatggtaccgggcatgtcggcttttgggggatgctcgtcatcatgatgctgccgaattttgcttttatgctcatgagactcatgcatcgcagaagtaccaagcagtcctgttaa

SEQ ID NO: 366879 - DNA, 930 bp, Pseudomonas aeruginosa
atgagcagccttcgaaatgatatcccgacacagcaggcgtcggacgtaaatcggggccttttgcgggcccgccaccgcaactaccgtgcagccaaggttacccaaggtctgttggtactggtatcgatcatcttgccggtaatcggtgttttggttgggcctcaaatccccgaagtacggccctacctggccttggccggcttgatcttgctggtgatggagacggcgttgttcgacaggatccaaaaggatcggctcaaacgcggcgccaagctgcaggagcagttcgatacagacgtcttcggtttgccttggaaccgcttcgtgacgggcgcgcaagtggaacatgaagacgtgcgtcggctgtcggccaagccgctgtccaagaagcgcgaggcgcacttccaggcttggtacgaggtgtgtgtcggccgtttgcccctgcacgtagcccgcctgattggccagcgcacaaacattagctacgacgctcggctcagacgccggtacggaggctggctgctgacggtcaccctcctgttcggtgtggcgctgctgtacgcgggcttgtacaaggggctgcagtttcccgatctcatcatgaccttgatggtgccgttcctgcctgtgctgacgtgggcactgcgggagcgcatgcagcaggccaacgccgcgatttcgctgaccaacctccacggcgagtgggaaaaaatctggactaaggccctgggtggtgccgattcggcgacccttacggccgaatcgcgggccttgcaggacgccatctaccagcatcgcgagcgcagcccgctggtcttcgactgggtctactccatctttcggtcagcgaacgaggacgaagcccaccacgcggcagaggatctcgtgcgcaaggccgagaaggctctcgcagggggggctaagacatga

SEQ ID NO: 366880 - DNA, 1473 bp, Pseudomonas aeruginosa
atgaagctggtcgatcagttcaagacctttctcagcagcgaggtcaacctcaacgacacgcggatgagccagctaggctccagcgtcgaagcggttcaaaaagcgatcaagacctccagttgggggccgaagattctcgatttcgacgctcacggttcatgggcccacggcacaatcatcaagccgcgtacaggcggcgagttcgatgccgacctgttggtgatcgtagagcccgtagagggttgggaagccaaggactacatcaacaagctgggcgccgtctttgacggccatagcacctataaggacaaggtgcaccggtattcgcactgcgtgaccatcgagtacgcgggcgaacgccgcatcgacatcgcgccgtgcgtcaaaggccgccagtggccgaacacatacgaggtctgcaaccggaccaccaacgagttcgagacgaccgccgcgctggaatacacggactgggtggtcggcaggaacggcgtagcgggcggtaacgacctcaagaaggttacgcggctgctgaagtaccttcgcgacatcaagactaacttcacctgcccgtcgttcctgttcacgacgctggtgggcatgcacatctacgactcggacaagggcactgcggccttcgcggacacaccaacctgcctgaagaccttaatgggccgtctggatgactacctgcaggcgcgccccactgttcctgtcatccgaaacccagtgctgtggtccgacattcagagccgcgtctgggatcaaacgaaatacggcaacttccgcgagaagatcaatctttaccgcacgtggatcgacgaagccttcggcgaggcggaccgcgacgagtctatcggcaagtggcagcgcgttttcggcgacagcttcgctgccagcgaggccaaggaatctgcgcggctcagcgagagcgtgtcgaggagcgatgcgctggttttggcaagcgagagcatgtcggggagcgaggcgctggtgtcggcaagccggtgcaaggatttggttcagcgtgtcatcgagcttggtcgcgcagcactgccagagcgcatcacccggctaccctatgtccagcgccccaagtggcgcaacgcgtcgcagtcgtaccacgtcaaggtgtccgccgagctcttggccgaacaaaggggcaggcgtctgggctcagtggcgacgctacaaccgctgccgaagggcaaatcgatccgcttcacggcatccaactccatcggagtgccgttcccctcatcattcaaagtgcaatggcgcgtgacgaacaccgacctggcggcatacgacgccaactcactacgcggtgatttctatcccagtgactcgggcttttcacgtgaagaggatttagcctatcgcggggtgcacttcgtggaggcattcctgatcggcaagagcgataaccgtctgtacgggaagtcggagccgttctatgtcgtgatcgagtga

SEQ ID NO: 366881 - DNA, 222 bp, Pseudomonas aeruginosa
atggataagttggcgaaagcgttaggggaacgcatccgagtgcaaaggaaggcctgccgtatttcccaggatgcactagcgctggcgtgcaatatagaccgtagctacataggccggatcgaacgtggcgaggtcaacatcaccgtcgagaagctattccgcatcgcaggcgaactcgcctgcgagccttcaagccttctgccacaatcatctgacatttaa

SEQ ID NO: 366882 - DNA, 591 bp, Pseudomonas aeruginosa
atgaaatcggcctcgtttatcttcgacaggcgtctgtatgagctgcttcaggagccagggcgtacatcgtttacgacccgcgagctgcgcgatgcctatgccgctcgcttgagtggcacacaattccgtatcgccgatgtgcgacgctatgtgtatgagcagattcgccgattagtgcgtgcgggctgggtttctccggacgaggaccgccgtgttcgagggcaggtctaccacctgcagccgattccggcacacctgcaactggaactgatcgacaacggttttgagaacagcctgatggcttccggagtgcccgaacctgacaaggctgttcgcgaccttgaggctttgtcgcttaagtcgtcagccaatacggatttgcagttggaagcgctccacaaggaaatccgtttggactttctcacttcaatgggcgaggcagagcgattcaaactgcttctggacgagatgccgcatttgcggagcaaggttgaaggcgattatctggaggccagggatcgcagttctcgcctactggggcatctgcgcgccatagaaaagaccctcaaaacgctcgctgcgccacgatga

SEQ ID NO: 366883 - DNA, 303 bp, Pseudomonas aeruginosa
atggagatcaagtcgccggcaatggtcgatgtagttgaggatgtaatctgcgacgtgtgccgttctggtacacggattccggactatggtcttcaatacggcaagcttgaagcccaatggggatacgggtcgcagcatgacggggaacactaccgggtgcatctctgtgagccttgttttttcagggtcttgagcgggttgcgtcgcgagcgtatggttaatggtatgttcgaggatgagcaaccattttcctcagaggattttggcttggtcagcaagggtaactactgggaaaagagctga

SEQ ID NO: 366884 - DNA, 948 bp, Pseudomonas aeruginosa
atgccaacaaagatctcacataccacgcccttcaaactacaaggtggcaggtttcttccttcgtcggaatttatgtatctgatgcctatccgccctttaattgaggagcgtaatggtggggttttggatgtcactcgatacttctctataggacgtgcgtcaccctctgacctccatctacatcttggaggtcagtcaaataatatttttgctcgctatggtcagactgaagaagatcgagcactaagcctgaatacgcactccttgcgccacctgcaaaatggtgagctatttcgactaggagttgcagacaccattattactaaacgcttcaaccgccgtagtgtcgctcagagctatgtttatgatcatcgtagtctggcagaagaacttgataatattgatctacccgctggtgcggaagctattgctcctcgcgctcaggaaacactgcgcatgataatggccaataagatacgagggccgatagttgatgagtttttagagattcaaaaagaaatgggtgatgatgcagctttccagtttttgtccgcagaggcggatgggctccatgcgacaccttatggcttttgcgttaatagcttcacagtggatccctgcccaaagcaccttcagtgctacaacggctgccggcatttgactcgctcaggagttgatgaggaaaaccagagcctagagaagttaagagggcgattgaagaaaatagtagacttgataaaagagacgcctacagaggctagaggtcttgggtggcaaaatcaattaaatcacgctgaaactagtctatcaaatttagagaaagttatatcaaccgctccgggcagcaatccatttcctgatggccaaaatctctatcgttccgtagatatggcaagaggaacgacattgatagactccgcactaataagagaaaagaatgaaacttga

SEQ ID NO: 366885 - DNA, 480 bp, Pseudomonas aeruginosa
atgcagggatggagggtcgcgaaggagaagcgcatcaatgaccttactggcgcgggcgctgctattgccggtgggcgctggaatgacgttgatgtaccagcggtctacctgggcctctcgcctggcatttgcagccttgagacctttgtccataccaccagcaggatccagccaccgctcaagattgccctgatcgagctgccagatgagcccggtctgtattgggagcccgaacttgaagacttgcccaaaggctggaatgcggtgccgtccgatcggccaagcatggattttggtactcgctggctgaggtcaacgagtcacctcggcctgatcgttccttcggttgtgatgcctctggaaaggaatctcgtgttgaacccagcccatccagcaatggccatggtccgaatcaaggaagtctacaacttcgcctatgacgagcgaatgtttaaggacttccctaagatgctgcagtag

SEQ ID NO: 366886 - DNA, 423 bp, Pseudomonas aeruginosa
atggcaaagcctgccgccttctggaccctggctcatgctcgcgcgaagctcaccgagacccagcggctggccgaaatcaaggctgggctgggcaccgaatgggtccttagcatgaaggaggtatttcatgtttcgacccatctactactgatttttgcgaatgcttctgcctcgacgctggagcgtcggaagaagggtaacctgccgctggatcaggtggcctcggagcgtttggatcgtctcgcctctgtagcgctactggccgaagaggtcttcgaagataagcaggcggccgcagattggatgtccgagcccaaccagtccttgggagggcggcaacccctgagcttgtgcgatacggagatcggcgccaatcaagtgcgccgggtccttcatgctattgagtggggcggagccgcgtaa

SEQ ID NO: 366887 - DNA, 342 bp, Pseudomonas aeruginosa
atggtgtcgatggtgaatacgctgattgcccaagggtatgaaaaaccgattacggtgttttacggttcacggctagaagctgaactggaagcggccgaaaccctgtttgggtggaaagaaaatttaaaactgattaatgtgtcgtcgagcgtggtgggtaactcggagaaaaagtatccgaccggttatgtccatgagataattcctgaatacatggaggggctgctaggtgccgagttctatctgtgcggcccgccgcagatgattaactccgtccagaagttgcttatgattgaaaataaagtaccgttcgaagcgattcattttgataggttcttttaa

SEQ ID NO: 366888 - DNA, 138 bp, Pseudomonas aeruginosa
atgacactctacttagtgctgctctacgtgctgaattggtatttccatatgagtgtaactcaggagggtgcggcgcatgtaagatcgagctgcttgagggagaggtctctaacctatggcctgatgcaccaggattag

SEQ ID NO: 366889 - DNA, 984 bp, Pseudomonas aeruginosa
atgagctttgaatccaagaaaccgatgcgtacatggagccacctggccgaaatgagaaagaagccaagtgagtacgatattgtctcacgcaagcttcactacagtaccaacaatcccgattcaccctgggagctgagccccgatagcccaatgaatctgtggtacaagcagtaccgtaacgcatcgccattgaaacacgataactgggatgcttttactgatcctgaccaacttgtataccgcacctacaacctgatgcaggatggtcaggaatcttatgtgcagagtctgttcgatcaattcaatgagcgcgaacatgaccaaatggtgcgggagggctgggagcacacaatggcccgctgttattccccgttgcgctatctgttccactgcctgcagatgtcgtcggcctatgttcagcagatggcgccggcgagcacaatctcaaattgctgcatccttcaaactgctgacagcctgcgatggttgacgcacaccgcctaccgaacgcacgaactcagtcttacttatccggatgctggtttaggtgagcacgagcgagaactgtgggagaaagagccgggttggcaggggctgcgtgaattgatggagaagcaactaactgcttttgattggggagaggcttttgtcagtctaaatttggtggtcaagccaatgattgtcgagagtattttcaaaccactgcagcagcaagcatgggaaaataacgataccttgcttcctctgttgattgacagtcagctgaaagatgccgagcgtcatagtcgttggtcgaaagcacttgtaaaacatgcgctggaaaaccccgataatcacgctgtaattgaaggttggattgaaaagtggcgccccttggctgacagggcagctgaagcttacctgagtatgctatctagcgacattttgcccgctcaatatcttgagcgtagtacctcattgagggcatccatacttacggtctga

SEQ ID NO: 366890 - DNA, 354 bp, Pseudomonas aeruginosa
atgcgcagtcgggttgcgaaacatcccgaatgttccacggatcagattggcaaatccactttgctcacttcgctcactagcggtctgtcggggattgattgcaagcagtggagcatcaccggcaagcgctcgatctaccaaggcgacaccatcatccgcaaggcctgtgaggattctaattttgtcggcaacactcttcaccgcttcctggacggcgtgaaagtaattatcagccaacagttcctcgcggcagaacctcatgacgtcaggatgaactccacggccctccatatccgctctcagttcctgcgctctgcgccttgcctctggaagcgtctgcacaatcgctactga

SEQ ID NO: 366891 - DNA, 144 bp, Pseudomonas aeruginosa
atgagcgcaaagcgttcaggcggtagcagtggcggtaacggtggtgacaagaagatcatccatcgcagttccgaaagcggacgtttcgtgacggaggactacgccaagaagcatccgaagacgaccgagaaagagcggcgttga

SEQ ID NO: 366892 - DNA, 720 bp, Pseudomonas aeruginosa
atgatttttgacggccatggaactgtaaagaaggatcagtcggtaggcactataataattggtggaactcctattgatgtgtggggcttgcgagacgttattcaaatgccgccaatagtgctgcttagtgcatgtgatacgcttcctattgatggagggcatggatcagtcgctaatgggatgcttgcgctgggcgccgtcacagttctaggaacagttttacctgtagactcaagaaagtccgcgatttttatcggccgtctactacataggattgctgagtttttacctatagttgtcagtcgttctagctatatgccttggaggtcattcatgagtggtatgcttcgaatgacattttgctcagaacttattatctcgctcattgaggatgcaaagataatctctataagcgactatccaagaattcaaatggctgcaaatatggggataaattctctacagccggattggtatgagggagtaatagactcgatttgctccgcctcccagttgaacagagatgttgtcatagagaagtgtcgattttggggggcgatggtagactctcttaaatatatacaaataggtcgaccagagaagattagactcaggtcaatgagtgtcgataaggcgatcgaaattttagttcgcgataaagggattcccgttgattcgattcctacgatacctcgccccccgagcatgttttttcattga

SEQ ID NO: 366893 - DNA, 672 bp, Pseudomonas aeruginosa
atgacagcactcaacaacaccccgaacgaaaaaactatcgttatccaaaactcctgggcgaaattcaacaaagaatatctcgcagatcatgacaaggtggcagtcgagttccttaacctagactgtcgtggacttaatacgcatcgagacagcactgcggccatcttgctgttttccggaattccgagtccaaatgactccaaatgcttgaccgcaatctcggaaaaatacggcatcgaccgtcgcgctcttgttaaggcatggattgtaaaaaacaaactcgaagccagccttcaagcagttactagaacagccgttcgagatcgaaccaacaccaactctgtatttttctacgtgcaggatcaggaagtagccgaatacctgaagaatacttacatgccgaatgctgtgatcgacaacagtctcgcattgacatccccaaagacgcaggatggacggacaacgatcccgccaacggaatatgataaaatttgtacatttagcaaaaccgcatattctaaaggtgtacctcgcaaggacatcaacaaagctattgcaaaattctgggatgtttcgccgagcaccgcacgtagacgaactgaattcctcaagagcatgccgaaaccagcattacctaacaaccaagtagaccttaccagtttccttgcctga

SEQ ID NO: 366894 - DNA, 243 bp, Pseudomonas aeruginosa
atgaagaagcttctaaccggcctgttcctggccatttccgcgttccctgcatccttcgccgttggcgtcgtggtcatgcagcacaccgccttcggtgcgttccccaatgccctggatgcggcagctaagaccgcattggccgtccttggtcttgccgtgttcgtcttttgtagcgggttggtttcgaaggttgatgcctcgaagtccgctgcggacgctgagcaggctttgggcaagaaatga

SEQ ID NO: 366895 - DNA, 234 bp, Pseudomonas aeruginosa
atggtttttgatagcctgaaggcggattgtggtttgaatataaagatggcctggtctttgattgtgctttcatttgttcttacattcataacgctgcatgtgtttttgttaagaacttttgatttctcgatgttcagctatttttcggaatggttggagaagatatggctttggcttgggtgtaaggtttccaaaattttaattggtattgattatatttcggaatttccctag

SEQ ID NO: 366896 - DNA, 372 bp, Pseudomonas aeruginosa
ttgctgtttcccttcaccctatcacggcgttctcgccatcaagggctggccggctacgagcgtgaagtgttcgcagcgctgttcctagatgccaagcatcgactgatccagtacgtcgagcttttccagggcaccatcgacagcacagcggtctatccacgtgaagtcgtcaaggaagcactgcgcctgaatgcagccgcggcgatcgtcgctcacaaccatcccagcggtaatcgagagcctagcgaagcggacaagtcaatcacccggcgcatcaaggaagcattggcgctagtggacgtgcgcgccttggatcacatcatcattgcggggacgcagtcagtctctttcgcggagcgagggctcatctga

SEQ ID NO: 366897 - DNA, 297 bp, Pseudomonas aeruginosa
gtgaacgaaggcgtcatgacctgccttccgccgcacgatggccatccaggcatggagctcatctgggccgcggactgccggcaggcattcaatcaaggcgtggggctggcccagacctggctcgacaacgctcgcagcggctggctctgggcgatcatgatcgcggagcgtgatctcctaccctgcgcaatggaaagacgtgccttcgaggtcggctttctgagccgtattcaccagcggctgagttcgctgcagcgcaatgagcagcgggtcagggatctgcctttgacgttgtag

SEQ ID NO: 366898 - DNA, 270 bp, Pseudomonas aeruginosa
atggctgagttcgaaaccggcgttatcccctttcccaggcggccaagtccgctgcacgaatccgagcgctctcccctccccgccgaggccgccgccgaactccgcgcaaccatgcttggcaatctgctggatcaaatggccgggccagatggactccagccggagaacctgcgccttcggcttgcggcctactcggcccaggatctgctcgacgaaatggtcgtgctgtttcgtcgtgcgctttctgaagcgcgaggaggtgcaaggtga

SEQ ID NO: 366899 - DNA, 2304 bp, Pseudomonas aeruginosa
atggaggcggaaagtgggcgtggctcaccctattggaaaaagttcgaagtaattcagcgtaacgcaatgaccctattgaaacaggttaacaccctgcttgatttggcgaagatggacgcccagcagatggggctctcttatcgacgagcggatctcagccagctaacccgcgttatcagctcgaattttgacggaatagcccagcaaaagtcgataacattggatgcggaacttccccctcatttgattgctgaggtggattgcgagaagtacgaacgtatcatccttaacttgctttccaacgctttcaagttcactcctgatggggggcttatccgctgccaccttagcctgagtcaaccagcgcatgccttgattactgtatccgatagcgggccaggtattccccaaaatcttcgtaaagagatatttgagcgcttccatcaactaaatcaggaaggtcaacaagctaatcaaggtaccggtttggggctttccattgtgaaagaattcgttgaattgcaccatgggactatttctgtaagtgatgcacccggtggaggcgcactttttcaagtgaagctgccattaaacgcacctgaaggcgcttatgttgcgaataacgccatgtcacgaagcgacaatccacagacggtgaatccggacgagtacctattgccgatacccaccgcgggaagcggggctgaactgcctcagtttcaatctgatcagcctcgggttctgatcgttgaagacaatccagatatgcgttgcttcataagggactgcctcagcaccgactatcaagtgtatgtcgcaccagacggcgcaaaggctttggagctgatgtgttccgctccaccagacctcctgatcacagacctgatgatgcccgttatgagcggcgatacgctagttcataaagttcgtgaaaaaaacgaatttgcgcatatcccgatcatggtgttgtcggccaagccagacgaaaagctgcgtgtaaaattactctctgaatcggtgcaggactatcttcttaagccattctctgctcacgagctacgagcacgtgtaagcaacctgatatcaatgaagattgcaggcgatgctttacgcaaggagctttccgatcagagcaatgatatcgcgctgcttacccaccgcctgatcaaaagtcgtcaccgccttcagcagagtaacattgcattaactgcatcagaagctcgttggaaagcagtatatgaaaactctgccgccgggatcgtactgactgataccgaaaaccgaatactcaacgccaatcccgcgtttcagcgcattaccggctatacggaaaaggatctggcacaactatctatggaacaattgactccacctaacgaaagaacacagatgaagcaacgtctggctcgattgcttcagagcgggggggcggaatacagtgtggagtgctcctatttatgcaaaaatggctctacgatctgggccaatgccagtgtctcgctgatgtctccacgagtagatgagccccaagttatactgcagatcatcgatgacatcactgaaaaaaaacaagcacaggaaacccttaatcaattgcaacaggaacttgtgcaggtttcccgttctgctacgatgggagagtttgcagcctatattgcgcacgagataaatcaaccactttcggcgatcatgacaaacgcaaatgccgggacacgctggataggcaatgaaccacctaacataatggaggctaaagaggcactcgcgcgcattatccgagactccgaccgcgctgcagacattatccgtatggtgcgttcgttcctgaaacgccagggaccggtgctgaaacctattgatctcaaagcactagtagccgatacaactcttatactaaaggcacctagccagagtaatggtgtcagcctaaatgtcattgcaggcgatacacttcctgcgataatgggtgatgccgttcagattcagcaattggtaatcaatctggccatgaactctatcgaagcaatgagccaggtcggttgtgaaacaagacaactagccctgtcgttctcaagtaatgcttcaaatgatgcactgattatctgtgtgaaagacacaggtccaggcattccagaagatcagatagggcagttgtttaatgcattctacacaacaaaaaaagaggggctcggcatggggttggcaatttgtcttacaatcgcggaagtacataatggtaaaatctgggctgaaagtcctccggcgggaggtgcttgtttcttcgtaagtatcccggtcagttag

SEQ ID NO: 366900 - DNA, 846 bp, Pseudomonas aeruginosa
atggcacgtcgtcgcaagacctctccctttgaagacctcatctccctcgccgcgctgctgccctggtgggccagcttgctgattgccctcgtgtcttggttcttcctgcatggcgtcgcgaccagcacacctcctgctatgacccacgctaaccagttctccgaggctatgacggggactgtcctacgcagttttgccatggtcggccagtacctcatcccactcgcattggtattcggtgccatcggctcaattgccggcagggccaagcgcaagaagctcatcaaggacgtagctgcggccactcagccgggcagaaccgtcgatggcatcagctggcgcgaatttgagcagctggtgggcgaagcattccggcgcaagggattcaccgtaaccgagagtggtggcggtggctcggatggtggcgtcgatctcaccttgcacatgggcaccgacaagtacctggtccagtgcaagcaatggaaggccaccaaggttggcgtcaccgtcattcgcgagtttttcggcgtaatggctgctgaaggcgcggcgggtggatttgttgtgacctctggcgcctataccgaagaggccaaggtattcgcacagggacgcaacatccagttggtagatggcaccttattgaggaagtggatttctaaccgatctgtctcaacttcaggtctaggagggctggagacggtaaaagtgctgcctattcccttatgtccggtttgtaaatcgtcgatgactattagggtcgctaaacgtggtctcaatgcaggagctgaattctggggttgtcccagttttcctgcttgtcgtgggaccagggatttatcttaa

SEQ ID NO: 366901 - DNA, 1143 bp, Pseudomonas aeruginosa
atggttgcgctttcaacgagaactgcggtgcactcgttatgtaatctatcgcttggtttttggtgttcgcattacagagattacgtaagcctcctcccctcgcctaaagttgaccaatatagaacagtcagaaatcaagaatgttttttgcctcttagtgatcaatcacttatcgtttcatatatagatgatcttgcagaaaagctggaggtatctaggtcggatggcgcgccgcatgaattagatcttctagatctaaggaacgcctgcttgatgatattgagccatcaatatgcattcagatctggccaaatagcaaagattaaagctagtgacgttaggtcgcccaatatgaattcgctgcatgtttcagtgcctgttggaaagcaaaggaattctaagcgaggcaggttggtgacgcgaaaaataaaaagtgaatgggcaattatattcagatcatatagcgagatggctggcgctgtacgattgcatgaaaacagtaccttagggcagctttacttttgcatgacaccggtgcaggtctctatcgcgatcggagatctttccgagcatattattggtgagcgctgggtcgcgacagatctacggcatacagctgcgcaacgaatggtagacgctggtgtaagccatgtgtctctttcagagttcatgactcacgccaccacgttatcagccaatgtctacttcaacgcctcgcctactcaggccgaacgcgtaaatcaggcattggcgctttcgcccatctattcaaatgttgcagaagttgcacgaactagggtaattgacaaagcagctctcatgcgactcccgtccgatcagcaaatagcaggtgtcccccacggaattccgattgctggcattggaggttgctccgctggacaatcgctctgcacaatgaatccgatcttgagttgctacacgtgcagaagatttttgccactattagactctgcgattcatctagaggtcgtagaaaagttgcgccctgttgtaactgattttgcaaatgcatcacgaaacaacgaggagagtccagcctatacgcagctaaagcgaatgttccacgctgctttacgtgttgcggatgaggtaaagattataaagacagaggttgttgagtga

SEQ ID NO: 366902 - DNA, 846 bp, Pseudomonas aeruginosa
atgcagttgctgagccaatccaccggccacggcaaccgagccatacgcgaaatcgggcagatcatctggcgggagttcagggatgatccggacgtgggtcgccgcctccctacccatctggagaagctcgagggacgcttgaaccaccagcaatgggctatcgatagtcagctcgaagcggatccagcggcagagttcggcatccgaactctgtcggatttacctcattccacccctagttcggatgccgaactcagtgaaatcagcggcaagcaatgcgctctaccgctgagttcggatgccgaacccagacagaatccgccgagtacgcccttggttcggatgccgaactcatatagtacgtatacatacaaacaagattctgtatgtaaaaagccagtacaaccgcgagcacgcgaggaagcccatccaaactggcaggatctcctgcacgcactggaggccgagcaacggatccaggcggtaagcgcgctccgacgggtgtccgaagatcttcggctacccatcatcgagcagtggcagcaccgttgtgccggcggaacagtcagcaatccgttcggctacctcatgacgctcatccagcgtgcagtccagggcaagttcaacgcctcttgggctccggaagaaccggctgagcgaaccatccccgcaacggaacgccccagtcgtgctccggcaccaccaagccccacaacgcctaaacagcaccaagttcaaatgcggggtgatacccggacagggagcgaggtcctcagccggctcaaggacctcattcggcccaggcacggatcgagcgtgccatccgagcggggtgatgagccatga

SEQ ID NO: 366903 - DNA, 270 bp, Pseudomonas aeruginosa
atgactactcacctgatcaccctggtcatcaagcagccgagcgacgcccaggcacgccaactcatgtaccaagagttgctcggcctaatctcacgctacggcggtgaggtgacgtccaaggccttggaggacgagtcgtccctctgcgagctgctggagcagatgctgcctgatcatgaggtagagcaagccaggaaacaggtgctggaacttcatgccaagcgccgccgaccgggccgcctgcactcgccggcgagcctgaaggtgtaa

SEQ ID NO: 366904 - DNA, 270 bp, Pseudomonas aeruginosa
atgactactcacctgatcaccctagtcatcaagcagccgagcgacgctcaggcacgccaactcatgtaccaggggttgctcgacctgatctcacgctacggcggtgaggtggcgtccaaggccttagaggacgagtcgaccctctgcgagctgctggagcagatgctgcctgatcatgaggtagagcaagccaggaaacaggtgctcgaacttcatgccaagggccgccgaccgggccgcctgcaggcgccggcaagcctgaaggtgtaa

SEQ ID NO: 366905 - DNA, 174 bp, Pseudomonas aeruginosa
atgctgcgttccgcgcatgacgacctggcctgcagtcggcagagcgatcgtcgcagccttcaggcgctggtgaaacgtctcctggatgccgccgccaccgatagccttccccgctcccttgcagagatggagacctggctgcagctcaacagcgaggagaccacgaatgcgtag

SEQ ID NO: 366906 - DNA, 300 bp, Pseudomonas aeruginosa
atgatcactggtgaatatttttcgagcctcttccgcattaaaaaaataccctttagcgtggccagtaattacttggtgaatatctgccagaatcattttcaagaagaagtagtgatcgtcatactgcttctcatctacaaattctttcacctgaagtggaggtttacactgagactcacattccagaatatatctaaccacagctttatatacagtctgcccagtgtctgctggcttgcaaatgcttgtatgatcctcatcaaccgccagataatcctttgctttactacccataggtag

SEQ ID NO: 366907 - DNA, 690 bp, Pseudomonas aeruginosa
atgcccgcagaaaagccgcgggagcggccaatcctgttcaaggaccagatggtccgcgccatcctggaaggtaggaagacggtcacgcggcgagtgatgaagccgcaacccatgcccagcaaaagcggcggccaccattggccgtgcaaggtccaccagtcgatgcttcatgttgagcgagagcttcagaatggcgagggctgttggtgtggtctggcagaggctgcctgcccttacggccagccaggcgaccggctgtgggtgcgggaagcatggcaagggccgctgatttccgatgaggaacaggccgccaaccagtcatggtggaaggacatgacgaagttccaaaacccagggcactgcgcctatcgcgccagcggcgacgacaacgaatacgtcgatcccgacggctacttccactgcaaatggaagccaagtatccacatgccccgctgggcctcccgcatcctgctggagatcaccgccgttcgcgtagagcgcctgcaggacatcagcgaggagcaggcacgggccgagggatatcccgccgagcgcgaatgcgaaaccggcggtagtggcttggatgcctggctctggttccgctccctttggggagagatcaacggtccagaggctttcaccgccaatccctgggtctgggtcatcgaattcaagcgggtgacaccatga

SEQ ID NO: 366908 - DNA, 315 bp, Pseudomonas aeruginosa; identical to SEQ ID NO: 344130

SEQ ID NO: 366909 - DNA, 444 bp, Pseudomonas aeruginosa
atgcgtgaggttgttaagaaaatcaatgaaatgcaggactcgttagatcagttcgacaattatctaaaaagcttgacggttgggctcaacgaggaaatttggaggacggcccgtgagcagaaaattgtgctggttcggtctgtgcacatcaggcagtgcccgaatcgtttcaggattgagtggtgccgcctgaaacatatcaagccggacgccttcgctaaatccaaggtgtatttcagccggataaagctaaacaactgctcgtctaaaaagacgtttaagcagagccaaaccttgatgggcaagctcgatgactttcacttggggatcttcaatgaatacgacaagaagtttgctgcaattcgcgaaatggccgaagcgaacggagactatcgtgaagggttgaaaaaaatgaaacgcatcttcgaggatattgaaatttaa

SEQ ID NO: 366910 - DNA, 690 bp, Pseudomonas aeruginosa
atgttcctcgacggcttcggcccgcagatactcgccggcaccctggtgaccctgaaactggcgctgggctccctgctcggcgccgtgctcatcggcctcctcggcgccagcgccaagctcgccgccaaccgcccgctgcgcgccctggccagcggctatacaacgctgatccgcagcgtccccgacctggtcatcatgctgttgctgttcttcagcctgcagatcctcctcaaccgcgtcaccgacgccctcggcatcggccaggtcgacatcgacccgttcgccgccggctgcgtcaccctggcgttcatctatggcgcctacttcacggaaaccttccgcggcgccttccaggcggtcccggccggccaggtcgaagccgcgcaagcctacggcatggggcgctggcgagtgttccgccgggtactcctgccgcagatgctgcgctacgccctgccgggcatcggcaacaactggcaggtgctggtcaagtccaccgcgctggtctcgatcatcggtctcggcgacctggtcaaggccacccaggacgccggcaaaggcaccctgcagttcttccacttcaccctggtctgcgggctgatctacctggccatcaccgcaatctccaacgccgcgctgctgtggctggagcggcgcagctcgctgggcgtcaggaggccgctgccatga

SEQ ID NO: 366911 - DNA, 1707 bp, Pseudomonas aeruginosa
atggaaattgagaaaatttcaatagtcggctttcgaaactatctaaacgccacgataaatttcaacaagagcaccttgataatcggcgcaaacgacagtggcaaaaccaacctagttcacgccatgcgcctgcttctagacaaaagcttgccagaaagcgaattggagccctcagagacagactttcatttcgaaccaggcggtaaacaatccgaaaccatttccatagacattcattttaaagaggtcaaggaagatgccgtattgtccacgctaaagggcagtgtgggggaagatgaaaaatgcgtccttaggtactctgcaaagcgaggtgatctcagctactcactttattgcggcccggatagcgatgagcttgatgagattgctggccgattttacttaaagtatcttaatttaagatatgtgaagtcgcaaagagatctagaaaaatttattagcacagaaaagagacaactcctcaagatctctcaagaaaatcgcaccaaaaaagaggctgaagaagataaagcaaaactacaaactatcgaaaaaagactgaccaccatcaacaagcatgttcgtgaactgcactatgtcaaaggtgctactgacgcggtgaacaacgaactatctaagctttcacataacttatctgcgtactctgtacaccttgattccggcgccatagaaacgcagcagttcatcgataacctcaagcttggagcgagtgcggcaggttcaagagtatcccttgggggagatgggaggaataatcaaattcttctttcactctggaaggcaaaaagcgaacgagaattcgaccctgaaagtgaagtggttttttattgcatcgaagagccggaagcacatcttcacccccatcagcaaagaaaactagccgactatctcatatctgaactacccgggcagaccttcattacaagtcactccccacagatcaccgcaagattctctcctgagtcaatcgttcacgttaaatcaaagtccggaaaaagctatgctgcaagcaatggatgttcgaaatgtatcaatactgcatgggacaagcttggctatcggatgagcattctccctgcggaggctttctttgccaaaagcgtattcctcgtagaaggcccatccgagcaactgttttatacagagctagccaaagccctagaaatagatcttgattattacaatatctccatccttagtgttgatggagttcagttcaaggtttatgccagcattttaaacgcaatggaaatcccctggacaatcagaacagataacgacatctcggacatcacgaaaaacaagaagccgtacaagaacctggctggtattaaccggtgtctaaccctagcaggtctaaaaaagatagatcacgcgccggccaccacgactcacgccgatcttatgaagaatgggcactggagtgggtgctcaagaaaggttaataaaaagggaatttttctatccaagatagacctagagcacgacttatcagaagaaatgccggacgagttactcaattattctgctcgccctaacctacctttggccatagcctacctacaggataagaaggctattaggatgcgggaatttcttagcaagtacagcgaaaggctggtaaacatagggcacggagaaatcgcacgcgctctgctccattgcttagaacaggcaaaggagtga

SEQ ID NO: 366912 - DNA, 1641 bp, Pseudomonas aeruginosa
atgatcaaattaaccaagcaacaaataaccgcgatagatcattcggggaacctgattatcacagcctgccctggcagtggaaaaacaacagtaatatcagaaaaaatcagaaacgaactcgaagatctgaaaaggcatcaaggcgttatagccattacctttacacgaaaagccagcaaggaattggcgcgccggtgtaatcgtggtggcaaagaaaccaaatcaagcttctttggaaccattgatgcattctgcctctcggagatcatatttcccttttccaagttcatttttggctccagccctgataatttggtgccaaagttcaagaatgaactatcagaggaagaaatctcaataataattgagaccgcaaaccagcttggtgagcttggcgcggagaacatagatgattacatgccggcactcaaggaattgtacgatttggggtgtatctatttcccaagcataccctttttggccagccacatagtgaaaaattccaaatcttgccgtaattacttgaaagctcggtacacaacggcttacatagatgagtatcaagactcatcttcagcacaacatgatttattcctcttattactagatatcggaattcgaggcgtttgcgttggcgatattcagcaatcaatttatggctggcgaaaaagcagtcctgagtttttaaagcaactcattaatttgcccacctttaatcaccttacagtatcaaccaaccatagatgccatccttcaatttcaaattatgcaaatcgcctatttgatgaagacttcgaggttgagcagggtgaagaacttcgagtgtatcaatgtgaagtggagggagccgaactagatgtcgctttaaagcttaacaacatcataccgagtattataaaaaaataccctgtcaagaatctctcggatgtggcagttcttgtccgctacaataaaggtctggagcgaataagagagaagctagctatcccttgcaagatatacacagaggatgacctcagtggaattgagtcaaaaacctcccagctatgggttatgctgctcgaattcaaattcgacaaaagcatgctggtagatgacatagtgaatttatacaacccagccggcgatatccgtcgcgaccgattgaaagcgcttagggatgcagttaagagtgttagaaccgttgcgctcgaagatcttgcagacacgcttttagcagcatctcaattgttacttgacatcccggccactaaatttgaagtaaacgcacttaggaagataataaatgaccctgaattgttaaaccaatacctgccggctactgacgatcaagtccagtgcatgactcttcataaatccaaaggccttgaattcgatattgtcatccatcttgatttagtcgaatgggtctttcccaagcgcgtgccaggcgcaaactacaatgatcgagtttacccagatttagagcaggatttgaatttgcactacgtgggtatcactagagccaagaatgcatgcgtactaattcacactacacagaggatcaactcacttggggcggttaaacgagcagacccatctgcttttttgagcttacccggccttgatgagctatacaaaatagttgataggaaatggtag

SEQ ID NO: 366913 - DNA, 1200 bp, Pseudomonas aeruginosa
atgacctgtcaaaccctcagatccagcgcaacacccaaggccctgaccggctgggttctcctcgatggcaataatgttcctcgctattgggcgactgtctgggctgacgtcctgcaggcgaaactcaaagacagcacgcgaagccgatgcttgtacgcgattgatcgcttgtaccagcattttgcgctgctgcaccaagccgatgtccttgatcggcttctgactgattgccaattcgatgcacttgaggctggcctggccgccttcttgagcgtcctgcgaaatcaggccaaacgcgatggcattgtcaattccacagtttgggcttcggccattagattcattgtcgatatcctccgctaccttgccagaggcatagacgccgacaatatgaagggccggctagagaatctggaaaaactatatagccagctcgatccatcccccccagctgaaccgggtcctattcgagccttgccgggaattgtggttgacgatctttatcggattatggagcccctttcccctgacaacccttttcgtactgaaaaaaaccgctggcgaaattactttgtgtttatttgcgcgcttgcatctgggttgaggcgaggagaagtagcctctcttgcaattgatgccattcaatctgaatatgattacgtagccaatgatgatcggagttggataagcgtacgagagaacccatatgtcgaagtggatcctcgccgagatgcggctagcattaagaatgcacagtccagacgtcaattgccaatttcccaagagctattgcggataaacgatcgcttagtcttaggaactcctagaaaacaatcccatggttacttagtaagctcacagaaaggaaaacctatttctcttcgtcagttacaacgtatatttgaagtggcctcgggtcgattgtctccggctgcgagaagagctttgcagtttcgcggaaagaacaatgtgactcttcacgatcttcgccacacttgcgccgtctatagacttaagtgctacttggattcggggcatgacctggatacggcagttgagaagttgcgagtgttctttggttggtcagctagctctgatatgcctaggcattacgctcgagcatactttgaatcagagcatgcagatgtctggagcgacaagtatgagaagataattagcgtcttgagagagttaggatag

SEQ ID NO: 366914 - DNA, 915 bp, Pseudomonas aeruginosa
atgatgaaaattcgcactatgaaacccgccctaacgatcgtaagtctcgcagctcttcagggttgcgtaggtgtaatgcttccctttccaggcgagataacaactcaagttgaaaacatgaatgtgacctatgtcccccgagaaacagggcttgatcgttggatcaatgctcagccggtggatctcagtgctcataagactcagactgagaaagccatggcccttttcggctatccgacactaggttggtaccctgaaggccgcttgacctataacaatacggtcagggtggccattatcgaaacgccgctttacatgcgtccttcttatgccggccccagcgacctccgccccctcagcgcctccagtgccactgataccttaattactgcaggtctgagcacaggtaacggggcccttgccgcagcgggcgccgtggccagtctcggtccatctggtaacgctgacccgcgaacccgacagtcgcactttctctgctacaaggcgcaggacaagtacgatgccaactcagcgttacagtcctgctggaaggactggcttggtcaaatgcgctcgattccccttcagcaagacgaactgcacagcatggacatcgttcagttcggtcttacggtgccgacagtagaagggcgtgaaggtcatgctcgcatggcgctgaatcggagtcggacgggttatttcgttggcatggcacctgttcaaatgggcggatacaaagcgcacattttccacttcaacccgattgtcagagcaatgcctggtgacccctacacggtcgaggaattgattgcactgcttgagaaaaacaagccaagtgacatcgtctaccttatcgctggggcggcagacactcgcaagcggtttggcgtcgacccggtcggtatcgttgactga

SEQ ID NO: 366915 - DNA, 984 bp, Pseudomonas aeruginosa
atgccacaacattcaaaacacgcctcaaaaaatatgggttacggacgaaatccaaaatacgcagcaaaaaacaaactaagagaccactttaattccggccgccatgcaaccacggttacacactgcgaacgcttcaatctcttcattgactggatagaagagcatcacaaaataaacgacctatggtgcataaccaacagccatttactagcgtactcagaacatatcaaggcactaatgagtgacgagataatcgctgtatcaaccgcacacaacagaatctcatcatgcaacgtcgttttaaaaataatgcgcggagacaatcatatccgcatagataaaattgctaaaaccttagaaaaaaaacgttgctacgcccgcagtcatgtcccagacgggattgatctcgacgaagtactccaagcccaatatcaactgagaaacgatggaaatattcgacttgccgctatactcggcctcgcacgaacattaggaatgcgcctcagagaagcagttttatgcgaccttcagcgcttaaaaagcgaggctcaaaaatttggaagaatcaatatccaggaaggtaccaagggcggacgaaaaggatctcacgcacctagatggattgatattaaagaatgcgccgccgacgctattgattttgcaattcccgcgtcaccacccaacagcaaaaatcttctcaaaccgaatgagacatacatttcattcatacgctcagtagtcagatacaaaggcaaaagtcttggaggctatggaatccgcaaaatccatgatcttagagccgcatatgcctgcgagcgctacgagcaaatcacaggacacccggcgcctgtaattgccaagcggcaagccatgtcaaaggaggagcttagaatggacaaagaagcccgcagaatcatcagcagagagcttggccacgagagaatagaaatctgcaactcctacatcggaagctgtaaaagatga

SEQ ID NO: 366916 - DNA, 1368 bp, Pseudomonas aeruginosa
atgtccctgggtagcgattacttgcgttctctgctcgaggaagaccccgagcgcggcgtctaccgctgcaagcgggagatgttcaccgatccacgcctgttcgaactggagatgaagcacatcttcgagggcaattgggtctatctcgcccacgaaagccaggttgccggagtcaacgactacctgaccacccagatcggccgccagtcgatcgtcatcgcgcgcaaccgcgacggccagctcaacgccttcatcaacgcctgcagccaccgtggcgcgatgctctgccggcacaagagcggcaatcgcagcagctatacctgtccgttccacggctggaccttcaacaactccggcaagctgctcaaggtcaaggacccggccgaggccggctacccgcagggcttcaactgcgagggctcgcacgacctgacccgggtggcgcgcttcgagtcctaccgtggcttcctgttcggcagcctcaaccccgatgtcaggccgctggccgagcacctgggcgagtcggcgaagatcatcgacatgatcgtcgaccagtcgccggaaggcctcgaagtgctgcgcggctcttccagctatgtctacgaaggcaactggaagcttaccgccgagaacggcgccgacggctaccacgtcagttcggtgcactggaactacgcggcgacccagagccagcgccagcagcgcgacgccgcggaccagctgcggaccatgagcgccgccggctgggcccggcagggcggcggcttctactcgttcgagcatggccacatgctgctctggagtcgctgggccaaccccgaggaccggccggccttcgagcgccgcgccgagcttgcccgcgacttcggcgaggcccgcgccgactggatgatcgagaactcgcgcaacctctgcctgtaccccaacgtgtacctgatggaccagttcagctcgcagatccgcatcgcccggccgctgtcggtggaccgcacggaaatcaccatctactgcatcgcgccgaaaggcgagagcgccgaggcgcgcgcccggcgcatccgccagtacgaggacttcttcaacgtcagcggcatggccaccccggacgacctggaggagttccgttcctgccagcagggctaccagggcagcgtggtcggctggaacgacctgtcgcgcggcgccgaacactggatagagggcgccgacgcggcggccgcggccatcgacctgcggccgcgcctgagcggcgtgcgcaccgaggacgaagggctgttcgtattgcagcatcgctactggcaggaggcgctgctcgccgccctggagcgcgaacggacgcagcgcgtggcgctgcgggaggtggcgtcatga

SEQ ID NO: 366917 - DNA, 645 bp, Pseudomonas aeruginosa
atgctggttgtatcgcattaccaacctcaggagtctgcatcccgcgcccatccatgggacaagaccacctacacggagaatgctggggagtactactcgttcagagacaatccgaaattaatccgaaaggttctggaggatttcaaaccacacgaatcgcaagaggcagtaaggctcttttatgaaatgattgaatggctcaaccgaaaggacggcagccttgaaacaaatgactgcctgcttcggccgcccgaagataacccagacgatcaattcctattcagcaggaagacctggggaagaatcgagttcttcatgcgtcaactggagttcaatcttctagatgacgcatgcctctggctatatcggatgctgagcatccacctccaggtagaaaggcccgatttccaggcggccatattcgatatcgccgcctgccctacggactaccttgaccttcccggcgggcacgacgagcgtacagggatacgattctgcatctacttcaacgcttatggtaacggggatacggaggcttgggacaacctgcacactgctttcgacggactctttgaagcttttaaagccgtggaaaggtcgatgagcggaggctatgtcaagttcccccagtccagctctgcttag

SEQ ID NO: 366918 - DNA, 315 bp, Pseudomonas aeruginosa
atggcgtcgatgagcgaggactttttgtcatccttggttggagaggtggtgaaggctgtctatatccactacaggctaaatgaaccgctgccggaacctttggggtctcgaaaggcgatggctgactgccatgagatgctggcgcgcgtgatcccggctattacctggcagggaggagatgtggacgccgggtacttgatgtacgtgaaagggtggaggctgaagataggaccgttgttggattctgcactggaggcgattaagcgatcacagattaatgcgatagaaccagaagagggcggcggtgatggctga

SEQ ID NO: 366919 - DNA, 1017 bp, Pseudomonas aeruginosa
atgactagcattgccttctttaacaataaaggcggagtaggaaaaacaaccctcctatgcaatctcgcaggttatttctcactggaaaagaacaaaaaaatacttattatcgatgcagaccctcaaagcaacgcaaccgtctacctcctaagcgaggaaatattaaactccatatatgatgacgatgatgaagacaacctctacgggtactatgagagcgtagcaaacggcgagggttataatgactcagaaccgccgatatatacatcaagccgtttccaagtagacatcatccctggccacccaaggtttgcactccgagaagatttacttgcacaggactggggaaattccttaaccggaaacgagcgcggcctgagaacaacttacactttcaactatttactaaaaaaagtagaagatgactacgacctgattttcatcgacatgggtccctcacttggagccataaatagatcaatacttctagccgcagatttcttcataaccccaatgtctgccgatctattcagcctaatggctatcgagaacataatcctttcactttccacttggaaaatggacctagaggatgcacttaaagcatataaaagaagaaaaaaatcaaatttctctcaaagtgacgaaaatatatcttggaaaataaaatttctcggatatgtcatgcaacagtacaaagcaaaaagcactcgcggcgaacttagagcggttgcctcatatgacaaaataatccaaagattcccaaatgatatagcacaacttgaggaaaaatttggaattaacgacatggaaagcactgatctagggaagttcccttccctatatagcctggtacccatgtcacagacggcacacgcgccgatttttgctctaagttctagggatggtgttgttggcgcacactttgcaaaggtggatgaggcacgtcaaatgttttctaagattgccgacaacgtcttatatcgactagcattagccggggaagaaaatgattaa

SEQ ID NO: 366920 - DNA, 849 bp, Pseudomonas aeruginosa
atgattaactggccacaagaactagtcgatgactttgagtcccgaagagtcattctttttatcggatctggcgtctcaagaaactccgtgggagcagacgggataactagaccaaaaacttgggaaagtttcttaatcgaggcagcaagacaacacgcgctactagatagaattcagccacacctaactagaaaagactacttaaccgcattagatttattgcgaaactccatttcccgcgaccaatatgcgagaattgtacgcagggagtatctagaacctagatactcagaagcccctatacatgagagcatatacaagcttgacgcaaaaataatcctaaccccaaactttgataagatttatgacatatatgcacaagcaaaatcccggggaactgtaatcataaagcaatactacgatctcgacttagcccgttttattcgtggcgatcagcgagtcgtaatcaaagcacatggatctgttgactccgtagaaaacatgatcttcggaagaaaagattatgccgaagccagggtcaagcatcggtggttctatgagatcctgaaagccttattccttacacactcatttgttttcgtaggatgcggagcagatgatccagatatcaggctagtactcgaagatatacatttcagcgcaggatatgcgcgagagcattatttcatatctgcccaagggagtatccccgaggatatgaaaacaatattccagcaaactatgaatttgaacattctcgaatatgattacgactccaacgcggacgaccactcagacctttccacctcattggaagatctagctaatagcctaagcttcaaccagtaa

SEQ ID NO: 366921 - DNA, 633 bp, Pseudomonas aeruginosa
atggtggcaatgacgagcagccggacggctggcagcgccacgtcgaggcgttgcgccaagccggcatcgccgaacccggagcgacgatccagggccgcaagccggcgaccgtggcggacgagcaggcgctgtacgacgtcgcgcagtcgttcgcggagctgctgccgtgggtggagttcctgccgccgtcgaagtccatgctgctggaggacgggcaatcggtcgcagccttctacgagctggtcccgctgggcaccgaaggtcgggagcctggctggctcgcgcatgcccgcgatgcgctcgaaaacgcgctccaggattcgttcgatgagctggacgagaacccctgggtgctccagctctacgcccaggacgaacccagcttcgaccagtacatgcagaccctgcgcaactacgtgcagccgcgcgctcgcggcacagccttcaccgagttctatcttcgcttcttcggccaccacctgcgcgcggtggccaagcccggcggcctgttcgaggacacggtggtcacgcggttgcgctggcgcggccagacgcggcgcgtgcgcatggtggtctatcgccgggccaccggccaggcgaaccgccgtggccagacacccgagcaaatgctga

SEQ ID NO: 366922 - DNA, 5757 bp, Pseudomonas aeruginosa
gtgtacagcctcggcaggctggatatcgcccgcgacgatgccggcaaccgtgccgccagcctgcgcaacctttccggggtgatcgagagcggcaaggacttcagcctgcgtgccagcctgatcgagaaccgtcgcgccgtgctggaaagcaagtcgggcctgtacaccgcgaagatggagcagaccgcctgcatcgaaggcgtcaacgcgggcgactgcagcggcaagcgcaacgccatctggaccatcacccagcgcgacaagaccgaggtcaccgccagcagcgccatggggcaactgctggccggaggcgacttcgccatcgacggcggcaccctgaacaacctttccagcctgatcggcagcggcggcaacctcaccgccaacctcgaagtcctcgacaaccagggcctggaaaccggcgagctggaaaccatccgcgtgctgcgtaccgctcgcggcggcgatatcggcggcatcgaccagaagtcgcgcaacttcaccaacctctactggtaccagagcgccaatttcgacccggcgcgcgcgggcgagattcccgccgcgctcaacgcgatcctcagcgactggtccttcgagtacgaattcccgagcaaggggccgaccccgatcagcagtggcgaccagtcctacgcagcggtgatccaggccgccggcgacgtcacggtcaatgccagcacgcgcatcgacaacggcgtcacccgccccggctacaccttcgtcggcagcggccgccaggtgggcgacagcgcggtgggcggcagcggggtttcggtggtcgtgccgctgacctcgcaactgccgcccgacctggcgcggcgccaggtcaacccggttaccctgcccggcttcagcctgccccagggcgacaacggcctgttccgtctcagctcgcgcttcgccgaggacggcaatggcagcgccgcgctcggtgccggcgccgaccgcacccagggcggtagcggcgtctcggtcggccagcaaggcgccggcaacgtcgccggtacctggcagggccagggcgtgcgagtcgatggcctggctggcgcggccaacgtccagggtcagggcggcagcgcgctcggcggtagcctgccgggcgtcgcccgggtccagggcgtgcccggcaacgccacgccgagcgccagccacaagtacctgatcgagaccaacccggcgctcaccgaactgaagcagttcctcaactcggactacctgctcagcggcctgggcatgaacccggacgctagcaagaagcgtctcggcgacggtctctacgagcagcggctgatccgcgacgcggtggtggcgcgcaccggccagcgctacatcgacgggctgagcagcgacgaggcactgttccgctacctgatggacaacgccatcgcttacaaggaccaactgcacctgcaactgggtgtgggtctgagcgcggagcagatggcggcgctgactcacgacatcgtctggctggaagaggtcgaggtgaacggcgagaaggtcctcgcgccggtggtctacctggcccaggcggagggtcggctggcacccaacggtgcgctgatccagggccgcgacgtgaagctggtgagcggcggcgacctgcataacgtcggcaccctgcgcgcgcggaacgacctctcggcgacggccgacaacctcgacaacagcggcctgatcgaggccggcaagcgcctcgacctgctcgccggcgactcgatccgcaaccgccagggcggggtcatcgccgggcgtgacgtgagcctcaccgcgctgaccggcgacgtaatcaacgaacgcagcgtgacccgctacgacagcgcgctcgacggccgcacctgggaacgcagcttcgccgacagcgccgcgcgggtggaggcggcgaacagcctgaacgtccaggccggacgcgacatcgccaacctcggcggggtgctgcagagccgcggcgacctcagcctcgacgccggacgcgacgtcaccgtcgccgccgtcgaggaccgccagggccagacccgctggagcacgtcgcggctccagagcgtgacccagctcggcgccgaagtcagcgccgggcgggacctgaacgtcagcgccggccgcgacttgacggcggtggccagcaccctcgaagcgcgccgcgacatcgccctctccgccgggcgcgacgtgaccctggcggcggcggcgaacgaggagcacagcttcgccaccggcaagaaggtgacggcgaagaacgatcgggtggaacaccaatcgaccgtggtcagcgccggcggcgatctcagcgtgcaaggcggcaatgacgtgaccttcgttgccagtcaggcgaaggccagcaacgaggcctatctgtacgccggcaacgacctcaatctgctggcggctcacgacgaaagctattcctactactcgaagaagaaaaaaggctcgttcgggcgcagcagtagccggatgagcgagagcgaagccagtaccgtggtgtcgtcgtcgatccaggcgggacaaggggcggaactggtcgccaagcgtgacgtcaacgtcgaggcctcttccgcctccagcacgaagggcgagctggcggtcgtggcggggcgcgatgtgaacctcacggcagctgagaacagctactccagcgtgtccgcgaaatccaagtccggaggcttggggctgtcatccaccagcaaggccaacgcccagtcctcttcctacaccagcgttcagggcgccacgttgagtggcgataccaccgtggtgcaggcgggaagggacatctcggtggccgccagcaatgtggtttctaccgggaagactgcgctgcgtgccggcaacgacatcatcatcgacagcgtggcggagacgtcggagtcgcatcgcagcgagtcgaagaagaagtccggcctgatgagttccggagggatcggcatcacgctcggcacggcgaagaatgcctcgacacaggacacccgtaccgtcgtcaaccagggcagcaccatcggcagtgtgctcggcgatgtcgacatgcgggcgggcaagaacctgtctatcacggcttcggatgtggtggccggcaaggacatcaacctcgtcgggcagaacgtgagcattctcgctgccgacaaccagaacgtcagcgagcagacccgcaagaccagcaagagcggcttgacgctggccttgtcgggaacggtcggtagcgcaatcgacgccacctaccagaatgccaagcaggccaggaacgaagacgacagtcgcctttccgcgttgcaggggatcaaggccggcttgagcggcgtccaggcctggcaggcagctcagcagaacggcggcatgacgggcgagaacagcgcgcagttcgtcggcatcagcgcttcgctgggctcgcagaagtccagctctcggcagcgccaggagcagcagatcagccagggaagcacgctcaccgccggtggcaacctgaacattatcgccacgggttccggggctgtcggcgaagacggcgacttgcgcgtgcaaggcagcaagctgcaggctggcaaggacctccaactgatcgccaaccgcgacgtcgtgctggaagccgcggccaatacgcagaagctcgatggcaagaacaagagcagcggcggcgctgtcggggtaagcgtcggcgttggttcgggcgaggctggcatcagcattttcgccaacgccaacaagggcgccggcaaggaaatcggcaacggcaccacctggaccgaaaccaccctggacgcgggccagaaggccagcttggtcagcgggcgcgacaccacgctgaaaggggcgcaggtcaatggtgaaagcatcctggcgaaagtgggtcgtgaccttaccctgcaaagcctgcaggatcgcgattactacgattccaagcagaagaacgtcggtggtggggcgagtttggctatcgttggccagggtggcggcgccaacttgagtctcagccagagcaagctgcattcgaagtacgacagcgtgcaggagcagaccgggctgttcgccggcaagggcggcttccaggtggaggtgggcaagcacacgcagctggatggcagcgtgatcgccagcaccgccgaagccgagaagaatcgcctgagcacaggctccttgggctggagcgagatccgtaacaaggccgagtacaagagccaacttcagagtgtcagtgtcagcagcgccaacgatggcgccggtgcgttcgtcagcaacatgcctagcggcatgctcattgcctacaaccacggcgatagtgccagcggtaccacgggttcggcgatatccgaaggcaccctggaggttcgcgatccggcgcgccagcaacaggatgtggcgacgctcagccgtgacccgagccgcgccaacgatagcgtcagtccgatcttcgacaaggagaaagagcagaagcgtctgcagcaggtccaactgatcggcgagatcggcacccaggccatggatatcctgcggacgcagggccaactcgacgccgacaaggcggcgcgggccgaactggaagcgcggggtatctccgcgccggacgccggcgccagcgagcggcaagtcgaggactaccgcaaagcgcttctgggcacgaatgcctaccaggacatcatgggcaagtacggcaccggaggcgactaccagaaggccgcccaggcggtgaccgcagccttgcaagggctggccggcggcgacattggctcggcgttggcgggagcttcctcgccctatgtggcgggcgtgatcaagcaggtggcaggcgacaatgacacggcgcggatcatggcccacgcggttcttggcgcggtggttgcgcaggcccagggcaattcggctgctgcggggggcgcaggagcggcggggagcgaactggcggcgcaggtgatcagcgagcgactgtacggaacccgggacagctcgacgctgaacgaagcgcagaagcagactatcaccgcgctggccagcctggccggcggattggccggctccgttgtcgatgggagcagcggaggagccattgccggggccgcaggcgggaagaacgcaacggaaaacaacttccttggcggcggaaccccgccgggcttgatcagctatggtcaggcagcgagctccttgaccgagtacatgcgcaagaacggggcgacagccgaggagatcacccaggcgcaacgtgatctggcccagggacagggcttcgatggcgtacagccagcgaatgagttcatcaaggcctggggcgaggccatggttgcggaggctgccggccttgggattgttgcggggttgggtaggtttgggttgtgggttgggaaaggggcgggagaaactgccatagccgttcccggtcgtgtccaatctcgtataaatattgccaatggccgcacagcaactacaccgcttcgcgataccggaaggccagtatctgcggggtttgaccatgttctacaagggcatttcggagtagaggtttccaactcacggtctgtgttcactatcactccgagtgaactgaaggatgtacttcagagcagccctgttgttaagtcaccagttatggcattgcctgatgggcaattcgtgaggaccgttgatgtaggtaaagtaattggcactaccaatttaaaggatggaggagtgcccacctcggtattaaaaatatttactgacagagctggtaatttgatcacaaccttcccaatcaaggcggtggattaa

SEQ ID NO: 366923 - DNA, 1650 bp, Pseudomonas aeruginosa
atgaccaatcccaagcgcggcgccattcgcgaactgctcgccctgctcaggccctttcgagcgatcgtggccgtctccatagcactgggcatggccggcggccttgccatcaccctgctgctggccagcatcaacaacgccttgcactcggaaaacggcctcggccaaggcgtactgctgtcgttcggcggactctgcctgctggcattggtcagttcgatcgtctccgacatcggtaccagctacgtcggccaacacatcatcgcgaagctgcgcaaggaactcggcgagaaagtcctctcggcgcccatcgagcagatcgagcgctaccggacccaccgtctcattccggtactgacacacgacattgataccatcagcgacttctccttttccttcaccccactggccatcgccctgaccatcactttcggctgcctgggttacctcgcctacctatcggtcccgatgttcctgctgacagtcgtcgccatcgtcatcggcacggcagcccagtacctggcgcgctcccgcggtttcaaagggttctatgccgcccgcgatctcgaagacgaattgcagaagcactacaccgccatcgcttcgggcgcgaaggaactgcgcatccaccgcccccgtcgctatcgcatgcacaccggccgcatcagcgaaaccgcgaacaacatccgcgacctccacatcagctccatcaatatattcatcctggccaagaccttcggctcgatgctgttcttcgtggtgatcggtctggcgcttacgctccaggcctactggccttcgtccaatccggccgccatcactggcttcgtgatggtcctgctgtacatgaagggaccactcgaacaggtggtgaccatccttcccatcgtcagtcgcgcccaggtcgccttccagcgggtcgccgaactttccgagcgtttttcctctcccgaaccccatcttctgctcagcgaacaggaggccccggacaagaccgtcgacagcctggaactgcgcgacgttcgctacagcccccccgccgtcgaaggcagcgaaccgttccatctgggccctatcaatctgcgtatcgcccaaggtgacatcgtcttcatcgtcggcgagaacggctgcggcaagacgaccctgatcaagctgctgctcggcctctatcgcccgcagtccggcgagatccttctcaacggagaaccagtcagcgcggagacccgcgacgattaccgccagctcttcagcaccatcttcgccgactactacctattcgacgacctggtccagggcaagcaggcttcgttgcagaacgcgacccaatatctgcaacgcctggaaatcgcccacaaggtcagcgtcatggacggcaacttcagcaccaccgatctctccaccgggcagcgcaagcgccttgcgctgatcaatgcctggctcgaagagcgaccggtcctggtcttcgacgaatgggccgcagaccaggacccggctttccgcagggtcttctacaccgaactgttgccggacctgaaacgccagggcaagaccatcatcgtgatcagccacgatgatcgctatttcgaaatggcggaccagttgataaggctctcggcaggcaaggtcgtcaaggaaaccgagacggcgtga

SEQ ID NO: 366924 - DNA, 501 bp, Pseudomonas aeruginosa
atggctgaacattccaatgaacatcaacatcacacatccggtcagatgggtaagcacggccgaccatacgccaagttctgggtgaacatggtgttgggcctcgtcgtcatgtacttcgtaatgttcagcatgatcgacggcgccagggacttcagaaacaatctcaacatgctctacatggcggtcactatgtgggcgccaatgggcatcttcatgctagcgacaatgcccggcatgtttccaaaccggcggctcaatctcgtgctgtacggcttgtttgccgttctcacactcggttcttttgccgctacccgtgctcaaaccggaatcggcgatcgacagttcatcgcgtctatggtcccgcaccattcgggagcgatcctcatgtgccgcgaggcgcagctctcagatccggaactcgtcaacctatgccaagcgatttccgatggccagcgcgcggagatcgagcagatgaaccggattgctgcacgccttcgttga

SEQ ID NO: 366925 - DNA, 747 bp, Pseudomonas aeruginosa; identical to SEQ ID NO: 323900

SEQ ID NO: 366926 - DNA, 213 bp, Pseudomonas aeruginosa; identical to SEQ ID NO: 323901

SEQ ID NO: 366927 - DNA, 876 bp, Pseudomonas aeruginosa
atgcaggtcgtgtccatcatttcaacgaagggcggcgtcggcaagaccacgacggccgccaacctgggcgggctcgccgcggacgcgggcctgcgcgtgctgctgctcgatctcgacgtgcagcccaccttgtcctcctactacgaactgacccagcgcgcgccgggcggcatctatgagctgttggccttcaacgagcgcgaccttggccagctcgtgtcccgcacgatcatcgcgggcctggacctggtgctgtccgacgaccaccggggcgagctgaacacgttgttgctgcatgcgccggatggccgcctgcggttgcggcatctgctgccagcacttgctcccctctacgacctggtgctgatcgacacccagggcgcgcgttccgtgctgctggagatggcggtgctcgcctccgatctcgcgctgtcgcccgtcacgccggagatcctcgcggcacgcgagctgcggcgcggcaccatgcagttgctcgaagacattgcgccgtaccggcacctgggtatcgaaccgccgccgctgcacttgctcatcaaccgcgtccacccggtgtccgccaacgcacggctgatccagcaggccttgcgcgacctgttccaggacagcgccggcatccgcgtgctcgccaccgacgtgccggccatagaagcgtatccacgtgccgcaacgcgcggcctgccggtgcatcgggtcgagcaccgccagccgcccggcagagtcgcccctgccgcgctcgacacgatgcgcgcgctcgccagcgagttgttcccgcaatggcaggaccgactggctcaagtatccggccgcccgcagcgacctcttgatcctgggaggccccatggcgaacgcacatga

SEQ ID NO: 366928 - DNA, 270 bp, Pseudomonas aeruginosa; identical to SEQ ID NO: 323903

SEQ ID NO: 366929 - DNA, 1680 bp, Pseudomonas aeruginosa
atggctgacatgacctcgcaggacatggcaggcaagctgctcgcggccggcttcgagcgcagcggcccagcggctacggccttgagcgacccgatcgcggacacgcccatggtcgtgacgctggaccagttgcggccctacgaccatgacccgcgcatgaagcgcaacccggcttacgaggaaatcaaggcatccatccgcgagcgcggcctggacgcggcgccggccatcacgcgcaggcccggcgaggaccactacatcatccgcaacggcggcaacacgcgactggcgatcctgcgcgaactctggtcggagaccaaggaagaacgcttcttccgcatatcgtgcctgttccgaccatggccggagcgcggtgaaatcgtcgcgctgaccgggcatcttgccgagaacgaactgcgcggcggcctcacgttcatcgagcgcgcgctcggcgtcgagaaagcacgggagttctacgagcaggagagcggcgccgccctgagccagtcggaactggcccgccgcctggcggccgatggcttccccgtccagcggtcgcacatcacccgcatggccgacgcggtgcgctacctgctgcccgccattcccaccgtgctttatggcggccttgggcgccaccaggtcgagcggctgtcggtcatgcgcacggcctgcaaacgcacctgggagcactacgccaaggaccgctcgctgccgctggacttcgacagcttttttcaggaggtgctggcgcagttcgacacgcagggcgacgagttcgcgccgcagcgcgtgcaagacgagctgatcggccagatgtccgagctgctgggcatcggctacgacgtgctggcgctggacctgaccgaatcggaaagccgccaccgggcgctggtcagtgacccgacgccacctgcggcgcagccggcgttgccttcgcccaccgccggcacgccgactccgccgggcgcagcatcgtccatcgccacgcctgcagcggcggccggtcctccacccgccagccctccggcgtccgagcccaccttgcgccacgacgacacggcggttggcgaagcggccacgggaagccagccggccgcaccgggcgatctgcttcgcgagcacatcgtctcgccagcaccgacgacagaacggctccaatcgatccagcgcatggtcgccgaccagttgggcgatgcgctgccgcccgacttctcggcgagcgtgctgcagtccatcccggtgcaagccggcggactctatccgatctccgatgtctggtacatcgacgccggcctggacacgcccgatcggctgcgcatccacatcgcgcagttcgcgcgcgagatcgccggggaggcaggcctggacgagtgcatcgaggatcgcgccgatggcatcgggtttgcgtgccgcgcccgcggccaagccccgtcgccgctcggccgcgcggtgctgacgctgctcacttccctgacgggtcagcccgtcgccgaagcgggcctggacggcgcgcagctcgccgccgacctgccgaccctgttgcacggccagagccaaggccatggcagcggcgcaaggcgcttgagcgacaccgcgttggtcaagctctttcggctgctccgcttggcccggcgtctgctggacctggaagccggcaccacggcgcccgggacgtga

SEQ ID NO: 366930 - DNA, 561 bp, Pseudomonas aeruginosa
atgtccacatcgcatccgctcaaccaggccgtgattgcccaggcgctgtatgaccttcgcaacggccaactgcgccgctgcaaggccatgggcttcggcgaggccgagctggatgcgctcaagcaccccgcgctgatcagcgtgctggccaacgccagcgtctcgtggtgctcggtcacggtcaaccgcgaagtgctgcagcgcctgctcaaccaggcacaggacgtggagaaggaaatcgccacggtcgatcgcatgctgcggctgggggccagcacggagatggtcagccgcttctatggcctgacccatcaggaagtcgccctgcggcgggagatcctcggcctgcccaagcgcaaggggcgccaccccgtcctggacgagacccaggacaccgaactgtggcggcaatggaaagccgtgaccagcagcaggaacgtcgatctggaggacgagacctcgattctcgatgcggccatggacctggccgagggtatgtcactgccgctctcggtggtctgggccgcgatcaggaactgggtcgatcagggattgggctag

SEQ ID NO: 366931 - DNA, 1239 bp, Pseudomonas aeruginosa
atggccgtggacgacaccgccccacgagcccagcgccctggccccatcgcactcgccgacctgttcgacgctgcgctgaaggacctcgcgcccaagtccagctctggcgctcccgcgtccctgcctgctccaacgcccacgcctcctacgtccggcgacgccttcctgttcagtggcaatcggcacgagagcgtgccgcggcggctgttcctcgaccgccgcctgacaccgctggagcgcaacgcctggcaggtgttccgattgatgctcaacgacgatggcgtcacggcatttcccacctatgagcagttgcgcccctggctggcgtcgatgccctgcgcaggccaggcctcccatgagaccgtggcgcgggcgctgacgctgctgcgcctgacgcgctggctgagcctcgtgcgacgacggcgcgaccccaagaccggtcgcatcctcggcaacctctacgtcctgcacgacgaaccgctgacgccgttcgaggcgatgcaactcgacgccgactacctggccctggtcagccagtcgctggggcattcggccaaggccgtccaggtggtgggactcaacaccctccaggagatcgcggacgacccgatgctgtccggacgcaccttgccgtcgcggctgcaagtgctcgccgagcgcctggccgaccagggcatcaccgcctccgaaagttatccacaggaggatgcggtccacgattccgaagaagggcccgcgagccttcttcggaatggcgatcgcccatcttcggaatccgaagcagggccgaaacccgcgccagacggcgctcttcggaattcgaagcaggaccgtacagtacgtagtagtcgtattgatgaagtacgtactaccgcgcaggcgcgtgcgctgggcgacctgcaatggcccaagcgcttcgcggaactgaaggcggaacagcaggccggagccaagatggcgttgcagcaggtggacgctgccctgcggcaggccgtgctggacgaatgggccgcacggtgcggcaagcatggcatccgcaaccccgccggttatctgttcggcatcatccagcgcgccatgcgcggcgagttcaatgcctgggccaagcagaccggcccggcaccgccaacaccatcggcggcgcgagcgccaccatccgagccgccgcgcaacgtcgtgccgcccgaggtggcccggcagcacatcgagcgcctgcgcgatctgctgcgcaaatcctga

SEQ ID NO: 366932 - DNA, 465 bp, Pseudomonas aeruginosa
atgctgatcggtgcgctgctggttctcacctgggtcatcctcctcgtccgatacccggccaaggccctgccggtctccctggcggctctcgccgggctgggcctggtggcggcctgggtgatctggcaggacaacgacgaaagccgccacctgcaacgccaggaactgcgcctgagctatgcgccggaacgctgtccggtggaccggccgctggcggtcgaactgaagaacggcagcgaccgtccgttgctggagctacgctggaggatcgccgcctaccgccccggcgacagcgtcaacctggccgacaccagcttcgacagcccgcgctaccgggcgccgaacgccctgctcggcggcgacagctggcacgattgcctgccgctgccgccgctgcgtccgggctatcgcgccagcaccctggaattccgcgccgaacgcctggacgggcgtttcggcaactga

SEQ ID NO: 366933 - DNA, 252 bp, Pseudomonas aeruginosa
atgagcatcgaagtcagcgagcagaaactggagaaagagctggacctgcttcggcggctgatgcgcagcatcgaccagggtctagatggtatggattacgtgatgggcggttgctcgcatatggtcttgtcgctgtgccggctcgggctgatcaccggcgaggaaaagctggctctgctggacgaagtgcagcagctgtaccgcaaggggctggacgcgcgcgcggcgaaggtggctggcggctacgcataa

SEQ ID NO: 366934 - DNA, 1029 bp, Pseudomonas aeruginosa
atgcctagatgctgcgatcgatgctttcaagactcagtagtagtagcaaaaattatttctgaaagagaaataaaccgctgtagctactgcggtacaaatcaggtttcgtgtatagaccccacgaagctctccgataaacttgagttgttcacttacggtttatctgaagacgcaaatggctattcgtttactgagattctagccttctatggtcttttcagtgagaaggttcgtgagccagcagctttagtagacgatatatttggaaaaggggcttctgaaaagcgattttcgtttgacttcgatgttgccagctattcagagcaatggaatgaattcaaacttgagcttaagcataaaaatcgcttttttccaaaggcaacaattcattcatctctattcagtagatcgaattccgatagagcggaaggagttttgtttcagctacttgaacaactaaagaccccaataaatgaaagagatagtttcttcagggctcgtatttcagaagagcctctgaaggctgataaaatgggttgcccaccatgcgaaaaggttacgggagggagggctaacccattgggaataccctacctatacgccgcagacaccctgcagacgtgcattagcgaagtacgtcccagcaattctagctgtgtatatgtttcgcaaatgaggccggtgcgtgaactttctgtattagatttaacctcacctagaaggctatgctccgcttctgctttcggagaagagcaattagcagctgtattgggtttcgtgggacttcttgagctgttttcggaagagttgtcgaagcctgttattcctgaaaacggaaatctagactatataccgacacagttcctttgcgagtttataaaaagtgaagcgaaatttgacggattaatttttaacagctcatttgggaatggaaagaactttgtgttctttgacggtaaaaccttagtccctgctgagcctctgaaatatatagtcaataagaccgcgcatgagtatgagcttggataa

SEQ ID NO: 366935 - DNA, 888 bp, Pseudomonas aeruginosa
ttgttcaccataagggatgcagcgaggcttttctcaagcaaacgaatagctgagattgcatctggagacttttcctatttattaaaaatagctgctgaatataagaactcatttgaccagaactttactgcggcggacatcatagatcacgtttactcggagctttacaagggctatcggagtgagtattttttcaagaataccgtagccgaaagaatacttctaggacggcactccttaaacactgcgaccgtactgccagagtttagagttgggcgaagcaaggctgactgtgtaatccttaacggaagctccacttgttacgaaataaaatctgactttgataatcttgacaggcttccagagcaactatcatcttataggcggatttttgacaaaacctatgttgttgttgggaagtcacacttatccaaagtggaagacttgtgcggtgatgatgttggaatattggagcttacaccgagaagaagtttacgcaccgtcagagaggcaaaaatctcccgagcccccgtagatatctcgatattgatgcgctcgctgcgagcaaatgaatataaagaagttgtttcaaaggtttcatgcgaaagtcttgattatccgaatactgaaatattctcagtttgcgaaaatatattgaaaaactcgccatcggatgaagtgagaaaagcgttctgctctaccttgaagcaaagtagaaagattgcaaaggattatctatcttctcttcctcgctcgttacttatggccgggataggctttaagcttagctctgagcaacgacgcaatcttgtggaaaacttaaacaaaagctttagtaaggatgctctatgtactacccaattctacgaggcaaacaatttgagctaa

SEQ ID NO: 366936 - DNA, 603 bp, Pseudomonas aeruginosa
  misc_feature (587)..(596): n is a, c, g, or t
atgctagcaagactttatctaaataacttcaagtccataaacatggagcactcaatcgagctcgctccatactcaattctttgcggggcgaatagcagtgggaaaagctctataatacaagcgatcctattactctgccaaacctttggcggtcgcttccaaacagagtccctgatactaaatggcaacctaactagactaggctcttttcatgacataaaacgtcacaggaccgacaacgaaccaattaccattagcttcacaataacccccaggatatatacgcacgaggaaatgaccatatcgtgcgagattatatttggcaggacacagagacaaaaaacaaaactagaagatgattatcatcctgacattttaagcataaaatgccaagtaatcacaaagaacgaaggaattgagcagtcggactatatgcatgttcgacaaccgaagcctggagagactactaggcaggaatactacgttgtagagcacattgaactatccaaagacagcaagcttgagaaggactatccgaactataaaatactaggatgcaaaaagaatcaaatcatcccatctgaacnnnnnnnnnncatctga

SEQ ID NO: 366937 - DNA, 156 bp, Pseudomonas aeruginosa
atgccggcggccatgtggctgccgctgctggtgatggtgctggcgttctacctgttctttgccggcgtgctgctgcagcgcatgcgtctggaagtgctcaggcgcgaatggcgcagtcgctgggtacgcctggaactgggcgaggagggcgcgtga

SEQ ID NO: 366938 - DNA, 519 bp, Pseudomonas aeruginosa
atgacgcgcggccgaaagatcctgacctggagcctcgccagcctggtcctgctgctggcggcgttggtggtgttcatcgccaccttcgactggaacctgatcaagcccaccctcaacgaaaaggtctcggcggcgctgaaccgcccgttcgccatcaacggcaacctcgccgtggcctggcgccgcgaggagggcgaggaaggctggcgcgcctggatcccctggccgcgcttcagcgccgaggacatcaccctcggcaacccggagtggacggcgggcaagaccaaggcgagcgagttcgccagcctggaacgcatcgaattccgcctcgcgccgttgccgttgctctggcagaccatccgcattccacagatcaagctgacccagccgcgcgccgacctcctgcgcctggccgacggccgcgccaactgggatttcgacctgcctgcctgccagcgacagcgacgagccgtccgcctggcaactggacatccgcgagatcggtttcgacaagggtag

SEQ ID NO: 366939 - DNA, 726 bp, Pseudomonas aeruginosa
atgagccccacccagccccacgacctggccctctggtgccggctgctggacgacgcgggagagcgtatgcgcaaccctctggcccactaccgcgccgtgcaggctgaggccgacagcctgctggcccgccacaccatcagccccggcgagtatcacgaactggccgacctcgctgaggccgcctaccagcacgcgctcgagatgaaagctggcgagatgtttgagcaggctgcggtctatgacgtgatcgacctgcagacgggagagcgaacgggtgtcatcactcgcggcacttacctcctctgcgatcccgcagcgcgccggacgttctcgtcggtcgacggcctggtgcgctacgaccgtgaggggcagctgagcatggtggagatgaacggggacagccttggccctatctgcggcctcacctgggtgaaccggagcggcgcggctttcagcctgctgaaggtcaagagctactgcgacggccagtcggtgccgcacctgggagatatcgaggcgtgccggatggcgctcagtaggcttgagctggcacgcgaggagaacgacgcgccgacggcacagcggattcagcaggcactggcagcagcgccattcggactgtgcccggcttgccgcgaccgcttcgacctggtcgacgactgcatacgatgccgaggccaggggatagtcagccgagccgggcgccattggtcgccaacccagtaa

SEQ ID NO: 366940 - DNA, 1038 bp, Pseudomonas aeruginosa
atgagcaccgcaacgcgccaggaactggctaccaactcgaacgccgcccagggcgaactacgaccgcggcaggcgtccatggatgccttcaccttcggggagccgactccggtgctggatagccgcggcatcctcgactacgtcgaatgctggtccaacggacgttggtacgagccgcccctgtcgatgtacggcctggccaagggcatgcgctcgagcccctacgtccagtcggcgctgatgttcaagcggaacatgctggccaagaccttcatcccgcaccgcctgctgagcttggcggcattcgagcaattcagcttggactggctgaccttcggcaatagctacctcgagaagcgccgcgcgcggatgatgaacaccctgtcactgcagccaccgctggccaagtacatgcgccgcggcgtcgaggacggcgtctactaccaggtgctgggctggaaggatgagcacgaattcgaggccgggagcgtgttccagctccgtgaggcggacgtcaaccaggaactctatggcatcccggagtggttctgcgccctgcagagcgcgctgctcaacgagtcggccacgctgttccggcggaagtattacaacaacggcagtcacgctggtttcatcctctacatgaccgacgccgcccaggatcaagcggacatagacaacctgcggaccgcgctgaagaacgcgaaggggccgggcaatttccgcaacctgttcgtctacgcgcccaacggcaagaaggagggcatccagttgattccggtcagcgaggtggcggccaaggatgacttcggtgcgatcaaaaacatcagccgtgacgaccagctcgcggcgttgcgtgtctacccgcaactattgggggtggtgccgcagaacgccggggggttcgggtcgatcaaggaggcggcggaggtgtggaccaccaacgaactggagcccatgcaggcgcggctgcgccaggtgaacgaatgggtaggggaggaggtgatccgcttcaaggaagtcgcgccgccggcgtag

SEQ ID NO: 366941 - DNA, 1767 bp, Pseudomonas aeruginosa
atgaatgtgaccgccgaaatccctgtccgagacaaccgccgccaggccaaattcctgtactggatgggctggcgtgtctgcgatatcgccgacttcctgagcgagaaggaaaagacccttcacagctggaaggatcgcgacagttgggatcgggccgacagcgtagaacggattggcggcgcgctggaagcccgtctcgtccagttgatcctgaaggaggggaagaccagcggcgatttcaaggaaatcgacctgctgcaccgccagttggagcgccaggcgcgtatccagcgctaccaggacggcggaaccgagacggatctcaaccccgaactggcgaaacacaatgcggcgccgaagcgcaagcccaagcgcaagcgcaacgatatcgacgaggacctggtcgagaagctgatcgaggcgttcctcgaccagagtttcgactaccagaaggactggtaccgcgctggagagatgcgcactcgggtcatcctgaagtcgcggcagatcggcgccacgttctacttcgcgcgcgaggcgctgattgacgccctggtcaccgggcgcaaccagattttcctgtcggccagcaaaaatcaggcgcacatcttcaaggcctatattcaggccttcgcccgtgaagtggtgggagtggagctgaccggcgacccgatcaccttgcccaacggcgccaacctctacttcctcggcacgaacgcccgcaccgcccagggctaccacggcaatttctacttcgacgagttcttctggacctacaagttcaacgagctgaacaaggtcgcgtccggtatggcgatgcagaagcagtaccgccggacctacttctcgacgccctcgagcatggcccatgaggcctacaccttctggaccggcgaacggttcaacaagggcaaaccgactgcacagcacgtcaagatcgatgtctcgcacgatgctctgggccctggccggctgtgcgaggacagcatctggcggcagatcgtcacgatcctcgacgccgagggtcgtggctgcgacctgttcgacattgaggagcttcggcgtgagtacgacgccgaggcgttccagaacctgctcatgtgccagttcgtcgacgatggcgcgagcatcttcccgctgtccatgctgcagcctgggatggtcgacagctgggtcgagtgggctgaggactacaaacccttcgcgctgcgcccctttggcgaccggcaggtctgggtcggctatgaccctgcggagaatggcgacagcgctggcctggtggtggtggcgccaccgctggtaccaggcggaaagttccgcgtcctcgagcgccaccagttccgcggcatggatttcgccgctcaggccgagttcattcgcaaggtcaccgagcgctactgggtaacctacatcggcatcgacaccaccggcatggggaccggtgtagcccagctggtgcgcaacttcttcccaggcctgaccaccttcagctactcgcccgaagtgaaagtgcgcctggtgatgaaggcctgggacgtgatcaagaacggacggctggagttcgacgccggctggacggatctggcgtcgtcgctgatggccatccgcaagaccatgaccgctggcgggcggcagttcacttacaccgccggccgcaacgacaacaccggccacgccgacctggcgtgggcattgttccacgccctgcacaacgaaccgctcgagggccagaccaaggccaacaccggattcatggagagctattga

SEQ ID NO: 366942 - DNA, 852 bp, Pseudomonas aeruginosa
atgtcgacccccgccaagaaattccgctccaactggttccgcgtcgccgtagaaggtgcgacctcggacaaacgcatcatcaagcgcagctggctggagcaagccgccaaaaacttcgaccgtagtgtctacggcgcccgcatctggatggagcacttccgcagcctgctgccggacagcccgttccgtgcctacggcgacgtcctggcggtaaaggttgaagaggtcgacatcgccggccagaagaagctggccctgttcgcccaggtcgagccgactcccgacctgatcgccatgaacaaggcaaagcagaagatctacacctccatcgagatcgacgattccttcgcggacaccggcgaggcctacatcgtgggcctcgccgtgaccgactcgcccgcgagcctgggcaccgacgtgctggcgttctcggcgcagaaaccggagtccagccccttcaaggaccggcactactccgaaacctccatgttcaccgagtccatcgaagtcgagggcctcgccttcgaggaagtggaagacccgaaaaccggggtcggcgccaagttgctcagcagcgtgaaagccctgctcagtggcaaacaggctcagaccgacgagcagttcagccaggtcgccgaagccgttgaggcagtggccgatcacgtcaaggacctgccggagaagttcgccagcctggaaggcaagcaaggagagcaggacggcaagctcgtccagctcagcaaggacctggacgagttgaaacagaaactcagccacacccccgatccgaagcagatccagcgccccgtggcaaccggcggcgacaaatcggtcgagaagaccgactgctga

SEQ ID NO: 366943 - DNA, 1014 bp, Pseudomonas aeruginosa
atgcacaaagatacccgccgcctgttcaacgaatacctcggccagctcgccgcgctgaacggtgtagacgacgtcaccacgaaattctcggtcgacccgaccgtcgcccagacgctggaaacccgcattcaggagtcgagcggcttcctgcagcagatcaatatcctcggcgtcaccgagcagtcgggcgaaaaagtcggccttggcgtttccggcccaattgccagcaccaccgacaccaccgcgcaagaccgtcagacccgtgacgtgaccgtcctcgacaacctgggctacctctgcacccagaccaacttcgacagccacatcacctacaagaagctggacgcctggcgcaagttcaaggacttccaggcccgcattcgagacgcgatcctgcgccgccaagccctcgaccgcatcatgatcggctggaacggcaccagccgtgccgccacctcgaacatcgccaccaacccgctactgcaagacgtcaacgtcggctggctggagaagatgcgcctcaccaacgcggcacgcgtgatgtccgagggtgacaaggaagccggcaagatcctgatcggcgctaccggcgacttcaagaacatcgacgccctggtctacgccatggtcaacgagctcatcgagccctggtaccaggaagactccgagctggtcgtcgtgtgtggccgcgagctgctggccgacaagtacttcccgctggtcaacaaggatcaggccccgagcgagcagctggccgccgacgtcgtcatgagccagaaacgcattggcggcctgccggccgcacgggtgcctttcttcccggccaagggcctgatgatcacccgcctcgacaacctgtccatctactggcaggaagagagccgccgccgtcagatcgtggacaacgccaagcgcgaccgcatcgagaactacgagtcgtccaacgactcctacgtgatcgaggacaacggctgcgctgcgatggccgagaacatcgagctgcaggtcgcgtga

SEQ ID NO: 366944 - DNA, 696 bp, Pseudomonas aeruginosa
atgaacctctgccgccgccattaccagcgcgtcaccgccgcccaagcggcggcggaggccgctggccccacccagactatggccggtctgaccgcctacgaactccaacttgcccagctcatccaggaccgcgcccgcctgaagggcatccagtccaccgaggggaaaatcgagctgaagcgtcagcttctgccggcctacgagccctacgtcgagggcgtgctctcggctggccagggcgcccaggacgaagtgctggtcaccgtgatgctctggcgcatcgacgcaggcgatttcactggaggtctggacgttgcggcctacgtgttcaagcacggtctggtgatgccggaccgcttcaaccgcaccgtcggctgcctggtggcagaggaagtggccgaaggcgccatcaaggccttgaaggccggccagccattcgacattgccgtgctgctgcgcgctgccgagctgaccgccgagcaagacatgcctgacgaggtccgcgccaagctgttcctcgccctcgcgcgcgcaacgctcaccggcctggatgccgacaatcccggcaagcctgggcaggtcgatgaaggtatcgccctgctcaagcgcgccatcgagctgcacgacaagtgcggcggcaagaaagacctggaagccgccgaacggctccaaaagaaactggcccccgcggcctga

SEQ ID NO: 366945 - DNA, 465 bp, Pseudomonas aeruginosa
atgagtgcattcgtagccagcggcgacgtggccgccggcgtgaccatcaacagcgacgaattctggccgggcatcgacgtcgacgacctgcgcgacgacatgcgcatcggcgccgacgtcagcccggccaagctggagacagcagtggttgccgccctgctgaacgtcaaccgtcagctcggcgaatggcaggccatgcaggaggatcagggcttcaccgccctgagccaggtaccggcaaagcaggtaaacggtacgtccgccctggtgctgcagtatcagcgtgccgtgcgctgcgccacggcagccgagctgctcgagcgctaccgcggctacgacaccaccaacatcggcaaccagaacgccgaagaacgcaccccgaccatcgacgaataccgccgtgacgtggcctgggcgctcagcgatctggtcggccgtccacgctccaccatcgagctgatctga

SEQ ID NO: 366946 - DNA, 213 bp, Pseudomonas aeruginosa
atggcagccctcctccgcactcagcagtacgacaccgtcgagtccctgtgctggaggtactacggccgcaccggaagtgtcaccgaggccgtgctcgaagcgaacccagggttggccgactacggcccgatcctgccgcaagggatcgaggtaaccatgcccgatgcccagaacaccgcccccacacagcaggtagtgaacctgtgggattga

SEQ ID NO: 366947 - DNA, 354 bp, Pseudomonas aeruginosa
atggctgatccaaccaccaccgcggccggcggtctcctgatggggctgggccttggcgccacccttcacgtcgacggctacgtgctgttcggcgccctgctcggcgcctggattaccaccagcagccgccacgacttcaaggtctggacgcgcatgttcgcgctgatccttccgacctgcgttgggtatctctccgcgggcccggcactagcccaacttccctggctcaccacccgcgaattcgctgccctggtctgcgccgtggtggtcatccccctgatcctcaaggccgcagcctggctggacaagctcgacttcggcgagattctgcgccgcattcgcggagggagctga

SEQ ID NO: 366948 - DNA, 273 bp, Pseudomonas aeruginosa
atgttcttcctgatcatcccgctcatcaccgccctggcatacctggccggcgctgtgcgcatcgcttgctttcgcaggggagcagcgcgctaccgccgcggcatgtcggtagtcgccagcctgctgggggcatccatggccatctgcggcctggaaatcctgttctaccgcccaccggtcagcatctggcacggcgtcactgcctgcctgttgtgcctgctgatcttccgttcccgcggcaacgtagccgctctgctgaggccttccacatga

SEQ ID NO: 366949 - DNA, 837 bp, Pseudomonas aeruginosa
atgaccatccttcgccacggcgaccgcggacaggatgtccgcaccctgcagaaccggctcaacgaccgcctcaaggctggcctggacaccaccggattgttcgacgacgccaccgaggcagccgtccgcaccttccagcgcggcgccggcctggtcgacgacggcatcgtcggggccaagacccaggccgccttgactggcctgggtactgcccagttgcttggcgccggcaacctcgctgcagccgcccaacgccttggcctgccgctggccaccgtctatgccgtcaatgaggtggaatcggccggcgccggcttcctggccaacggcaagcccaagatcctcttcgagcggcaccagatgtatcgccagctctgcacgccccggagccccgacgacgatgcggcggagctgaagcgccacgccgatgagctggtcgccctgtcgccgtccctggtcaaccccacgccgggtggctatgccggcggtactgccgagcatcagcggctggcacaggcccgcatgatcgacgacaccgccgccctggagtccaccagctggggcgccttccagatcatgggttaccacgccacacgcttgggctatgagagcgtgcaggccttcgccgccgccatggccagcggagagccagcccagttcgacgccttcgtccgcttcatcgaggccgacccggccctgctcaaggccctgaaggcccgcaagtgggccgatttcgccaagctctacaacggcccggcctacgcccggaacctgtatgacgtgaagctgcagcgcgcgtacgaacgctacgccgaaagccatgcggaggtcgcatga

SEQ ID NO: 366950 - DNA, 282 bp, Pseudomonas aeruginosa
atgaccagccggcccgctactccgccgaaagcaccgccgccggcaccgaccagcaggtcggtggttcttgagcagcgaatcgacctcgaccagctgcgccgaatcgacccgcaggacggtgacgtcctggtgctgcccgatgacttcccacgggaagactttcgcgcactagccgaggctctgcaggtcgccaagccagggatcaagtgcctgatcgtgcgaggcgatgtccgccgcctcgacgtgagcgaaatgaaccgcctgggctggtaccgggcgtga

SEQ ID NO: 366951 - DNA, 444 bp, Pseudomonas aeruginosa
gtgagcacgctgcgccaggcgctttacggtattgcgctgctgggcgccctgggcctgctgctgtggggctaccaccagcgcgatcaggccgctgccgctaccttggccctggccaaccagcagcgggaggatgccgacgcccgcaacgaacggcaggccagcaccatcaccgccctgagcggcagcctgaaggctgagcgcgaggcacaggtaggcctacgcaccacgcaaaaccagctccgcgagaggctggccgaccgacaacgtcagatcgaggacttgaagcgtgagaaccaggaactgcgcgaatgggctgatcagttgctgcctgatgctgctcgccgcctgcggcagcgccccgccctcaccggagcagacgcttatcgcgactggctgtccggtcgtggtgccctgccaactgccggcgaccgctcccagccgtaa

SEQ ID NO: 366952 - DNA, 534 bp, Pseudomonas aeruginosa
atgtacaagcccgatagcctccgcgccaccttgctggcctcggttccgcagctcaagcacgaccatgagcggctgctgatgttcatcgaccagggcagcgtccgctgcaccgccgccgcgtccctgtcgtatgagtacgcctacagcctgcagatcatcctcaccgacttccccggctcgcccgacgccgtgatgctgcccctgctcggctggctgcgcgagcatcagagtgagctgctggccaacctcgacaaggtggacaaaggcattgagttcgaggtcgacatcctcgacaagtcaaaggtcgacatggccatcaccctgccgctcactgagcgggtggtcgtcaagcgccttgaggacggcacctacaacgtcgttcacgccccagagccgcagtaccaggtctacgagaactacggccccatgcagttcatcgccaacggcgagctgctgacagagtggacgccaccgcctgcgccagatgccatggcgctcgtcactccgcacccgcgccgcccgagcgatggctga

SEQ ID NO: 366953 - DNA, 459 bp, Pseudomonas aeruginosa
atggctgatccgctcgactccctggaagactgggccggccccattctgcgggctctggagccggcacagcgcaagaacctggctgccgacctggcgcgtcgcctccgccgcagccagcagaagcgcatcgccgaacagaagaaccccgacggcagcccctacacccctcgtaaatcgcgcgacctgcggggaaaggtcggacgcatcaagcgccgcgccgcgatgttcaccaagctacgcaccgcccgctacctcaaggccaagggcaacgccgaggccatcgtcctcagcttcgccggccgcatctcgcgcattgcccgcgtccaccagttcggcctgaaggatcgtgccgagcgaggcgcgccggacgtccgctatcccgaacggaagctgttcggcttcaccgacaccgacctcgacctgatccgcgacggcctgctcgagcacgtcgagctgtaa

SEQ ID NO: 366954 - DNA, 585 bp, Pseudomonas aeruginosa
atgctcggcgccatgactgacttcgccgaactctcccgcctcatcgaaaacctggtccgtgtcggcaccatcgccgagatcgacctggtgaaagcccgcgtgcgcgtgcgaaccggcgatctgctcaccggctggctgccttggacggcggtgcgtgccggcgcagaccgagactgggacccgcctaccgtcaatgagcaggtgctgctgctgagcccatctggccagttggcgaacggtgtggccatcactggcctgttcagcacccagcaccccgccaacggcgaccgcgcaaacctacaccgccgcacctactccgacggcgccgtgatcgagtacgacagccaggcccatcacctgagcgcccacctgcccgccggcggcaccaccgagctgatcagcgacggcggcgtccacatcgtcggagacgtcaccctcgaaggcgacctcattcagaccggcaaccaacaggtcaccggaaacgtccaggtgagcatcgacgtggtcgccgcaggtatcagcctggtgcaccacgttcacggtggggtgcagggcggtggctccaatacgggggtgccgaagtga

SEQ ID NO: 366955 - DNA, 345 bp, Pseudomonas aeruginosa
gtgaaccgcaccactggcagcaccatcggcaccctcgcccacatccgccaatccattgcggacatcctcacaacccgcatcggtactcgctgcatgcgccgcgagtacggcagccagttgccggagctggtcgaccaacccttcaacgacgccacccgcttgcgtgcctactccgccaccgttatcgccctgatgcgctgggaaccgcgcatccgcatcagccgggtgcagttcaacggtatctccctgcagggctccgtggtgctggagctggaggccacgctggtggatagcaacgagcaacagaacatcagcatcccgctgagcatgggcgcctcggtatga

SEQ ID NO: 366956 - DNA, 915 bp, Pseudomonas aeruginosa
atgagcatcaccttctccgccatcgatctgagccaactgcctatcccggaggtggtcgagcagatcgacttcgaaaccatcctcgccgagcgcaaggcctacctggtcagcctgtacccagcggatcagcaggcggaaatcaccgcgcggctggagctggaatctgagccgctcaccaagctactggaggaaaacgcctaccgcgaattggtctggcggcaacgggtaaacgaggctgcgctcgccaacatgctggcctacgcggccggtagcgaccttgagcagctcgccgcgaactacaacgtcaagcgcctggtggtcaccccaggtgatccctctgctgtgccaccggtcgcggaggtcctcgaggacgacgacagtctgcgcgagcgcgcccagatggcttgggaggggctgagtaccgcgggcccacgcaacagctacatcttccatgcccgcgcagctgacggtcgggtcgcagacgctacggcatccagcccatcgcccgccgtggccgtggttaccatccaggcactggccggtaatggcaccgcaccacccgatctgattgccgccgttcaggcgtacctcagcgatgaagatcgccgccccgtagccgatcgcctgaccgtccagggcgcccaggtgctgccgtacagcgtcaccgcaacgctctacctgaacaccgcaggcccggagtcggagccgatcatggaggcagccgaagccgccctattggccttcgttcatcagcgccgtcgactgggcttggaagtgtccgagtctgcgatccacgccgcactgcacgtcgaaggcgtccgcaaggtcgtactcaccggatgggtcgatatcgtcgccaccgaggcccaggccccctattgcaccggcgtaaccctttccctggggagcgactga

SEQ ID NO: 366957 - DNA, 624 bp, Pseudomonas aeruginosa
atgccagccacgccgctgctcccgggaaatgccacacagctggaacggctcgccgcgcaggcgttggccgatatccagcgcgtgccaattccactccggcaactggttgaccccaatacctgcccagtcacgctgctgccgtacctggcctgggccttctccgtcgaccgctgggacagtgcctggccggaagccgccaagcgcgccgccatccgctcggcctacttcatccactcgcgcaaggggaccattggtgccctgcgccgggtggtcgagccgctgggctacctgatcgaggtccgcgagtggtggcaactggcgcctgccggcgtgccgggcaccttcgccctggtggtcggcgtgctcgactccggtatcaccgatgagatgtatgccgaactcagctggctgatcgacgacgccaagccgctgacccgccacctgatcgggctggacatcagcctcgaagtgcaaggccgcatcccagtgactgcggcgcagtacgacggcgacaccctgaccgtctacccctacctccccgaaacaatcgaggtcaccggcacgctgagcatgccgggccgcgaacacaccatcgacactgtgagcgtctacccatggcagtga

SEQ ID NO: 366958 - DNA, 1626 bp, Pseudomonas aeruginosa
atggcagtgacctactacgcgatccttaccgccgtcggcgcggccaagctggccaacgccgccgccctcggtaccaccctgcagatcacccagatggccgttggcgacggtggcggcaacgtgccggtgcccgatgccaaccgcacgaccctggtcaacgaggtgcgccgcgcgccgttgaatcaactgaagatcgacccgagcaactccgcccagatcatcgccgagcaggtcatcccggaatcggtgggcggctggtggattcgggaaatgggcctgctggacaacaccggcgccctgatcgccatcgccaactgcgccccgtcctacaagccccagctcgccgagggcagcggtcgcacccagaccgtgcgcatggtgctgatcgtcaacaacactggctccgtcgagctgaagatcgaccccagcgtcgtgctggccacgcgcgaatactgcgacaacgccatcaccaccgcgatcaatcgtcaggacgccaaggcttccgtgcgtgcagccaccactgcgaacatcgcattgaacggcctaccgaccgtcgacggcgtcgtgctggcggcgggtgatcgggtgttggtgaagaatcaggccgctggcagtcagaacggcatctatgtcgcggcggccggcgcctgggcgcgcagcgcggatgccgatgagaacgccgaggtaacgccgtcgctcacagtttcggtcgagagcggtgccactctggccgacaccgtctggcagctgatcaccgacgcgccaatcgtcgtgggtaccactgctctggtgttccaggacatcaccaacggattggctcgcttggcgtctccgacgttcagcggcagcccttcggcgccgaccccatcgctgttcgacagctcgcagcgcttggcgacgatggaggcccttcagcgggcgcttggaaatcgctctacgatgggcacgaacatcaccggcacgcgcaacatggcgctggccaatcttggcggaactttcgtattcaacggcggtgcaggaactccgaccgccgtgctgccagacatcgcaacgcttgctaagccgggctccctctacttctacaacaccggctctgttaacgccgtagtgcaggcgtttgcaggtcaagttatcgctaaggcgaacgggcttaccacgccatcggtatctgtcccgcccggcggaagtttgatcctgtcttcgctcgtcggcgtcggcgggtggttccccgagggcggcagtgtggcgaaccagttcgacctcgggagctttggtgcgttgctggccaacccaggatggcgcctgttgccgagcggtgagattgagaactgggggactttgaaccttacgggggtgggctccttcaaccaggaaactatcggcggaacgacgttctacaccaactattacaaccttacatatccgatggcttataaggtcgccccgtttgaggcagaagccacactggcctgcgcaacgtttgcgagtcagaccggcatggccggcaaggcggtatctctgaatcttagtggtaccggcaacgctcttacggggatgacggttgcagtcacgacgaagaatctaggcgagattccgacgattcattggcgctctcgggggaaataa

SEQ ID NO: 366959 - DNA, 507 bp, Pseudomonas aeruginosa
atgatcatgtacttctcagcctctactggtggtttctacagcctcgaatatcacggcgagagtggcattcctgacgatgccgtagagcttacggaagaggaatatcgcgcgaccgctggccggcaggttcaagctgacgcatcgggccgccctgttctggtccaagcccctgcgcaagtcgtagatccgcgagtgctaatcgcagagcgccgctacctggccgaaaccgccggcatcaccgtaaacggcatggccctgcccaccgaccgcgacagtcaggccttggtgaccggtgccgccatcgctgcctggatggaccaggactatgcctgccagtggaaaaccgccgatgggttcgtcgccctggccgcgcagcagatcatcgccctagccagcgccatgcgtgcccacgtacaggcctgtttcgatcgagaggccgcgctgctagatgcattggcggcgggcacctacaccgacgagcagctcgaccaaggctggccagcatga

SEQ ID NO: 366960 - DNA, 369 bp, Pseudomonas aeruginosa
atgagccgcttcctgaccgccctgcaggttgagctgcagggcgaccgcaccacctggaagctgctgagcgagttcgtctatgaggacgccgagcacgggcgcattgccgtcgcccgcggcttcgaaacggacttcgccagcgtgccgcgcattcctgtggtgttcgacctggtcggcgcctacggccacgccgccgccaccttgcacgactggctgtactccagcggcctggtgccgcgcgctagcgctgacaggatcttccgtgaagccctgcgcgccacgggtattgcccgctggcgggcctggctgatgtgggcaggcgtccgtctcggcggctcgccgcactaccgccaccccgagtccttctga

SEQ ID NO: 366961 - DNA, 1173 bp, Pseudomonas aeruginosa
atggcaggcgaataccatcacggcgtgcgcgtcgtcgaaatcaacgaaggcactcggccgatccgcaccatcagcaccgccatcatcggcctggtagcggttgccgaggacgccgacgccaccctcttccccctcgatacccctgtactgctcaccaacgtgcagtccgccatcggcaaggcaggcaccaacggcaccctggcgcccagccttcaggccatcgccgaccagaccaacgccgtcaccgtcgtggtgcgcgtagccaagggcgccgacgatgccgccaccaccagcaacctcatcggcaccaccaccgtcgacggcaaatacaccggcatgaaggcgctgaagaccgccaagaccaagttcggcgtcaccccgcgcatcctgggcgtgcccgggctggacagcgagccggtggccaccgccctggtcgccctggcccagcagatgcgcgccttcgcctacgtttccggcgccgatgcgaaaaccaaggaagaggccaccgcctaccgcgaaggcttcggcgcccgtgaagtgatggtgatctggcctgacttccagcgctgggacaccgtcaccaacggcaccgtcgtggctccggccgtggcccgtgccctgggcctgcgcgcgaagatcgaccaggaaatcggctggcacaaaaccatctccaacgtcgccgtcaacggcgtgaccggcatcagcgccgacgtgtactgggacctgcagagcaccgccaccgacagcgactacctcaacgaggcggacgtcaccaccctcatcaacgccaacggctaccgcttctggggctcgcgcacctgctcggacgacccgctgttcgccttcgagaactacacccgcaccgcccaggtgctggccgataccgtcgccgaagcgcacctgtgggcgatggacaagcccatgcacccgaccctgatccgcgacatcatcgagggcctcaaggccaagggccgcgagctggtcgccaacggctacctgatgggcttcgacgcctggtacgacgagaccctcaacgacaaggacaccctcaaggccggcaagctgaagatcgtctacgagtacaccccggtgccgccgctcgaggacctgaccttcaaccagaagatcaccgacacctacctggccgacttcgccagccgtatcaacgcttga

SEQ ID NO: 366962 - DNA, 516 bp, Pseudomonas aeruginosa
atggccatgccgcgcaaactcaagaacatgaacctcttcaacgacgccaacagcttcctgggcgtctccaagtccgtcaccccgcccaagctggcccgcaagatggaggcctaccgtggcggcggcatgaacggcccggtagaggtcgacctcggcttcagtgacgacggcctggtggtcgagttcacccagggcggtctcgacgtgatcaccatcaagcagttcgccgccgccaccgccacggcggtccctctgcgctggaccggcgcctaccagcaggatgacaccggcgaaaccgtatccgtggagatcgtcgcccgtggccgtgtgaaggaaatcgacatgggcgaagccaagcccggcgaggacaccgagcacaagttcaccgtcacctgcagctactacaagctgatcgtcgacggcgaagagatcctcgaaatcgaccacctgaacttcatcgagaaggtcaacggcgttgaccgcctcgccgagcagcgcaaagccatcggcatctga

SEQ ID NO: 366963 - DNA, 348 bp, Pseudomonas aeruginosa
atggacgatctcgaaccccaagctgaaaaccagtctgcagccccgcaggatgaagccatccccgacaacgtcgtcgtgctcgataccccgctcaagcgtggtaccagccagatcgaccgcctcaccctgcgcaagccggccgccggcgagctgcgcggcctgcagatggccagcctgctgcagatggacgtggccagcaccatgaagctgctgccgcgcatcagctcccccggcatcaccgagcccgaggcagccgcgatggacccggccgacctgcaggcctgcgccgcgaagatctgcggttttttgctacagaagcgcgagaaggcggcatacctgctcgcgtag

SEQ ID NO: 366964 - DNA, 2565 bp, Pseudomonas aeruginosa
atggcgaatgacctgcagctgcgcgtgttgctcggcgtgatcgacaaggccctcggcccgttgaagaagatcacccagggcagcggcgacacggccaaggccctgaaggccgcacgcgagcggctcaaggaactcaacgccacgcaggccgacaccagcgcctggcgtacccagcgcgccgcgctcgagcaaaccagccgcgctatggctgccaatcaggcgaaagtctctgcgctagcccgcgccatgggttccgctgggccgcccacgcgggccatgacccgcgactaccaacgggccattcgcgaatctcagcgcctgaagcaacaacacgacagccagagtcaggctgtgcaggcgctgcgcacgcgcctggaagccgccggtatcaacacccgcagattccaggaaggcgagcgcaaccttcgtcagcagatctcggaaaccacccggaccatccagcagcaggaagaccgtctacgtcgactcggtgaacgcgagcgcgctgtatcccgcgcgaggtcggctatggagcgtacgcgcgccactgccggtaaagcagcaatggctggtgctggggcgtcgacagtggcctatggcatcggccgtggcctgtacgcaccaattcaggaaggcaagcacttcaccctggaagaaaaccgcgtagcagccctgggactgggcgaccaggctacgcaggatgcgatcaagtttgccaaggccatgaagacctacggcaccagcgcgaccgacaatctcacgctggtgcgtgatgccatgacggtcttcgcggatgagcatcatgcccagatggttgctcccatgctggcgaagatgaagttctccaacgaggcgatgttcggcgagcaggacggcgccgagaacgaacgcaagttcatggacatgctcaaggtcatcgagctgcgcggcggccttgccagcgaagaagagttccgcaaacaggccaacatcgtgcagaaggtcctgaccgccaccggcggacgggttggtcccaacgagtggctgaacgtcatcaagactggtggccttgccgccaaaggcctgaccgacgaggcgttctactaccagatggagccactggtacaggagatgggcggtaaccgagtcggtactgccatgatgagcgcctaccagaacctctatcagggccggaccaccaagcgtgcggccaacaaccttgagcagctcggccttgtcgacccgaagaagctcaagtacgacaaagccggccagatcgccttcctcgacgtcggcgccatcaagggtagcgacctgttccgctccaaccagttcgaatggatgcagaaggtcctactgccgcaactggcgtctcagggcatcaccgagaagggccaagtgctggataccatcggcagcatcttctccaaccgtaccgcgtcgaacctgttctcgcagatgtaccttcagcaggcgcagatagccaaaaaccagaaactcaacatgggtgctgacggtatcgacgagctgtaccagaaggggatgaacaccgcccagggcaaggaattggagctgctagcgaagcgtgccgacgcctacaagcagatgagcgatacgctattgccgacctacgtagacgccctgctgatgatcaccgacgccatcaagagcgtgacagcctggatgcagaagaaccctgcggccgctgcgctgatgctcaagtccgtagtcgtcattggcctgctggcggctatatttggttccctcgccatcgtcatggctggtttgctgggcccattcgccatgctgcgctacgccatgacgctgttcggcatcgccaccaacgccgcgctctggcccgttctggcggtgatcgccgccgtggccgcgctggccgttgcgggctacctcatctacacccactgggaccaggttaaggcctacttcggcgggctctggcaggaaattctggcgggcttcaacggcggtatcggcggcatcacccgcttaattctcgacttctcgccgcttggtctgttctaccgagccttcgccggagtcatgaactacttcggcgtggacctgccggcccgcttcagcgacctcggcggcatgctgctggacggcctggtatcgggcatccgcaacaaactcggcgctgtgaaggacgcaatcaaccaggtgggcgaaagtaccatcggctggttcaaggagaagctcgacatccactcgcccagccgcgtcttcgcagaactcggcggcttcaccatggcaggcctggcgcaggggctgctggcgggccagggcggcccgttgggagccatcacggacatcgcagcgcgcctgaccgctgccggcgccctggtgatcggcaccaacgcgcctgcgctggccatcgacgagcgcccaccaatcagcgccgccaccccggcgccggtgattcagggcgacacctacaacatcaccatccaggccggccctggtgccgatactgccgcgctcaagcgcatgatcgagcagaccctggccgagcacgcaggacgcaaggcggcgcgcatgcgctcgaccctgcgcgaccgggagtaa

SEQ ID NO: 366965 - DNA, 441 bp, Pseudomonas aeruginosa
atgatgatggccctcggcatgttcgtgttcagcctgcacaccctggcgtatcaggagctgcagcagaaaaccgaatggcgccaccccaccaccaaccgcgtcggcgcagcaccggcacgtcagtacctcggccgcggcgaagactccatcacgctgcctggcgtgctgctgccggagctggccggcacgatgctcagccttgacgccctgcggcaaatggcggacaccggtaaggcctggcccatggtggaaggcaacgggcgcattcgcggcttgtgggtgatcgagagcatcagcgaaacccgcaccctgttcttcgcggacggagcgccccgccgcatcgagttcagcctagagctgaagcgcgtggacgatggccgcgtagatctgcttggcgccatcacaggcagcgccggcagcatcctacagggcatgctatga

SEQ ID NO: 366966 - DNA, 1266 bp, Pseudomonas aeruginosa
atgagcctgctcgacagcgtgaccggctacgttagcaacatcgccgagcagtaccagcgcgccgccaattacccggtaccggccttccgcctcaccgtcgacggcaatgacatcgcccagctgatcagcccgcggcttataaacctggacctcaccgacaaccgcggcatcgaggccgaccagctaaacatcacgctgagcgaccatgacggcctgctagccatcccacgcaagggtgcagtcttgaacctgtggcttggctggagtgataccggcctggtggacaagggcacctacacagtggacgaggtcgagcacagcggcgcacccgacgtgctcagcatccgcgcacgcagcgcagacttgcgcaaggcgctgaaggtcaagcgcgaaggcagctggagcaacactaccctcggccaggtgctggccgacgtcgcaaaacgcaacgagctgcgcctgcgcctggccgacgccttggcgccactaaccgtgctgcagctggaccaggcaaacgagtccgacgccaacctgctgacccgcctgggcgaggacttcgacgccgtgaccagtatcaaggccggctgcctagtctgcttgcctgctggcggcgggaagagtgtcagcggcctagctctgccgcacataaccctggtgcgagccgacggcgacggccaccgctatttgtacgccgaccgcgacagctacgacggcgtccgggcgtactactacgacatcaacagcgcgaagaagaaggaagccatcgccggtggcggcaagaacctcaagaacctgcgccacacctacggcgacctgcagagcgccttgcgtgctgctcgctcagattggcggcgtgtgcagcgcggcagcgccaccctgagctacaaccttgcgcgcggccgggcagacctgatccctgagctcacctacaccttgcagggcgtgaaggcagatatcgacgccatcatctggtacggcggcaacatccagcaccggctcagcgctgacgaaggcttcgtcaccagcctggagctggagagcaagttgcccgacgacctggtcgaaggcctctgggaggaaatgcagggcgactacaccgggatcatcgcctactaccgcgacaccaagggtgtggagcgctacctcaccgccggcgaccagaccaagccacgtcggctgcggttcctgtacagcacgaagggaagcgcgaagcgcgcggtggaccgggaatggctgcggcttcaggagagcaaggcaggaacatga

SEQ ID NO: 366967 - DNA, 441 bp, Pseudomonas aeruginosa
atgaagcgagttgcaatcgtggttgtaggccttggcatgatcccactgggttcccacgctgctgactgtgtcagcgtgctgaacaaggcccgcactgagcggcacctgaccatggtgcagagcggccaggagcacgcccaattccgcgatggcccgaaggtgcaggcctccatcggctgcgagcgcggcaagcccaacgtgcagttcgcgtgggaaggagcagagccggacaaggagttctatgacctggtcggccggctcggccaagccgccagcggcagcaaggcgccgcaggtaatcctggccgccaagacgtgtcgccagcaggcgctgcaggacggcgtggaaatctcccaggtcgagcagccggggatggcgatagagtgccaggcctactcgcgcgatggtggcggcacaacgatcacggtctacgccgactga

SEQ ID NO: 366968 - DNA, 177 bp, Pseudomonas aeruginosa
atggaacgctatgcaagcaacgccacacagaccgccctgccgtcgtcggaggtcgatgggctcgaagcctgggagcgcgatctgctgcgactggccaggcaactgcctggcgggcagcgtgaaacgctgttgaggatgcttgaaggaatggcccaactggccacactgctggggtga

SEQ ID NO: 366969 - DNA, 330 bp, Pseudomonas aeruginosa
atgaccatgggcgaacgcctcaaggaagaacggctacgggctggcctcagtcagacacaattggcagagcagtgcggaatctccaagaacacccaactgaactacgaaaaaggcgataggagcccagatggggcatacctcgaaattgctgcaaggttgggtatcgacgtgctctatgtggttaccggtcgccaacttccatcggagctgaacaacctcagccaaaccgagctggacgtcatcggctacctgagggacatgagcgacgacgaccgcgccacgtttgtacgcatggcccagggtctatcgcttgtcagcaaggaccggtaa

SEQ ID NO: 366970 - DNA, 213 bp, Pseudomonas aeruginosa
atggccgacacctatgcccccgagcaagcctgccaagccgcccgcgaaaggcttgagaggaagggcatctccgtaaaacagttcgcggagcaaaacgacctccacgtctctaccgtctacgcagtgctcaacggtcagaaaaaatgcctgcgcggcgaggcgcaccgcgccgccgtcctgctcggcatcaaagacggcgagatttcacagtaa

SEQ ID NO: 366971 - DNA, 192 bp, Pseudomonas aeruginosa
atgtatcaggacccgaaacgcatccgaaagtaccgcgccacgatgaacctcgatgactacgagcaggccctcatcgttgccttggtcaactacaccggtatcgaccaggcagaactgcttcgccgcctggccctggagcaggcccgcgaacttttgctggcggagccgatgctaggcctcaccagcgcatga

SEQ ID NO: 366972 - DNA, 186 bp, Pseudomonas aeruginosa
atgcccgaggcctccttcccctacagcgatgtagagcgcgagctgctggagcaaatccgcatccaggaagggctttccacgctggatcaggcggcggaatggctggtgaagactcgtcttcgacggcagaccctgaaacttacggggcgcaaccgagccctctacccagtcggacaacggaaatga

SEQ ID NO: 366973 - DNA, 300 bp, Pseudomonas aeruginosa
atgagcgtgtacaaactggtatgcccggcctgcggaggcaagctgcgcatccgaaacagcgagggtgaaagcccgatcttccgcagcatctacggccagtgcatgaacgttgcctgcggcgccacctttgctggctcccagtcctgggaatacgaactcagcccctccggcctggacaaaccccgtgtgcagcttcctgtggcgccctcggttacacggatgaaggccctgcgcgactcccgcgccgagaccgaccagctcgacctgctcgacgacctgcccatggaggcgctggcatga

SEQ ID NO: 366974 - DNA, 312 bp, Pseudomonas aeruginosa
atgaccactcacaccatcaacgctgatgactaccgcacgtccatgcagcgcgcggcgctggactacctgaagcgccacaaggaccagcacctggccgagtcggatctgctgttcaacgcctgcgtacaccacttggtgaatgccctcggcgtcccggtctttctgtcgcaatccctggtgcagcgcgcctgggatgacctcttccccgagccaaagccagacgtcgtctggatcggcatcgacatggcggccggtgaagcaccctgctttgtctccgatcgcctgatcagcaagcacccgaaacacccctga

SEQ ID NO: 366975 - DNA, 237 bp, Pseudomonas aeruginosa
atgagtggcgaaatttccatcaacgtgactgtcgatcgagagcaggcagagagctacctgcaatggctggtcagtcagtacgagctggccatgacggagttctggttcgacgaccgctaccgcttcacaccccagggcttccgggcaaaacgcatcatcgcggaccacccgcacatggtcggcctggtgcgcagcatgcgcgaactgcgcacccaacttcgggggctgccggcatga

SEQ ID NO: 366976 - DNA, 2724 bp, Pseudomonas aeruginosa
atgagggacatggataacgacctgcgccaggacgtcctgagcaagctgcagctgcagttcggcctcaagcccatgaagggcacgaagtacatgcgcaagggtgagtgcccggcctgcctgaagaaggagctgttcaccctggtcgacaacccctggttcatccgctgcgggcgggagagcaagtgcggcgagagctggcacatcaaggaaatctacccggagctgttcgacgactggagcaaacgcgcgccgtccagcgacaaggagccgaccgcttcggccaaggcctacctcagccatgcccgtggcttcgatctgaagctcgtcgaaggctggtacacccaggaacagtactgggaccgcgacctcggcatcggcagcgccaccgtgcgcttcgccctggccaaaggcgggtactgggaacgcctgatcgaccagcccgcgcgcttcggcaagaagaaggcgcgcttcaagccaggcgaatcctacaagggcgtctggtggtgcccgccctgcgtcgacctgctcgaggtgaaagacctgtggatcgtcgagggcatcttcgacgccatcgccctgctgcaccacggcatcgccgccgtctccgcgatgtcgtccaacgccttccccgaggagtccctgcgcgacctggcgcgcatccgtggcggcaagctgccgaaactggtctgggccctggacaacgagcccggcgcgcaccactacacccgccgctgggtcaaggaagcgcgcgccctgggctacaactgcgaggccgcgcagatcggccagcgcggcaaccgcaagaccgactggaatgacctgcaccagcgctggatgttcatcgacgacggcgcccagcgtgaggaccagatcgagaaggacctcaaggcagcccgccacgaaggcgccctgctgatcgccgagagcgcggccgagaaggccctgctgatgtacgactggggcaagcgcggcgaattccatttccggttcggcaaccgcctgtactggttcaagctggacatcgagaagttcaacaaggcgatgcagagcctggaagacagcgaagaccacgacgaccagctgctcaaccagaagcagatgcgcgacaaggccctgcagcaggccggcggtgtggtggaaatcgccaactgcttcccgcaggccctgtacttccagcgcaacgaagtgaccgacgagagctggtactacttccgcgtcgaccgccccgacgacgagccggtgaagaacaccttcaccagcgcccaggtggcggccgccagcgagttcaagaaacgcctgctcggcgtggccgccggcgccatctacaccggcagcggcgtgcagctcgaccagatcatgaagctgcagctcaccggcctgaagaccgtggcaaccatcgactacctgggctacagccgggagcacgcctgctacgtcctgggcgacgtggcggtgcgcggtggcgtgctggagaaggccaacgccgaggactacttcgagttccagaagctgcggctgaagaccctgcagcgctcgatcaagcttcagatcggtaccgacgacaacacctaccgggcggagtggctcgactggctgtggacctgtttcggcgccaagggcctggtcgccctggcgttctggttcggctcgctgttcgcggagcagatccgggcggagttccagtccttcccgttcctggaagccaccggcgaggccggcgcgggtaagtcgacgctgatcaccttcctctggaagctgctcggccgtgccgacgaggaaggccaggacccgtcgaagatgaccaaggcaggcctgcgccgctggctcacccagctgtcgaacatgcccatggtgctgctggaggcagaccgtagcgacaacagccgtgccggtggcgccgccaaggccttcgactgggacgagttcaagccgctgttcaacggccgctccctgggcgtcaccggccagaagaccgccggcaacgagacctatgagccgcccttccgcggcaccctggtgatcagccagaacgccacggtgctggcctccgaagcgatcatgacccgtatcgtgaagctgcacttcatgcgcccggagatcacccgcgacagccaggccgcggcggacaacctcaaccacctgggcgtgatggacgtcagccacttcctgctgaaggcgatccgcgccgaaggccaggtgctggagtgcttccgcgagcgcatcaaggttcacacggccacgctgcgcggcctgaagcaggtccgcatcgagcgcctgatcctcaaccacgccatgttgatggccctggtggacggcttgcgcctggtggtgccgctcaccgacacccagcacgccagcgcgcagcaggccctgctgaccatggccctggagcgccagtccgccgtaaacgccgacgcgcaagaggtggcggaattctgggaggtctacgagtacctcgagaacacccaggacgggccggtgctgaaccacagcaagaagccggaaaccatcgccatcaacctcaacgagttcgtgcgcctggctgccgagcaccgccagaaggtggcagacgccacgaccctgcgcgagctgctgaaagagtcccggcgccacaagtacctcgactacaaggccgtcgacagcgctgtacgtgcggccgaggcagcccggcatacccatttcgcgaagcccagcacggtgaagtgctggattttcgaagcctga

SEQ ID NO: 366977 - DNA, 831 bp, Pseudomonas aeruginosa
atgcagaaacaaaccccgaaatggctcgacctgttcctcaccgcattcggcccctctgggctggtggcactggcgtggtgggccggcgccttccacgcgcaacgcatccgcgagctgcagctcacctatccgatcctgaacatcaccggcaacgccggcgtagggaagtccaccctggtggcaaacctgtggaaacttgtcggctccagcgatgcggagaatcgcaacctgcacacctgcagcatgggcgcgctgctggccatcctggcccgcgcagtcaaccgccctgtcgtgctggaagaaaaccgcttcggacacgatggctacgactggaacagcctgagtgagtgctattccggcggcaccatcgcgcgtcgcaccagtgatcctgtcgtcgcaggtgtacggttccagggtgcccttgccttcgttggtggcgaactcgagaccatcaaccgccgcatcgtcaacatccacctcaagtggcagccgcgcactgcggacaacaaccgggccatccaggcgctgtacgacctgcacatcggtgacttcagcgagttcctggtgaaggtgcaggagaaccgtgaacagctgatgtaccgcctcggccacgtcggtgcctacgtccagagcctgcaggacgagaccgataatggcctcacccccgatgccgcccgcaaccacgcccagctccgcgtcctggtcgattttctggccgacctattccccatggccgacgaccgcaacgcccaacacgacgctcacgccctgatcagcgatatggcctggagccatatcgccatggccaaagcggtccccaatcactactaa

SEQ ID NO: 366978 - DNA, 588 bp, Pseudomonas aeruginosa
atgcagcactactacaaatcccaggcccccgacgtggtggccattgtccaggacttctacgaggcgaaggcccagcacgatcatcagttgggcaagctcggcgaggtgatgggcgggaaagtcgctcacatgcgcgatatcacctctctttttgctggtggcgtgaagctgccggcagatcgttccctcgacgtccactggcgccggccagatgagcatggcttccgctcgctcaggacagcagcagtgcccccgaagggcatcacgaaagaggagcgtgaagagatacgcaccgaacatgggcgcctgatcgccctgtggcgtgaacactgccccgagagactcgacacccacatctactgggaacgcctcaacctcaacaccggcaacctgatgatgtgcggaggcatcaagttcgaccaccagggagtggcctacttctgcctgggattcgagatcaacgaggcccggcacctggccaacgtcgacgccggcacggcctctgccggctggatcaccggcgccgtggaaatcctgcccagcgagtacgaagcggcgcgcaaggcaaagctgggggtgacgacgtga

SEQ ID NO: 366979 - DNA, 393 bp, Pseudomonas aeruginosa
gtgagcaccaaacagcagatcaccgccgcgcagctgctcagcgaccaactgaaccagaagttggccttcgccaactgggcaagggcccgcggctacgacctggccatgagcgacgacggcgccgccttcctgtccttggaaacccggtgcgcctggctcggcttcgaagccgcgcacggcccggacggctgcaaaccccgaggccagcagctctacgcgaagctcaggaagtccagccctcacgcccaccagaccgacaagttcttcgaggttcgcgtcggcaaggcgccctacgacgactacgtcgtgcacggtggcccaggcggcgtgtaccgcctgagcgacgtgaatttctacgtgatgtccggcgaaaagatgtaccgcctcggctga

SEQ ID NO: 366980 - DNA, 486 bp, Pseudomonas aeruginosa
atgcaagtgaaccccaaagaagtcagcggcgagaaggctaccacgccggcagccgacctgcgcctcgtctcagtcgagcagctccagaagatccaccgcgagttggatgcctgtcagaaggtcatctggctggccggttgcggacagcgcggctacggcttcgacccttcctacgtcaccggtgcccaggagcaactccagggaatcgaagcattgattaacgccgccgccccggtcgcccaggctgggcaggtgccggagtggatcgaggtggccactcagcagccggaggtcgggcagtgcattgtcatggcaggcccgcagggcagcgacgcaccgggtcgctattggcgactgaccggaattcgccgcgaagacggctactacgacgccaacggctgcgggtgctgcgatatcacccactggtatccgctgcttgaatcgccgggtgcgattgccgccgctctggcgcagggaggtgagtga

SEQ ID NO: 366981 - DNA, 600 bp, Pseudomonas aeruginosa
atgaccacgcctacctgcatcaagaccccagcgaacctcgccaaagagtggcttgcgctgggcagtgaagggctcattctcgataccgagaccaccggcctcgacgaccttgcccagatcgttgagatcgcaatcgtcgatatgactggccggcccgtgctgaacaccctggtcaaaccgacctgcctgatcccgggcgaagcgtccgcaattcacggaatcagcaacgacgatgtcgtcgacgcgccaacctggagccaggtatttgaccagttcaagtccctggtatctggtcgccgtgtggtgatctataacgcggactacgacgttcgcttggtccatcaaacatccctggcgaacggcctcgacgacagtgatttccacgcccgcctgggcagatcagctgaatgcgccatgctcgcctacgccgagcacttcggagattggaatgagtaccgccaacaatggcgctggcagaagctcgtcaacgccgctagccaatgtggcatcgcctccgtgggcgcgcatcgggcccttgctgactgcctgatgactctgggtgtcatcaaagctatggcagcggaggtggcccatgcgtga

SEQ ID NO: 366982 - DNA, 198 bp, Pseudomonas aeruginosa
atgcgtgagcgcccaaccatggccagccacagcctggacctccccagcatctgcgatatctgcggcaaggctcgctccacccgcaagcatgcccgctgcagccgtatccgccagcaaaccaaacaggccgagtgggccacctacatggacaacgtcgccgccaagaaagcgcagggaggccgtcgctatgcacgttaa

SEQ ID NO: 366983 - DNA, 306 bp, Pseudomonas aeruginosa
atgcacgttaagcacatcgaagcgggctcgcccctgcacagcgccatcaaggcaggcacgccggccaacgccctgcgcggctcgggctgggctgaagtcgatgccaccggcatgggctacgtcacccttctcaaccgcctgaccaagatcggcagcagcggccagccagtctccgtcctgctgaccaactgcaccgaagaaaccctgaagaagcttagccgtctgcgccgcaagcagggcaagagcgtcggcgaagtgaccgtctatacgctgcaggcgccggctactggcgaggtgtcggcatga

SEQ ID NO: 366984 - DNA, 240 bp, Pseudomonas aeruginosa
atgagccggctagtcctcttcaccggcgggcgtcgatgcggaaagactctgcaggcgctgtttctgtatgccaaggagttcgggtggacggccagcaagaccaacggcggacacctgcgcttcaccaagccagggcgcccgatcatccacaccagcagcacgccaagcgactggcgtgccgtgcgcaacgccctgagcatgctgtccagggctgaccgagtggtggacatcgggacgtag

SEQ ID NO: 366985 - DNA, 1167 bp, Pseudomonas aeruginosa
atggcagatggagtggaggtacgcggaaaccggatcaggatctatttccgctaccagggcgaactgtgcagggaatccgtgccaggggacgcaacagcagagaacgtggccaacgcagagcgcctggccggcatcatcaactacgaaatcaagcacgggacgttcagctacagccggcacttcccggactcgcccagggtgcagaccaacaccttgggccactacctggacttgtggctggagatcaagcgcagcgagctggccccttcggggttccgcacccacaagagcaaagtcgagacgcacattcggccgcgctggggctctcaccaggctgaccaggtcgatcatctcgacctacagacctgggtgaaggccgacctgatgacgaagctgcacaacaagacggtgcgggaaatcatcagcatccttggccaggtgttcaccatttaccggacccgcaaccgttcgtcgcacgacccaaccgaaggcatcacggtacgcctgccggaccctgacgaagccgacccgttcgaccgcaaggaaatcgccgccatcctgggagttgagacagagcgcgtgcaggaactggctctcgctcagttcatgatctgggcaggcccgcgtgtatcggaggccatggccctggcctgggaggacgtcgacctcgacgctggcacggtgcgtttccgccgttcgcaggtgcgcagccactacaaggtgaccaagacccgccgctcgacgcgggagattcggttactgaagccggccttggaagcgctgcaggcgcagaaggcgcggacggctgacctcccgcccgtcgaaatcgaggtaaccgaccgggacaacaagacgaaaaagcgacagatggtccggttcgtcttccacaactcgaacaccggcgcagcccacaccagctccgacgtgctgctgcagcgctggtggcagccccacctgaaactggctggagtgcggtaccgcggcccgaacaactgccgacacacctacgccagccagttgctgacctccggcgtggtcccgctggactggattgcggaccagatgggccacacgtccaccgcgatgatctggcgccactacggcaagtggatcaaccaggacggccccgacatgatcggcctgctcgagcacgcgctgaagctctaa

SEQ ID NO: 366986 - DNA, 177 bp, Pseudomonas aeruginosa; identical to SEQ ID NO: 324481

SEQ ID NO: 366987 - DNA, 702 bp, Pseudomonas aeruginosa
atgcaccggcagtgtcggcagcaaggtgtccagcgcgaggccgcggcgcaggtttgcgcgcccgatgccggcgaccggctcgacggtgcgcagcggcgcgtacaggttctgcgcggcatggcgcgtcagcacgaccgataccggcgtttcgcgccggggaacggatttgtctgcgggcgcatcggcctgctcgtccgcgccacttgctgcaccgccgccgtagcgcttcgcgggggcttccgcttccacgatgcgcaccggctccagcggcgcctggccgtccttcgccggctcggcggcgatgtcgagcaggatcagcgcgccggattccacgtcctgcagttgcagccgcgtgggcggaatcggctcgctcgcccgcaggtagatcgcgccgcccgcactctgcacgcgcagatggtcgccgacgctggccggtacgccgacgcgcacattgcggtcgatgaagaccacgcgctcctggccgaccaccagcggcaccggcaggggcagccgctcccagcgcaggatttccacggcctggctggccggcacgacaccgaggatcagcaggacgctggccagggccgacaaggcaacgggcttcatggggagtctccctgcaggtggccgggggcgttggcgggcacgccggcctgggtcggcgtcggcggcggttcgatgcgctggggtgcgctggcgtag

SEQ ID NO: 366988 - DNA, 627 bp, Pseudomonas aeruginosa; identical to SEQ ID NO: 250863

SEQ ID NO: 366989 - DNA, 1821 bp, Pseudomonas aeruginosa; identical to SEQ ID NO: 332727

SEQ ID NO: 366990 - DNA, 1920 bp, Pseudomonas aeruginosa
atgtttcaactcctttcctggatatccaggaagccgtcccccaccccaccaaccaaagctgccccagggggattcctccctcctctgagcagcatggaactgctcggcacgcctcggcgccggcagctactggagaacatctggcaacgtgcctcgctatccaagcagcaattcgaggagatctaccggcggccactggccaactatgcagagctggtccagcagctccctgcttcggaaaaccatcaccatgcccatccaggcgggatgatcgatcacggcctggagatcgtggcctacgcactcaaggtacggcagacctacctgctcccgatcggcgcagcgccggagtcacagtcagcccaggctgaagcctggtcggccgccgcggcgtatggcgccctggctcacgacataggcaagatcgtcgtcgacctgcaggttgagctacaggacggcagcacctggcacccttggaacggaccgatcaaccagccataccgcttcaagtacgtgaagtcccgcgaataccagctccacggcgctgcctcagcactcctcatccaccaactgctaccgcgcactgcactcgattggctcagtcgctttccagagctgtgggctcaattgatctacctgttcgctgggcagtacgagcacgccgggatcctcggcgagatcatcgtgaaggcagaccaggcctcagttgcacaggagctaggaggcaatccggatcgagctctggctgcaccgaagcagtcgctgcagcggcagttggcagacggccttcgcttcttggtgaaggacaagttcaagttgaatcaacctagcggcccgtccgatggatggctgacccaggacgcactctggctggtgagcaagcctgcagccgatcaactgagagcctacctgctggcccagggtatcgagggggtgccctcctccaactcgccgttcttcaacatgctccaggaccaagccgtcatccagacaaatgccgaggacaaggccatctggacggccacgatagacaatggtgctgggtggagaaacaagttcacgcttctcaagatcgctccagccttgatctgggctgaccctgccgagcggcctgattcctacagcggatcactcatcattgaagagggcaacgcctcctctgaaaagccggaaacgacctgcgaaattcccaacgatccgattgaacagcagcaagcaccagaaacgaagatgacgctccaccaaccttcgccgagcgttgcgaaaccggcaaacgacatacaggcgattgcaaaaccaacaactgctgatcaggaagaaacagacgatttgtacgcgcttcttggtaatatcacttcgccaccagaagagctagacactagccacgactcatcggctgcttctcctatgaatactcgcggggaggagaacctacggcagccactagggatcaaggagccaacagattgcgctcctgaagcaattgaagatgtatttatgcctagcagaagcactgatctgggacagggattcgttggctggatgaaatctggcatcacggcccgtcgcctgttcatcaacgacaccaaggctttggtgcataccgtcgacgggaccgccatgctggtcacgccaggaatcttcaagcgttatgtccaggagcatccggaggttgaaaagctggcccaggccaaggagaccgccggctggaagctggtgcagcgcgcgttcgagaaacagggtcttcaccgaaagaccagtaagaacctgaatatctggaccatcaaggtttctggtcctcgcaagacgaaagagctcaaggcctacctgctccaggatcccaaattgctgttccctgtgcagcctctggacaacccaagcctcacggtcatcaccgatgccgaaggaggtgtggaatga

SEQ ID NO: 366991 - DNA, 612 bp, Pseudomonas aeruginosa
atgaatacagacaccatcaccgattccagtgcggatgagcccaccaaaacactgtgttcattgaccgaaaattggtggatttttgcgttgcgcggtgtcttggcattgattttcgcagcccttgcgttctggatgccacaatcggctctgttggccatgaccttagtgttcggcgcattttccttggtcaatggcgctttcaacttggttgcagcggtgcgccatatccagaaaaaagagcgctggggctggctgctgttcagcggcattgtcggcatacttaccggcgtcgtcgtcctggttgctccttgggtcgccacgatggtcatggcttcttttttatgggctagcgtggggttctgggcgattttcaccggtgtgctggagatatccgccgcggttcggctgcgtcaagaaatcaagggtgaaatctggcttgccttcagtggactgctctcgattgtccttggcgctatcgtcttgtggatatttttttcccgtccggtcgagtcattcctggccgcaggctggctgttgggcttctatgcggcagtctatggtgtcacgcttttgttcttgagttggcgtcttcgcaaaacgcgccagggataa

SEQ ID NO: 366992 - DNA, 366 bp, Pseudomonas aeruginosa; identical to SEQ ID NO: 270954

SEQ ID NO: 366993 - DNA, 366 bp, Pseudomonas aeruginosa
gtgccgctgatcgatcagggcaagatcgaagaagccaaagccgcgctgcaggcagcgctcagcacgttggtcgagacgcgcagcgtgcatccgctgcccgccctgcgcgccaggctgctcctgaagcgcgccgagaccttggtagaagatggtcagcggagcgaagcgtccaatgagcgcctggagacattattgaacgaagcgcggcagcagttggaaatggcagaactgctgggctatggaaagaagaaggactttgagcccctgtatactgaactcaagaaagtcaagcaaaagacggctgggggaggcggcggaataggctggctcgatgaaatcaaggcaaagctgtccaagttgttctga

SEQ ID NO: 366994 - DNA, 888 bp, Pseudomonas aeruginosa
atgaatgagcaaacaccgaatcccaatgcgacgaacgaaggaataaacgaacaggccgcggtaagcagccttcctgtcagtccagagtccaagcctgaagtcgtcacggaggtacagcctgaggttcagaaggaaacggactcgctggcggcagacaaacgtaaacaagtcctcgatgaggccgtctcggccttggcgctgaccaaatcagcgctggccgcacttgacggcaaggacgctgcacgcgcattggcaacgctggccgaagtgacgggaaagctggagctgatcgttgcgcgcgaacccacgctcgccctggcccccgttgatgtgcgcaccatcgtgcacgacttgttcgccaacacggaaaccgttgaggcgatgactgacgaggcgctggatgccctcaaacatggcgaggtgcaacgcgctcgtcgcgtgttggcattgctggccagcgaaatcgtgattgcggtcaccaacatccctctggcgacttacccggcagccgtgaaggcagtcgtgccgctgatcgatcagggcaagatcgaagaagccaaagccgcgctgcaggcagcgctcagcacgctggtcgagacgcgcagcgtgcatccgctgcccgccctgcgcgccaggctgctcctgaagcgcgccgagaccttggtagaagatggtcagcggagcgaagcgtccaatgagcgcctggagacattattgaacgaagcgcggcagcagttggaaatggcagaactgctgggctatggaaagaagaaggactttgagcccctgtatgctgaactcaagaaagtcaagcaaaagacggctgggggaggcggcggaaaaggctggctcgatgaaatcaaggcaaagctgtccaagttgttctga

SEQ ID NO: 366995 - DNA, 888 bp, Pseudomonas aeruginosa; identical to SEQ ID NO: 357470

SEQ ID NO: 366996 - DNA, 303 bp, Pseudomonas aeruginosa
atgctgactgtcagcgatgatatcggccagcctgagtgtgtcatcgggctgataaaattcgaagacttcctcttccaccatggcctcggcgacgtcttgggcatccggttcgaccggcgcgtccagagaaacgaattcgccaaattgccggctgcttgccacttcgttatccaggacggcgaacagatgcttcaaaagaccggtgtaagcctctttttcccccggcacggattgccattccacctcagctcggacaatcgcttcatccaccacgtcgcgcagcgtcggataatcgcgcggtaa

SEQ ID NO: 366997 - DNA, 615 bp, Pseudomonas aeruginosa
gtggttgacgggtggcagcggcagcgccaccacatcgagatcggaggcggggttctgctccaggcccggcacgatcaccagcgcgtagcggaacagttggttgaaccacgtcctgactttctcggcgacggagagtgccttgcgcttctcgatcttggcgatcacctccaagaggtcgggacgcttgatctcatagaccgaccgcttgcccaaggcgggcagcacatccttgtcgaagatgcgcggaagtatcgagagggtcgtctgccggccttccttgaggctgagcccgcgatgcttgagccacttgcgatacaccgcctcgaaggtgttctcgtcggcgagccggacagcggtgcgcttctgcttgcggtgaacgcgaggattggtgcctttggccagcagggcgcgcgcttcgtcgcgcaggctgcgggcctcgcgaagcgtcacctccgggtaggtgccgagcgacatccgcttctgcttgcccgcccagtagtagcggaagtgccaagtcctgccccctgcagccgtgacggccagggagaggccatccaagtcagggagggtgtatgccttgccagttgccttggcctgtcgaacggccaggtctga

SEQ ID NO: 366998 - DNA, 378 bp, Pseudomonas aeruginosa
gtgcgtatcgacgtgctgacgcccgcaaacggcgaccatcccacggtgcaatgggccgcgcgcgcccactactggcaggtgctggagcacggtgtgcgcatcttcgaacggcctggcccgttcgaccacagcaagctgatgctggtagacggagcgtggtgctgcctgggttcggccaattgggatgcgcgcagtttgcgcctcaacttcgagttcaatgtggaggtgtacgacaccgcgttgtctacgcggctgtcatccctttttgatgccgcccgtgatgcggcggacgagatatcggcgatggcgttgcgcgcccgcccgctggccatccgcttgcgcgacggggtggcccgtctgttcacccccattctctag

SEQ ID NO: 366999 - DNA, 378 bp, Pseudomonas aeruginosa
gtgcgtatcgacgtgctgacgcccgcaaacggcgaccatcccacggtgcaatgggccgcgcgcgcccactactggcaggtgctggagcacggtgtgcgcatcttcgaacggcctggcccgttcgaccacagcaagctgatgctggtagacggagcgtggtgctgcctgggttcggccaattgggatgcgcgcagtttgcgcctcaacttcgagttcaatgtggaggtgtacgacaccgcgttgtctaggcggctgtcatccctttttgatgccgctcgtgatgcgtcgggcgagatatcggcgaaggcgttgcgcgcccgcccgctggccatccgcttgcgcgacggggtggcccgtctgttcacccccgttctctag

SEQ ID NO: 367000 - DNA, 153 bp, Pseudomonas aeruginosa
atgggtgtgttcgagcgcgcctaccggatcctcgacaccaaccgcgcggtgctggagcgttgtgcgcgcgaactgctggcgcgggaaacgctcgacgagaacgacatccttcaattgacccaaggacttgttcttgatggaaacgaaaagtag

SEQ ID NO: 367001 - DNA, 414 bp, Pseudomonas aeruginosa; identical to SEQ ID NO: 343727

SEQ ID NO: 367002 - DNA, 468 bp, Pseudomonas aeruginosa
atgagcgccagtgactatgttttttcaccctccgtaggggcgttctacccggtctcattgcgagaaatctatgaagccggcagcggctggccagcagacggaatccctgtcagcaccgagacttataataagatcatggaggagcaggaggccggccgggagatttgctcagactccgatggccaacccatgacgaaggaaccaccgccgccctccgtagaagcgctggcggcaatcgaacgtaactggcgcgaccgccagttggacgacaccgacgctctggtcgcccgtcaccgcgacgagctcgaggttggtcccacgacgctcagcacggagcaataccaggcgctgcaggcgtaccgccgacagttgcgcgactggccggagtccggcgagtttccactcgcagaacaccggccggtcgcaccggactggctcgacgccctcttcgccgacggcgtcttgtag

SEQ ID NO: 367003 - DNA, 1449 bp, Pseudomonas aeruginosa
gtgacggcgaaggttgccgcggacttcaaggggcgcaaggtgctggccggcaacggcctggtcggcggtggcgacctgtccgccgaccgcaccatcgccctgccagcctccggcgtggccgccggcacctaccgtgcggtcaccgtcaacgccaacggcatcgtcaccgccggcagtaacccgaccacgctggccggctatggcatcaccgatgcctacaccaaggctgctaccgatggcctgctggcacagaaggcgaacaaggccaccacgctggggggctatggcatcaccgatgcctataccaagacggctaccgacgcgctgctcgccccgaaagcagataagtccaccactttggcgggctatggcatcactgatgcacttcacgtcagcgaggcggtcaccgtggcgaccgcaagcaagctgctcagattgaacgcagcgggccagttgccggcctcaatcaccggcaacgccaccacggccaaccgactggctgccgcaatcacgctaagcgcgacaggtgacgcgacctggtccgcgcgcttcgacggctcgaccagcgtgagcagccctcttaccctctccaacaccggagtacgtgccggcacatatcccaaagtcaccgtcaacgcaaagggcctggtcacaggcggcgcggcgctggaggcagcggatatacccggactggactggtccaaaatcagtagcggcaaaccgacgagcctggctggctatggcatcaccgacggcatcaagatcggtagttttggactcgctggaaatatcgcaccaaccgccggcatagacaccgttggcctagctggagggttttacggatatgcaacggggccaacatccttcgtcaattactgcagcttgatcaatattccatatattacagatggatactccgctcagctgggcatcatgcaaggggcgaatgaagtacacgtacatgttcgctcaaccaaaaatgatgggaagtggacacccactcgccggctatggcacgacggcgacttccgtccaactgactttgcgtctactggacattctcacgatgcgagccagataacctccggcatcctacctctcgctcgcggcggtcttggcgcgaacaacgcggcaacggcccgcagcaatattggcgcaggcactatcgcgacagcctcgctgggatcgagtggctggtggcgggacaacgatactgggctcatccgccagtgggggcgagtaactgtcgccggagacggcaccgcagccatcacctttcccatccccttcccaaatgtctgcctgggtggcttcgccggtcagacagcaaatttccaccccggtaccgacgcgagcacttcgttctacaacctaacgaagacaggtgcgactgtggaaaacgggtaccaactacagatggttctgttctgggaggcattcggccgatga

SEQ ID NO: 367004 - DNA, 138 bp, Pseudomonas aeruginosa
atgcagtacaacgtgacctacatgctcggcgagaaagtccgccagtccgtgatgaaccagcgcgagctggacgaatgccgctcccgctgcgaagtcgtggaagcggtaccggtcgccgcgcagaaggcaacacgatga

SEQ ID NO: 367005 - DNA, 318 bp, Pseudomonas aeruginosa
atggcccgcatcaccaagctcgaaaaggggcaaattttctggaccgtccagcgtggcgaaatttgccagcgtatgtacgacgggttttccgaggagaacaacagccatgtgattctcttcgtggaaggaggagagggttttggcggttacctcgacccttacccgatggcctatgagtacgagagcgatctgctggagctgcagcttgaagatgcccgcaagcaggccgaggaagccgtggctcgcgtgccgcgcctcgagcttcagtggcgcaacgcactcaaggccgagcgcaacgccagaccggcccaggcctga

SEQ ID NO: 367006 - DNA, 192 bp, Pseudomonas aeruginosa
atgaccaataccgagcgcctgattggctacttcgaagaggccgagaagcacaacgccctgccggttcgcttcaatgtcggccgcaataccggcaacgccccgtccgtgattgccgccctgcgccgccggggcttcgaagtctctcgcggcctgcgctgctacgaaatcactggccgctctcccaaggcctga

SEQ ID NO: 367007 - DNA, 372 bp, Pseudomonas aeruginosa
atgagttacgaacccacacccgagcagctccagcagctgcaagaacgcctccagaagctgtgcgagggcctcggcatcgtctatcgagagcgggcggacgatccgtgccatggcggcatcacgatcaccttcacctacggggaagaggagctggttgaccagctgatccgtaacgcccggaaaaccttcgcctactgcggtgctgagtactggctgagcgacacggacccagctgcagcgcagtatcgccgcgcagagcagttctcctatcaggtgtcgaaatgcctgatcgtgagccacaagtactggagcgtcaccttcaccctgtgcagccctggggagaagtactccctgttggagagctgccagtaa

SEQ ID NO: 367008 - DNA, 450 bp, Pseudomonas aeruginosa
atgactgaccaagacaaccttctcaactcgaagtaccaggccatcgacaaggccaagcacgcctacctggctttcagcgtgctgttcctgggcgggtctttcttggcgaccacctgcattcctgacccgctcggctcagagatcgccagatcctctctcggaatgatctgggcgctcttgtggatggccggcgcccgcaccacgcgccacttcggcaagtcgttcgttgtggcgtatctgctgcccgcgctgaccagcaccatcctggcattcggttacgcgaggttgctgctaatgaccggcttcgacccaactgttgagcaaaagcccgacttgcttctgggcctgtgtggcatcgccatcattgccgctatcggcgctgccagctccgcgatcgttcgtgcactggtgtgggccaagttcgagatgacccctaccatcggcaaatga

SEQ ID NO: 367009 - DNA, 405 bp, Pseudomonas aeruginosa
atgcacatccttcccggcacctatcgccctcagatcggcgaaacgttgtttgccgccttcaagatgaacaagcctcaagcgatcaaggtcaccggctaccgtcgggctaagggcttcagcagtgagctgttcgattacgaggtgcatggcaccggcaagaaggactgggcatccctcgacggctacaccttcttccccggcgtcgatctcgacagcaagttcgtctactgcgtcgtccaaagctccgaccttgatcaatacagcgtcgaggaagcctatttcttcgacccgcagagcgccttcgatcacatcaaggacatcgagtcgggcgcatgcccgcacgtcttcgggaaagaggcatctgaagatcggaccttctccgtcctggtagaactgattgcctga

SEQ ID NO: 367010 - DNA, 1272 bp, Pseudomonas aeruginosa
gtgggaaacgcggacgacatgactgagcagcgcttgagtcccgagcttatcgccaggcttggcacggcgtctgataccaagctggcggccgagttcaaggtgcggctaggtgcggtcaagtgggcgcgcacaaagcgcaacatcccagcgttctcatacctcgaggcgctgccgaagaaccccgagttcatggccttgctggggaaggtgtccgatatggaacttgggcggcggttcgagtgttcgtatgcaacagtgaaagtcatccgcgagcggctttgtattccagcttacgtgcccagcgccaaccccgacttcatagcagcgcttggcacgatgaccgataaggatgttgccgccaagtttggctactccgagggccatgtctgcctcgagcgatcgaggcgaggcattgcagctcacggccggcaggatcccagaacctctgacaaagagttcatgtcgttgctcggcgtcatacctgatgatgagcttgcgtataggtatggctgttcagtcaatacagtccgaaggcttcgcaaggcccatacacctaaggtcaaaaagactacggcagaggtggctgctgaatggcaggcaaaacacctttcagaagtcattccacttctcggcaaaatgccagacgttgagcttgcaaaacgttatggcgggctctcctcgcgctactcgtacctacgcaaaaagcatggaattgcagcatttcagccggagaagtctgggccacttgagtccgggcctgagagaaaacagcaaaggcaacagcggcctgcggcaagcgaggctcgcaagctatcgctgcttaggacgcggcaaccgacctacaccctgcctgacgaagtcatggcccggttgggcaaagtaaatgaccgccagctcagcagcgaatcaggtgtcccattccatcgcataaagcactatcgcacctggcttcaaatcccggcataccgaaagcgaagcgtcatagagcaggagctcatcgatagcctggggaaaatgaaagatgaggatgttgctgccaagttcgggcgcacacactcctgggtcagaaaagagcggaagaagcggggtattcccggcttcaagttcgagtctattcctgggctaattgaaagcctgggaaccatgcatgatttcgaagtggctgagaaatttggagtctccagcaactgggtgctgaagacgcgcagtgagcgcgggataccgatcttcaatcccaataaagtcagggcttcagattcggaccaggtgtag

SEQ ID NO: 367011 - DNA, 558 bp, Pseudomonas aeruginosa
atgcagaccaccaccgacgccctccaggccctaatcgccgccggcttcaagtttccccacgagctgggcctgtttcagtacccgatgctgacggccgatggccataacgtggatccgcgggcgcagggcttcactatctaccccaccggcggcggctgcgaggcgctggtgctgcagctgggcaacttcctcctgatgctgaccgacgatgacggtcgcaactgccctgaggctcatgagtggccgcaaagcatgatcggcgtgtatcaaggcgatgaccgcgatgaagtggcggtgctcaccggcctgcagtggctggagcttgtgagcgagatggtcaacggcatcccttctgacagcgccttcgaccgcatgactcaagagcagctgtccgcatggtacctgcagcaggtgggctacgacccgatgcaggatgaccccgagcaggacctcgattccttccgcgccgactgcaaggaatacgcactgatcatccgctgtggcggtctggatgctgacgcgtaccccctcatcgaggcccagcgtaaggccgagtaa

SEQ ID NO: 367012 - DNA, 684 bp, Pseudomonas aeruginosa
atgacttccgctacccccgcccagctgaccgttatcgacctgttcggcaacatcattcccgtcaccgacatggacaaggccattgccgagcgcgaggcctgcgtcgaggctgacatgcccgtcaaagtggcgccctttacgttcaagaacggcttggccgagaccatccccggccgcgaaagcgagcgcgtcgttctgaccgactatcacaagcacctgctgaagcagctgatggccctgaaaggccgggtggcggaacaggctgctgcagcggcagaggaggggcaaaagccggcgcctgcgccggatatgaagcccgtgagcctgttcatcgtgcgcgtgtccagcaccctgatcgatcgccacggcatcgaggtcagccagatcgccgaattctgcgtgccggtcgaggccgagagtgaagagcaggcctgtcagcgtgcggtgctgtggcataccgacaacggcgtagtcgtcgaggacgaagatctgctgtggaaagcggatgacaagatccgcggcctgtccttcaaggccacctactgcctgtgcatcaccgagagcgaaatggacttcttcctgagcgtcacgcagggggtttcaacggcgcgagtcatcggccggacacccgtcggcttccccgaatcttcgaccgtaaagatcatcggcgaggttacgccgtaa

SEQ ID NO: 367013 - DNA, 192 bp, Pseudomonas aeruginosa
atggtcttcgccgaggttgagaagctcgaggtcggcgaccggatcgaactatgggtcgaggatgcgccgcaggcgatcgtcgtccgtgcgctcaccgagggggagggcagccgcaccatcgggttcctgcatgaaggcgccatgaaggagctgagcttcccgctgggccagaccgtaaaccgcgtctgctga

SEQ ID NO: 367014 - DNA, 207 bp, Pseudomonas aeruginosa
atggcaactctcactgctgcaaccaaggccaagcatgtgcgctgcgtggtcggtcaaacgggcgtgactgaatcagaagccctccaagccctggaagaggcccagtgggccccggatgaagctgtggcaagcatccgggcacggttcaatgaggcgttccgcctgcgcctgcagcagcggcagggttgcagttcgctcgcctcgtga

SEQ ID NO: 367015 - DNA, 192 bp, Pseudomonas aeruginosa
atgatcctgaaagacctgttctggaacctgacccgcgtgggcgactgctccatcctggatgagcagacccgcgatgccgccaaggcctcccagctcgccctgtccgaagtgcgcaacctgctggacctgccggccaccgcgagcaccggtgaactggtcgatgcagtccgccaactgaaagccggcgcctga

SEQ ID NO: 367016 - DNA, 243 bp, Pseudomonas aeruginosa
atgacccacaagcaagtaaccatcccgaacgaagacatcgacaccctgctggatgctgtcgaggacaaactccacaagatcggcaaaacctaccaggccaacggcaagagctggcacgatgacctggccattaccggcctacgcaagatcgccgcacagctgggcaccgacttcgaaatcctgacttcgaacgatccggacggcttcatcatcactcgtgtccccaataccgcggccgagtaa

SEQ ID NO: 367017 - DNA, 561 bp, Pseudomonas aeruginosa
atgaatttcgaagagctgtgggagcaggcgtgccgtgacggcgttccgccggccatagaggccgctcgcttcttctacgacaagctggccgcacctgaatcgcgccacccggcgcccgcgcaggcagaggcccgccatgcgcgaccatgtcgaacacagccagtggcgccggtaccgcaggcgctcattgaccagttcccgccgctgcctgagtacgtcgccagctggcaggccatctacatggagccggtgatgggttccggcgagcgcgtggccgttgcagtgatcgccttcgatgcagacggctgtgaggtactggttaccttgtccgaatcgcgcctgcaggctctgttcggcgagcaggctgaggccatggcctccatgatcggcatggttgctggtgctgcccagaagcacggccaggccgggcacctcgtcaactttaagcctcctctgggtggggtgatcattggcgagctgcgcgaggctatgggcgacgatcgggccgacgtgctgcagcaggccgcatcgctgtccagttgcttctacgagcgatcatag

SEQ ID NO: 367018 - DNA, 468 bp, Pseudomonas aeruginosa
atgaccaagcgcaaacctaattcccccctattgctgggcgcatccgtgttgatgatcgctggcccgcttcaggtgtatggaatcttcaaattggttgagagccttggccttggcatttttcaagatcggccctgggcgattctgattttggcgctcgtgattacggctctggtagtgtttctggttatgcgtctgctgcaggtcgaacgcactccaccgaaggtcacgattgcccacagcgagagaaaaccggtggattcggccctgcacagagcaacgccggaagaaatcgttgccctgactgatctcgcctggtggatgaagaagcaccaaatggtgctggttacggggcgcgctaatggcatccggattggcgcctcgcaggacgttatccggttcatggaaaagcaccttgacccctattcggctggagccgttgcggggaacctggttccgatccccaactga

SEQ ID NO: 367019 - DNA, 198 bp, Pseudomonas aeruginosa
atgcccaccttcaacattgcaggaaaagtgacggtgtcctgctggaccaccgtagaggcggccagtgaggaagaggccatgcagatcgctgcaggccgcgaactcgccgagctccacatcgacggtgcatatcccgtggatgagagttggcacctcgattcagacggcaagccctacgagctgcgtgtcgacaagtga

SEQ ID NO: 367020 - DNA, 876 bp, Pseudomonas aeruginosa
atgtcgaaactgctttatctgcccatcgttgccgtagttggcgcactcctttctgcctgcgcaagcgccccccgcgaaggcggagatgacaagatccatttcaaggtgcagcagcaatcgattattgctgtggcaaacgccaagcccgtagatctgccggcagaactgtctgataccgaccgggcgcgttacttgcacggctacccttcggtggaacagttccccctgggcaatctgccaacttcggcttttgaggtaagtggcgaaattaacgtcgaaagatttctcgggaccggtcgagccaacagtggctccggtcggttcaacgccgatacgggcatcgcagttggtacctccatcggcggtgctgctggcggggctatcgggcttctgtccgtgatgggcccgagtgatgctcagctggatttccggcaaatgcgctccagcgcgctttgctatatcccaatcgccgaagccaactccccagatgacgcaattgagaaatgcgctctggccgttcgggggcacttcaagagcactcttgccaactcggttgaggtgaacactcccggcacaaacttcttaatcaagggcggcattgacgcaggcggcgagcaaagaactgcatatctccaggtcttcaaaagtggcgcctactacgccaagggatatgcaccggcgaacatcggaggctatgaggcccatatcgcctacatagcggtaggcaatttcacgccaaatccggacaacctcgtcactgtcgaggacgtggttcaggcactcaaagtcggtaagccaacgaacatggcgttcatttcctcccccggcatggatggcaggaagcgcatgggcgtcaaccaggtgggcgtctactaa

SEQ ID NO: 367021 - DNA, 213 bp, Pseudomonas aeruginosa
atgtccaccgcgcaccccgctccgaaactgaagctctcccgcaacgccaaacgcgccattaccagctatggccgtcagaagtgcgtcgatgccttcgagatgaccaagccgggcgacggtgccagcaccatcgggttttccctgggcctgaccaccaaccaagctgacgcggccatcgctgccggccgcgagctggctgctggcgcgcagtag

SEQ ID NO: 367022 - DNA, 192 bp, Pseudomonas aeruginosa
atgagcattgagggaatcagaatttccccccgcaagcagcgcatcatcgagatcgctgatcagatcatcgagggccaggtcagcaagggcgttctcgacccggaaaacgagcaggccatggatgccgccatcacgcaggccgttaccgacgctgcagcgctctacgacgccgccatcgaattcatgagctag

SEQ ID NO: 367023 - DNA, 180 bp, Pseudomonas aeruginosa
atgcgtacccccatctttgcaggcgcggccccaggcttcggcaagaccgtggtcttcgcgcacatgctcttggccggcgtgctgggcaacagcaatcgcaagccgcgcaccgatcagctgccggccttcccccgaaacaacctttcgagcgctgtctgcaaggccattggccgtccataa

SEQ ID NO: 367024 - DNA, 237 bp, Pseudomonas aeruginosa
atgagtaacgccgaacccaagactgaagcccagctgcaggcccagtgcgatgcctggaaccgtgcgcatgctgtgggcaccgtagtctccttcgagagcatcatcggcgagggggagactcatcgcggcgcctccaagacgccggcgcagatcctgggtggccataccgccgtgatctggctcgagggcaaatccggctgcgtgtgcctcgatcactgcacggccatggttgcctga

SEQ ID NO: 367025 - DNA, 189 bp, Pseudomonas aeruginosa
atgaccctcatgaccctgtactactcgctgcaggctgatttcggcctcgagcgcgagaaggaagttgccagcgcggaggaggcccagagcttcctgcaaacggccggcaaggtggcctggtggtatctgcttgatgccgatggcagtgaagtcgccagcttcgaatccggcgccgccgccgcagaataa

SEQ ID NO: 367026 - DNA, 189 bp, Pseudomonas aeruginosa
atgagcaccaatgaaacccaccgggattatccggctatccaatgccccctgtgcgagcgcctgcgcaagcccatcagcctgaacaaggacggtagcgtcacctacagctgcccgcccgatcacgacaagcacggtgatcgctatacctggcgcattgccgtcaccggggaggtcgtcgagaaatggtag

SEQ ID NO: 367027 - DNA, 276 bp, Pseudomonas aeruginosa
atggtagttgccagcaccctgcccacacctgaggcgcttcgtgagttcctccgggcccggtaccgccacgatcgcttcgaggggcgtgacgggccgctatggggcgccaactactccggggtcgtcgtcgatggctatctggaaacgctgaagtcggccggctcagcctggatcagccggcacgaatcgaacaacggctttgccatcaagttcgacgccagcctgaccattctggttgacgactctgtccggccagccgcggcagtatcctgctga

SEQ ID NO: 367028 - DNA, 492 bp, Pseudomonas aeruginosa
atgatgaccaaggcgctgcgcaatcagaaggcggatgcgcggagattcgctcagggcaatctcccgcgcctggcggctgatgtgttggactggcagcgatcggcagtacttcctgccgatagccttatgcacgcgctggccggcctctgcgggtacgtctctgagtcctatgcggaagctgagcggctggttgctcagcttgccctggagcaggccgcgcagacggcccaggctggcagtccggagcagggcgaacaggcaacagggcatgcgcttgctgatcaggtcgggccgggcagtgacgcctaccagaggatgcttcccaagctgctcgagatgtcggcagtggtggacagcatgaccgacgcccaatacgcggcctggatcaactctctcgaggaggacgaattcctcgcctacatcgcagtgtcgacctctcccgagtcgctgactgccgctgtagcagaagccaaagcgatgattcgcagctag

SEQ ID NO: 367029 - DNA, 435 bp, Pseudomonas aeruginosa
ttgagccagatgaagaagaacgtacccggcggcacctggatcctgctggccattctggtggtcccgatcgtttggctgttcgccacccagcagacggatgatcagaaacgcaaggctgcccagttgaagttcgtcgcccagatcccgcaggtcggcaccgttggccgctggcatgacgatctgggctcggcgtcctacggggacgccttcatcaccatcaccgccgagaacggccgctacctggctacccgcgtcagcggggatggcagccggacgacccttgcgctgacccgccagggcgagcagggcaattccttcctggtcgacaacgacaaattcggcgcccgctacgtcatcaccccggccggcctggagctgcacgacagcaagggctacatccgcaccgccaaaccagcgggtgacagtgcccggtga

SEQ ID NO: 367030 - DNA, 192 bp, Pseudomonas aeruginosa
atgtctaaagcagcaagagagttcttcgtccaggtagacggtgtgcaggttcaagcgtgggttgcgcaggatcggcaggggtaccgcgcctggggtgattaccgcggcaagcaaatcgtgtgcacggggcgctcggaaggggccgccagggccgcttggcaggcagcggcggactatgcctccaaggagtag

SEQ ID NO: 367031 - DNA, 1560 bp, Pseudomonas aeruginosa
atgtttcgatccaaggcggtaccactctcggtagacgacatcaagtcaggtcgttttgaaatcctcgccgaaactgttcgagcaaaatggccgttcaaagcgcggccaacaagagaagaagctcttgatatcgtggcaaagagtcttgggtacaaagactttgacgatgcgacaaatagtgcaactgttactgctgtggtttgcctaagtattaggtcggatgtttcgagcagatttacgaagctcggatatgcgccagcagagcctcgatttggaagtgctgagcgaccattcgatatgtcgtctatttttgatggatcgatgtttttggaaaacaaggctgcccatgacttcgtggaagagtggccgcttgatttaataagtagatggaattatgcgggcgccccggcgatttttggtggggctttcctgtctgaacaggaggagctattcgacttcatgtggatgtatgacactaaagagtctaatggcttctataccgcgactaccagtagatctgctggcactgttgttgcagctgtttctggtggaataagttaccaagacctaaatggcatggtgattggagatctgattgatcccgagatgtccgaggctctgttgcaggacgtgatgccaatggtcattggacgaattctcacggttaacgaggcagatgctcaacgactcacggaagagacgggaatgagcatgcaggacctctggaggttaccaaggacagaatcaaacttcccatcgctttatcatcacatgcgaaagcgtatgaaggatgatctgcttggcaggcccgttctggatctgtatcaagcgaagcgaggtgacaatgggttttactacttcgcaggcgatatagaccatcgtgcagtaaaagttactgaagaggttcttgagggctttttcgattttgctgttgaaagtaactacctagaatctgaagttttccgatcctacagttgcgtggggcagctaagaaataaaagtggggatgttctatctcaggtttcaggaagatatgttgctgggccggcaaggctcgacgtgtctgggatggacttcatctctgcgctagatgaagtgtgtgacgatgatgtggaggttggtgataatcttctgactatgcttcagaatcagatctttgctgaagtcgatgagttgctggagaagtcatacattaacaccaggatgatttttggctacggcaatttatttatcctgtcaaactgggagcgatccgaacgggctgagaagggggtcgggatcaagctgcttgaatactgtattggtcaattaaagaagaaatacaagcgcaacatttgtattgccgggctgattgagcctaatcagtatctcggtagtgcagggagcattggcgtagtagctgaacaatgccaaaaagatcgggataaaatatgggatcagctgagaaaggttggacgtttgccgtacgtatttggaatgcacgccgcaagcaggtctcaggctgaagggccgtctaccttttccaggtactgcggcgagtcatacggcgatttggactga

SEQ ID NO: 367032 - DNA, 531 bp, Pseudomonas aeruginosa
atgacttacgccaccctccccgatcgcctgctggacggcatggagcgcgtctattccatctccatgctttgggaaggcacgccggcaaccaccaccgacgacaaagagcgccagctgctcaacctggtgctgcctgcatggcaacgccccgtggtctgggatgagcagcagcaggtgcgcttcatcgaaggcatcttcctgggccttggcactggctactatgtcatcaacggcaaggactggaacggcgacggctccggcaagcacatgtcgggctggctgctcgacggtcagcagcgcatcactgctatcgctcgcttcgtgaagggtgagctgtccatcttcgacggcgtgcgttacccggacctgagcataggcgatcgccgccgccgcttcgacaacgtcattttcccctgcatcgaactgaagtacgtggacgacgaagagctgctcaagaccctgtaccgccgcctgaactacggcggcaccccgcacacccaggccgacctcgaccgcctgaacaaggcctaa

SEQ ID NO: 367033 - DNA, 555 bp, Pseudomonas aeruginosa
atgaccaacaccaccaaactctccgatcgcgtgcgcccgaactccgaggcagcaccctgggtcatcgaagagatcaaacgcctcgaggcggagctggcccgcctgcagcaaccttctctcaccctgaccggccacatgctgcgcgaagccctggggctgattgcgcccgacggcactgatgagcagctggatggcgagctggtgctggtcaagtaccaggacggcgcccattccggccctggcatctacgcccactacgaggaatgccccgaggaaggcgcaaccctgatcgacggcgagagcgagctgggcgacgccttcgtgccggccgcatcggcatcggccgccgtcccgcaggtatggcgtagcaccctggaggccgtcacctcctcgctgcgcgatctcaacagcgttcagcgcgagaacatcgacgacgacatggaagaaccggaagtcgagcgtgagctgtgcgatgagacagacgagctggtcgaaagagccgagcgccttctggcaactgccagtcagtccgatgcggactccgaaagcgtgtag

SEQ ID NO: 367034 - DNA, 1179 bp, Pseudomonas aeruginosa
atgagctcccctgccatctttctgagaccacagcttgctgcatcaatggcccagcagcttttgcagccgtctgctttggacgttggccttcgctccgggctgttcctgtcgggtctgcgccgcaccggcaaaaccacctttctcatgaacgacctgattcccgcccttgaggaacgcggggcactggtgatctatgttgacctctggtcagacacgtctacgcccccagccaacctggtgcatgcggctacgcgcaaagcgctgcaagacacactttctccagcctcatcgtttatgggccgcttaaaagcactgcgcggcgcagaaattgaggcggccggcttcaagttcgggttcagtctcgaaacgatcggtgcggaaggtggaccgacactcgcggaggccttggtggaggttgttgatcaagccaagaccgatgtcgtgctgatcgtcgacgaagtccaacacgcgatcaccacagatgatgggttgcagttgatgctggcgctgaaagcagcccgcgatgcaatcaaccctcgccccggcacaccgggacacttcctcttcattggcaccggctcccaccgggccatggtcaatgagctcacgacgcgccgtaaccaggccttcgccggagcaacgaatatcccctaccctgttcttgaccgcgattatgtggagttctggctgaacaagcttcagcaggaaggcttcccagtcatgccaacactggatgctgcatgccgggcattcaataccctgggcaatcgcccagaggaactgatccgcgctttcaggcagctagccaacactccgatggctggccaaaaccccgaccaggtactgcaggtgatagctgccacgcttcgagctgcggcagctgatgtcgagctgacgaaggtggaagagcttggcccgctggcccaagccatctttgccaagattgctgctgctgacggtaatgtccgcggggtgttctcagcggaggccgctgccgagtattcgcgttcggtgggtcgggaagtgcgcattgaggaaatccagcctgtcaccaacgaactgcttgccgccaacctaatcatgcggcccgagcctggccgttatggcgtgacagacccctttgtgaaagagatctggcgagaacgccaagcgatgctgacaggccagttctcaacctga

SEQ ID NO: 367035 - DNA, 534 bp, Pseudomonas aeruginosa
atggatatcaaatccgaactcgcggcagccggcctgcagatcgtcagcggcaacatgcgaatgctcgcagcgctgggcgccggagtggacatcgaggcgatcgacgaagccggcgccacctatcggctctcgaccaaatccgggaagctgactgtcgaaaaggctgagccccagggccaaggcccggccgcagtcatccagttccccagcgctattcccatgctgcccatcgaagcactgacgcaggatccctccgtcgccacccagatcacctactcgttccgcgccgaaaccgaactggataccaccctgttcctgagcctggtgcgcagccagggctatgaggtggccagcacggttcatagcgacgctgacggccttcctgatgtcgatgtcgagatgcagtgctccgcaaccctcgagcagctgcagggcatcctgcggacgatcaaagatgcccacgtgatgctgcagaccctgcgccctgtgcagctggccgacaactcgctcgaacgggactacgacctgcactga

SEQ ID NO: 367036 - DNA, 207 bp, Pseudomonas aeruginosa
atgtacactgggattactacgagaaagaccttctgggcagcgaagcccggccagactgagtgcctcgaggtcgtccttgatggggcctgtggcgacaaatgcggctacgtacgctgcatagagactggcgaccgctggatgacctacggctacaccaccctggccccggccggcgaaatcaaacagacggttcagtactcgcgctga

SEQ ID NO: 367037 - DNA, 357 bp, Pseudomonas aeruginosa
atgacgacaggcaacgcagtcctcccgacccagaacaaagaatggggcttctgggggaccatggcgcacgagaagaaggccaaggaatcctggccgctggccatggccgccgtcggcgaggccacgaagcagccggcgaatgtcgttcgcgacttcctggacagcaaggacgggcgtcacttcgcggatcaggtcgtgctggcgctatcgggcggcaagcatctgccggacgctgtgagagaagccactgagctctggatgcggcccagcaagaacaacccgatccacttccctgaccagcctgctgataccccctacctggtagccatcatcaaggactacagccccgaccagtga

SEQ ID NO: 367038 - DNA, 735 bp, Pseudomonas aeruginosa
atgaccccagagggcgttgatgaagcacgtgcatacgttgctggcctgatgggcgtcgatcttgggtcaattggcgttgagatcattccccttcagcaatggcaggatggcggcgctgagggcaagcactaccgggccggagtcgatcagcatttcatccttatgcccgagcgagtcgcttcgccggttgaggttctggttcatgagtttgggcacgcggctcacacgatcctgcagcggcagaatggggagtacccgtttttttacacagctcccaatagcagcgagttcatcgcccatttttgccagtacaggtacgtgctggatcacctttctagggagcatttcctggtcgcactggggcagctggtgacagcctccttcgcgctatcaatcttcgcttctgggatcactgacgacgttgaggagtatctggcttccccgcaggcgcaggagattcgaaatgggtggtcgtttcccattttgcaggcgcagtacgagctgttcagccagaacgagcactattgggtggccgagtgcaaccgggcgatttcactcatcctggcgttgctgctgatcgacgaagtcgaaggcatgaggcgctacgcgagcttggatcgcatcgacgtgccgctggaggcgaagcttgaggccgctttcccaggtgccctggcaaaaatgtccttcgcggacatcaatgacaagatccaagaactgctggcccgtttcgaatag

SEQ ID NO: 367039 - DNA, 321 bp, Pseudomonas aeruginosa
atggacacttacctggatgacaacggcaacttcgacgtgaagcgctgggccgcctgggccgaaaagcgcggctacctgccctggcagatgacgctgtccgaatacagccagttcctcgatcgcgaccggatacctctggaggagctgcgcgcaaagcacagcctgcataccatcaccctgattgagagcgagcggctgtctatcaagcgcagcgcgatggagcagcaccagcgttccgtgcagcacgccctggagttagggaaagacgttcgaccagaggtactggccgactacaacctggcgccgaaagccgcagcataa

SEQ ID NO: 367040 - DNA, 1344 bp, Pseudomonas aeruginosa
atgaaatcgagcgacatgtacgacaagatcagcaccaactcgcgctcctacgagcagcggttgcgctcggtcgaaaaagagctctcccaggcccatgagcatgagctgcgcctgcagcacagcatcgccaaggctttgcgcaacttcgcctccctgcagatcgaggagaacccggccggcaacgctgaaattgagctcatgctcaagcgccgagcttcggccgagaacgagctgcgccagcgcctggccggcgccgaggccgcggtctcccagagcctcgatttcgcacgcacgatcacgaccaacatcgagcaactcatcgagcaggtcgatcagcgcctggcggtagatacccactaccaggatctgttcgcgctgtcgctgtcggccaagaacaacgccgaaggcgcccgcggcaaatacgaagagatcgcgtccgagtgcaccgagaagctcaaggcgttcgaaacggaccgcctctatcgctatctgcgagccgccaagtacggtaccgacggctacacccgtggcggcctggtccgcgcactggatcgctgggttgccggcttgtgcaacttcatgcagaaccaccaggccgagaccaccctgctggctatgcaggccgccaacgagagcgaatggtcgctgctgacggcaagcttcgatggctacaaagagcagctgatgcagctgatcaccagtgcccgcgccgaagccggcgtgcccgagctggtcgccaagcaagaagccgctgaatctgccgccaatgcggctaaggcccgcgccagctccctgcaggacgaactcgaggctttcgccaacaagtccgacagctactacgaggccatcctcaaggcgctgaccgctcagctggccggtaaactgccgtccgaactgcgcgccctggccgcagcaactcccgacagcggcgatgatgtcctggtcgagcagctcgaggacctgcgccagcagctgaccagcaaccaggccctcgccactcgcctcaaccgcgagtgcgtcgaagccaaggatgcctacgagcgtgcccgcgacctggagcgccagctgaacaaaccccgcttcaagagcagcgactatcgctattccagcggactcgatctggatgctctgctggtgggctatatggccggcgcgatgagcaaccagcaggtggtgcgcgaggtcgactcgcaccgggagtccgtaccgtcctcgggcggatatggcggcagctttgggggcggcagtacctggggcggttcaaacaaagatggcggcttcggcggtttcagcacgtccagttcggacagtggtggcagcttcagcaccagcgacagcctgtag

SEQ ID NO: 367041 - DNA, 1431 bp, Pseudomonas aeruginosa
gtgagcgccgtcaccttgaccgaacagatgggggccatggccctcatcgacgaactgcggcatgcgcagctggaggtccagaagcatctggacctgccggctcggcgccaagccgttgccgatcgcattcgcgagtactacaagtccaagggcatagctgtcgatgacgccctggtagaccaaggtgtgaaggcctacttcgcatcccgactgacctacgaggcgccgaaggttggcgccctgcagggcctgctcgcacgcgtctacacgacccgcgccaagtggggcctgccggctggcgtggcgctggtgctttccatatcgctgttcttgggcgggaattacgccttgcagcgccaccagcaatacctggtcgaccgaacggaggcgctggtggaagctgccagcgtaggggctgaacacatccagagccagctcaagagccagaagctggccatcgtgcagctggaggccagtctgtccaaatcggacccgatctcagtccgccgcttggtggaacgggtgagaatgtcctttccgcaggtggatggcatcgactgggtgaccttgcccaagcacgtgactccggagaaccgggaggaagctgaggcccaggtagaggactcccggcgccagcaggacgaggcgcttgccctgctgaaggccaacgaccgcatgatcagcagcgtacccctcgtgcgagaggcgaacatgcgcctgctgcgcataacttcccaaccagggtacgcggctgcagctgaatcgacaccgcggatcagagccctcgccagttcggcccggacggtcatcgacacagcggaccagggcaacagcaatacatcgatcaccaacaccctcgatcgcctatcggttctgatgaattcgtaccaggacctggagccgcgacgggacaagctggcgaagctgcgccagcaggtgggcgctatgggcctgtcgcaagcggatctggcgcagttcgaccccatcttctcgcgcattcaggaagccctcacggacctcgacggcgccttcgcagatgagatgctgcgcaaagcctccgcggttcaggcctatgcagcaaagccactgactctgggcgtggtcagcagggctcatgaaaagtcgatggtcgagcgcaactacgacccaaccggcggcaagtcctggtacctgctgaccgaagccacagatgccgccggcaacgtggtaccagtgccggtgatcagcgcggaaaccggtcggaagacgatggccaaggtgtttggcgtgcgcgtcgaagaggcaacctaccgcctcgcctacaaggacaagaaagcggacggccgcgtcgacgaccgcgagatgggccacaagccggcgaattccttttcgctcaacttcaacagcaaccgggcagtcgttggccgtccggacctgattaccgagtggtaa

SEQ ID NO: 367042 - DNA, 1134 bp, Pseudomonas aeruginosa
atgatcaccaactaccttcagcgctccatggatgcgctgtcctcgatcggcttcagcttcaagtccgaagaggcgcccgtgttggcgctgctcgaccgtatctccggctatgacgccaacctggttaccagcatcgcggccaccctgacccaggccccggtagtgaacgcggctctgcgcgagaagatccagggcatggaagtgtccagccgctttgccgacatcatcaacagcttcgactccatccgcaccgacgcccagcagatggccgactggatggcggacggcaagctccagttcggcgagcgcattcagctggcctggatgaaggtgcgccgcgggtccatcccggaccgcttcgaagacatccgcaactcctacctcgacgtggccaaggacaccctcaagcagctgcagctggaaacccagatcctcgacgcctaccaggactaccgcctggccatgaagcaagcagaagtcgacgccgcttcggtgaagaaaactgccgaggctgtgctggccagcaagcgcgaagccctgaccgccgcggtaactgccctcgaggccacgaacatcgatccgaccgaacgggtccgcctcgagttcgcccgtgacgaggcgcaacgcaacctgcaggacgaagacaagcgcttccagatcatcaccgacatcgctgatcaactgaaaacggcttacagcgccgccgaactggtgtttgcccggctgaaccagtaccacacggtgaaagagcggctgtatgagcgcgctgtcagcttcttcgcgaccaacgaggttgtcctgaccggactggctgcatcgttcaccactgcggcaggcctgagcgagaccaccaacaccatcaacgcgatgtccgaggtcctcaacgccggcatcgaagcccaggccagcaccggcggcaaagtgctcgatgaagcgctcaaggccggctatggctccaacatgaaggtcagctcggtcaaagcgctggcggacgccgtggtcgagttccagacccaaagccacgacatgatctacgaactgcgcacccaggcccgcgacactgcagaagagatccaggccatcaccgacgacagcaagcgccgctacgctgcccttctgcagaaggcggtctga

SEQ ID NO: 367043 - DNA, 216 bp, Pseudomonas aeruginosa
atggaatcgaggctttggacggtcggccgcttccctgcaggcgtatggagtggcggcggtagcaggaacgacccggactactcggagtgtgaggtctacctgatccacgcagagagtctggacaaggcaaaaaagaaggctcaggccgtccgcgctcgcctcgtgaagaagggcagtgaactcccatcgcaagcctctccctaccaagcgaactaa

SEQ ID NO: 367044 - DNA, 201 bp, Pseudomonas aeruginosa
atggccacccagaaagtcaagctgaccccggcacagatcgctttgctcgctgagcgtaaaggcaccttcatcgatacctacaagcccggaatgaagttgatcgagctttccctggtggacgccagcaagagcaaatttggcgtctactcctgggccatcaacagcgctggcgagacatttcttgccagccgcaagggttga

SEQ ID NO: 367045 - DNA, 432 bp, Pseudomonas aeruginosa
atgaatgcccgtgatctgaaagacctgcttgtgagtggcccgctggctatcgagcttggcgaagcggtagttgaactggaggcctacgctgagcccaggatgcgagcgcacctggtcgccgtcgaactccagcgggacgatgttgctgtcttgaaggtcgattacagcgcctttgaagacttcaacaaggtgtttgagcaggccaactactacgacgcccagggcaacccgacacttacagcccgagaggcaggccagtatcagcccaaagaagacttgtacgtcatggctagcgatgacctggaatcgaagattctggcgatactgcccagcgtatccctggccttgatcgacgaattcaagggcagcggccatgcgaattatgtgcgctggctggaagagcagctggccgctgctcgcaccacgaactga

SEQ ID NO: 367046 - DNA, 159 bp, Pseudomonas aeruginosa
atgcctgacaagttgaaagagcttctggagacaattccgcagcaaccgcagcgccaagattcgaccaaggcgcaactcgccgacctgcacgccttcgccaatcgcctcggcctgtacgatgctgcagacgcgatcaaggccatcgtcggccgccagtag

SEQ ID NO: 367047 - DNA, 948 bp, Pseudomonas aeruginosa
atggacttcatcgctcgcttgaaaggatttttctccggtcgcgaagagcgccctgaaatcggtgattctgtttttctcttgggcgatttcatggggatgtactcaacctcgcccaacggacgctggttggtgtcctggatggacgcggatcccgcccaaaggggggtaggtggttcccggcccggcggtgacggcgcttacctcctctacgacaaggccgctaatcgtgtggtcgtaagaggtcgcacgcctcgacccagtgccgggcgggtagccaacaatgggacattttgtcttgaagaccgggactttggctcggccctctccggcactctgcgagtcttctcctgcagcgggcattccatcgcccaggtgccagttaccgccaacatcgtcagaagtgctctatctgagaatggcgctttcgcactcatccacactgccaattcgccaaccgatgacggctctaagcttttcctggttgatctacagggcgggaaggtgcgctatcgggttaccccgagtgccggctggccagatcgctacggcttcgtcgagaagcaggggatggttatcgcctatctggaagggctcggggagttccgatacggtccagacggtgcctttatcgatgaggacaagctcgatcgagcaatgctcgactccccgcgctacgagcatgcaatccccgctgctgagaagcttctgagccaggccggaacatcggaggcaagtgctcaggaggcgctgcgcatccttcttcgagttcggcagaatggcgcagacatggccgatgcgtggcacgcacgctgcctaaagatgattggtcaggctcacgaagcgttgggggaaaaccgcgacgccattgatgcatacgaccatgccctatcccttgacccgaaaattggtgtgaagcgcaggagagactcgctccaaaagcgactttga

SEQ ID NO: 367048 - DNA, 240 bp, Pseudomonas aeruginosa
atgatgctgcaccttgtgactgaccagctcgatggtgagccgaacatcttgagccaagtaatgcacgaggcctttgagatccgatcgctctctgggcaggtgatcaaaacagttcccgccccggcgttaggttggacgcatgaacagctgacggcggccgtcatagagcatgatgaacatactcgcgaaggcgccgatggctacctgggcggccaatgggttggcagtacagaggtctga

SEQ ID NO: 367049 - DNA, 2007 bp, Pseudomonas aeruginosa
atgccaatcgacccccttgatgaactcgctatccaggccataggcctctgggagcgtctctctgggcgtaaggttggagccaccgcgttcagcatccaaatgaccgatgccagccgcgagctcagcgctggatgcggactcatcgataaggccgttgcactgggccacgggctcagcgttctcctagtggtgcgcagtgtcgttgagcggatgagcggggcagggctgctggccgattacgatcaggactcagtgtccgctttggcccgcctgttcagctctccggcctgcgccagcgcttgcgctgagtacttcctccactgcgaacgcgcaatcagccactaccgcggcgatgccggcaccggtgatggcatatcggcattcgttcgccaggaagctgcgctgctgaatttggacgctttcctggccatgcagcggctcactcggcttcaggccttcaacggaccacctggtggctcggttgagccacagctgagccagttcgtgctcgcattccagtccatcgagcagctgctgcaacacgcccgcgagatgcccgagggcttctccctgtgcacgatcctctgcgagagcatcagcgacagctacttcgtgctgctggtgcgcaacggacagcgtgtgacgctgctgaccgacaagggtaagttcgcccacccgttgcagcaggccatgatgcgcggccgtaatgatcgctataaccagtaccgcatcgcaggcagtcacttcccgtactcactccttggcatcgtctgggctgaccggggccggagggcgtctgccggaacctctcaagctctggagctgaccagcggcggtatcccctcgatcgggagcctggctgacctcgcgccgagtgaactgctatggctgcacctgctgatcgagcaatgccgtgtccgctacttcgaccagcaggtcgttgagccgcagctggcgctcgggtcgcagatccggctcgagcacagctggttaccggcctccagcaactcggtgccggccgtgctcgaggcagttcctcctttggaggttcgtcacagcgccgaactgacaacggacttcatgcagggcatggagccgacgtggtcgaacaaccggacgcccaatcgctggatggagcgccgctacgccccattggtgcctgccgaagctctgtacgtgcctgaggccgccctcgatggaggaacgctgctgctggagcacgcagacacctccacgaggcttgtgcgggccggcggcgccctggcccatgaacgaatccccacccaggtgatcctgcagtcgatttcaagcgaccttctggccacagccgaggaggtggctcgtgacgcccactatatcgcccggagcaaccaggcccaggtgatcaaggttctggcccgtcaggacttcgaagcccggcgcatggagatgctggagtggttctaccgcaaagcggcaaagaaccttcccaacctcctcgaggcgctgcttaccggcgatagcgccccgttccagctggaccagcccaagcaccaggccgtcttcgacatcaccgggttcaggcccaccggcgccagcaatgcgcggaaggtgagcttcgaatacaggcctgcacgaaagcagtacccgccgcgcaagtctgatggtccaagtttggccaaggccctgaagctggttcacctgcgcgacctgtgcgtctgttgcgtactgtcaaacatggagcaggcccaggtattcgtcagcgtgccggtcaccaatgcactcgacattgccaacctgactggcatcgcctgggaaaagcttccggaagagctgcagtaccttggcatgcccctgcagcagggcaacagcatcctggagcgcctcgacccgctgcatgggctgcccaacccatggaaggggttcgagccgcgatacgtggttccagtagggctgcgcggcctgaaagacttccgcaaggcccgcggcctctccaccccgaaggcggaagacctgcagcgcctctga

SEQ ID NO: 367050 - DNA, 357 bp, Pseudomonas aeruginosa
atgagcaaaaaagctgttgagatcgacctggcctgggtgggcgatgagacccagacacttcgagtgcacgccgtcctcgaggagggtcggctcttttcgactgagatgtacggtcacctgtacgaggagacccagaataacggcaagcagatgtggccgtgtttgctgcaggatgaggacggtgaacgccgcaggtacgtagctgagtggggctacaacgacgcgagccacaacaccttcgagttcctggatcgtccgctggagattggtcaggaggtcaaacgcaccgatctgttcgacaactcaaaggtcgagtacgtctacaaggtggtagggctgagggatctcctggcctaa

SEQ ID NO: 367051 - DNA, 312 bp, Pseudomonas aeruginosa
atgtctacttccaaactgatcaacctctttgacatcctcgacgttgccagcgagcttgcgctcgacggtgatgacgtaacggaatgggtcaatgagttcggctcggcgccggcaacataccgaatcgacactgccgatggattccaccgcttcgaggaccagctggtatcgctggaccaggatggttgtttccacgctgattcggtaaagggtgttgccgtcaccatcgaggcaaagatctcgcgccctgtgacctatgaggatgtgctcaaggcactccccgaccagatcaaaggagtagctgatgtctga

SEQ ID NO: 367052 - DNA, 279 bp, Pseudomonas aeruginosa
atgtctgaagtgcagccccaggaaagccgtgaagcgcagaattgggcactgaaggcggtcttccggccggatcttcaatccgtcctgtcgcgcatgactctccagcaactcgagatcttcaagggactcgctgaacgcattgaggtagacgaagacctcacactgcgcgtggcacccgaggagctgagagcggagatagcacgaggcatcgaagagtcgaaagagcagatcgcgtctgctctggatctcatcaaggccgagttgttgaagcgacaatag

SEQ ID NO: 367053 - DNA, 714 bp, Pseudomonas aeruginosa
atgactcttctcctaccttacggaccctatgccggcgtgaatggcaacttgctccgaatggccgcggccatactggccgatctaaagtctgcaaagctttacgacttggctgttgcgctcggagtgagccccgccgaagcccagccaacgtgggagcaacttgtcgcggaaggattcattgaaacgtcagctgaaggtgccagaccgaccagtcgaatggatgacttggcccgagccaggttcggaaatccgcttcctcgaaagaaggccgaggctctgatagaccggtcagtggccgcggctaaggcgttgaatgccctacctcttgatgccccattttactgggtgacccgactggctgttttcggctcctatcttgatccccaaaagctagaacttggtgatctggatcttgcttgggaggtagaaatgaggccgaaccaagagaatctcttctgcagatccatcatgtataaccgtgacccacttcagccaactcgtgcaaagatttgcccgaaagggccttacgttcgattggccggctttgatgaaatgcttgcgctgaaatgtccgttccaggtggtttacacgttcgagtctgaagagctcgagcaggctcgcgcagataaagccgccaggcacgagagagacgctcagcaagaggatgtactagggcttgaaggccttttcatttctcccgattcgcggctctaa

SEQ ID NO: 367054 - DNA, 759 bp, Pseudomonas aeruginosa
atgccacgcgcacccgccccgcttcccaagcggattacgctctactggggcttagatcgactgatagttgaagatccagcttggatcgccaagatcgttcgggagatgcttgagaacagcaaagattccgaacgtatcgggctataccgaaacgcggtgtattcacgcagggaagaacaaattcaggaaggtcttcgtacatttggtctgggacctggtttgcgcgacccagccggcccccgaatgcagattggttatcaagccccagcacttcagggcccagtcgcggccgaagctctgaagctgttcctcggcctggagttacccgtcgcccttcaccagagaagtacatggggccgctcagaaggccgagtaaccgcagtgcatgtagccatcaggtcgtgccatagctacagcttgttcgaagatgaactgaaggtgtgcttggtgttcaacgggtttcagttgtactccacgcaccatctcggccaagagcttgtgcgcccctttcgcagcgaatctcgctgctacatcgagaggcgactactagacgccaaatgggtccgctgggggtttgatggcgcttcttccccccaggcagggagacgctggggctggggtgagcgcatttactacttcacaggaaatggagtggagcgggttaactcaactgactcggatctgcagcccgtctacgaagaccacgatcccgacggcatcgaaggcgatgaaaaccaacattcacaaggggccgtatga

SEQ ID NO: 367055 - DNA, 1497 bp, Pseudomonas aeruginosa
atggtcgattcatctcagtccgcaccggagtggctgcaaggcccttttctggctgtcgccgattcattggaacttggcacgcctgcctactacctgtcggcacatcctgcacagttcagcccggagctggtctccaggatcaagctggttgcgaagcacctttcgaaggctgccggcgcccaacgctcattggcgctagaatgggttgccatagctctgcagttccagaactggcaccagctgagcgctcacttctcgaatgctcccaagtcatccggccatggtgtccatgatcagtgggcgtcgcggctgaagctggcgctggtgctgctccatgagaacaccccggagatggaagtgcctggagcccagatcgaggccttcgagtacttcgcagcccggctggccaatgcatcaggattggacattcccagagtgctggacgaggtactggcccgcctttgctctgcggggaactggggcgaggtgaaggatcgtcaccccctgaactcctccaagcccctctacaagttcgttgtcgacacggacgatggcgaagatttcagcggatttgtcccaagcgaggcatgccgccagctgcagcggatgcacgatgaccgattaggcgaggctttaacccaagagcacgaggatgccatgaacgcctggctggcttccgcgatcaagaaacagccgcagttccttgatggtggcctctccctggcctaccacttgtatgagcacggcaatcaagtggctgcgcgtacgattgtcgaccaacagatccgtgaggcaaacgctctcatacccaaggggttccgcggcaaaatccgctgggaccggctggataatcgtgtctatcaccgcctgctatggctgcagcttaaaattgcccatgctgagggcgacctgaagaagtgcctgagactctgccggcgcatgctcaaactgaaccctagcgacaacttgggggcacgcttcgtacttccatggattcacctggaacagggcgagacacagaaggccctgaaggctgcaaccccaggtagagaccagtacttctgcccaacgatgcgattggcgaaggcattcgcatacttcgccaatggtgaccgccggaggttcctagagcacctgctcaacgccctgttcgagctaccgatgctgcgcagctatctgctcgatgaacacgctcttgcgcctgatgaaacaggcaatcgtggtgtgatccccgatatggagcttttccatcacttctggtgggcgtcctatcaatcgatcgaagggctcagcgctgcctgcaaggaggtcctggacaggaaggaagttcaggatgcagagcagtcgctcagaacctactggaacggcttctggcagaggcgccaggaggcggtaggcaactacgccggttgggaggctttgaaccagactctccaccgcagtctaatgaatgagttgcggcatttggatgtggattccggtcgtaggttagactga

SEQ ID NO: 367056 - DNA, 711 bp, Pseudomonas aeruginosa
atgaccgatgagaacacgcagtccgatgtcgtccatatcctctgtgacatgcgtgagggtcgctcagggatcattgaggccctgcagtcgcgatacggcgccagggtgcaggttggcgagctggagaccggggactatgtcctgagcggcgagatggtggttgagcgcaagacggcggtcgacttcatcaactcgatccaagacggacgcctgtttaaccaaattggcaagatgcgcctcaacttttcccgccccatcttcctgattgaaggcgatgtctacgggactcgatcggcgattacgcgggaagctatcgatggtgccctggcatttctcgtcgccatacacgggtgcacggtcctgtacgtgaaggaccaggctgcagctgctgggctcatcttccgcctagccaagcaggcacagcatggccttggatacgacgttgccttccgccgcgggaaaacctcccctggccggggcgaggcgctgtttctcattgaggggacgccaggcgtaggcccgacaacggcaatcaaggtgctcaaccactttcgctccgtgcatgcattcttcacggcctcgatcgaggagatgcggaagattccaggccttggggctaaaaaggttgagcgcatccatcaggccattcactggaagatggaccatggcgacgaagcgaagccgggcgaatcgctgttcagtgatgattag

SEQ ID NO: 367057 - DNA, 453 bp, Pseudomonas aeruginosa
gtgcgggcgtttctggaaaggatcctgacgcttgagtcctatgtgtcgttctacggcagcgtgctggtcgtggcgccccgtgatggcttcccggtgtaccaggatgtcctggtcgaagatgggctatccactttggcggtgatgcacagaaacggcggggtgctcccggtggtgaacgctgagtacaggatcaacctacacgagaagtcctactgcgcctcactggggcacaccttcacggcccggtaccgggagcatcttctggaggtcgggagccttgcccagcgcttgggcagccctgcgattgagccgatgctgcgccggatgtacaaaactcggctggccatgagcgtggcgtacgacacctacctcgaggccggcggctggctcgattaccacgggttcgtatctgcggccgttgaggaaaggctccctggcgcagcccttgtttga

SEQ ID NO: 367058 - DNA, 207 bp, Pseudomonas aeruginosa
atggctatctctgcagctcaccacgatcgccccatggcggcccctggcctgaccagctaccgctaccagggcacctatggctggatcatgatcggcgcaaccgaccacgaggacgctcttcgcgaggccaagcgctcaactggcactccgacggtactggagaagctgcagatctggtcggggaatgcataccggcaggcgcagtag

SEQ ID NO: 367059 - DNA, 489 bp, Pseudomonas aeruginosa
atgaccacctcccgccccgccgtcaccgtcacccccatcgaagacaacgatggcaacctgactcactgcgtcatcaagatcggcgacatcgagatgcaggctccctttgacgagggccatacagcgctcagcaaccgcgtcgatgacgaaactggtgttgaactcacctgcaacgagatcatgacggtcaccaatgcctcgcgccagcagatggagcgcgagtatgcccgcatcaagcccctgctcgaggagcagccggccggcaccgttgcagtcgccggggacatgttcttctggctggacgcggagaatgaggttgtctgggatcagtggatcaccatcaacaagggcagcctcaaccccggtactgccgactgcatcggcgagatcgacaccgatgagctgtacgaactggctgaaaaaatccgcagctggctcaagtccccccagtaccagcaggccgatgtagcctggctgcacgcggagtaa

SEQ ID NO: 367060 - DNA, 459 bp, Pseudomonas aeruginosa
atgacgatcggctatccgcgtccgcctgatgctctggtgctcggcattgcccaggagatcgttgggaagcgctacacaacggaccaccgtgattacaaccgactgatgcaggcgctgcgtgatcgtggcctggatcaccggctgggcttctacggtgaggacgccagaacggcgaagcctgtcgtcgagtgcgtggcagagcagaacctgcgtatagccccgctgcaggccctgcaacgcaggatcgacagcctagaccgacaggtatccgcgtcggtcgcaaagagccatgccagggtcgacattactcggcttgggggggccggcgccgccggccgggttcgtgatcaggcccatgactcatttcgccgcgacctgctgcgcatgcagcgggacctgctgctgaacgagatagcacgacgccaagctgcagcgggcgaaggcccgccgcgaccgtaa

SEQ ID NO: 367061 - DNA, 525 bp, Pseudomonas aeruginosa
atgagcaaccccgaacctacctcccctgctcagcagcaagccgccctgcagctcgccgtgctggagctgctgcgcgtagacgcccttggctcccgctcatcgaccaagttccatgaggccatggtaggacttcaggccgcctattccgccctcgggacccctgccctagcacccagcgagccagaggacgaattcgagcagctgctcaacggcgcggccatcgccgcggatgagccggcaaccgtctggccgaagtccaatgatgtcggtcgctatggggacatgtccccgctggcgcacctgcgcgttgggctcgatggcgacaatgatgcctatgtgtccgtctacgacggcgaaggcggtgcggtggtcgagttcaacatgcccttcagtggcggcggcaaatcaccacgcacacgtgaggcactggtggctctgatggtcgccatggaaatggacaatgccgaagacccatctcgcaactggtggctgcgcggccagcccgcaaagagcccccagccatga

SEQ ID NO: 367062 - DNA, 1338 bp, Pseudomonas aeruginosa
gtggcgaaagtagctgaagtgtggctttgggatgtgcgggttggcgcagtgctctgggacgagagtcaaagcccggcaacagggacgttcgaatacgatcctgacttctgcgagataggcctgcagattgcgcccatcaccatgccggccgttgtcggtgaggtatacgccttcccttcactgccagagaaggccttcaagcgcttgccgccctgcttgtccgattccttgccggacgatttcggtaacgccgtgatcgacagctggctagcctcacagggacgcgacccgaaaagcttcacccccgtagagcgccttctctacgttggcgccaggggcatgggcgccctggagtatcgccccgccgcactacagtccgcggacaaggcggaagcgctgcagatgacatccctggttgagctcgctggaaagatcctttccgatcgcaagtcgcagctcgatggcctcgccataagcccagcaacgggtaaagaagaccctgcactccagcagctgttcaagatcggctcctcggccggcggtgcccgcgccaaagcgatcatctcgatcaacgacgccacaggcgagatttgctccggccaggttgtcgccccaccgggctactcgtactggctgttcaagtttgacgtgggcgacaaggccgagtccctaggcgaccccgcgggcttcggtcgcgttgagtacgcctaccacctgatggccctcgaggccggcgtagagatgacagagtgccgcctgcatgaggaaggcccgcgtgcgcacttcatgacccgccgcttcgaccgcatcactgacaacccggagtacctgggcgacaagatccacgttcagtctctgtgcgctatggatcaggcagacttcaattcgcctggggcttacagctatgagcaggccctgctggtctgccgggagctgggtctgtctcgcgatgagcagatccagctgtaccggcggatggtgttcaatatcgtcagccgaaatcaggacgaccacactcgcaacatcgcgttccaggtctggcgtgacggtgtctggcgcctcacgccggcttacgacgtgtgctggtcctacaacccggacggcgactggacggccacgcaccagatgagcgcaaacggcaagcgtgacggcttcgtgctcgaggacctggtggccgtggccaagcagatccccaggctgaacgccgccgagatcgttgaggaggtgtgcgatgcagttgcacgctggcgcgagttcgccgcccaggcgggtgtgcgtcaagacctgacagaccagatcgagtcgacacaccgcctttacctgcgtccaggtgcttga

SEQ ID NO: 367063 - DNA, 384 bp, Pseudomonas aeruginosa
atgcacctccagcgactgtcagacgatgccatagccgaacagctcggtgaagtcgtgcgcgaacgccgcgtgcgcaaagacatcagccaggagcagctagccaaggccgtaggcgtcagcacacccaccatccagaagctggagaagggcaagggaaccatcgccctactggtggcgacgttacgggagctcaagtgcctcgacttgctggccggcctgcttgtgaagcccagggttagcccattggccgtgatggcgactggcaaagtccgccgcgttcgagcctctggccacgcaagggcaacggccagggcaaccaacacatctgttcaggtgatttccaagaagcttggcgaaaatctgctgatcccgaggaaaaagtaa

SEQ ID NO: 367064 - DNA, 600 bp, Pseudomonas aeruginosa
atgagaaacctgtttttcatgcttgccgcgactctgctgctgactggctgcgacaaactgcaatcgctgatgggcgatcaagctcctacgggtcaactggtgtttgaggtgaatgtttcctcgcctgacaacgccgtgaagacctggtggcgctacctggacgcccgcgccaaagcaacgcacgagttctgcgtgttcgagaccggccgcggtaacgaaaaggacatcctccgcacgattgcaactggagacgtagagcgcatccgcagcggctttggcagttgcgaggaagatgtttacggccgcgaaatcctggaggtcaaacaggaaagcgatacccgcgccacgctactggcaaagatcaccaacgagacgcccacgaacctcgtgcccaccgctgaagaagcggagctgcgcaagcagggcaaaacgttcaagtatctcctcgagaaggacgattctggctggaaggtggcccaggtctatcaggccaacccgcgctacgtgattctcaagcagggcgatccctggatcagcatctacaagacctacgacaagtcttacccggccagtccgtcagcaattttcacgcacctgtaa

SEQ ID NO: 367065 - DNA, 264 bp, Pseudomonas aeruginosa
gtgagcagtgctgcgttcacccctatcgcccatcacccagtggtttcggtctttttcctgctggtgctggcagccttgaccctcgtgctactgagggccctgggcgactatctgggctggttgtccgtaaaggaccaccagatcactgatccggccctactggctgacctggaaggcgttaagccccctgcgtacctcgggcgtttgcttttctggttggcgctttggatgatcgtcgccggcgcctgcaaagctttgctgtaa

SEQ ID NO: 367066 - DNA, 1191 bp, Pseudomonas aeruginosa
atgacactccccgcctccggcatcagcatcgtcgacatcaccggccgccccttccccgtgaccgcggacctcgccgcccaggggaaacccaacaccgttgcactgacgcccgaggtcagtgagctgctggcgcgggactgcgtagtggctattggcgtctcaggaggcaaggactcggacgcttgcgcgatcgcgacgcaccaccacctgaacaagatcggccacaagggcccgcgggtgctcattcatgccgatctggggctcgtagagtgggagcagagcctacccggctgccggcgtcttgccgctcttcttgggtgggagctgatggtggtcagtcgcaaggctggtggtctgatggagcgatgggagtcgcgctgggacaacaatgttgcccgctaccaggatctggcttgcgtgaagctgattctgccatggtctacgcctggtttacgcttctgtaccagcgaagccaagactgacgcaatatgtgcaaacctgcgcaaggccttcccagggcaggacatcctcaacgtcaccggcatccgccggcaagagagcgccactcgcgccaagatggcagtcagcggccccctccccaaactgcagcgcaagaacgcggccggtgtcagctggaacccgatcattgattggccggtcgaggacgtggtgcacgcgatcatcaccagcggcctgagcctgcacgaggcctacaccgtctacggcacctcgcgggtcagctgctcaagctgcatcatgtcttcgctgcctgaccttcaggcttccgcgcagtgcccaactaaccagcccgcctacgtccgtatctgcgaactcgaggtcaaatcgtccttcggcttccagggcaatcgctggctgtccgacgttgcgccacacctgctgcctgaagcgcttcgcgctcaggtggcagagagcaagcggatcgccgtcgagcgcgtcgaggctgaggacctcctggcgaagcatctgctcttcagcaagggctggccacacgccctcccgaccaaggaagaggctcaactgatcgcaacggtccgccgcaaggtctcagacctgctggcgctcaccgccggctacctgacggccgagtccgtgctcgatcgctacgcttacctcctcgagcagaaggctctgggtgtcagcgtccagagggccacccgccgagctgcataa

SEQ ID NO: 367067 - DNA, 1212 bp, Pseudomonas aeruginosa
gtgtcgttgaacccgtttgatgccgagtatctggacctcaccggccagctcgaagagctgaaggcgaggcaggccggactgcaatcgaagctggacgcccacgcctcaacctctgaagcggcattgcgaacccgcatcagcaacagccagctggaactggacgaagcaaaacgcttgaccgaggcggcacgcgtcgaggctctcggcgctgatcagcggaaccagcgccacatgaagcagctcaaggccagctggtacaaccccgtgatgtggctgcccaatatcgcctcctacatggggtctctcgacgctctggataccaagctcttccaccacaagcgttgcagggtggaagaagcgaaggttgcccagcggcttgccggtgaggttgaggcactgtcgcagtacctggcctttgaagcgcagcgcggtgggattctcggattgatcgcgagcctgcagccggccatcgatcaactcgaggaaaagctcagccggataaccccgctaaaggccgccctggacgacgagttgagggcgcccctgcaggaaatccaccagtaccaggtgcagatcagccagctgcaacatgacatccagcaggcggagcacctggaatggatcctccagaacgcttcgagcggtcgcgaaagagctcaagcgcacagcaggtgcgaatccctgtttgatggggagtccaagccgcgcaaggtgatcaaggccagaaacgagagcctcagggctctggagcgcaagctgaagaagaacgagaacctggccatggacatcatcaaacgccacaccagggtcatcagcgctatcgtcattgacggaagcaacctgtgctacatcggcgacgagttcattgggctcaacgccctggtgacggtggccaaccatctcagcgggaaatacccggtcaccgtcattttcgacgggagcatccgcaagaagacccgtctttccgaaaaggacattcgcgcagccttcgcaccaggtgtgacggttcacgtcatgagccgcgagggcaaggccgacgagatcgtcctcaaggaagcagcggatgaccatgcctacgtggtgtcgggcgacaactacgacgagtaccgttttctgccggccgtggccaaggaacgggtactgaaacccgagatcctgaagaccaggatctacattccggcattgggcctcgatctggcttggtcagcctga

SEQ ID NO: 367068 - DNA, 459 bp, Pseudomonas aeruginosa
atgaacgacctgcccccaatcgacaagcgtgtgatcacctggatgttctccggcgacacgggcatgtccagcaaagccatctgcgcccacatgctgggcctgaaatacgacaagagccacccgtccgacccgtctgacctgggccgctgcctgcgcctgctggagctgatccccgagtggaagccccggatccaggaaatggcgcagcactgccctggctgggccggcctgattggtgactgggacaacatcgtggatctctactacaacgaaggcggcgtaccgcccgccaagcgtgtgcgctccatagagacctaccgggcaatgaaactggccatcgccaacggctatcgcaacgacgctcgctttgtatgcaccttcgctgcagatggcactctcttctcggccagtcgtgtcgaccaaactgatgatgaagaagagagagagccggcagaatga

SEQ ID NO: 367069 - DNA, 612 bp, Pseudomonas aeruginosa
atgtccgaaccatcgggcgagaagcctactgtcaccgtggagcaggcactgcagatcctgaacaccacgtgtgaatgcatgccacgccgggctcctcagatgcgtctggcggtcaagatctacagccccggcgccatcggcgggacaccccacgccgaggtcacccacatcactggcgggatcgacttcgacagcaacctgatgctgatcacccccaatatgcccctcactgcgctttcgcctgatgacgtggtggctatccgggagagtgtgcgcaaagggcagtcctggcattcctaccaggcctacaaggccatggacggcaagctgaaggaactgcagcagaaggtgaaactactcaccgaggagcgcacccaccttctggaggcggtgcggcgcacctgggagctcagcccagggagggacagtcagatccttcgactggggtccatcgtcgccggcggcattcggcgtcaggcaaacgaccttttcgaggtcagctgcaccctccccggctccaccctgtcctgtaccgacctggaaagcgccgaggcggcgaggaaatccctcgagagcacggcaacccagtggctccagaacctgctcgcctag

SEQ ID NO: 367070 - DNA, 894 bp, Pseudomonas aeruginosa
atgtgcgacgatcttgaagccccaactgaggccaagcagtttgccagccatgacgacctggccaaagcctgccagtttgtcgcaacgctgtgcgttgatcggtaccggctagagcgctcctttgtccctgatcctggagagctgacaggcacggtcacgtttctggaaatccttgggaagacctatgccgtaacagcgcagcacgtcattgatgagctcgaaagacaggctaaggaacacggccgtatgcctggaagctacctactactacaagaccctgggccccggtttagcggcccattcatccaggcgccagttgatgccgcggcgatccggcccgcggatgtcgctcttcgcccgattccacctgattggccggcaagcattggcaaacgagccttcgttgtcactgaggccaactgtgccccggcaactatcacccacggccaggccgtaggttttccgactcttgcgaagcaggacgcccacgacaatcggggcgttcgcgtggtgatgccttgcgtgcacgccatcgcggaattcggcagcgccaatgtggaccgcgtttccttctacagccccctcgataaattcccagaaaatttgagccttagcggcatgagcggaggccccgtgttctggtctgatggggacgcgtacggactggcaggcattgtcatcgagtccatcgacgccggtccggatgaagcgctctacaacgttcccatggtccacttcagcgctcaaagggtcgactacgagacactactgcggtgggcggccgaggcggatgccaagtatcccgcagctcgagcggaaattcgtgcgcgacaggccgaaaagcggaagcagggacaggcaacaacagccctcggatttccatcccctctgtag

SEQ ID NO: 367071 - DNA, 267 bp, Pseudomonas aeruginosa
atgagcaccccaaccaagctgtatgtcatcgccaaggctgtcggcggctacacccgcgaaagccccgacaagatcgatgtcattggcgtctacgacgacgaagaagtggcggccaaggttcgcctctctacctccgcgcagatgttcgaggtggagctcaacacgctcgccgccggactgctcgccaatgccgggcagctgttcggtgaggacagcgagggcttccagcgcatgctgtcgaagttgactgccaccaaagcgaaatag

SEQ ID NO: 367072 - DNA, 933 bp, Pseudomonas aeruginosa
atggccatcagtcgtgcaggccgcatcacatttggtgacgcccagatccagatcctggaccacagccaccccggttcgggcgtctctgctgctgagcaggatgcctggacagctcagttcaagaaggaggttttcgcccggatcgttcagaccctgaaccgcctgggttggacctgcgagctcccaccgttcaatcagtccgataaggaccgctatccatcgatctacgaggccagccgccggcgcactcgactctgccgcaagggtgaccttcagggcgaactggatcttcaaggcagctgcatcacctttcagatgtggcaggacgttgtcaccaagaaccggcatggcgggcgatacgacttcggcaaggaggcccgcatgccctacctgttgggcctcgagatggaacgcacgcggcggcggattcgcgactacctctgcaacgtgatcgagggctatgtgttcaccccagacaagcggctccaggccggcccaggtatgcacaccgccctcgaggtgattctcgaggagcgcaagcactccgggcacttccggccggagctgggtcgcgcctcctacacgaacgaagctcaggcatccggtgatggcctggtcatcgaggatggcgctcaggtctacgccgtgacgtataaggggcgcctgatccgcggtaccgccctttactgcctgaacggcaactggacgatcgtctccgggcgctacggcattacccggaacgtctggcacaagcaggtcttcgtcgagtgcccaggggatgtacggctgaagcgaaacagccacctgcgtgagcaggccttggaaagcgagctcaggaaggcagtcgcccgtatggatttccgccgggcggaggttctgcgcgaccttcgatggccggatggcaattaccctcaggccaagcaagccgcttag

SEQ ID NO: 367073 - DNA, 303 bp, Pseudomonas aeruginosa
atgaatcagacccacaatttcatcagcaccggcgccgcctacgacgccacccagtgcgaccaggccgtggaaaagggccatgcgctgcacgtgagcgctgagaaggtcgtcgggctgacttggacctggccggtggcgattacgctcgaggccggcgccctgcattccatgggcgacactccggcttcggtcatcagcgatgcaggctggactcaggagcagatccaacacgctgtagcgctggctgatcagcacggctaccccgtcgccgactgggcccggaaggccgccactgaccactga

SEQ ID NO: 367074 - DNA, 513 bp, Pseudomonas aeruginosa
atgaatgaggtaatggaggtccttcgagaagccaagctgcttgcgcggcgcttctacgagctcactggtaagccgctgggcgtaacgggtgaggtagcggagtatgaggcggcaacacggctcggactgcgcctggaggtggcccgccaggccggctacgacgcaactgagctgcgcgacgggaaggtggtcaggatccagatcaaaggccggtgcgttaccaagccagggcgccaagctgggcgcatgggatcgatcgacttgcgtcagcacttcgacagcgtgctgctggtgctgctcgacgcgaagttcaacgccttcgccatgtacgaggcgccaagagaggctgttgcggaactgatcacccgaccagggtcgagagctcgcaatgagcgtggctcagtagggatcagccagttcaaggccatcagtcaggtcaggtggcttctgtccgaggaggttgtcccggctgtttccgccggtacggggcggagcctgcaggcgcagccctga

SEQ ID NO: 367075 - DNA, 195 bp, Pseudomonas aeruginosa
atggcaagcaagacgccacttcccgcagatgcgccgaagaaaggtgaacgctgggatagccttcacggcggcggcacctgcagggtcatgtgcgatccagtcgaaggctatgtgatggcacgttacaagggctgcggccccttcctgctgcacgtcaacgactggcacaagaagttcaagcgccagaacacctaa

SEQ ID NO: 367076 - DNA, 663 bp, Pseudomonas aeruginosa
atgctttacctcttcctatgcaccctcatgctgatcctgtgcattgccgagttccaccggcagatgcttggcctgattggccacggcacccgcctggcacctgtacgggcgattgggtcgttcctcatcgcagcggccttctgtgccccagtactcaccctcatggtgagcattctcctcaacgttgaatccatatcggacgaacaatctcgcatcaccgtgaacctgctgctcgcagcgtctctagcgagcctgggactcttcgtgttcgacttcaacaaggcctgggccagcaagtcatttggcttttgggccacagggaggcttgccattctgttgatggctggtgtcgtggggtcgatgtccgcctacaagcacctagagtttttctcggtgaaggatgctggatgggtatcggtcgggaccctccgcgagctggtggaggtgaacgacatgaaggactgtggcgctgcaatcgcgctggtgcagtaccgggaagccggcccgctggcgtaccgctgcccgacgaccatcctgatcaactcgatgtctggcgagcccttcaccccctggccggactacgtggaaggcagcagtgaccagctggcagccgctatccagacgatcaaggccagtgcccacaagcctgtatcggcggagtaa

SEQ ID NO: 367077 - DNA, 591 bp, Pseudomonas aeruginosa
atgacctcgacacccaccaccatcagtcccggccttgcattcatgctggctgccagcaatggcatgccgtccacgctgggcgatcgatccacaacggccgcgctcggcgacgccttgctgctcgccatccgctgcaagatgaagttcgacagagcagacatggcagaactctggaagctgcgccgcagcaccagcgtcggcgtgttccgtccgactgatacctgctactacacagcggcctgtctcgccggaggcacctttgctggtgcctgggagaagcaccacgagaccaagccctgggttgccccgatcgtgctggagaaaggtaacgcagatatactcgccaacaatcgcgtggcgccgggtcttggcgtgctcgtggagtccggtgaagacccagagcttgcgacgctctcgggaaggcaggtctggtggtgcaccagcatgtcggccgaggaaatcattctctgtcgctacgcccccggcctgaccacaacagcgctacgcccgagcggcagcccggcccgtatcaagacgctgacccgtgcttcgtggcccacttttttcgccacggctgctgcagtcgcctaa

SEQ ID NO: 367078 - DNA, 960 bp, Pseudomonas aeruginosa
gtgcatgacaatgagatagacgcgggctacgcgcccaagaagaggccccgactgagcaccgaggccatgatgcacctgaacgtaaggcaaatcgggatcgggcctcctgaggggtctgagcgcctcctgtgccctaatcgggcggacggtcactacgagcttggtggtgcactgggcaacctgattgctatccccgccggcatgctctgccctatctgctcgcaccaggttcccctcagcgaaatacccgccgagaccttggaggccgctgcagcctcggaggccatcacgcacccgagcctggagatgctgggcaaagcagaagaccagatcactgcctacgagaattttgctcaatcacaggactacccgcttgccttcatgatggctaccagcttgaaggagtatgtcgcccacgtttcggcagttcggcgcaagccaaagtggcctggtccatcggtcgagcagttccccatcagcttcctgatcgccatccacaacctggcagaagctggtggtccaattcgtcatgaaatccgcgaatggctggacaaggagcatgagctacggccacgccagcactggcttgaggccattctcctcaccgaagagggtgacctggtctttcaccaggacctgtacagccgcgcctgctaccgtgggaagcaagagacctacttcaagagcgctcatgagcagttcgaggggctgaagtcaaaactccagttcgtttcgctgttccaggggctcgaggacggggaagctgaaaagcaccttccctcgaacaccttgttcgcaactcggcagctgagtcgagagctgcaggcacttaaggcaatggccccggagctgaagaagattgctcaggcgctcgaggggaagggccttcaggatgtagctagcgccctgcagcccggcttgacccatctcgccctaccagacggcaacgacaatgactga

SEQ ID NO: 367079 - DNA, 1281 bp, Pseudomonas aeruginosa
atgcgaagcacacgactcaagcacaagatttccgcccctgggcagggggagctgttcagcgtcgaacagatcgccaacatctaccggtccaaaccggacgtgccacttaccaatgccgccctctacgacatcatcagctctcagctgggcgtgtctagcgaagcgatgaactccacggcgccggtgggcgcgagcggccagcgccatagcctggttcgccgagctgtacggttcactcagcagtcgctgaagcacatggggctgatcgagcgcgtgagcggtgagcgtggcgtctggcgccttacccaggaggccaaacgcgacctcaatgcagccaagcctggcgtcaagctactgggctttcggaccgacttgggcctggccatctggggctccagcggcgacatcttcaagcgactcaccgtacccataaccctcgcgttctccagcccgccgtacccaatccggaaaggccgaaactatggcaccttcgacgatcgggagatcgtggacttcatctgcagcacgcttgagcctgtcgttgaggccctcgctgaagatgggagcttggtgctgaacctgtccaacgactgcttcaatcccggcatgccatccaggtcgacctaccttgagcgtctgacgctggagatttgcgatcgcttcggcctgcacctcatggaccggatcatctgggagaacccctcaaaggcgcctgggccagtccggtgggcctcgatgacgcgccagcagctcaacgtcggctatgagcctgtcttgtggttctcccccaatccagcgaagtgcaaatctgataaccgtcgcgtcctcaagccgcacaccgagcgccacctgcagctgataaagcagggcggcgagcagcgcactgccagctacagcgatggcgcctacaagctcaagccgggcagctttggcggccagactgccgggacgattccgaagaacgtgctcacccgcggtcaccgttgcgcctacgggctgcagcatcggcagatagcggaggagctcggcctgcccacccatggagcacccatgcccttctcggtaccagagttcctgatccagttcctcaccgaagagggcgatctcgtggtcgatccttgggccggccgaaacatgacctccctggctgcggagatgctcggccgagcctggatgtccggagagctcatgctccagcacatccggaccggcgctgagctcttccgttcccgccccggcttctggctcaatcctcaagttgaacaggctttcgctcggtag

SEQ ID NO: 367080 - DNA, 933 bp, Pseudomonas aeruginosa
atggtcgaaggagattctgcgttggatgacatttcccaaatcaccgattactccgatctactgaagcgccccggcttcaaccctgtcttgagcttcgaccgaaaaggcggccgaacctttggcaaggtgcttctcccctaccacttcagcgagccggttccctgcgggatcgccagctgccgcacgccccacctgaagggctacctgatcacctccagcgacaaccaggagacgatcattggccaggtgtgcggcaagcgggtcttcggcatgtccttcacccgccagcgtcagcgcatcgaccaggccgtcgctgatgcgcggcgcaaggaaacgatccagcagatgattcgcgggatgccggcgatgatcgaggtcatcgagcggctggagcgggaatacaagttcctgcaggacctgaagtatcgcctgatgggcgctcttgacccccggctctacaaggaactgcgtgcacgcgctgaaaggggttcagcagtggtcacccgctcagtccctatgaccgaggaggaagctgcgatcgtctttgaaaccaccaaccgccgtcgaaacgacgggcttggctggcctcacaaagagttgccgatctgcgcgctggagggcctcgagttcatcaagtctcccttcaaggacatgctggtgaccaacctgatcaccccgcttcgccggttgagccgtatgcggcctgatgaagtcctggaaatggggcgacgggagcttgcacgtgaggccaaatgggtcggtgaggtaccgcagggcatcatcctagccgaggaggtagtcgccgccggccacaggttcttcaccagtgcgaacatcgccaacctcgtgcacatcggcgccaaccgcgatgttctcgctgcaatggtggcagacctcaagcgtgcggaagagaagcgcaaagcccctatctga

SEQ ID NO: 367081 - DNA, 603 bp, Pseudomonas aeruginosa
atgcagaccccggtcgatagcgataacagcggcaaaggtttcgaagcgctgaagcctgctcgacgcggtgcattggaatgcgtgtctttcgttacggaagcccctgatccatggcatgccctctacgcctacggaaccgccggcgaggaggcgaagcgtgtggcgctgagaaagctggagctcggcggagatactttgcacccagcttgctttctcaaccaggactgtcacgagttatgggtcggcggagagctgatcgggttgtgcagcatcaacactgaggcaaagactgaaggcgacaccgcggacatcgttataggcctcaagtcgatcttcctgctgggcgattttcgtggtcatggtgtgagttctgttttcatcgactgtatttggaaggatttagctgcagccataacctctactgcagccgaggccactgaggccggcgttgagcgcctcatcctgttgctgattgccgatttccagaccgaagaaggcgagggggttttcagccacttcgaggcattgctcgactcgtatagcaattcgctcgcgtcgggattcaatctcgatatcgaggtaaagacagatgccggttcataa

SEQ ID NO: 367082 - DNA, 183 bp, Pseudomonas aeruginosa
atgagtgaccaagaaaaactgaaagccctgctgacggagtttggtgtcgggtttaccgaggatgaaacatccatatcttgcgaggcaggagacgccaaggttggtggctatatcggcttcggaacgacgttcgagttcgataccgaaggaaaatttaagcgcatgggcgcctgggaatcctga

SEQ ID NO: 367083 - DNA, 342 bp, Pseudomonas aeruginosa
atgcgtttgagccggctcaagtaccggatacgccagaacgtcatggcccccgccatgggcctttctgagcagtacctttcggctgtggagaccggccggaagccagttcacgatgaattgctcgattcctcgatcaagttcttccggcagatcgacgctggtttcgacgccgacgcgcttcgtaccgcggcggaccaatcgcggcgccaagtaagcgttgaggctctcgggtctgaagcgaaagccctcgtggccagcttggcccgccacctggagcagttcaaagatatggaccaggtcgaagaagtgttgcgcctcgaaaaccttcttggcttgaagtag

SEQ ID NO: 367084 - DNA, 126 bp, Pseudomonas aeruginosa
atgttcgacgggatcatctggcctaagggccgtgtgatcgtcgagatcatcccagagaaaggaagcccggcgctctacatgccccgcctgggcggactcagtatcgtgccggcaggcagtgaatga

SEQ ID NO: 367085 - DNA, 564 bp, Pseudomonas aeruginosa
atgaaaaaagtaatgatcggtcttctgctttccgccgccgctgccggcgcctctttcaccatccaggcggccgatgtgttcgggctgccgctgggcaccggtcgtgctgaccaggtgaccggaatcctccagtcccgtggcgatcagttcgtccagctgcaaggctccgatcttccagcaatcagaatcaagaagtccgagacgctcgaagcattggggggatcgccaaccgccaatctccaatttgcgccgtcgggcttcctctattcgatcagcatcaatctggattcgactccagctgaaatgaaagacatccagagtgcgctggagaagaagtacggtaaagcgcaggcattgtctgggtgggatcttgagcgaaataaggccctggcgtatggaataggaggccaaaacgttgtgatgttcacccctaacccggtagctggagctcccacactcaactactattttcagcccctggtaaacgaggtcaccctcttcaatgaggctcgggccagagaggcagccaaatccgacttcgagcgtctggtcgacaaaatctga

SEQ ID NO: 367086 - DNA, 1956 bp, Pseudomonas aeruginosa
atgggctacaggtcatcagtgacgcgccaactcgccaaggttggcggcatcctgaatgaatttgagttcctgtcctccatgttcctgaccaatgcacaggagcagcagtacagagatgtcctatgcggatcaccattcgcggatgagacaccctggcgcaagacacaggaagtggccattcgctacgcccgagccgagggccttgagctccccttcaccggagagggcgactccaaccttgtagagtcctcccagattgtcgcgaccgaatggccattcatgaggaagatgcttggcgctggcctgctcaatcgcacccttagccacaacctggtgttgctgagcatgctgcgcaagcggatccagagcccaaatgtccgggacagtgaacgcaacttcgttctattcctcagctggatgctggtgcgcaagctacctgcaggctttgactgcctggtaggcgtgcactacccggagctcaacgaagtcatgccgtttgactacggggttggcggcatcactgctgcaacgcttggtgacaacgcaggggatttctgggatcgagtaccgggtgagctgttcgagctcctgctagaggtggccatcgaatccgctcgcgaagaccaggtaccggacgaacactgcgctgaagctcgtgcggccatagagcgcctcaacggtctggtacggacagctatctctgccggcaccctgagcgcccagctctccgacctgctggccgactttactctgcacacacttcgcccggcacagagctgcctgattgaggctctctcaggccttggcgctcttctggacgtgcctgtatctgttcaggccctcaccgagaacctaccccgctttgacctcgatctgagccgggtgccgttccctgcggccgaaaagtacatttccaggtacatcagtgcgggctcgctctcccgaatcagcgccgatatcgccgcggtcaaggcctgggaggttgagctgggacagcagcaggaagccatctgcgagctgaccaagagccccagcgtcgccaacatgctgaagatcgcggaagaggcagccaagggcaaagagcggatccagcaagcccagcgccagctcagcgagtgggtcgattcgactgccgagtcgcagcggttctacaacaacattctggctgacctggagtcactcgccgctgaggcagatcagcggcagctgttggaaatagcgcccacaccagtcgtggattcggtcgaatcggcgccgccggtgccgagtacggagagcctgccggccgaagtcatcaaagaggtgactctgctacaggctcaggtagctcagttggccgaggagctgagtacagcgcatgctgataacgagcatctcgcgctggagctgcaggagaagaagcaggagcttcaccgcctgcgccaggtcagcgaggccaccggcctggccaagcattacagccaatccaatgcgccctatgtggacagcgagctgctcaaccgcgtggtcatgcgctccggggtgacgatcagcgacgtgcttgcctacttcgcccacactgctgccggccgcgtggaaatcctcgactccgtctggcgcgtggctggcaagtacgttgggcagcatgactgcaccgagcgcttgatggacctgctgtacaagctgatctacccctacctggatgccatgaacagcggcaagcccgacacccaggctcgcgagatctttggccccaaggtctattcggccaaggaaagcaccagcacgctcaccgatgcccgcctgcgcgcaatgcgcgagcacacctacctgggtgagaaggtacttttccagcgccacctgcgcccttccaatggccacggcctggagggctgccgcgtctacttcgagatcatcgacggggtggtagtgattgcctacgtcggcccgcacctggacgtgtcgaccagcaactaa

SEQ ID NO: 367087 - DNA, 411 bp, Pseudomonas aeruginosa
atgcaagccatatcccacccactcgaccctcgcattggcgcccttgtgcgcaatggcgctgcggtctactacgcctacttgaatggctatgagcatgagccgatcgaggggacgctcaacgaggtcgagtcgagcctcggtatcgcgctgtcaccggcaaaagatgtgggtcctgagcgcattgcatcacctgcccccctctctgggcgggaatcaggcggtctgcgcctgttcgcagtgaccatgacgccgaacgtgatcacctacggcggctctcacacctacggcgaggctgtcgagtacgtgtatgctgagtccaggacagacgccgagcgccaggtgcgccagcagctcagagagaccaatgggcgccatggcccgaggtacaaggtcagcgcacgacttgcctga

SEQ ID NO: 367088 - DNA, 936 bp, Pseudomonas aeruginosa
atggcagacggcagctcccggctcggtctgactcagatcaccagtcacgtcaccaccggccccagcgctggccagaatttcggtcgcgtatcctttcgcttctgcgatcgtgaacaggaccaggacaatcgctacgatgagtccttcgataccgcatggttcctagttgaccaccggctcggcaagatccagttcggaccggctgaaggtcttcgcatccgggcacgcggccaggggataggctgctacctcatcggccagctcctgcgtgtgctatctcaggcaaacatccgcgggcagtaccaggttgaagacttcaacttcactgatgccgttgaggctcacctcccgccagatgagcgcgctttcaaccgggagcgtgcagaggcggcttttggtcgtgctgggtttttcatctcccaggccggcggtgagctgatcgtgggcgcccgtcgctctggcgatttgaagccaaactggaactccgaccgcatccgcttcctcaacatcacccagatggccgttgccgcaggaagctggctgtccaaatcgcaggatcaggaatccgagattgtcggcctgaaacaggccttggctggccttgagcaggccggcgccatcaaggctcagcagtctgcagagcgtgaagcgctgcttcgcacttcgatccaggagttgcaggaggaggttgccaacaagcagagcgtcatcgaagccctggagcagggccaggagttgcatgccgagcagctcgaggcgatccgcgccgagctcgctccaagcgctcaagacacggcccaggcgccacagcctgtgccaggtatcagtcaggtgatcctcaagccttccaggggcctgatgtggtggctttggggcgtcctgacggtgggtgccggcgctgttgtgatcgcgggtgccggcgtgattctccgatag

SEQ ID NO: 367089 - DNA, 579 bp, Pseudomonas aeruginosa
atgcttaaacacctgatcatcggcgcgacttaccagtgcaacgggccgctcggccagcgctgctttgttccgcagatcgttgatggccaagtcctgttggtacacagcagcatcgatggctctccggatcgtctgaccactatcgacttaaccgagaacgaatgggcttccatagactttgtcgacggttcgccactgttggttggccgccagtacctggtgctcatctctggcgagtggcgcctggcaacctggaagagcgatgcatgccgggttgatcgcccggtacagtactttttctcttcaggcgctgtcggctttggcgccgtggttgagaaggctgtgctggtaccggagcctgaggaaagcgatctctggatcgaggctccttccgccctgccggccctgggccagcaggtcctgcacatcgacaaggattacccgatcgttgccatgtccgtttacgactaccgcagctctcgccgtatccaaggccttagcggcccgtgcttcggtaccgacaaccccgccaacatggtgcgttgctggatgccgattgagcggctcctaagcgcgtga

SEQ ID NO: 367090 - DNA, 2571 bp, Pseudomonas aeruginosa
atgaccccgaaattcatgtctcgcactgtgctggccctggccatctccgccgcggcaggttacagcttcgcaatcccagtcgagccgcccgcagccccggtaagcttcggcgccgaaaccgttgacggtttcaccctcaccggctccgccagcgtcaccgaggatatcgtcgacctcgaaggcaccactgtaaacggcgacatcaatctcgacggcgacttcaccgctaccggggactacgtctcgggcgtggacatggatgggctggactcggctgccatgatcatgaacggcaacgtcaccaacttcggcaaccttaacctcaacggcctcgccgccaccgggatcctggccgatcacattgccctgaacggcagcatcatcaacaacggccaaatcatcgtcgccggcgactacgacagcgagatttcggaagctgccggcggcgtcgtgatcctcggcacctccgccctgggcgacatccgtaacgatggcatcatcagcgtcaccggtaaccaaggcgatggctatcgcctgagctcggccgagctgcaaggattcctgatcaacagccgcgatgccgaaatcagcgtttccggcgcaggcgccaacggcatcagcgctttcgactccgaagttgaagtgaccatcaaccacgggcgcatcaccgccaacggcaccagcgccagcggggtcgactatgatcgaaccacaatcaaccgtctgatcaactccggctctatcaccgccaccggcgacagctccgtcggcatcatgctcgacaatatcaatatggtgtacgagggcgagctggccgcatcccaacagggcatcatcaacagcggcaccatcagtggcgacaagtacggcatcgtggtggacggtctgctgcatggcgacgccaccccgctgtacatcaacatgaacggcggcgctatcagcggcggtactgctgccatcaagggtaacgaccaggatgtccgtctcgagtggaacttcggcgagattaacggcgacctgctcgacatcggcgacatcaacgtcaattccttcggcgtcttcggcggctccactatcagtggtaatggcaatcgcacactcaccgtcaagtcggatgccttcctgaccctcaacgccccccacaccaccatcaccgacaacttcaccatgcaggacaattcggtcctgaagctgcccgtttccgcgctgaccaatccgaccagcccgattctggcagttggcggtaccgccaccctgggcaacaacgccgagatcatgctcaccccgcggcctgagaacttcgcgccgcagtctgcaggtgccgattacgtgatcatcggcgccggcgagctgatcaacaacggcgtggtggtctcctctacttccgacctgatggagctgaagagcttcaacaccgctgacaaccagctggtcgctcagctcgccctgaagccggatgacgaaatcgatgacgtgatcgaggacgacaacggcaacgaagacatcggcgacgacaacagcgaagaggccatctcgtcgctgattcacatgctctcgttcatggatgaaaacgatccgatcttccaggccttggccaacgccacgcctgcagagcgcgctgaactggccaagcaactgacccccaccatcaacggcggctcgacccaagcggcggtctccggccaggccctggtttccgacgcagtgggcggccgcaccggcagcctgcgcagcggcgaatcctccggcgaaatgctggctgagactggcgcctgggtgcagatcctgaccaacaaaatgacccaagatcgtcgcagcggcgttgaaggctacgacgctgacaccaatggtttctcgattggtgctgatggcaaggctaacgagcaggtgaccctcggcgtggcatacagctacctggagtccgacgtgaagtccgacggtggcaacaagaccgacgtggaaggtcacagcttcactgcctacgcaggcctggaacaaggcaactggtttgccgacagcgcgatcacctattcggtgaacgacaactcctccactcgctacatcgtcggcaccgaggccaaggctgactacgacagcaccatgctgggcctctccgcagagggtggttacaccttcaaagtatcgcccaacgccgccgtcgaaccgctggcgggcctgcgctacgcagcgatcgacatcgagagctacgacgagaaaggttcttctgcggctctgagcgttggctcccagcgctacgagatcgtcgaagccggcctgggcatgcgtgtgaagggcgacttcctggtgggcaatggcgtactgaagccacaagccaagctcatggcttaccatgactttgccgccgaccaagccagcaccacctcgagcttcatcctgggcagcaccagcttcaccaccaacggtgccaaaccggcacgtgacagctacgagcttggcctcggagcttcctacgagctgggcaacgtcaccctgggcgcgaactactcccgcctgaccaagtccgggttcgagtccgacaccttcactgccaatgcccgctacgacttctaa

SEQ ID NO: 367091 - DNA, 234 bp, Pseudomonas aeruginosa
atgaacgagtaccaagaaaagaaaatcgcagagctcaaggggctcggctggaccgaatcaggaagccagtccttcaatgggcccggccgttcggctcccagggttcatgtttactccttcaccaactcagccggcctggttgcattcgtgtatccgaacgaggtgatgcatatccctgctgagctcccgcctaaggtcgatctactaagcgaaagctttcagcagctggcctaa

SEQ ID NO: 367092 - DNA, 513 bp, Pseudomonas aeruginosa
atgaaatccccagcccctacccgcatggactcccttatcggggacagttacgtcctggctcgttttgctgacttgccgatgcattggcagctgtcgattgtttggcgcacggtgatggattgtgaaagctgggccaatgtcgttacccctcagtggccttccgctgaggatgcaaaggctggtctcacccagatgctgccccaatacgttgagcgctacggcgaccagctctttggggtggcgacaatctgcaccgaagccatcaaggcctcggtgatgcaggacgaagacatcgcggggtcctatgactcatgggagcaataccacgcatggtacatgcgcggtggcgccgtgaagcatcaggaatcaaaccgttggcctgtgaccctttcaccggacaattacgaaacgcttttggatggatggaatcggcttcacagctacatcagagatggagcagctgtgattcccgcagtatttgttcctcaggagcatcatctcaacgctgcttga

SEQ ID NO: 367093 - DNA, 1881 bp, Pseudomonas aeruginosa
atgcaagcaattcaaatcatcccagttcgagagtttcaaccggtaccagtatcggccacagcaggccgtttcagccggatcgtggcgcgtgctgagacctgtatcgagcgtattggcgagctgatcgaccagggttacacctgctcgtcggcaacaagcttcgggaaggacagtacggtggtcctggtgctgatgctcgaggcaatccgccgccgagtagaagctggtgtctacgtgccgccggcgttcgtgaccaatgcgaacaccggtaccgaaaatcctgcgatggacacctacgcggaagccatgatcaccgagctcgagatgtactgtgcacggcactcgctaccggtcactgtgatcaaggttcagccatcgatgacctcatcgtttgcctacgccactatcggtcgcggcaagcttccggttttcgctggcgcatcccgtagctgctctgtggactggaagctgcgcccgcagcagaaagccctcaaacagctgctttcgacactccagaaccctggtgagctggtgaccttcgtgggcactcgcttgtcggagtcggcttctcgtgaggcaagcatgcgctcgcgtggtgagggggtggcgggacagctggtcattaacgaccagggctcgttcaactgctcgatcatcgccgactgggagatggaggaagtctgggagttccttatggcatgcgaggcgaagcgcggcggtccgtatcggacattcgtggataacttcgactggtgtcttgagctctacaaagaagcaaacgaaggcatgtgcgcgatcatcaccggagacggtgggaacaaggcggcgtgtggatctcgttttggctgcgcctggtgcacagttacaggcgagagggacaagtcgatggaggccatgatctcttcagcgcccgagaagcatgggcacatggagggcatcaatgcattccgtaaccacctgatcaaaacccgttgggacatgggccgcagggactggatcggacggacccactccgaggccaactacatcaacgtcacggggacagcctacagcgcagaaatgcgccgtgaactgctgcggtacctgctgacactggatgtgctggaagaggagagggcagaagagcacgatgccaagatgttccgaggcgagctggaaatgacggattccaacgagactcttcgtggaaccaccttccaattcatcacgccaaagaaccttctggccatcgattttgcttggtctctcagctacggtttcgatcacgccttcccggcgctgaccgagtggtatgagatccgcgtcctcggaaagcgctaccccatccctgatatcactccggtggagaagggtgtcattccggagcagcgctggttcaaattcgaggcttggcaaagccctgcccaggaaatggggctgcaggatgcctacctcgaggccaccaacaaggaccgctaccctggtcggcctccgatgcgaacgatccgtgaccggtttgaaggtaaggagcgctccatcgtgtactacgaggaggccgatgagatgaacatcgactctgcagaagcgatgtgcttcgtggacgactttgatgaggggttcttcgagctggctaaaaccctggctccgaccgacagtgccaagttctacttgaacagaggcatcgtcaaattggccagaggaaaagcggctgactacgacgaaatggcccgccgggcgcaattctggcggcgtatgcagcgcgatctgggcagtactgatctacgctcgtacattcgctacaactcgatcagcaatgctgagcacgaagcaatccttgagtcgctcaaggctagcgccgccccggccgatgctccaggcgacacccaggatctgtttgcttga

SEQ ID NO: 367094 - DNA, 882 bp, Pseudomonas aeruginosa
atggttgcacggaagtccttcgccgcgctcggtttggtaattggattaatgactggttgcggaggcgataactttaacggctcgtatattgctaagcccagattagctggcgtgcctgcaatggatatcgacggtgacagagctttatttgttttagtcgacaaacgaacctctgaattcagcgagatactagaattcaacgtcagttacaaggacaataaaatgttccttgatggcgagggcggcggacctcgattcgtttatgcgcgtggcgtggacgaacgcggtctagaatgtcttaactgcaaagattacccccgcacaattatgcccagcaagtttatacctgcctctaaagcccttggcctggaaaacggcttgagggagcaaagagaagaagaaagggctaaggatgaagaagaaaataaagctcttttgaagcggcaggaggaaaacgctaaggctgaggctaaggctaaggctgaggcaaaggtaaaagcggaagccgcccaagctcgcatcgaagaagaaactaaaaagcttggtccattcgaaggtgtctgggttgtggtcaagcagccgaagacgcttagtgatctgaggacttttatcattgaccgtgactcaggggtaacacagcggttctatcatacgtggaatgaagaatctgactacaaaacgctctttgaagttacagacggagattttgtgtgggttattccgacagcggagaaccagaggtacaaacttaatgcagagggtaatgaactccgctgcattacgtgtgcccgagaggatgtctggttgaagcttgatcctagtgaagcaaacgacaggagccatctggaaaagctggctaatcggttacaaaaagctggctga

SEQ ID NO: 367095 - DNA, 264 bp, Pseudomonas aeruginosa
atgagattccagaaaacactgcaaggaaaagcgaagggatctgtgtccgtcgatgacctactggaacaccttcatcacctgtccggcgaaacagtgaacatcaatgcgcctggtttgagtgcatctggtgtcattgtcgaaaaatggcagtttgacggcgagagctttgatgttcagttctccgagcaggcaatcgattttctccaggcggcggatgatccccgcattgaaatcgtagccgtgctgttcaatgggattggatag

SEQ ID NO: 367096 - DNA, 222 bp, Pseudomonas aeruginosa
atgctgcgtatcgaccccgacaagttgaggccaatagatacagcgccccgtgatggcacaaaggtgctggccgtccacttttccacaccaggcctcagcgactgggcttgcaaagctgccttcaagccgccgaagtccggtgaaaaaccaacctggatggaagtcgatggggtgcgcggccaggtgttccttgcgccgactcattggcagcccctgaactga

SEQ ID NO: 367097 - DNA, 270 bp, Pseudomonas aeruginosa
atgagcatccagcgagttgagaagctgcacctgtggacgattggcgattcgagcgttggcatttctggcgattctgccgaggtggctgcacccggttggctggtcagctccgaggactatgagccggagggctacaaggccaccctggaagaattccgcgagaaagtgcgggcagccttcgaggtgatctggccgaacgaaaaggtctacgcccagtacgacttcgagctgcgtgaagaagacgcggctctggatgtggtagcaggctga

SEQ ID NO: 367098 - DNA, 363 bp, Pseudomonas aeruginosa
atggctacgaagaccaccggagctgagctgcgagcgttctacaacgacgacgcttactggctgaagtcgggcgatggcaagagtgacgatgtttggcacgaggaactggtccttgaggtgaacggggtcgagcagtctgatgacttctcgatcaatcaagacctcaaggatgaagaccaggtgaagatcgtctacggccatgtgttgtcgacccgtgaaggctttgcagatcgcagctttgagtcgttcttcaaggcctggcgcaagcagcagaacacagtctacctctccgtcgccgtaccgaaagagaaactggacgccgtgcgcgctgcaatccttgcggctggtggcagcgtcaagtaa

SEQ ID NO: 367099 - DNA, 318 bp, Pseudomonas aeruginosa
atgaccgcacagccccatgtcgtaatcggcgaacttgctgtctccggcgcaaagatcagagctgcacgtgacagcatcgaggcctggccaggctacggcgtggtttgctacccgctgggcactctgaatggcaacattcctgccatcgccaaggggttggttgggctctgttcggcgcaggagcaaatgcgccgcgagctggatgatccgacctactccgttgcggtgatgctcgatggcgtcgagtttaactgccaaagcgtcgaggtcgtcgcagagcagctggccaccctctaccagcgtcacaaccagaagtga

SEQ ID NO: 367100 - DNA, 948 bp, Pseudomonas aeruginosa
atgggcccggccaaccgggcgccaacggtggccaacggcacactgagcctggccgaagacggcacaggatcagtcaccctgacggcctacgacgcggacgccggcgacacccacacattcagcatcgtcagtgctcccggtaagggttccgcctggatgagcggcagccgtctgaactacatcccgccggccaactggaatggaacgactacgttgacctacgtggcaacggactcgaaaggcgccgcatccaacaccgcgacgatcacaatcaccgtaaccccggtcaatgacgccccctccgtggcaaaccgtgttctcaccatgaacgaggataccgtcggcacgttcgccatgacggtgacggatatcgacctcagctacgagggtgacagccacacctgggagatcgttaccggtcctgatgcgtccgatggcggcgcagtcatcaccggtggaacgctgacgttcaaacccgtcgccaactggtcggggaccgcgaccctgacctaccgggcgcgggactccaagggcgtttactcgaacacggccaccatcacggtgaccgtgaatccggtgaatgacgtacccgtcgcagatcctaagtcgctgacgactcaagaggacaccgctgccaccgttacgctgtcagcaacggacatcgattctccagcaccgactgttttcgcgatcgttaccgccccagcagctgcatccggtaccgcctcgatcacggggaacaccctcacgttcacgccggcggcgaactggaacgggacggccaccctcacctaccgggcccaggacagttctggggcctggtcggcgccagtatcggtgaccctcaacgtagccccggtgaacgacgttccagccctcaagaacccgatcacgatcaccacacacgagaacaagcctgcgaccatcgagacgcagatcccgcggtag

SEQ ID NO: 367101 - DNA, 2865 bp, Pseudomonas aeruginosa
atgcaaactcaagttaacaacctgatcgacctctcgattccgcaacccatctccatcgacgttctgttggagaagtacgccaaaggctccgagcaatctcaggcagagatctttgcccgtgtcgctcaagccctggcatccgtagaggccgacccctccaagtacgagcaggatttcctgttcgccctggagaacggtttcatccctgccggccggatcatgtccgccgctggcactggcatcaaatcgacactgatgaactgcttcgtgcagccagttggtgattcgttcagcgagttctgcgagcgcaccggtaaacctggcatctacaccgctttggcggaggccggcgagaccatgcgccgcggtggtggtgtcggctatgacttctccgacatccgcccaaagaacagcctggtcaaaggcactcagtcctacgcaagcgggcctgtgagcttcatgagggtcttcgacaagtcctgtgcaacggttgagtccgccggcagccgccggggtgctcagatgggcgtgctgaaggtttcccacccagatatccgcgagttcatccgagctaagcggaccatgggcgagctgaccaacttcaacgtctctgtgggtgtctctgatgccttcatggaagcggtggagcagggtacttcgttcaaactggtgcacgctgctgagccatcggcaaagcagattgcgggcggggcctatcacgaggacggcgtctgggtatacgaggtggttaatgccgctgagctctacgacgaaatcatggcgctgacctacgacttcgctgagcctggaatcctcttcctcgatcgcatgaaccaggaaaacaaccttcgttcgatcggtgaggtcttcgaagcgaccaacccgtgcgcggagcagccgctaccttcgtatggctgttgcgatctgggttctgtgaatttagcacgtatggtgcttcacgtatatagcgccgaagcaactattgactggaagctactcggttcggtcgtgacccttggcgtgcgcatgctcgacaacgtcctggacctcacgttctggccgttggaaaagcaacgcatcgaggcaatgaacaagcgtcgcattggtctgggctttaccgccctgggtaatgcgctggcatttctgtgtacgaagtacaactctcccgaggggcgtgctaaggctgcagagatctccgagttcatgcgcgacacggcctatcgggcgtccatcgagctggcaaaggagaagggagcattcccgctgttcgatgccgagaaatacctgcagtcgccgttcattcagcgtctgccggacgacatccgagaaggcatcaagaagcacggtatccgtaactcgcacctgctctcgatcgcgcctaccggcacgatttcgctgagcttctgtgacaacgcgagtaacggtatcgagcctccgttcacctggttctacgaccggaacaagcggatgcctgatggttctcaggcaacctatcgtgtctatgaccatgcgtaccgcgtgtggctggccgaagggggctcaccagaggacctgccgccgtactttgtatcggcgctcgagatgtctgcgcaggaccacatggcaatgctggaagcggttcagccctacgttgacacttcgatctcgaagaccgtgaacgtgccggaggattatcccttcgacgacttcaagggcctctacatggaagcatggaagggcggcttgaaagggttggccacgtatcgtccgagtgatgtgcgtggtgccgtgctggtggcgcctactgccgagaaggtggaagaaaagcctgatttcgacgactccgatccggatcgccgagtcaagctggacaagctgccggaacctgctttggccagccttcgctggaacaagcgtccggtactgcctgctggtaatccgtcctggacctacatggtgaagcgcccggatggcaatgacttcgcggttatggtcggtcacgttgaaggcgtcaacggcagtaagccgcagatgctggaagtgtgggtgaatggctcggatgcgccccgcggtttgggggccattgcaaagagtctctccatggatatgcgtagcgaggacaccagctggctgaaagccaagctggaatccctgcagcgtgtcgccggcgaagatggatttgaaatgccgtgtccgtttgacggtgcggtgaagttcatgccgagcagcgttgctgccttggcgtccatcgtaaaagctcgttgtgagcagctggggattttcgacggggagggcgcgagtccgatcttcgattccctgatgtctccgaaggagccgaaaacaggtaccgacggaaccatggcttgggcggttgatgtcagcaaccctgccaccggtgacgatctgtgcatgttcgtgaaagagctggtgctgcccgatggtacccgccgtccgtactccgtatggctggctggatcctaccctcgtgtgctggatgggctttgcaagagcctgtcgtttgacatgcgcgtcgtcgaccctgcctgggtgggcgccaagcttcgtcaaatcgcagatttcagtgaggtccgcggtgacttcttcggcaaagttccgggctctaacaagtccgagaatcagccgtcgacgatcgcctacctggccaagctgatcctgcatcgttatgcgatgctgggtgtgctcgatgatgatggcttcccagtccaggagctcggtttcttctaccaggagactgatgcgccgaagactgaaatgaagctgattcagaagggttcgcaatgcgcgcagtgcatgcagatggcggtcatcaaaaaggacggctgtgatttctgcacgaactgcggcgaaatcggcagctgtggctga

SEQ ID NO: 367102 - DNA, 267 bp, Pseudomonas aeruginosa
atgaaatctaaactcacttcccagattgccttcggcaaaactgcagagaacctgacgctcgagtttggccccggccgtctcaagcacacggtagaaattcccgccggcactgaagtcgcgaaccatggcacccctgaaaaggcgcactggctcgtaaacgatttcgcaatgatcgccgacaagaattccatcctcatgcatgacgctgtccaccacggcattccggtgccggcggacaaagtcgtcgacgttcgccaggcgaagtaa

SEQ ID NO: 367103 - DNA, 279 bp, Pseudomonas aeruginosa
atggagcgcaagtctccacactcacggccctggtacgcacccctggtgcatttcgcggcgcataccctcgtaggtacgggaattttcctgatcatcggcatgccggccgtgtttctcggttggctggtgcacaaactcagggactaccacgtctctgaattcaccatctctgtcctggtcttcctcgagcatgcgctgatcgtggtcgatgcctttctgttcgtgacctacctgggcttcacctcctgggcggcactaaaggagatgcggaatgaataa

SEQ ID NO: 367104 - DNA, 150 bp, Pseudomonas aeruginosa
atgaccaaggttcaactcgctcaacatgtgcgctgcattcgtgcagagttcatcgaagccgctaagcaggctcccggcattttcttcgccccgattaccggtgcggtgaaagagctcaatgcctgctggaagcaacttcacagccgctga

SEQ ID NO: 367105 - DNA, 231 bp, Pseudomonas aeruginosa
atgggtgtcaaagatcgttcggaattgctggccgcaatcgcagcaaaccgctcgacactccaagacgcgatcagtgaaggcttcaggttcgtggtgcgcacccgcgacgcttacttgtgcttcctggatgagcccgagatgaaagcatctgcgaaagcagtagctgattccgaaggcttcatcccggtccacggcaagctcactgcgaacaaccttttctggtaccagtag

SEQ ID NO: 367106 - DNA, 348 bp, Pseudomonas aeruginosa
atggatattcatcttcaaggcacagacccacgcgtcgatctggctcatttcgagcacgtgattgaagcgaagcgcaatgagctcggtgagggcggcagcaagattccaaaggtgctgcttctcgagcctgaggatcggaagcgctatctgatgtgcctggcagctgtgaagcacttcgaggcgaagaaaggtacctgtgggattcataccctgcgggacatggtcgagcacctggaactggtcaacgagctctcgttgagccaggccaaggtgccggttgaggaccttcgtaaattcagcctcgacctgctccgtagcatgcgtactggcctcgcaaagcgggcttga

SEQ ID NO: 367107 - DNA, 132 bp, Pseudomonas aeruginosa
atgaaattttctgacgtgaagatcgctgacctggtccgtattcaagatggtatctacggatacggcagctacatcgtccagatcagcaaccgcggcaaggccaccgtgtggtttcacggaggtgcccaatga

SEQ ID NO: 367108 - DNA, 795 bp, Pseudomonas aeruginosa
atgtccaatatttccgctgtaaccaaagtgatgcagcaccacctcgagcagctgggctatccctcggacaatgtccggtggagcctgggttactgccagggtgatggcgcgagcttcaccggtaatctggatctcgcaaagctgggcgcaaggcttctgccgggcgttcacccgattatttgggaatcctgtaccgctgagctgcaaatcacacgtgaccgagatcgatacgtccacgaacgatccaccagcctcagcgagtcggttgaaaccgtcgattccggtgctccggatgagtacggtggcattgctcaaaaggtcgcgttccgaaagctggtagccatcttggagacggaaatcgtccaggttggtgctgagctcggtcgtatgggctacaacgtcctgggtagctatttcaggcctgatcacgaaggtggttccgaatcggtctggtgcttccgcactgaaaacttccaagtggaggttttcaagatcgaggatacgtactacaacccgcttgatatgaccgatgagtttttcagtgagactgttgctgaactgacctcgggcgagtgggagatctgcggtagcaaggtggtggtcagcatgctggatgaggatggcgaccccatctctgatctggcagagaagtactgctttggccactactacaaaaagacggatcctgtgttcggtaatcgttccaccatgcgcgagctggtgcgcgaagccattcatgaagcccgtgtcaactacgccaaaatcagccgcccgcggctgaaacaagctgcataa

SEQ ID NO: 367109 - DNA, 1122 bp, Pseudomonas aeruginosa
atgaaaaatatcgatgcacaggtcgtgaagcgtgcggcggcaggccagtgggatgcaatcctgcgcaagcttgcgccggagatcccagatgcggccttcaacaagctcgggaagcacgtggtgtgccctcggcacggcaatggcaccaaaggtgatgggttcaagcttttcaaaaaggacttccatgacaccggcggtggtatgtgcaacacctgcggcaagttccacgatggctttgcactgcttatgtggttgcacaactgggaattctcagtcgctgtcgaagaggtcgggggttacctcggcatcaaaagcagcagtgatcaaagagcccagcgcaaggttaacctcgagcgtgaagcagagttccagcagcgccaagctgagcgccttcagaaggaggccttgaacaacggacgcatccgcattcgtctacaaggcatctggaaggagagcatcccgctgacagacccaagatctgagccagcaaggctgtattttgctagccgtaagattctgggttgggatcgcgccgggttggagaacgtcattcgcttccaccagcgcctgccgagctacaacgaggacggtaagctggaaggctactttcctgctgttgtgtgcctggtttgcaatgaagggaagcctgtgacaatccaccgtattttcatcactgcaaagggtgagaaggcgccggtggagagctgcaaaaagatgtgtgaggtgccgtctgacaggattgtcactggcggcggtatctacacgtctggcctcgcagaggtcattgatgtagcggaaggcgtagagaccgcactggccgttgaaacggctatgggtatcccagtctggccattggtcaacgccactttgttggagctgttcaacccacctgcaggcgttaaatgcgtgcggatctgggtcgacaaagacgtgtcgggacggggtgttgaggcaggtaaaaatctgcagaagcgcctctgggaaatgggcatcaccgctcgcctcgttgtcccctccatggaaattcctgagggggcgaagggagtcgactggaatgacgttcttatgcagctcggccgcttcggttttccgcagcgttccaatgcatcaagggtggcatga

SEQ ID NO: 367110 - DNA, 288 bp, Pseudomonas aeruginosa
atgatgtcggggcccaataccttcgatccgctgctgattgaaaccactcctggggggcacttcacgtgccccttcagccctccccccagctttgagggtggggcaggggagtacatgagcttgatgcgattccggtaccgcaatcctgagcaccagcgtggctttcgtgagcacctgaaggcttaccaggccggcggccggctagtcatcaacggaccattcgcatccgaagccttgttaattctggccaagatcgactgtgttgcaccaaaaatgaaagccggctga

SEQ ID NO: 367111 - DNA, 684 bp, Pseudomonas aeruginosa
atgccggggctctacgaagtcgctttttgtggcgacgaccgcttctatcaaaagcttgaggttcatgtaggccaggatctggggcctgacgctttggattatgtggaacttttcggcatttggtttttcataatggcaattggctcagccgggatgaaccgaactgctaaagggctctcgcttgtggtatcccgcggggcaatcaaaagactccttcgcactgactcgtcgaaggctcacttgttcagctacaccaatgctcttcggacgcagctttatggcctcaagactatatccgttgagaagaatgccgcgtgggcatctgacctagatgtagtaatgtgcactaagtggaatggagagccgccagaatatccggaaattgataacccggtacttggtaaggttggcattacctttcacgctctgcagcgctattatgagcacaccaatagcgaaggccggcaagaccttgttttcaacaaggtgcaaaaacttgcgagagaagcaacgattgaagcaaagcttgatgctcgtacaatcaagcataaggaattgaaatatggcgatgcctcagagtctacgcgctatctgaacacgccttctggatggcaggcagttgttgtcaatcgtccaggtgcgcaacaggtactcactactgtttatcagcgcaatggatactga

SEQ ID NO: 367112 - DNA, 1353 bp, Pseudomonas aeruginosa
atggccactccacctaagccattccctctgttcgatacgttcaagcgattccagacgctgaatcacctgaacctcagcgccgagctcccggctgttcgcgactacctgaacgcctttccatccgagcttcgtgctgtcgagggctaccaggttgttcgaagctttctgaagtcgtaccagggaaacgaaaccaccttcgtcagttaccggacgcattcagagcgcctcctgctttgggcgctgctgattcgcaagaagccaatcctcgacctcagacgggtcgacgctgaggccttcatggagttctgcctcaatccgcctccttcctgggtcggtccagtcgtcaagtcgcgcttcaaccgaattggcggccgcaaggtaaaggactccgacacctatgaggtcaacccggcttggcggccgttcaactacccgccggtcaagggcgcttccgctgagggcgatgaaagcgctcttgagcgcaagtacaagccgtcacagggcacaacggctcagatcttcgctgtctgcggtagcttcttcgagcacgcgatcgatgaaggctactgcgagtcaaacccgatccgggcaatcaaacagaagtccaatttcaagcagcgctatgtcaaggacgacgatgcccggacgctgacgccgctgcagtgggattacgtgattgagacggctgtgatgatggctgaccagcacaagccggcccccggcgttgccctggaagcgatggatgacgaatcccggaagctatgggtctaccacgagcgcaacctattcatcatcgcgaccctgttctccatgtacctgcgtatttccgacctggtcggccggcctggctgggagccatctatgggtgatttccgactcgacccgcgtggctattggttcttccacgtggtcgggaaaggcaacaaggctgcgaaaatcagtgtccgaaacgactacatgaccacctacatggccaggtataggacgcacctcggactgtctcctatgccggcgccgggtgaaacccgccctcttctttacgccctccatggccgcgctggcctgagcgatcgtcaggtgaggctgctggtgcagggggtctttgatcgcgccctagagcgcatgaaggaagaccattggatcgaggctgaggtctcgaagcttcgagaggcttcgcttcactggctgcgccacacctcggcgacattcgatgcgccgcttcgcgacatgaaggacctgcaggctgacctgcgccacgagagcatgcaaaccacgcaggacgtttactacaactccctggatgaccagcgcgctcaatcggtgatgaacctgccagttcgtcgggatgagtag

SEQ ID NO: 367113 - DNA, 312 bp, Pseudomonas aeruginosa
atgcacctcaatgccaatgtaagcgccgagcctgcagcctcccaaggctccgcggctaagcttcagctggtggaaacccctcccgccgatcggcttatcgccacctatggcgagcgtatgacaacgctccaggttgccaccgagctcggctacaccgagacctacttcctgaagaagatcggctcggccaagcacacgcatctggattgggtcaaagccctcaaaccggctcgtttcagcctgggtcgaaccccctactaccacactgaagccgtttccaagttcatggggcagaaggggatcctcaaatga

SEQ ID NO: 367114 - DNA, 1041 bp, Pseudomonas aeruginosa
atgaatcctctcgcccagaatgtccttttcagtctggcgctggtgctgcctcttgctgttcaagcggcgggagtgagcgcacagcctgatacgcctgcggcagcggcatccgactccgtcagtttctatcagggcaaggctgacggctggttctggtacaaggagccgcctgagcctcccaaggagaaaaagaagaagaaggaagagccgccccctcctcctccgttgcccaagccaatcgaacaagcaaagcctgttgaacctgcgcctgccgccccccaagggccgcaggttttcagcgttgcctggctgcagaagaaccttcccaagtaccgcaatatcgcgatcgacaaccccaccgaggagaacgtccagcggtactactacatgcagcggatgatgatggacaaggcgaacaagttcgccgaggtgtcctcgaccgtgatcatgaaggatccgttcctcgacgaagatagccgccggccggtggccacctatgccgcccaggccttgaaccggcaagtaggtgccaaggcagaaaaagtcctcaaggacctttcgaagcaggtcggccttttcttctttttctcctccgactgcatgctctgctctgagcaggctggcgtgctgcaggcgctcacctacaagacgggtatccaggtgatccctgtctccatggatggcgggcctctttccaatggcatgtatcccgattatcgggtggaccagggccaggccaaggcgatgaacatctatcaggcccctgccctcgccctcgcgatcccgcccgacaaaaccgagatcgtcggttatggcgctgtcaccctcgacgtgcttcagaaccgaattttcatggctgcacgcgacgccggcgtgatcagcaaagaggtcttcgcatctacccagcccttctacgacaacggactgctttccatggatgacgctcaaggcctggatgaggaaatgctcgaggacccacaggtatttgttgaacacatgcgccgccagctcgcgcaaaagaacattcaaggagccaagtaa

SEQ ID NO: 367115 - DNA, 1440 bp, Pseudomonas aeruginosa
atgttcagccctaagccaaacgctctagcccttggtctcgcgctcgcaatcttcagcggtgcagctatggccaacattcaaagccagatggacagcatgttcgagggaatgtcgaactccactgcacctggcgcattcgagacggcgacccgaggcgtaatctccggcggttccatgcgcatccgcaacgaaatcagcactggcccggtcgtatcgttcaggccgccatccatccaggcgggctgcggcggcatcgacatgttcgccggctccttcagcttcatcaacgcacagcagtttgttcaaacgctgcgctccgttgcttccaatgccgtcggcgtggcctccggctacgccttcaagctggcgctgcaggcgatgggtccaacgccggcgaacgtcatttctcagctgcaagaaaccatgcagaagatgaacgaaatgatgtcgaactcatgccagctggcgacaggcctcgtcactgatacgttcctggcgtttggtgcgaacctggacaacaacgacaagcagaaatccctggctgccggcctcggtgacgccttcagttccttcaacggcccgagcaatgacggcggtaaaagtgccggcgagaaggtcgaggaaagtggcaaggccgaagcctgtaaggacttcggaaacgtcctttggtgcgcaatggtcgatcggagcaccaagtcgttcttcaagtatggtagcgatcagaccgaagaactgatcatgtctatgacaggctcctacatcctgggcgaaatggatgaggccagcgatggtaaaggcaagacccgtcgcaatgtgccactcccccctctggaggaagttagcttgatcaccctgatcgaaggtaagaagggggaaaagctgaaggtctatgactgctctgatgatgagaacacctgtgtcgactacaagacccaggagatcgaattcgacgggctcgcctcaaaaatcgagaaggcattcatcggcagtggctccagtcctggaatcatctacaagtggtcgaccaatactggctcattcacccctgatgagatccaggtgatctcggcgcttcagaagtccagcttctcggcgatgatccagcgcctgtcgcagcgaagcgcatcggttgcctcgggatttgtctctgagaactccaagcttattgctcgagatgcgatgcacagcctggcgcgtagctacctcgatgcagcaagagcgtcgcttgtcggctccccgatgatctcagcgcttggcgagcatccggatgaattcctgaaccgcgcctacacaacgctgaacacgcactacgcggccgccctcgagaagtacggttcaaacgccgccatgatggctgactacaacaacaagatgcagatcatgcctgctccaggcttcctttcttacatcggcgagaagcctgttgctggggctgaataa

SEQ ID NO: 367116 - DNA, 3045 bp, Pseudomonas aeruginosa
atggaattcactatctactcgattggctcggcggcatacctcgaagagattctcaacgcggttgccatgatcagcggtactggtgacatcgaggcgctggccaaggtcggcatgatcatcggcgtgctcatcctgggcttccaggctgtcatgaatggcacgggcatccagtttcagaagatgctggtatgcgcaatcatgtacctggcaatgtacggcccgactggccgggctctcattgaagatgtctataccggtgatgtcgccgtcgtagacaacgtcccactggggcctcttgctgtgggttcgattgtttcgaccatcggttacaacatcaccgacaccttcgaaacagccttttctgtgccaggcatgacggagtacggtttcgcagatccgctggacaccttggtcaaggtgcggaaggtcgcaaacaacgtccagtccatgccgagtgtgacaggcacaggtaacgcctccctgctggcttcttgggccaattaccttcgcgaatgcaccctgactgccactaactccaaccctgtggccatgcgagacgttttcaccaacccggacgcgattggtgcaattcgtttcgactcgagcgtttactacaccaagatctacgatggctcagctgatggcgtgacgctgtcatgccgggatgcttatacgacgctcagaggcgctacagacactgcccaggacgcaatgctggacgacgtggcaaagagctttgccaaaccgggtgcactgctcgatagcactgcgctggagactcgtttgaataacgccctcttctcgctgactggtgctgccacagacgcccgcgcctacacggtcacagcggtactgctccctattctggaaggtgctcctgggcagcgtgccattgaggatatgcaaggcgccgcggccatcatgatgggccaggctatgcagcagcagaatactcagtgggcggccgaaggctctatgttcacgaagtacattcgcccgttcatgacattcttcgagggattcatctacgcgataacacctctgatggcgttcgtaatcgtccttggtggtttcggcatcggcctggtatctaaatacctactcatcctgatttggatgatgctctggatgcctgttctttctattgtgaacctctatacgatctcgacaaccaaggccaagatcgaaggcattctggggtcgagcacctttgtcaccgaggggctttcgttccagaacatgcgcgacatgatgccgatcatcgagacacagatcggcgtagcggggatgatggcttcggcaacgccggcgctgtgcatgttcctggtgtacggcacttctgttgcggccagtggtatcgcttcgcgcctgaacggctccgacacaatcaacgagaagatcgccagtccggatgttcttcagcctggagcgggaatgtctatgacctcgcaggtatcctccgatccaacccgcgggtctcgccagaccggctcagaggagtaccgtccaacgatcaatacaggttcagccctcgaaaaagctcgccaatctgcgtctgaaaacctcgcttcttcttccatgtcctacaaccaggcattccaaaagcaactgggtcagtcggtttccaacgcctcatccctggcagaggtagctgagataggtggaaaggtcgccagtgcccttggtacgtcttcgaactctggctatggtgctgctcgatctcaagcgatagcggctggttattcagagcaggaggttgatgcatttaccgctcaagttgctggcggtgtgggtgctcaagcgggccttggtaaggtggcctctgcggacatgggaggaaagcttcagagctcgactcagcagtcgtcaggcagcagtacccagcgcaccgatagcaatgctattgagcaaaatcttcgctctgcaatccagtccagtttttcgaaggagcaggcgcaaagcactgccgaacgactctccagttctcaagacttcaagaaagatgcaagctttacagatgcattgtcgaagcaaagcacggatctgcagcagtccaaagaggcctacagcaatgtcgaagcgttcaagcaaaactttggcatgagctcttcgatttctcttgacgcgcttgcaaataaagccattggcaatggaactgcaggccagctcgtgtccaacttggacaaacttgacgataaggatcgagcagcggcagctgaaaggttcgaagcatttaaaacatctaacgccgggaccatgggcaatcagaacgcgaccgtggcagccgccgcttatgcgcttgctggcgttggccgctacgacctgctgggtgatgcgcttggtgctaagtatgagggcatcaatccagacgctaacgcaggtcttgaggcggtaggctctaatggtaatgcggcggcattcgacggccgcggcgttcctcaggctggatttgatccgaatgctgagcgttcgcgtctgatttccgatggccaggctggggtttctaatttcgctggggccggtcagagtgcggtggagggcgacttcaactcgcggctcgattcctcccaggccaacttgaaggatgaaattggtgctcggtggcgtgacacgggccagaagaccgactatgacaggatcatgggcagcaatgtcaacatgcctgcttgggcagctcgcgccactgccaattcgcacaagaaagagtatgagctcgacagcatgcttgctgcgaagcgccgcgaggctgaagacgaattcggactacctccggtgctcgctgaggtgagcgcccgtgccgacattggctacctgacgcagcaggacatgggtaatgccgtggttaccctgcagaaagagtacggaatggatcgcaatgaagcacttggtgccgttgaggcgacggtaacaggcacttatggcagtaaagagggcggcaaggacttcagtgatatccaaaactactttagcggggatcaggtcaattcggcattgaggcctgattcaagtacaaggccaccaaatattctaagaatgaccgactaa

SEQ ID NO: 367117 - DNA, 459 bp, Pseudomonas aeruginosa
atggttgcggccgtgcatgccggcggcgatgctttcagctccctgacggatcttctcaactgcaatactggctatgctgaagtctgtttgggcttcatccataaccgcggccaacaggcgtttcatgccgccggcgaagagctgatccaccagggcgacgatgccgagcacgttttcgtgattatcgaaggccatgctgaagcctatgtcgacggccacaaggtcggcgacgtgcagaaagatgaaatcttcggcgccatggccgtgttcacccgcgagaagcgcagcgccaccgttctggccagcgaaccctgcaccgtgatggtcatccccaaggagcagttcctcagcctgatgcagagtaacccgcgcattgcccatagcctgattgaaagcatggcccggcgcatcgacctgctgaacaaggaagtcacccagctacgcctgcccgccgcctga

SEQ ID NO: 367118 - DNA, 849 bp, Pseudomonas aeruginosa
atggacggacagcgaagcaaggaacatgtcgctttggatcaagacttcatcaaatttaggcgtatacccgagggcgattgtgagctgctctcggcgcgctttagtaaccacaccttcggacgccactcccatgaccgctatgcagtcggggtcattactggcggcgtcgaacggatgtactaccgcggccgctattgcctcgggggcacgggctctgtggttacgattagcccaggagaaatccacgacggcttgccagctcatgagcagggctggatgtaccgtatgttgtatctagacccacagtggctcaaccgcacactgatgccgaagcaagcggatgattacattcatttgttcaaggaggctttcgaccagcagccggagctcgccgataccttctcgcaccatcaccaggtcatcgagtcgtcccaatgcagccttgagcgagaaagcttgcttttggagttggtgacccaactcttcgagcgtagagctgcgagcctcacatcggtcgacgcgcttgagaagcaggcggtgcggcgagtgcggtgccggcttgaggacgacttcgacaagccagtcacgctagagcaactggcccagatggtggacttggatccgctttacctgattagggtattcaagaagaacgtgggtgtgtcgccccacagctacctgattcaggtgagggtcgcccaggtgcagcgcctgctacgtgctggagtgagcattgccgatgccgccctcgcttgcggcttcttcgaccagagccatatgacgcgggctttcaagaaggtagtcggaatcaccccgggtggcttccgtattggacatctcccggcctag

SEQ ID NO: 367119 - DNA, 624 bp, Pseudomonas aeruginosa
atgtccctgaagctagtaattggcgattttggcaagtcttcctggtcgttccgtgcctggctggcactagtgagcgctgatgtttcgttccaaacccagcatgttcagcttgagcagccggatacccaccaacgcattctcgagctctctccttcgggaaaggtgccggctttactagtcgacgacatcgtcatcaacgatagcctggcgatctgcgaatacattgcggaaacctatccccacgcccagctttggcctgaagacagcgtcctgcgcgccaaagcccgagctgcagcggcagagatgcattccggtttcactcatctgcgtacgcagatgtcgttcgggctgaacactggggatcaggtcaacgagctgcaggaagaaacccgagaagaaatccagcgcatcttcgcaatctggagcgacctcattgcagcaagcaaatcgcacactttcctctgcggtagtttcggcatcgttgatgccatgtacgtgcctgttgtcttccgattccgccgctacggcatcgaagtgccgcctcatctacaagcgtatgtcaacaacgtgctagccaatcccgccgttcagcaatggctgaagctagccagtcagcacgcctga

SEQ ID NO: 367120 - DNA, 1344 bp, Pseudomonas aeruginosa
gtgagtattcattcagttacaagcaatgacggtaggcaggacggccacatcttcgacgtaatcggtatcggcttcggccctgccaacatagctctagccgtggccatggaggagcttggcttctccggctcgaggttgtttcttgatcgccagcctggggcccgttggcaaccagagatgcttctgtctggcagcgacattcagaaccatccaagccgtgacctagtcaccccacgcaatccacgcagccgttacaccttcaccaacttcctgttcgagaacggtcgcctatttgagcatctcaacctagggctggagtttcccttacgtagtgagttcgccgaatacgtccgttgggtggccgcattctttgccaaggatgtgatctataaccagtccgtaacctcgattcagtttgacccggcgcgcaacctgtacagcgtgacaacccaagctggtcagcatttcctggcacgctcgcttgtggtcgctcccggccgcactccaatggtgccccgggctttcgcaagcagcgagagcgagcgcgtattccacctgactcaatacctcagtcggcttagccatcttgccgagcaaggtacgctcaaacgtgtcgccgtcgtcggtggcagccagagcgcgatcgagatcattcttcacctgcggcacaactatcctgatgtgcaaataatcaatctccagcgtggctacggtttccgccttaaggacaccagccaattcagtgagcatgtgtattttcctgagttcgtcgaccagtactaccacagctcccctcgagccaagcagcacatcaatcgccacctgcactacaccaactactctgccgccgatggcgatgtgatcgccgaactctatgtgggcatgtacgaagataagctgcaaggcaaggagcgcgtcgtcctaaagggcttcagcgaaatcgaggaatgtgtaaccgagaaagagggttgcacgcttgaggttttgaatactcaggacggtcgccgtgaaaccctgactgatttggatgcgatcgttctcgccacagggtttcgcaacctgggtagcggcccccaggatgagcgctatccaacactgcttcagggcctggcggacaggctggaatgcgatgagcagggtgtgattcgtatcttgcgcgactaccgtttggccgcgcgcaaagggggcagcatgggtcccctctatctcaatgggttgtgcgagtcatctcatggctatggcgatgccggctccttcagcctgctatcgctacgctcacaggacattctcaactcgctgaacctgcagctggggttgactgagccgggtgagcggatcgcctga

SEQ ID NO: 367121 - DNA, 1329 bp, Pseudomonas aeruginosa
atgaacatctcgaacatgaatacaccagagttggatcttttcgccgaatatgaatcccaggcccgtagctactgccgcagttttccggtggtatttgaccaggccaagggcaactatctgtatgacctcaagggtcaggcgtacctcgacttcctcagctgcgctgggtcgcttaattacggccacaacccagaaccggttaaacacgccctgattaactaccttgcgcgtgacggtattcagggagccctggatatgcacagtcgagccaaacaggagttcatcttcaattttcgcaagctcatccttgagccccgggagctgtcttacaaactgcagttcacctcccccagcggcaccagcgtggtggagtcggcaattaagctggctcgcaaggtcaccgggcgtcgtcacgtagtggctttcaccaatggctttcacgggatgtcggccacctcactgggcctgactgggaatcgcgacaatcgccaacccggtgtcgatccctacgtgttccgcctgccctatgacaattatcttgaagggctagacagcatcgattacttctcgcgcctactcagtgacaacagctctggtatggatctacctgctgcggtgatcctagagacggtccagggtgaaggcgggatcaatgttgccagtcacaattggctgcagcgcctgcgccagttgaccagtgagcacggcatcctgctaatcattgatgacatccaggcaggctgtggtcggaccggtaccttcttcagcttcgagcctgccggaatcgagcccgaccttgtctgcctgtccaaatcgctcagcggctacgggctgccattcgccctgctgctgctacgcccagagcttgatatgtgggcacccggcgaggataacggcaccttccgcggtaataccctggcattcgtcgcggcgaccaaaaccctgcaagagttctggagcgatgatcgtctgactcgacatatccgggcctgcgagacccaagttgaaacctggctgactcggatcaacgagcacttcgccacacatatccgccaagtgcgagggcgtggtctgttctatggcattgagttccacgatccagcagttgcggcccgcgtggcacgagcctgcttcgggcgtcagctgatcattgagcgctgcggtcctcgcgaccaagtgctaaaactcatgccggcgctgaccatcgaccagaagaccttggaagctgggctggagtgcatcttcgatgccatgactcaaaccttgggcttggcatctgaagcacaccacaagcaggatgttatccagggagccgcctatgtcgactaa

SEQ ID NO: 367122 - DNA, 909 bp, Pseudomonas aeruginosa
atgtcgactaacaacaaccgagcgatccttgagctgaccattggcggtttgatgctcagcctttcggccttggccgtcgccttcgctcacatcggggctggtggcgccggcttttaccggatgctgttcgcctcgatcttattcttcctattactcaaggtccgccgcattccgattatgctgaagggcttcaaagctcagttgtataccgcccttgctggggtgttcctggccatcgacctggcactctggcaccagagcatatacatcgttggccctggcatcggctcgatcctgactaattgccaggtgttcttcatgacctttctagggttctacctgctcaaggaaaagcccacagtgtattttcttatttcaatcactttggccttcatcggtctgtacctgctcctcatgccggaaatgactaatgccctaggcgtcaaaggtgtggtttacggggtgctttcgggggttgcgtacgcactctgtgtgtatttcctcaaggtcaatgcccagctaccaaacggcggtggagataaagtcgctcagatgctcaacctgagcctctgggcagcgctagtgctgctcgtatacgccgtattgaatggtgaaagcttggcaatcaacgatggtcagaccttattgatgctggtgatctatggggttttggtgcaattcgtcggctggctgttggtcaaccgctcgatcggcaccatcagcctaggcttggccggattgattctcttgctggagccagtgattacctatttcattgatatcgcgtttctcggtaaggccaactcgatcttgcaaatctccggtgctctattgaccattctggcggtgtatatcggctcgctcaaaccgccggagaaaatgagccctgcacttactgaggcgacctaa

SEQ ID NO: 367123 - DNA, 837 bp, Pseudomonas aeruginosa
atgacctatgacctgaaaaacaaagtggtacttatcaccggttccacaggtggactcggccaagccgccgccgaagcattgcgggcccagggggccaggcttgctctacttgatcttcaactggaggatgtgaaagcgcaggcggcagaactgggaggcactgacgtcgcttatgcctgcgaggccaatgtttgctcgatggaaagcctcgaagcagccatgcgctcagtcgagcagcatttcggagcgatagatgtagtgattgccggcgccggcatcggcttcacagagccgatggcgacgatggagtccagaaccttcgagcgcaccatcgacgtcaatctcaacggcgtctggcgtaccttcaaggcaagtctgccctatgtcagcaagcggcagggctatatgttggcggtttcctcaatggctgccttcgtcaacgcgccgctcaatgcacactatgccgcgagcaaggcaggcgttctcgcgatgtgcaacagcctgcggttagagttcaaacatctcggggtcggtgttgggacactccatcctacgttcttcaagacaccaatgatggatgcgctaatgggcaacccctgctcggagttggtgttcaacaactaccagggcatctggaagttcgttgagttggagaccgtagtgagaggactcgttgaggggattacctctcgacgggaaatgatcacagtgcccaacagtaatgcactggtcgcccgagcgccggggctactgcgcggccttatcgaaaggctcggctttaacgatcagcgggttgctgaggcggtaagaatctccagcgtggccaaaacttcgtga

SEQ ID NO: 367124 - DNA, 273 bp, Pseudomonas aeruginosa
atggcattggagaaagtcgatctgatcgcgcaccacctgctcgaaggctttgcccacatagatgtcaaagtggccgtaggaatatcgtttgatctcgccgcgtggcgcccgacgagcgtgttccaaagttcgctttgctggcgccacgctgtcggggtcacatacgcaaaacaaaacaggtgcctgtatctgaggggttttgcggccagggaaatagcggacgatatccagagcaaagcgcgccggagcttcatttcggatatgagcccctag

SEQ ID NO: 367125 - DNA, 276 bp, Pseudomonas aeruginosa
atggccgccgccaaacgatgtcccccagagaatgaccttaccctgatcaacatctaccaggtcgcgagcatgggctatggcggctttccaatcgtcaagctggcggcggatatccagcaactgacgagggttaccctcgctctccccaaagtggcgatagtcaaacaccaagcaggcatagcctgctgccataaaacgctcagcgtatgcccccaagcgcatttggcgcgtaccgccaaggccgtgcgccatcaccacaattggaaaggggcctga

SEQ ID NO: 367126 - DNA, 759 bp, Pseudomonas aeruginosa
atgagccggccattgcataggcacgtagtgcaagagacctacgtgcaactgctctatgactatctggaggggcttgggtgtgcgcctgaagagatacttggcgaaccctggcctgagccaacgcctgagcgttctggggtagatgtggaacactgggactgcatgctgaagaaggcggctcaggctctggatgatccgttgctaggcctgcacgtcgggcaaaccattcgcgcccgacatttcggcgtagtcggatcagtgatattggcctgcacaaccatggaggcagtgctacagcacacgcagcgttatttacgcctagttttcgatgttattcccatgagccgtcgcgacggtgagggttggttcgagctggtctgggactcaagccagtatcttcccggcccgttggtaagtgagactggcactgtggcaatgctgcaattttgccgagacctggtgaggggcaccgtcacgccgctgaaggtcgacttcaaccatgcaggccccgaagacacgaccccttacgagacctttttcggctgcccggtgcgctttggccagcccgatgcagtagtgcgctactccacgcagttacttgatctgcccttgagaagtccagacccggtattgattgccttgctggaacagcacgcagatcgcctgttggcccaattaccgcagcaaaataagctggttgagcagttgcgcaaaaccattgctaaggaaggtctgaaaaagacttcccgaatctggtga

SEQ ID NO: 367127 - DNA, 507 bp, Pseudomonas aeruginosa
atgactcttaatccgctcaccctgatcggcatgctgcccagcctgttcggtaggacgccccaggcacgtctggctgttgtgaaggtggtagagctgccgccggcagactgcggcctgcaacacagcatcatccgggtgcacaacatgcacatcgattcgaagcggtccgatgttgggcgattctttcgccgcgacctgctgatgatcatcaacccggccaacggtgagaagacgctgcgttacgccatgggcaatcctggtggtaacggtctttccatcaaaaagcacgagattgcagtcgactacgatgctgtcgccaccctgggtgtgcggttcaatcgcgaggtcgaactggtcgtgcgccgagctacgacgatggagattgcggcctggttctacatgtaccccgatctgggaatccgctggtcttaccggcttggaatcctgggcgggctgctgggggtagtgggcctgttcacgggactgctgccgttcctgctgtcctga

SEQ ID NO: 367128 - DNA, 1194 bp, Pseudomonas aeruginosa
atggcagaacaattcatccaggggaaacactggcttgagcctctcaccccttccggcggctacccggaggatgtgcttgccatggctgatgagctgccgtttctggccggccggctggaagggctcatcgcgcctgagactgccaagcgcattgggagcctgatgcggatcaccaacagctactacagcaacctgatcgaaggccagttcacggaaccggccagtctggtccctcgcgtgaagcatcggggcaacaaggaactgcgcgagctggcgcagacccatgtggtggcgcaggaggtcatggagcgcatgtttcggcgtttcgtaatcgaatggccggagctattccacccgaagatgctttcgatcgtccacaagcgactctttgacggcgcgtccgatgcggacctgttgctgtctgatgggagcctgctcactccggggcagctgcgaggcgaagcacaaaagaacgttttcgtcggtgaccatgcagctcctgggtgggagtcggtgaccccgatggtcactcgcatgatggaggtctatggtcgagcccaggatcctcgctctcgtttgctcggggccatggcctatcaccagcgcctgggcttcgtgcaccccttcgaggatggtaatggccgcgtgatgaggatgattacccacctgcagctggggatgctcgggttgagctcgccactgtggtcgatatcccgcggcctggctcggcgccaagatgagtactacgccaggctcagtgccgctgaccggccccgccggggcgatctcgatggaagagggcagctcacccagacaggtctgatcgacttcgtccgtttcatgctgcaggtttgcaaggaccagatcctttacacctccgaggccatgggcttgcagaccctgcgccagcggcttgatcgcatcgtcttgtatgaaccgcaattcaccaaggcgggcatcaagccggaggcggccagggcactgcatctgctgctgattcagggtgaggtgtcgagagcagagttcaaggtctactttggcctgcatgaacgcactgccatcgagcagctgaaggccctgatcatgcttggcgtggtggaagcgccttcaccaaagtcgcgagaggtctatccgggcctgccggtgtggtttgcacagctggtcttcccagacctgcatagccggtttgtatag

SEQ ID NO: 367129 - DNA, 501 bp, Pseudomonas aeruginosa
atgagcaccctgcagtcgcccgagcacgtcgcaagcattgtcacccgcgactacggcgagcatgacccgcgaattgctccgtttcccgcctgcagttgcggcgctcctgcgcgcctggagcgcctccagtgtggcaagtgggatgcggggtgcacggcgtgcagtaagcgcattagctcgcctcagaagcacgattggcaggcctgcctgcagtggtgcgccatgaacatggagcagttgcactaccaggacctgcccctgttcggtctgcaagctctcgaccggccggccgccaaagctcgcttgacctcgatctacaacgacctggtgctgaggtgtcagattgggacgctggaactgtcgttgtgggagcgcacccgcgaccacacgacaccggggcgcgactacctggagaagatccttgcctaccgggactgggcaaagctttccctgcagctcatcaaggtgcgcgcccacggcgccccggaggaggtggactga

SEQ ID NO: 367130 - DNA, 210 bp, Pseudomonas aeruginosa
atggcccgcttctacatccacttcaaagctttccggaagaatggcccggcatcggagcatacccgctgcatcgagtgcgactcccctattgagtacgactccgatatagccgccgttcaggaatgggccgcgaaggaggtccaggctgattctgcaatgctgctgaactggcacgagctcaagggcgctcagcgacccaagcccaactga

SEQ ID NO: 367131 - DNA, 306 bp, Pseudomonas aeruginosa
atggaaatgaaatttcgtaccagatctggcgccattatcagcgcagacccacaggcagagcagtccgtccccctgggtctagctgatccctctgctgagcagggcgctgcgcaggttgagcccgcgcatcttctgcgcaaacagatcgagcgagtgattcgtgaatacggtgccgatcctgcgaaagccgcccttgccgtctgcgtcatcctggaagggaacttgggcctggcggaaaacggctacttcgacgatgacgaagctgtgctgaacgcaatcctggccgctgaccagtctgacgactga

SEQ ID NO: 367132 - DNA, 558 bp, Pseudomonas aeruginosa
atggactggcttctggagtgctttggccctgcgatcgcgggtgatgtgaccgagcggaatcatcgctatttggaggaggctctcgagcttgtgcaggcgtgcggctgcactgctgccgaggcccacaatttggtggactacgtgtttggtcggccggtcggggagacctcgcaagaggtcggcggggtcatggttaccctggccgcactttgccttgcccagggcatcgacatgagccacgcgggagaggtggagctctctcgaatctcacagccggaaatggttgagagaattcgtgagaagcagaagcgcaagcccgccatgtcaccgttaccgggcacatatccagaccgcgtcgccttgatccccagtgcagcagctgagcaccattcagccgccatcgcgtccgaactggacaccgtaaaagcactcctgcgcggccttctcgaaggtgacgccggcgccagcattctttccaggctcgatagcggccagggcacggctaccgaagacggtaagctatgggtggctgccagggagcttctcgccaagagttga

SEQ ID NO: 367133 - DNA, 261 bp, Pseudomonas aeruginosa
ttgaagtaccaatgggaagcccaggatgtagttgcgggtcgtaaagttgactcgcacaaccgcgctgagcgctacatgatcggttatgacgcgtcgatcaacaccgaggatggcaatctgctgctcgtgtccctgcgcgacggcatgctggtggagaagggcgctaccgcggaggcccttgcccagcgcatgaacgagtcggggatgcgcgcagtgtgcattcgcgaagatgacatcgctgcggcccgcaaagcatcgtga

SEQ ID NO: 367134 - DNA, 159 bp, Pseudomonas aeruginosa
atgtgcagcgcagccaaagcccaagccgatcagtcgttctgcagcttcgccatgaacgtgtacgagttcagcagctgcaagcgctatgacttcgcggacggctcgttcctgatcaagtgggacaacggccgcaccgaagtgaacaccatcactccctaa

SEQ ID NO: 367135 - DNA, 480 bp, Pseudomonas aeruginosa
atgagcagcaccagcacccccatcacgctcaaccactaccagctcaaggccctgcttgaggacagcgagatgtatggggtgggcgctgctgatgttcagtcggttgtggttgcctaccgatgcgcagatgacccggaggcctacgccgggccgggcctgtactcggtcatcgcaggcgtcgacctggaagatggctcctacctggcgctcgatcagcaggatcatgagcgggcccaggcgatccgccaggccgagcttgatcggatggtgctggagtacgaggctgtagaggcccaggtccagcaagaggactctcaccgctgcaagggccgtgctacctgcatgctgccacacggcgccgcatggctgttcaaggtgccggcagaggtgaagggatgcaaggcggtggggcgttgcctgtgcgatgagtaccgacaggcacacatcgaggtcgagctggagattcccctggaagggtag

SEQ ID NO: 367136 - DNA, 210 bp, Pseudomonas aeruginosa
atgcgaaaacaggcgtatcaactgggcgttttcagtttcggcatggttacggctggcctggtggcccccggtctgcttggtgacacgccggtcggcggggtcgagtttctcagcgcctctgtgtccttcttcaccatgatcttctgtgcctacaagtccgtcactctgccggcagagcctgtagaaatcgctgactctcctcgcgaatga

SEQ ID NO: 367137 - DNA, 408 bp, Pseudomonas aeruginosa
atggagcccgtcgattttgagcgtctgcttgcgaccggaaaggatctttcggagagcctcaggcgctatgaccaagagatcgtccagcgactcaccaacatggtggtgctggtgctgctggcgttcatcaccatgaccgtgactgccagctacgttgacaccctgctgctgcagcctgatagccgcggtccgctctggctgttctttgccggcgggatgggtctatcgatctgcgcgagcttcgtgggcatccacttcaacaacaggcgcctgtcggcggtcatgcgcaaccgcaagcaggatcaagtgatgctcagcaacgtcaaggtcgtgctggttgagggcttagccaatcgccaagatgcgggcgtgggtcgagatcagcttgaggtggagcggcttcggtaa

SEQ ID NO: 367138 - DNA, 570 bp, Pseudomonas aeruginosa
atgagcacaacggccgaactggcaactaccgtcatggggcaccagctggtcgaggccctgcgtgccgacggcctgagcggcgacctgggcgccaacgtggcggcgctgctgcggcagtggggcgctgacttcgctgcgggcccgcccgaggtcttcaacccgtgcaactgtggttacgccggcgagctcaagcgtgcgcggagcgggccggaaggggagttctactcggttcgctgcgccgagtgcctgaagtctgtccaagccttcacggtgatcggtctggtagggaactggaatgcggtcaaccgcaaacatgccccggcggcgcggctggtgcgcgatacggcgccgaagtgtgtgctcgactggtaccaggccaagctggcgcatgtgaaagcggtggatgcctacaaccagcgcctggcgttcgtgcagcagcacatgccgttcggcaccagcgtcgatccggagtaccagctgatggaagaggccgagcgacacgcccgcggcctgctcaaccccatgtttgaaggcctgcaggtgctgctggccgagcccgaggagaagtaa

SEQ ID NO: 367139 - DNA, 441 bp, Pseudomonas aeruginosa
atgaatgaccaccgccgcaccgcggcaatcccgtactgggtaaccatcgagctgctgctgggcgtggtgctggtatgcaccagcatcgccggcctggtcatctacgcccccgcccaaggtggagcggctctttcggctcctatcccggctaccggcctgttctggatcatgatcatcgcgggggtggcccagatcggctgggcgatccatacggctggcctcgaccgtgccgtgctcgctgtgagcgatggccaacaggagcgcctggacgtggccgagctgcagctggccggcgggcgagccaaaccataccccctgcaagccggcttcccgtccggcagctccctgaagttccgcaccgagggcggcgacactgtcgagatggacatccacgccctgaaacccctgtccgataccgacacagcaaaaggaaaagcctga

SEQ ID NO: 367140 - DNA, 258 bp, Pseudomonas aeruginosa
atggctaacaactccgggagtgccacctgcagccactgcggggcgcactaccacctgcactcgatctctggccgggacatgatggcactgtgtcgctcgtggcggaaaaagcacgaggccaagtgctccaccaggacgccgaaggagcgcagagcctgggcgaagaagtacatcgccaacgtacccggtgagcacagcctgactgtcgacatggaacacctgggattccaggacacctcgccgccccctaccgcgtaa

SEQ ID NO: 367141 - DNA, 330 bp, Pseudomonas aeruginosa
atgaccgagaagaaccccatcgagacgctggcagcggccggcaatgaggccctgaccatcgtcgacgccgccatcgccgagaacggccaagctgcgctggagaccgtcaacgcgcaggcggtggaggccgagtcggactactacaccgaagagcagctcaacaccgtcgtcaacgtccagctcaccctgcgtgacctgaccatcctcagctggggccacgaggccgtttccttcgttcccggcgaagagaatgacctcgagttccaggccgcgagcaagaaaatcgacgcagcactggatgaagcccgtgaccgcgccgcgcagctgtaa

SEQ ID NO: 367142 - DNA, 678 bp, Pseudomonas aeruginosa
atgagcactctcgtaacccctgcagctgagctggccccgttcgactatgacggcgccgcgaaaaggtcctttgccttcgtgcatgagggcgatgacaccttcgacgtggcatttggccgtccgaactggatgccggtgccgatggccatgctgatggctggcgatccccgagaggtccaagacgcgctcatggaagagttcgaagtcttcgtgaagcaagcccaaccccacgctgggtggcgtgactttcacagcgagctgaccggggtgcagggctggcttgaggaatgctctcgcaagctggagctggaaatggatcgggtgcgagcgctggacgcttccaggcgttctgctgagttcgacagcgaggaagggcaggacggttacagcgggttcacctccgtcgaggccgtgtgtcagtttctggcgacctggcaccaaacgaatacgcgtagcttgtgcgtgtgggacaccagctccaagcgaagcatcgcctactcccgtcttcccgaagtgcaggcgctggccaacgctatcgaggacatgcggatctgctcgttgaagtgggcctgcagctggctggccgagagcggcatgcaggtggaccacgtcgagcagctggtgctggtgccgggttaccagccgctgcggctcaagaaagcagtgcatggagactga

SEQ ID NO: 367143 - DNA, 306 bp, Pseudomonas aeruginosa
atgagccgcaagattatccagatatccgccgtatcgcccggcagcaatgggcgtcagttcttccaccctgcggctcttgcgctggccgatgacggcaccgtgtggtgcgcaggctacaaccccgtggaagagcagttcgacccgtggcaaaagctgcgcgacctgccccagaccgatcaggaggcgctggacgtgctggtcgagcacaagaaggccctggtagagccgcagttctccctggcggacgcctggcgcaagcgcattgccgggatacgggctttgttcgggctaggtaaccgcggttga

SEQ ID NO: 367144 - DNA, 630 bp, Pseudomonas aeruginosa
atgaacgcagcggcatccccagtcggtctcagtccggcaccagcaccggtcagcggcttcgccaacagcgagccagatgaacgcggaatgtactttctgcacgacgggcaggcctcgattggtcgtccggactggatgccctgcatgtacgccatgctgctggccgccggcgccgagggcgtagagctggcccagggcatgatcgcccgcacagtcactggtgccctgccggccggatggctcgaaaacgcctgcctgagcgcaaagcatgccttggcgccgctgtatgccctggatgaggtgcgcagcaccgatacggggctgtgggctggcgccggctacatgaacttcaccaccgaagaggtcttcgacgccttcctgggtgccctgaagtgctacctgatcacccgcgagaccgggaaggccctggcggccggccggaagcgggcgtttctcaagcagctcgtggtcgatgagcaccgctacatcaccgaggaactgtggactgcctccctgtgctgggcccgatcctggatgaaggctggcggggctctgctgagcgaaggcgagcagctggtgcatgtccctggttaccagcccctgatcggcgtggcagtccagcaaccgtga

SEQ ID NO: 367145 - DNA, 561 bp, Pseudomonas aeruginosa
atgtcgcaccagctccgcgaagtgctgaaccagcgagcgccggccatgaccaaggcaaacgccgtgatctgtaccctgcaccagctctactggttctgcaggcctgggaaactgccagtacggatcgaggtgcctgggagcggacgtgacgccgtgatgatcgccttgcctgagggggtgccactgttccgcctcgagcaactcaatgagctcgccattgcaggcatcgaactgctggcgcctctggtgctcgcagaccgcgagaacctggtgatctacatggcagccggggctggcgccgcggtgattgacccgatgcaggcagtgatcggcaatcgagcatcgctccaggaagagctgggtccgcaactgtgggctgaggtggagatggctttcgcgcctgcatgcatggcgcttggcccaggtctcgcctcactgccaccgcagaccccagtcgggctggtccgctctgaggcggagacggccttgatggcgctgcacaggttcgcccagatttcatgcgtaatccacgaaggagagcgcaaggcccgagccgcatag

SEQ ID NO: 367146 - DNA, 3183 bp, Pseudomonas aeruginosa
atggcgtaccagatggacaccccaccagtgaatgcattgcccgacgactcgggagctaagcagctcctgggcttctggcatgcactggagatggtgcaggcgagattcatccctgaggtggatctgcgcgcagtagggcaggccaagcgcgttgtcgagataggtctgacacatccagagcaagccccgtgggaacatgcagcggacaaccagggcgagacctatcgggtatacctggggtgttacggcagccggtcggcttacgacctcctcacaccgggaagcgcgcgagcagcgtccgtatcggactcagtacacgggagttatgccctttgcatgatcgaagtggacgcagataccggtttccggagaggaaccttcagtctttcgactgcatcctgggcaatcggccgactgatacacgggcacagcatccagagcggatacgaagcggcgcaggccttcctgagcgaagcggcagacgacatgttgtccgtcccttccagccagctacgcgagcgcatgcgcgacctgtgtgaccaggtacggctacaccttggccttgcggaactgggcatcgagaacgaacaccgtgcgcggtgcgttctgaaagcccctacctcagcagcagtccgagaggcccaccccctcaacagcccgcacgtagcggacatagagcgcgtccagaactatctcggcgccggcggcgtgtcccctgtcctagacggatacttgaaccgagagccaacgctgatacgcctcgacgtggagagcgaagagggtcaggagctcagcgcgatcgcacttatgccgcacagcggacagctggccgcatggcctacccgcgacctggcgtccaagtcggagatcctgagcagcaacctgattcgccgggagttgtccggcaccggcgggatccaggccgtcagccagcccgagggaagcgaaagctaccgggtagtacgaaagatccttctcgactccttggtggcgaaggcagacgtactggcgagcctgccaaggcctcagctggcattcaccaaccgaagcggcggggccggctgtcggcgccagggcgacgcctggcacctgtgcgaggggcttattgaccacggcgtggtgctgatcagtggtttgcatgccggcatccctggcctgctggcgagtctacggccagagctgcaggtgtccgatggtgaccgcctgatagctgagctgcagcagagtgtggttaccccctgcgatctctcggccagccaaccagtggagagagtcgcggcgcaggctagtgcccaagagagcgtcctgctcagactgctccgggcctcggcgtcagatcaggtcgccagtgaggatcggaacgccctgtggcatgaggcagtgcgtcggtaccgggccgctcgcgaaaatgtcctttcgcttctcggagacaccaagggcttgtcggcaggcgccaagcgatacatgcagctcagtgctcgcctgtccgccgtggagcgtgctcttgacctttgcgaggcgggattacaggagcatcgagagagcctgtccgacatcgacggaaacgtcatgcagcatctccagcacgagctgcaggagatcattcgacagcaggcatttgcgaacagcgttcgcggacgcgtgctgaatgcccttcaggggctctggcgcagcagcgccggtgaaagccggcggcaaggcctggccgagcgtgccgaatcgcttgccagcgcgatccgggccagccagcgccgtgtcgaaaccgctcagcgcgacatcgagcgcgagcgcgaggaggtgagtcgcctcgaggctggggtagcggagctggaggctgatctgcaggccctgctggcgaccgtcctgccggattgctatgccgtcggcgcccaccacctcgcagagtggttcaccggtaagtccctgcacgcgctggagacagagctgacagagctatggctcatagacggactgcgggatgcacaggagcagctgctgcacgaggccacccgcctgctggcggtcttcatgcgactggagagccggcgcctgcagaagaacctggagcaggggctccggatactttctggacaagcgccgcagcgagacgccggtcaccaggtggagtcccaggtggcgactgtcctgctgttcaccccggtggcagtcctgacgccgtccgatgttgaggcaaggctgcggagccagccggcgagcactatcggttgggtcatcctgaccgatgcggggtgcatcccggcgccggccgcccttggcgctgtgttccgcgggcgccgcgtagtgtccataggcgatagtactgtccgccaggtaggcccgcagctgccggagggcgtgatttgcctgctggccgaacagtcggggctcggagataactggcgccagtacagggcatccgcccaggacatggccgaacgggcctcggtttacggaactgtacgcgtgaccgatctggagtcgcgctgggccggcttgccgatccgcgctgtgccgtatggcgctgagccaatgctcagtatcctgaccaggctcagcaggggccgccgagtagccgtgcgccggccaggcggaattgctggtgcctttggttcaggctggattgatatccgcggcgagggcagcgggaactggattgccgctgaggggcgtgccctggagcggcttctggacagcctggcggagcggggcatcccaaatcagcagatcagcgtcgtctctccgttccgcagggttgttgtcgagctgcgtaagctgctcgccggtaccggatacccgctgggcttgatcgagtccctgcgcggaaggccgaccgatttcgtcatcgtcgtgctcggcggcagcaggccgggcgccagagactgggtctgcgaagatccttcccagatggtggtggccaccgccgctgctcgctcagggctttacctgattggcgaccgggccgactggtcccgccgacctgtgatgaagcccttcgctgagctgctggcgccgctcaacgtcgacgtgactgtccattactcacctgcagctcaatcgggcaccagcatcgcccggcagcgggcccatcgaaacgaagcgggcaaggggcaggtggtcctccacgctcggccagcaccagcgaaggcggccgccggcgccgcgagcaaccatgcacaggagtga

SEQ ID NO: 367147 - DNA, 258 bp, Pseudomonas aeruginosa
atgatcggggccggaatctatcccgacgatgtcctggtggtagatcgctctttgtctgccaagcactacgacatcgttattgccgtcgtcgacggcgagatgacttgtaagcgcctactcattgaaggcggcacggtggttctgcattccgagaacccggcgtatcccgatattcgactgaaatccggctccgaactcagtatatggggtgtctgcgctttcaatttgcaccgcctcactcgtttatccaggcggtag

SEQ ID NO: 367148 - DNA, 1251 bp, Pseudomonas aeruginosa
atggctttcatactcttcgatgcgcacaacttttatgtgagcgcgcaactggtttggcagcctgagtacatcggcaagcctgttgtcgttatcgggtcgaatgacggatgcgttatttctcgatcgccagaggcgaagaagctcggcatcgcaatgggcgaacccgctcactttgttcgtgaggagttctggcgcgagaacgttaaattcttctcagcgaacttcgctctctatggcgatatgagctcccggatgatggctgttatcgagcagcttgtgccgaaaatgcggatttactccatcgatgaggcattcgctatatgcgatggcatgtccattgttcagctggagactctcgcgtcacaagttcaagctcaggttaagcagtggaccggcctcggtattggcgccggtatcgcccgcacactcactctcgccaaagtttcgagctatctcgcaaagcgcgtgtttaaaacggacatgcactctatccactcagatgcggacaggatcgaggctatcgccaggactccagtggctgaggtctggggggtggggcccgcctatgcgtccaagctggaatccctgggggttcggactgccctggagctggctcaggcttcgacctccatgatcaagcagcacttccctgtcggcatctggcgtacacaggctgagctgcagggatttcctgcggtcgacctgggcgatgagtcaacccctaggcagatgatcaacgtggggcgctccttcggacaacggatcgagtcgctccatgacctgaagcccgctttcgcggcgtttgccatgaaggcggccgagaagctcaacaagcagcgttcggtttgcggggccatccgcgcatacctgcgaccagccggcgacctgcccgtgcgccctgttgctgttaccgcaaaactctcgattcggacatctgatcctcgggcgatagctgtcgcatcagccgagtgtgctgcgcgcatgttcaggcagggagtcgcctactcgaagggggggatttgtctgttggatctggatcagccagaagcggctattcagccgtcactgttcgatgcgtgcgatcaggatggtggtcgtatctcgacgctcatggcgcagatcaatgcccgcttcggacgtggaagcttgtccgtagccagcactctcggccccgatgtctggaaaccacgggcagatgggattagcgatacgtactcgacacgcatcagtgagctgaaggtcgtgaattga

SEQ ID NO: 367149 - DNA, 306 bp, Pseudomonas aeruginosa
atgagcaccgaacaaatcaccaacctgatggacaatgcggaattcgatacctgggccgacatctacgcccaggcccgcgttgccgaactgatcagcgtcaccttctcccagttcctccaggctccatgggagtacctgaccactgccggccaagagactgccgttgactgcatctccaatggcttcatgcccctgctgccaaaacaggcacaggcgagccagaagattcaggcggcctgggcatcccaggatgcggaattgactccccccaagcgcaaccacctcgccctggtagtcagcaactag

SEQ ID NO: 367150 - DNA, 408 bp, Pseudomonas aeruginosa
atgaattttgcatcccagacggaagcaatggtgcgggagctcgatcaggcctatgaggccatcgttgcgacggctaaatcgctgcagcaagacttcttcaacgaggagaaggattttgtctgctatcgcacctttacgatccgcaacgagtccacctcgatgaggatcgagtgggggcgtgtggtgtacaagggcaacaagcgcatgaagaaccctcagcgcatcaacctgggcaaaggctacacccagtcggtcaagttcatggggaacatgaaccagaaccaccagctgctgttcaacaaatacgagccccagcttgctgtgcttcgtgaactgtctgacaagaaccgtaccgccaggaaggcgctgctcaagctccaggtcgctgcgcagacccacaagatgtaa

SEQ ID NO: 367151 - DNA, 1008 bp, Pseudomonas aeruginosa
atggctaaagcaacccagacccagaaacccttcgtgttcggcctggacattggttactccaacgtcaagatggcctacggatatgcgggggatgagccggaaactctggttcggccggcgcaagccgcacctctgcgcatggtgaagggcgacgagaccccccaggccggtgaatatctggtctacgtaaatgatgagccgtggctcgccttcctggcccctgaccgcatcaacgccaagcgcgagctgcacgccgactatcctgcgtccgacgcctacaaagcgctgttcctggcctctctggctgcggcctgcaagaacggccaggatgtggacatgctggtaacgggcctgccggtgagccaggcggccgataagctgaaggtagatgcgctgaaagagcgcctgatcggcgatcaccagatcgcgccgaagacgactgtcagcgtcaaagcggtatccgttgtgccgcagccggcaggaactctgtacgacatctactccacccacgaggacgctgagctcttcaacgagtcgaacgtcctcgtgctggaccccggcttcttctcggtcgactgggtcctctaccaaagcggctcgatgaacaaggagtcgagcggcactaccctcgaagccatgagcaccatggtgcaaaccatcaactctgaaattcaggtggatttcggcggcgaaggtcctggcgttgccaaggtcgaaaacattctgcagaccggtaaggactactttgtcgcccgcggctctcgtgtgcagattgctccgtacatcctccgtgcccaggaaaagattgcccctctggcactgaaatcgatgcagcagagcctgcggttcctggatggagaaggcatctcgttcatcctggtaggcggtggcggcagcggcttctataaggatgcggccatggatctgtatccgaatgcgaaggtgatcacctcggataatccggtcatctccaacgcttgcggcttcttcttcaaaggcgctgcctaa

SEQ ID NO: 367152 - DNA, 696 bp, Pseudomonas aeruginosa
atgctctacgcagcagaacaaataactccaattgcgtttaaagagcgcctcgccgaaagaatgaaagaactggatgtcagcatcccccaactttcaatcaggacaggcatcagcgaggcaatgctaaagaatattctttataagaattctgatactggtcgggctaatctaattttgttggccactgccttgaaaacaacagttgagtatctcgcgactggtgttcaagcaggatctgagacggatgcgctgtcgttgaaggtcctaacgcctgaggaattggctgtagcactcggcatcatcagttcaggggctaatcacgctgctatggattctcgattggaaagcctgcctattccgaggcggatgctttcgcagtattcggtaatgccagagaatgttcgagctgttgctatcaatactgaatccctaagcccaacacttacccagcaagatgttgcgcttgtcgatatttcgtctacgcagcttgtcgagggtgttttccttcttgccatccgtgatgcggtaattctacggtttgtttccccggtgactcggggttttactttgtctgcgtccaatacgcatatctacggaaccaccatcaatgtggatccagatactggaatgcttgaggcacctgatacgaaagtcattggtaaagctttttgcgctatctcggttagaaatctataa

SEQ ID NO: 367153 - DNA, 894 bp, Pseudomonas aeruginosa
atggatattaagcagctcaagtttctcgttgccctggatgaaacacgccacttcggccatgccgcggcgcgctgtcatatcacccagccgaccctgtccatgcgcctgcgcaaactggaagatgagctgggcctggagctggtgctgcgtggtcagcgcttcgaaggttttaccgaggccggcctgcgcgtgctggcctgggcgcgcagcctgctggccgcccatgacggtttgtatgccgaggcggccgcctgtcgcgggcagttgatcggcaccctgcgcctgggggttgtgcccctggccgggttcgatccgatgcgcctggtgcagctgtttgccagccagcatccgggcctgcgttttcagttgtttgccttgagcagcgaggcgattctcgaacgcctggcgcgcaatcagctcgacctcggcctgtcctaccttgagcggctgaaccgcgacagctttacctgcctggagttggcgccgacccgcatggggctgctgcatgatcgccggcatttcaacttcgccacgccctcgctgacctggcaggcgttggtgactttgcccctgggcctgctctccagtggcatgcactttcgccagtctatcgatcacggctttcgcagccggggcctggcgctgcaaccgctgctggaaaccgacgcagtgcatcaattgctgcaagccgtcggcgtcggcctgtgctgtgcggtggtgccgatcgacagtggcctcgatgcgctggccgcgcatctcgacctgatccccattgatgacgcccagacactggcgcccctgggcctcatcctgcgcagccatgcgccccgctcagccttggccgacgcctgtttcaacgaggccaagcgcctgctggcgccgcctgcagcctga

SEQ ID NO: 367154 - DNA, 843 bp, Pseudomonas aeruginosa
atgtccgctaccgttccccagccctgcgctcagcccgagccggcgccgcctgcggccaacctctaccagtaccttgaactgacgaccacgctcgcccaggcgcaaaccgcgctggccagcgagtgcgccctggcgctgagcttcaacggtcttaaccacgcggtgatgatggtttcacccaacgacctggaagattttgtcctcggtttcagcctgagctgtggcgcggtcaaagccatcgacgagatttatgacctacgcctgagcggtagcggtgaggcgctgcaggccgacattcagctcagcagccgggcgttctggaacctcaagcagcaacgtcgccagttggccggcgccagcggctgcggcttgtgtggcgtggccgccctggagcaagccttgccccacttgccgcacctgagcgcgcaaccgctgccaccggccgagcacctgcatgggctgcgcgagcgcatcgaggccgcccagttccaggcacgcagcagcggcgcgttgcatgcggcgctgtttgtcgatgcgcgcggcggcctggcgctgtgccgcgaagacatcggccgccacaacgccctggacaaactgattggcgcactcaagcgggacaagttcaactgcgccagcggctttgccgtggtcaccagccgctgcagcctggagctgttgcacaaggccgtacgggccggcctctccaccctggtcagcctttccgccccaaccgccctgaccgtcgactgggcgcggtgccatgggctcaatcttattcatctcccgcaccacagtgcgccacgggtatacagcccggcgcccgccgaggcctgccagccatga

SEQ ID NO: 367155 - DNA, 2316 bp, Pseudomonas aeruginosa
atgagccacaagccccgctacaaaccctacaccggcgccgccgctggctggggcgccctgcgcagcgtcacccagcactggctgggcagcaagcagccgttcaagaacctgcgggccttactcaagaccaaccagaatggcggcttcgactgccccggttgcgcctggggcgagtcgcccgacagcggcgtggtcaagttctgcgagaacggcgccaaggcggtcaactgggaggcgaccaagcgtggcgtcggcgcggcgttctttgcccgccacagcgtgacccagctgcgtgagcagagtgattactggctggaacagcagggccgcctgaccgagccgatgcgctatgacgcggccaccgaccgctacctgccgatcagctgggacgccgccttcaccctgattggtgaggtgctgcgtagcctggacagccccgaccaggccgagttttacacctccggccgagccagcaacgaggcggcatttctctatcaactgttcgtgcgcagctacggcaccaacaacttccccgactgttccaacctgtgccacgaagccagcggcgtcgcccttggtaaaagtattggcgtgggcaaaggcacggtgacctttgccgatttcgcccaggccgacgctattttcgtgtttggccaaaaccccggcaccaaccatccacgcatgcttgaaccgctgcgcgaggcggtcgaacgcggcgcccgcgtcgcctgtttcaaccccctgaaagagcggggtctggaacgtttccagcacccgcagcacgccctggaaatgctcggcaatggcgaccgcccgaccagcagcgcctactttcgccccaacctgggcggtgacatggccgcagtgcgcggcatggccaagtgcctgctggcctgggagcgcgcgcagccgggcagcgtgtttgaccatgccttcattgcccagcacacccagggcttggcggactggttgcaggtggtcgagcacagcgagtgggccaccatcgaacagcaatctggcctgagccgccgcgaaatcgaacacgcggcgcagctctatgcccaatccgagcgcgttattgcctgctgggccatgggcatcacccagcaccggcattcggtggcgaccattcaggaaatcgccaacctcatgctcctgcgcggcaacgtgggcaaggccggcgccggcctgtgccccgtgcgcggccacagcaatgtccagggcgaccgcaccatgggcatcaacgaacacccgccggccgcgtttctcgatgccctggagcagcactttcaattcaaggtgccacgccaaccggggcataacgccgtgcaagccatcaacgccatgctcgccggccgcagcaaggtgtttatcggtctgggcggcaacttcgcccaggccacgccggacagtccgcagagccacgcggccttgcagcaatgcgcactgaccgtgcagatcagcaccaagctcaaccgcagccatttgatgcacggccggcaggcgctgatcctgccgtgtctggggcgtacggacatcgacctgcaagcgaacggcccgcaggcggtcagcgtcgaagacaccttcagcatggtgcatggctcctgggggcagctggcgcccttgtccacggcaatgcgctcggagccggcgattatcgccggcatcgccaacgccaccctcggcccgcagcccgtggactggctggcgctggtggaggattacgggcggatacgcgaactgattgccgcgaccattcccggctttaccgacttcaacgccaaactggcccaacctggcggcttctacctcggtaatgccgcggcaactcggcgctggaacaccccctcgggcgcggcacaatttgccgcccatgcgctgccggaggccttgctggccgcgcaggtgcgcagccaggaagagccgccgcagctgatcctgcaaaccctgcgcgcccatgaccagtacaacacctcgatctatggcctggatgatcgctatcgcggcgtgcgcggcatgcgcaaggtgctgttcgtcaacccgcaggatatcgcccgcctgggtttcgtcccgggtcagcaagtcgatctgcagtcactgtgggacgacggcatcgagcgcaaggtctgcggctttaccctgctcgcctatgacaccccgacgggccaggcggcggcctactacccggaaaccaacccgctggtgccgctgggcagtgttggcgagggcagttacacccccacctcaaaatttatcgccatccgcctgctggccagcgcggcttcaaacaaggtggctgcgctgaatctcagctag

SEQ ID NO: 367156 - DNA, 939 bp, Pseudomonas aeruginosa
atgccctggaaccactggtccaccgaacgcctgggtatcgcactggcagtgctggccgccttgggcttttccttcaaggccatcttcgtcaagttggcctacgccgccgcggccgtggatgccgtcaccctgctgaccctgcgcatgacctttgccttgcccatcgcactgtgggccagtctgtggctgtgccgcaccgcgccaccactcagccgcaaggattggggcttgctgctggtgctgggcgtgctgggttattacggcgccagcatcctcgacttcatcggcctacagtacatttcggcggccctcgagcgcttgattctgtttatctacccgaccctgactgtgctgatcggcgtgctgtttatgggtaaggcgctggagaaacgccaggtggcggcgctggccctgtcctacgccggcatcggcctggcgtttgcccacgacttgcaggtgacagacgacatgccggcggtgctgctcggcggggcgtttatcttcggctctgcgttgtcctacgccctgtatagcgccggagccgaagttgccattcggcgcttgggcaccctgcgctttgccgccctggccatcatcgtctccaccttcgccacgcagctgcactttgtcctcacccagccgtttaacgcgctggcgcaaccccttgaggtctatgcctatgccgcggcaatggccctgttctcaaccgtgttgccggtgttctggcagtcggccgccgtgcagcgcatcggtgccgcacgcaccgtgctgatcggcacactggggccgatgctaacgatcttcttcgcctggttgctgctgagcgaaccggtttccatcgcccagctccttggtgcaggtttggtcctggcgggggtaatgctggtctcccgacgccaacgcccaaggtcggcgcaacgcggcggcgcaggcaaatag

SEQ ID NO: 367157 - DNA, 264 bp, Pseudomonas aeruginosa
atgaaggcagtgctgatgctggtgatggtcgcgctggcgggatgcgccggccagatcgagcctgagccgcgcacggtgcgcgtagaagtgcccgttgcggtgccgtgccgagtgccggcggtagaggtaccggcctgggcaaccgctgggctgaagaagagcgacgatatccagaccaaggtccgtgcgctgctggccgagctgcagcagcggaaggggtatgaggtgcagctgcgcgccgctgtgaaggcgtgcagtgaatag

SEQ ID NO: 367158 - DNA, 369 bp, Pseudomonas aeruginosa
gtgatctcggcccgcgttgtctcgatcatgctggcctgcctgcttctggccggcttcggcgccgctggcggtgtttggttcggcgcgcggcactaccggctgcagttggatgccgcgcaggcggatctggtcgcctgccgtgccactcggggcagtctggaggccgcagtagctgagcagggcaggctggttgccgcgctgcgccatgccggcgagcagcgcgcccgggatgcagcacaggcagtggagcagggacgacagcaggctgccgagcagtatgcagcagcccatcgcctgctgagccagcgaaccgccggcgagcagtgtgcggccgccgatgcggtcatcgatcaggagttgggtctatga

SEQ ID NO: 367159 - DNA, 699 bp, Pseudomonas aeruginosa
atggatagcaagaacgaagccaagacggcgcgggcgcttcgccgggtttcctgcggcgaagggaacgcctgttttttcagtgttttggacaaaggcggcgaaatgcctccaacctctctacgacggcaaaaacctgaccccaaggacagtttttgccttgcactggtgcgtggtcgggaggggcgtgctcgactttgggttggcagcgcgaagaaaactggatacacaaaaacgatttgtgacaaaaagaatcagcagacttttgtacacaaaacagtgcgtggtctttctacacatcaccgccccggcgttcgggcgagaagcggcgcggataatgccagagacggcgggcggaattcatccccgaatggggtttttcgtcgggtttcaggacgcccggacgtaaattcgccagggcctgggagactccggtggcatgacatccagaaggcgctctcgatgttgcgtagcggagcgcgctcgagtacgggtcgcctggcagcctatgcctgccgggacttcttgcttcgccatccgcagggcggatacgccttgggcattatccgccggacaggtctccccgcctccccacatgggtcccctcaccacaccgcgatctgcgaatcggtgcgcggctcggtgccgccacagagcacgccgctggccgggtcgcgcaggacgatctggccgcgcccgtag

SEQ ID NO: 367160 - DNA, 129 bp, Pseudomonas aeruginosa
atgtccaagcgcaagagagacagcccagagttcaagcgggaaaccatcgagctggttcgccgttcagaggcgagctgccggcaggtagccctggaggttggcgttgctccgaacctgctcacacgctga

SEQ ID NO: 367161 - DNA, 693 bp, Pseudomonas aeruginosa
gtgggcatttacacagacctagacaaaggctttcctgcaaacaaagacaaaatccctgaaataactatgccacaccaaggagaagccacatccaactcatcatttggatgtcaggtaataaatagctataaagcaagagtagagtctttcgatcatttattccgactattcacagaggcagcccaaaatagattcgtctggcagcgaacaaaattcaagccaggagagttactagacaatacgagcaattcagtaaccggtgactgtgatcaactagcaaaaatgttggttcttctcgctcaacttcccaccccttatggcgcagggctagccggaaaatttgacattgctacatatcgtgggaaacacaacttgggattcattagcaaccacgaacgagaaatcctccgactcaaagccaacaccagattaataaaaagtaaacaaccaacctgttatctctgggaaaaccacaaagtggtatctcacaacggtaaattctacgacccatgctacaataaaatctaccaaagacttgaagaaatggctgtatatgaaataacggaagaagaaggcaaatattgcatagcaactcattgcgagatgcgcacgagccactacttcaaagccaacatcacgcccgccttagagtacgaagaaaccctgagcaagacttcatgcttgatccaataa

SEQ ID NO: 367162 - DNA, 549 bp, Pseudomonas aeruginosa; identical to SEQ ID NO: 351918

SEQ ID NO: 367163 - DNA, 672 bp, Pseudomonas aeruginosa
atgcatatccacgtactcgtcgtcgaagacaacttcgatctcgccggcaccgtcatcgactacctcgaggccgccggggtggtctgcgatcacgcccgcgacggccaggccggcctcaacctggcgcgcgccaaccgctacgacgtgatcctgctggacatcatgctgccgcgcatcaacggccggcaggtctgtcgccagctacgcgaagccggcctgcagaccccggtactcatgctcaccgccctggataccctgcaggacaagctcgacggcttcgacgccggcgccgacgactacctgctcaagcccttcgaactgccggagctgctggtccgcctgcaagccctcagccggcgccgcagcggccaggcccagcgcctgcaggtcgacgacctggtgatggacctcgacagccgccaggccagccgcggcggcacgcccctggcgctgtcccccaccgcctggaagatcctcgagtgcctgatgcgcgccagccccgcgctggtcacccgcgagcagctggggcgcagcgtctggggcgacgaaccgccggaaagcaacaccctcaacgtgcacatgcaccacctgcgcagcaccgtcgacaaggggttcgccacccctctgatccataccctgcacagcgtcggcttccagctggagcgcaaatga

SEQ ID NO: 367164 - DNA, 396 bp, Pseudomonas aeruginosa
atgctgcgctacacaattggcttcatcgctgtcgactacgacaaggctgtggaccgcaccgcgttcgactgcgtcgaccaccctccactgaacgactacatcgccaagcaggctactcaggatcagaagaggaacgtctctaggacttgtatgtacctggaggagggcaagctggtcggctactacaccctcgcaaccagctccgtgcagctcgcggacatccctgcagatgaggcgaaggggttgccgaaataccccctccctgcagtactcctgagccgcctggccgtcgacgggcccgcgcgcggcaagggactcggtaagcgtctcatggcgcacttacgcaatctcgaagcatgccggcgttgcgttcctcgttgtcgatgccaaagatga

SEQ ID NO: 367165 - DNA, 273 bp, Pseudomonas aeruginosa; identical to SEQ ID NO: 324362

SEQ ID NO: 367166 - DNA, 138 bp, Pseudomonas aeruginosa
atgagcatcgtcgacatcgccatggaggcgggcttttccagtcagtcctatttcacccagagctatcgccgccgtttcggctgcacaccgagccgctcgcggcaggggaaggacgaatgccgggctaaaaataactga

SEQ ID NO: 367167 - DNA, 822 bp, Pseudomonas aeruginosa
atgagttttaacagccgcgaaagctcgcttgcggatgggcagccggtgcggctgtaccagttcagccgtggcgcgatccgctggagctacaacagcagcgaccgggacatcacctaccagaaccaggttttccgcaccgtgccgggcggcatcaccgacaacgggattatctgctccggcgacccgcagtccgatcagttcatcatcaccgcgccggccgacctcgatgtcgcgctgctgtacaaggccaaatcgccgagtgatgccatcgatctggtcgtctacgacatgcactacggcgatgtcgaggcagcggtttcctgggtgggggagattggcgacgtggactggccgaccgtggacagcagtcgcataacgtgcgtgtccgaagacgagctgatggaccagccaggcttgatcgataccagttgccgcacctgcacggcgaccttgggcgaccaccgctgcaaggtaaacctcattccgtatcgagtgacgctgacaccgcagatcgtgtccgcgtgggtgatttccagcggagtggtcgccggctatgccgacgactggtttaccggtggctatgtggagtggcaggtggacggcgacaactacgaccgccgctacatcgagcggcacgccggggccgatctgcacatcctgggcggcaccgagggcatcccggcggggggccagctgcgggtctatccaggctgcgatctgctcgatgaaacctgcgccggaaagttcgacaacatcctgaatttccggggctttaacaagatgcaaggcaagtcgccgttcgatggcgaccaggtctggtga

SEQ ID NO: 367168 - DNA, 1704 bp, Pseudomonas aeruginosa
atggcgacgtttccggggttccaggtgccaaagccgctggtggggatcgttgccggcattacgccgaacatcgacgccctggagctgaatcaggacatcagcctggcagcggtcggggcctcgacctgggccggcgtctacgcggcgcatcagccggtagaggtgatccattcgtcgtacccagccgtccaccagagcgctctggaagacaactattacaaccggctgtggctgatccctacgactatggagctgggcaacgtcgtcagcactcaggtacgccctgcatctgtctggaacgcttatttcagtccgcgcacgctgaccgccatcgaccgcgaagccgcagacggcattacgctgtctggccaggcgtcgccgccgctgggttttgctgccctggaggaacgcacctggacggtcagcatcggcaccgacggcccgcccgtggtcaatgcacggatcatctggaggctcttgggcgagccggacctggtcctggtcatcaccggcaatcggatcatcgcctggacgttcgccccggactggggcgacagcatcgtcgagcgcctgagcgcctcgacaaatatcctgcaaagcgaatcagtcgtgacccagcgccgggctatgcgcctggcgccgcgccgggagttcgaagcgaacatgtacgcggtggaccgcgagcggcagctactggacatgacgctgtttggctggggcgcgcgcgtttgggcgctgccgatctggcctgatatccaactgctccaggaaccgctggcggccggctcgctgaacattccgtgcgacacggccggcctcgacttccgcgacggcggcctggcgatgctgcgcggcgaggacgcttttacttatgaggtcgtcgaggtcaagacggtgaccgccagcggcctggacctggttcggcccgtccaggccgcctggggaactggctcgcgactgtacccggtgcgcaccgcgcagctgaccgaacagcccacgctgacccggctgaccgataccgcgcagtctgcgcgggtgtcgttcctgataatggagcccagcgcctggcccgaggtaatgccggcgacgacctacaggggtcggccagtgctggagcagcgcccggacgaaagcgaagacctgacgtcgagctatcagcgcctgctgtccaccctcgacaacggcagcgcgattccccgcgtgaccgacgtcgccggcatggcgctgcccgtcatcggccatcgctggatcggcatgggccgagccgagcggtcggcgttccgtagcctggtctatgcgctgcgcggccagcagaagccgctatgggtgccaacccacgccgacgacctgaccctggtcgccaccgtctcgcaactggcgaccgcgctggatgtgcgcaatatcggctatgcccgtttcgcgaatggtcggccgggccgtcgcgacatccgtatcgagctgtacgacggcacggtctatcaccgccgcatcctcaccagcaccgagctggacgccgacaccgagcgtttggccatcgacgccgccctgggccgcctggtcgagccgaccgatgtagcgcgcatctgtttcatggcgctctgtagcgccgccaccgacgtggtcgagatagagcacgtcaccgatagcgagggcgtcgcaaccgccgcgctgacgttcaaaggggttcgtgacgatgagttttaa

SEQ ID NO: 367169 - DNA, 924 bp, Pseudomonas aeruginosa; identical to SEQ ID NO: 329549

SEQ ID NO: 367170 - DNA, 3483 bp, Pseudomonas aeruginosa
atggccactaatcagcaactctcgatagcactacgcatccaggctgacctggctgaagcgcagaacgcgctcagacaactaacgggcaacctccagcaggttgaccggggggcggtgcagaccaggagcgagctgtctgcgatgggtgggcagttggacagccttcgcgcacaggtgcttgggtttgtcggagcttgggctagcttgagtgcgctgggcggcctggtgaccatggttgaccaatatgggcaaatggccgaccgcatccagatggtcaccagcagcacggccgaatatgaacaagtgcaggcccggctgctggagacggccagccgcacctatcggccgctggcggaagcccaagagttgtacatccgcaccgccgacagcctgaagtcgttgcggtacaccaccgaacaagcgctggacatcaccgattcgttttccttcttgctggtaaccaacgccgcgtcggcggaccgtgcggcgagcgccatcgacgcctactcgaaatcgatccagaccggcaaggtcagctctgacgcctggcagtcgatcatggccgccatgcccagcctggtgaacgccctggcagagtccaccggcaagagcaccgaggaaatccgcaagctaggcatcgagggcagcctgtcgttgcgtgacctgaatgaagggctgcgcaagaccgtggcggcgaaccgcgaggcggcggacaacatgggcacctcggtccaggacgcgctggtcagcctgaacaacgccctgagcgcctacctgggcgagctgaaccgcacctatgacatcaccggtagcgtgtcctcggcgctgaacgtgctggccgagaacatggaggttatcgtcaaactgtttggggtcgcggcggtggcggggctgacccgctacgtggccagcctaacgctggccacccaggcgaaactggcggcagtgctggccgctcgggcgcaagccgctgaagaactgcgggcagcccaggctcaggtcgcttcgacggcagcggcagcggccaatgccagggcacaggcgggcctgacggtgagccatgctcaggcggcggcggccgaggcggcgcataccgccgcgacccagcgccttgctgctgcgcagttggcggccggcaccgcgatgcgcgggatgctggccgtgatcggtggtccggccggcatcgcgatgctggtggccggagcggcggcaagcttcttcctgtttcgcgatagcgcccaggcggtcaagagtagcctagatgacctgagtgagccgctggaccaggtcgtcgagcgcatgggtaagctgagcgagattgagcaagatcgcgaactgacccggctttccgagcagatcgacggattgcggcagacggctgtggaagccgcccgcgaaatgcgagaggtggccagcaccgccctctatggtgccaggctggatcgtatcccgtctgccgaagcacagcaggccctccagcctctaatcgatgcgtcggctgacgctgcgcgaggcgtggaggtggactggaagtcggtgatggactctctggctgccagcggcgctgttcccgattcactcaagcgcaagctgctggacatggcggctggtcaggcagaggcaggccgtactgctaccgagttggggcagcgtcatgcggaactcaaggcacgcctggagggttcgactgccgccatcaatgagaacagcgatgcactgagtaaagggtcggacaaggcagccgagtatatccagtccctgcgcctggccatcgccgacctggaagatccatcggtcctgggcaaggccggccgtcgcctccagcagttcggggccgacctcaatgccgagcagagtgccgaaatactccgcctggagaccctgaaggccaataccgaaaaggcggcccaggcccgcgaggatgcacggcgcaaggctgaatccagtgcgcgacaacaagcttccacggctgagcagttggcgaagagccaggaaggctatgttgcggggctggaaaagcaagcccgcaccctgggtctcaccagcgcagaggtgcgggcctacgagctggccgagaagggtttgaccggagccctccaagctcgggcagcggcagcacttgccgccctcgcggcggacgagaagaagcggcaagccgacgccactgcgcgcaccaacgccggactggaggccgaatatctgcgggcgaccggccgcaccgttgacgcggggctgctggagattcggacgaaatttgacgcgatgcgtcgggacttcgagaaggcgggcaacgacgccggcctggcctggatcgacaagctaatccccgtcgccgaggccaaggtccgcctggatgacgtcaagcagcagatggacgatttgctggccgaccagcaacgggccgagtcgtccgttaacgtccagcaggatgccggcgtcatcaacgaaatggacgcccggcagcgcatcctggacattcaccgagcgacctacgagaagctccagcagattcggccgatcctagaacagatggcccgccagcctggcgaggtcggccgagccgctgccgaatcgctcgcccaactggacgccgaggcggcgcgactccagcagaccacgacgctgctcgaaaccaccctgcgggacggcctcaccagcggctttaccgacgccatcaaggggctcgcttccgggaccatggacttgcgcgacgccatcacgtcgctgggtgaagctgtactcaatgccttggtgaacatggcggcgcagaacctcgcgcagtcgttgtccagcggcatcatggggctgtttggtggcggccagcaggacaccagcatgacgaccggcgcggcggctgtgaccgcgtcggccggtgccctatcgactgcgggcgcctcgctgctgaccggggccgctgctatccagacggccgctgcgtcgctggcagccgccaatggcgtccaagggctgggcgctgctgcgggtggtgcgggtgcggcaggagcggcggcgggcggcggcagttggtggtcctccatcgccggcgtgttcggtttcgccaccggtggtcacatcaagggaccaggaacaggtacaagcgacagtattccgattctggcatccaacgacgagtttatgacccgcgccgcagttgtacgacagcccggcgccctggcatttctcgaacagttcaaccgctacggcatggccgcgctggccggctgggcgaaccctgtccgtcacgcaaccggcggacagatcggcattcccgctcccaatctgccggctcccgtccgtggcggcgcgaacctgcccgagccctccaaaaacttcagcgcatcagtctccaacgcggtccacctccatgctgttcaagaccccgaccagatggcggccgacatgtgggccggcaagggcggcgaccattacatcgtctggctgaacaagaaccgccaggccgtcaagcaaatactcggaaactag

SEQ ID NO: 367171 - DNA, 495 bp, Pseudomonas aeruginosa
atggccaggaagaagcctgttaaccctcgcggccagccggccgactcggcgcccgacgacagcctgagcgtgctgttccctgaccgtcaactggcgatcgggggcgtcgaggtgacggtgcgcgagctgaccttcagcgagcaactgcgccataaccacctgttggccccgctggccgatgccctggcggcagttcccccggagcagctcgacggacctgagtcgatcaacgtcatcttcgacgctctggcccggcacgccgacgcgctgcgcgagttgctcgcgatcagttgcggccaatccgtggactgggtggacgcgctgccggcagacgacggcgaagcactggtgttgacctggtggacggtgaacagtggttttttcgtgcgaaggctctggcggcctcgcctactggcgatggcattgggcaaccgacgccctggagccgagtcttctccgatctcgtccgcgccggccactgccgcgaaaccctag

SEQ ID NO: 367172 - DNA, 771 bp, Pseudomonas aeruginosa
atggcacaggaaacgtatttctacgggcaaggcgagattgacgccgcgcctatcgtcaacggcgtcctcggcaaatggcgctggattcaggatgtctcggccatgagcatccagctcgcagtcgagaaggtcgagcacaaggaaagctacagcggccagaaagccctggtccgcagcttccccatcggcaagaccgccaccgtcagcatgaccttgcacagcatcgacccggataacctggcgctcaccctctatggcaaggtcgtgaccaaggcggccggctctgtgacgggtgaggcgctccccgccgacctggtggctggtgatgtaatccgcctggccaatccgggcgtcagcgagctggtcatcaccgacagcgcgagcacgccggcgcctctcgatccgcagtattacgccctgcgagccgatggcgcctacggtgaggtccaactgctgggtctgccgacgccggccccgacccagccgttcaaggcggcctatgagtacgcggcgactcgccaggtgggcatgttcaccgcgccgcagccgaccatcgccctgcgctacaagggcatcaacctggccgaaggcggcgcgccggtcatcgtcgagctgttcaaggtcgcgaccgatccgcttcaggagctggcattgatcagcgacggcaacaccgttgccggtatgcagatcagcggcggaatcctgctggacaccagcaagccggataccggcgacctgggccgcttcggtcgcattatccagctggggtaa

SEQ ID NO: 367173 - DNA, 180 bp, Pseudomonas aeruginosa
atggaaaccgtaaaagtcacgatcactgctgagaaccccaaccacacccacgcgggcaagccggtggcgcagggcgacgagatcgaagtcagccgcgccgatgccgcgttcctgctgcgccgtcaactgatcaccaagattcccgccgagcccaaggccgacgagaaacgcgacaagtaa

SEQ ID NO: 367174 - DNA, 474 bp, Pseudomonas aeruginosa
gtgagcgacccgttcgactacctgttcctggaaccgttgctgatcgagcgtatccgctcagaggttcctgggctggccatcgtttccggggtgcccgatctggcggccttgagtgagcaggaccagcccgcccccagcgtctatgtcgtctatctcggcgacgagataggcaccggggcggatcaccaagggggcaggcgcgccattcaggctatcggccagcagtgggcggttgtgctggtggtgcattacgccgactcgtcgaactccggcgaaggagcgcgccgagaggcaggaccgctgctgggacggctggtcaaggcactgaccggatgggctccagccatcgatgtggcgccgttggcgcgcagcgcccgacagtctcctgtcacctacgccagcggctacttctatttccccctggtgttcaccgccaggttcgtctacccgagggtcaagtcatggaaaccgtaa

SEQ ID NO: 367175 - DNA, 417 bp, Pseudomonas aeruginosa
gtgagctactgcacgctggccgacctgatcgagcagtacagcgagcagaaaatccgcgaggtgagtgaccgcgtcaataaaccggccacaaccatcgacacggtgatcgtggatcgcgccatcgccgacgccgactcagaaatcgacctgcatctgcacggccgataccagttgccgctcgccagcgtgccaacggcgctcaagcgcattgcctgtggcctggcctacgccaatctgcacatcgttctaaaggaagagaacccggtctacaaaacggccgagcatctgcgaaagctgctgtcgggcatcgccaacggcaagttgagtctggccctggatgctgacggcaagccggcgcccgtagccaacacggtgcagataagcgaaggccgtaacgactggggggccgactggtga

SEQ ID NO: 367176 - DNA, 168 bp, Pseudomonas aeruginosa; identical to SEQ ID NO: 350166

SEQ ID NO: 367177 - DNA, 342 bp, Pseudomonas aeruginosa; identical to SEQ ID NO: 355563

SEQ ID NO: 367178 - DNA, 915 bp, Pseudomonas aeruginosa
atggccatcattactccggcgctgattagcgcactgaaaacctcgttccagaagcatttccaggacgccctggcgacggcacccagcacctacctccaggttgccacggtgattccgtccaccaccgccagcaacacctatggctggctggggcagttccccaagctgcgcgagtggatcggtcagcgtgtcatcaaggacatggcggcccagggctaccagatcaccaacaagctcttcgaatcgaccgtgggcgtaaaacgtaccgacatcgaggacgacaacctcggcgtctacggaccgctcatgcaggaaatggggcgcgctgccggcgcgcatcccgacgagctggtcttcgccctgctcaaggccggcaacgccaatctctgctacgacggtcaaaacttcttcgacaccgatcacccggtctatccgaacgtggatggcaccggcacggcgaccaccgttagcaacctgttcgcgccggccgctgatccgggggcggcctggtatctgctcgacaccagccgcagcctcaagccgttgatctaccaggagcgcatgaagccgtcgttcacttcgatgaccaaggaagacgacgagcaggtcttcatggccgacgagtaccgctacggcgtgcgctcccgctgcaatgtcggattcggtttctggcaactggcagcgatgtccaccgaagagctgaacaaggcgaacttcgagaaagtttacgacgccatgcgcaaccagaaggccgacggcggccgtccgctggacattcgcccgaacctgctggtggtcccgaccactctgcgctccaaggccaaggaagtggtcggggtgcaacgtctggccaatggcgcggacaaccccaacttcgaactggtccaggtactcgataccgcctggctcaactga

SEQ ID NO: 367179 - DNA, 972 bp, Pseudomonas aeruginosa
atggacgtgccggcctggcggatcgatgccgccagcgccgccgccgtgatcgaccgggccagggcacgcaagacaccgcctgtcctggactatgagcaccagaccctcaagaaagaggaaaacggccagccggcgcctgctgccggccgcttcctcgatttcgaatggcgcgaaggctccggcctgtggggccgtgtcgaatacaccgcccgcgccgcacggatgatcgaggacggtgagtatctctacttctcgccggtcttcagctacgccccggacggcacggtcctgtcgattctgatgggcgccatcaccaacgaccccgccatcgatggcatggagccgctcgcccgccgagcggcggccacctttggcctttaccccacccaagaggaaacctccgtggatgaactcctgaaagccatcatcgaggcgctgtcgctcaaggaaggggcgaccgaggccgaagccatcgccgccctgaccgcgctcaagccggccttggacgcacaggcggccagcctggccacgctgcgcgaaaccctcgacctggccaaggacgctagcgtcgagcagatcgccgccgccaccagccaactgaagaaggccgacccgagccagaaacccgacccggccaagttcgtgccgttggaagctgtgacggacctccaggagcaaatcgccgctctgaccgcacgcctcaatggtggcgagctggacaagctggtcggcgctgcgctccaggacggtcgcctgctgccctccctggagcagtgggcacgcgacctgggcggtaaggacatcggccagctcaaagcgtacctggacaaggccgcgccgattgccgcgctgacccgcctgcaaggccgccagccggagggcgacacccacaacctcaccgacgccgagatggaggccgcccgtctgaccgggatcagccccgccgactacgccaaggcaaaaggagcctga

SEQ ID NO: 367180 - DNA, 252 bp, Pseudomonas aeruginosa
atgatgcaattgaagccgagaaataccgtgccaaggcctgacgcctccagccacaacccagacccgcgctacctgcgcgggctgctcaagaaagccggcatcagccagcggcgcgcagccgagctgctcggcctcagtgacagggtgatgcgctattacctgagcgaggacatcaaggagggctaccgccccgcgccgtataccgtccagttcgccctggagtgcctggcgaacgacccgccatctgcgtga

SEQ ID NO: 367181 - DNA, 303 bp, Pseudomonas aeruginosa
atgatgaccatcagtaagacagacattgactgttacctccagacctacgttgttatcgacccagtaagcaacgggtggcagtggggaatcgatgagaatggagtcggtggcgccctccatcatggccgagtagagatggttgaaggtgagaatggttacttcggtttgcgtggcgccactcacccgaccgagaaggaagccatggccgccgcgctcgggtatctgtggaagtgccgacaggacctggtggccatcgctcgcaatgatgcaattgaagccgagaaataccgtgccaaggcctga

SEQ ID NO: 367182 - DNA, 198 bp, Pseudomonas aeruginosa
atgaaaatcaccaacgacaccaccacctacgaagtggccgaactgatgggttcggaggctgacgaactcgatggacgtatcatgatggggctgctcagccgcgaatgcgtggtagacactgacgacctgagcgaggatcaatggctggctctgatcgacgagtcgcagaaagttcgccgcgaacaggaggcagaatga

SEQ ID NO: 367183 - DNA, 468 bp, Pseudomonas aeruginosa
gtgacaactaggatcgacgtcgagctggacgaccaggaggttcgccagcgcctggcgctgctgatgcgctcggtgaccgatacgctgccggtcatgcgtggcatcgctgccgagctgctcgcggaaactgagttcgcctttatggacgaggggccgggctggccgcagctcagccccgtgactgtcgccgctcgcgaggctaaggggcgtggtccacacccgatcctccaggtcacaaacgccctggctcgctcggtcacgacctgggcggatcgcaacgaggcgggaatcgggtccaacttggtctatgcggccatccaccaatttggtggcgacgccggccggggtcaccaggtcgaaattcctgcacggcggtatctgcctttcgacgaaaacggccaactggcggccggcgctcggcagtcaattctggagatcgtcctaacagccttgagccgaaatcggtag

SEQ ID NO: 367184 - DNA, 1287 bp, Pseudomonas aeruginosa
atggccgctccgaccgaagccgatctgcgggccatcttcgccctgcggccggccgccgctatcgagtatctggagcgcaagggcttcgcgatcacttggaactggcatgacgttgacgcggccacccacgcccgcgctctgaccgttgccagagcagcacgcctggacgtgctccaggacattcgcgacgccctggtcgagaacctggagcgcggcgagacgctacgagatttcaagcgcaacctgcggccgaccctggaggcgaagggctggtggggtcgccaggtggtagtcgcgccggatggcggcgccgaggtcgcacaactgggcagcccgcgccgcctggataccatctaccagaccaacatgcagtcggcctacatggcagggcgctacgcggccgcctacgaagccagggaaacccacccttactggatgtatgtggcggtgatggatggcgttacccggcccagccatgccgccctgcatgggaaagtgttcaggtgggacgatccgatctggcagcacatcaccccgcccaatggctacaactgccggtgccggatcgttgccttgacggaggccgctgtccgccgtcgcggcctgaccgtcgaatccagtcagggcaagaccggccaggtcaccgtcgaaaccggcgtggaccggcgcacaggggagattcgcgaacagaccctgaccaccctggagacgaccgaccgggccgggcggaagatccaatttcgccccgatgccgggttcgacggcagccccgtacagagtcacctgatggaccaggtgctgtacgacaaggccgagcgcaccctgggagccccagccgcaatcgacgaggtgcggggtgtgctgctggacccggtccgccagcgcgcctgggcggccttcgtagatcgcgccgcgtccccccaggggcagaccatgtccatcggcgtgctcgatccgaccgatatcacctacgccctagcccagggcgcccagttgcgggccggcgtggtcgccaccagcgataccgcaattcgcaacagtgctgtcgctcgcgagcagctcgccagcctgccgcagcgcttcgcccagcctgacctggtgctgtgggagcgcggcagcgagtcgttggtctacatcgtccaggccgatagcgcggccctggctatccgtctgcgcggcgagatatacgggcccggccaactggaaaatgtcggccaggttatggaaatcaccatggatagcatccaggatggcctggcgacgggccgctacaggagagtgcgctag

SEQ ID NO: 367185 - DNA, 1581 bp, Pseudomonas aeruginosa
atggcacaaatcgttgacgtctacggtaacccgatccgaacccagcagttgcgcgagccgcagacctcgcgcctggccggcctggcgaaggagttcgcccagcacccggccaaagggctgacgccggccaagctggctcgcatcctggtcgaggccgaacagggcaacctccaagcccaagccgaactgttcatggacatggaggaacgcgacgcccacctgttcgccgaaatgagcaagcgaaagcgcgcaatccttggcctggattgggcggtcgagcccccgcgtaacgcctcggcggccgagaaagccgatgccgactacctgcacgagctgttgctcgacctggaagggctggaggacttgctgctcgatgcgctggacggcatcggccacggctacagctgtatcgagctggagtgggcgttacaagggcgcgagtggatgccgctggcgttccaccaccgaccgcagagctggttccagctcaaccccgaagaccagaacgagctgcggctgcgcgacaacagcccggccggcgaagccttgcagcccttcggctggatcattcaccggccgcgtgcgcgctccggctatgtggcccgcagcggcctgttccgcgtgctggcctggccgtacctgttccgccactacgccacctccgacctggcggaaatgctggaaatctatggcctgccgatccggctggggaaatatccgccaggtactgccgacgaggaaaaggcaaccttgctgcgggccgttaccggcctgggtcacgctgccgctgggatcatccccgaaaccatggccatcgacttccagcaggcggcgcagggcagcagcgagccgttcctggcgatgatgcggcaaagcgaagacgccatatccaaggcggtcctgggcggtaccctgaccagcaccaccagccagtcaggcggcggcgcttttgccctgggccaggtacataacgaggttcggcacgacttgctggcatccgatgcccgccaattggcggcaacgttgtcccgcgatctgctctggccgctcctggtgctgaatcgccctggtagtcccgacgtgcgccgggcgccgcgcctagtcttcgacctgcgcgagcaagccgacatcaccagcatggcccagtcgattccggcgctggtcaacgtggggctggagattcccagcgcctgggtctatgacaagctcggcatcccgcagcctgccaagaatgagccagttctgcgttcggctgcgcagcctgcgatcctgagccgacagcatggacaacgggtggcggccttggccaccatcgttggcccacgctatggcgatcagcaggcgctggacaaggcgctggctgacctgccggcgaaggacatgcaaaaccaggccaacgacctgctcgccccgctcctggaagcggtcaaccgcggagacagcgaaaccgaactactcggcgccctcgccgaagcgttcccggacatggatgacagcgccctgacggacgcgctccaccggctgctgttcgccgccgatacctggggccgtctccacggcaacctggaccggatcgactga

SEQ ID NO: 367186 - DNA, 1653 bp, Pseudomonas aeruginosa
atgaagagtagcaccagggacttcctggcggacatcgcccagcttgcgggagagttccgtcgccagatcgaggccgaggtcgcaggtttcgaccccgactcgaaggccagcgccgcccggcgtgaacgggccagcgcggactatgagtatttcgcccggacctacttcccgcactacgtgaagcgcggtaacgcgctgctccacgactacctctacaagcggttgcccgagctggtggaccacccggacggccagcacgaagccattgcggcgccgcgtggtaatgccaagtccaccctggtgagccagatattcgtgatctggtgcgtactcaccggccgcaagcattaccccctgatcatcatggatgccttcgaacaggccgccacgatgttggaggcgatcaaggcggagctggagttcaacccgcgcctggccatggacttcccccagggcgccggcaagggccgcgtctggcaggtcggcaccatcgttacggcgaacgatgccaaggtccaggtcttcggctccggcaagcggatgcgcggccttcgacacggcccgcaccgtcctgacctggtgatcggcgacgacctggagaacgacgagaacgtccgcagcccggagcagcgcgacaagctggaaaactggctgaagaaaaccgttctgtccctcggctcggccgacgacaccatggacgtgatcatcatcgggaccatccttcactacgactcggtcctgtcgcgcctgctgaaaaacccgctgtggaagcggcgcaagttcaaggcgatcatcgaatggccgcaccgcatggacctgtgggagaagtgggaggaacttctgctcaactccgacgacgagggcgccgccgcactggccttctaccaggaacgcgtcgccgccatggaggacggcgcgatcatctgctggccggatgggcagcccctctacaaactcatggtgaaacgtgcccgcgatgggcactcggcgttcgactcggaacagcagaacgaccctgtccagggcgaaaacgcccccttcgccgcctgcatcacgttctgggtcaaccgcctggcgcagtggatgttctacggcgcgtgcgacccgtccctgggtaagcaaggctccagtcgcgaccccagcgccatcctggtgggtgggttcaatcgggaaacaggcgtcctggacgtggtcgaggctgccatccgcaagcgcctgccggacaagatcatcgaggacatcatcaccatgcagcgggcctatcactgcctggtgtggggcgttgaggcggtccagttccaggagtttctgcgcaccgagctggtgaagcgctcggccaaggctggctgcccagtacctgcccgagcgatcacgccacacgccgacaagctactgcgcatcgaaagcctccagccgcacatggccaacggcctaatccgtctgcatccaagccagaccgtcctggaacaacagctgcggcacttcccggccgcagaccacgacgatggccccgacgccctgcacatgctctggatgctagccaccacggggttcgcgccgatagaggcgaccttggtcaaacgccggcatgaatacgcgcccggccttgacgattcttttgacactggcggccgcttcggcggcgcatggtag

SEQ ID NO: 367187 - DNA, 252 bp, Pseudomonas aeruginosa; identical to SEQ ID NO: 339263

SEQ ID NO: 367188 - DNA, 252 bp, Pseudomonas aeruginosa
atgtcgatgagcccggagaacctggccgttctggcggatatgacggtacgtctgctggagctgcggcagaacgaatgcaagaacctggttgtcgaggacagcgcgccgatactgttcggaaagctggtcggcagttatctggatgctctggcgaaagaagtgcccaccacggcaaaggtggtgagcgtcacgaacagggttgaccttaagagtcttctgggtcgggcagtattcccagaagccggttcttga

SEQ ID NO: 367189 - DNA, 189 bp, Pseudomonas aeruginosa; identical to SEQ ID NO: 328998

SEQ ID NO: 367190 - DNA, 255 bp, Pseudomonas aeruginosa
atgccctggccgaaaccgctgctgatcgcgctgcctgccgctttcctgctggcgtcatgcagcagctcgaaaccgcccgtcaacgtgccgcccaggccactaccggcggccttggctcaaccgtgcccgaccccagtggcggtgactgatgacagccccgatgccgccgcaattgccctcaaacaactctacgaccaatacggcgtttgcgccggcctgcactgggacaccgtgcggcaccttcaaaaggactga

SEQ ID NO: 367191 - DNA, 243 bp, Pseudomonas aeruginosa
atgcagcgccccagcggaatcagcctcagcgatctgttcgcgatctgccgtgaagacccggccaaccgatggctctggatacgcctctatctccgcgacctgctggcccgcgtcgtgattctggccttcatggcaattggtgccgcaggcctcgcctatgggctgggcggggcgttcgcctacggcttcatgcagaccgttgcctcctaccaggtccagctcagcgtcgagaaatcgccatga

SEQ ID NO: 367192 - DNA, 417 bp, Pseudomonas aeruginosa
atggcccttcaacctcgcggcatccgcaacaacaaccccggcaacatcgtttggtcggcacgcaacaactggcagggtcaactcccccacgacccgcagatcgaaccgcgcttctgtcgtttcgacacggcgcataacggcatccgtgccttggcaaagctgttgctgaactaccgcaaggtctatggcctgcgcaccgtcgaatcgctgatcgcacgctgggcgccgtccaacgaaaacaacacccgcgcgtatgcctcggccgtggcccgagcgatgggagttccgccgcaggccagcctgcacctggaccaggccaccctggtcgctctggtgaccgccatcattcaccaggaaaacgggcagcagccctacagcgccgagcagatcgcccaggccgtgcgggaggtgctgtga

SEQ ID NO: 367193 - DNA, 471 bp, Pseudomonas aeruginosa
atgcgcacctatccgcaattcgggcagcgctcgcaacggaagcaccaaatgcctgatcccgcatccacctcggccggcagcgccgcgctgctgaaaatgttcggcatccacataagcgcgggcgccctggctgccgccctgggcttcctggtcctgtggccccgaaccatgaaagaggggttcgcccggctgttctgcaccatcgtcgcgtccagcgtcttcggcccgatcctggtcgtttacctgcactccaaccgccccgagctgttcgagtccgcccaggtggtggccgggctctaccagctggagccagcggtcggcctgctgttcgtttccgctccgctcctggtgattgccggtctgcctgcctggtggctgatcggtgcagccctgcgcctgtttgagcgggacggcgattcatggctgggcgcgttcgcccagtggataaaacgcaaactggagaacaactga

SEQ ID NO: 367194 - DNA, 450 bp, Pseudomonas aeruginosa
atgagtaggtctgaggtggatcttctggaggtccaggacatgctgccggataccgtccgcgacatggccggacgcataggactgccggccaccctggtggtggtcgagcagctcggcggcacgtcctggcggatagccgagggccgggcgcggaggggcgaagcgcgccgggctgcgctggccgaactggtgggcagcgacatcgaggagcagctccacacgcactatcggggcgaagaaatttacgtggcccgctgccacaaggcgctggtacggtggcgcgacctggagatcgtcgagcgcttcgaacagggcttgcgtgatgggcaaaccgcccgtagcctgctcagcgatcttgcccgccagtacaacctgtccgaccgctggatatgggagattgtcaaccggccgagcgagccggcaccgcagcaatccaccctgttccactaa

SEQ ID NO: 367195 - DNA, 402 bp, Pseudomonas aeruginosa
atgagcctacgcgccgtcaacctcgcaaaaatccacatcgccaaggcccagctgggcatggacgatgacacctatcgcgcattgctggctcgcgtcgcgggcgtgcgctcggccaaggacttagggccgcgccagatcgaccacgtactggtcgaactccagcgcctgggctggaaaccgaagagcaaccggcagggccgggcgacgccaaaagtgccgcaaaaccggcaaaccgtgctgcgcaaaatcaccgcgctcctggccagcgcccatcgcccctggagctacgccgaccacatggcccggcgcatgttccaggtcgagcgggtcgagtggctggacgacagccagctttaccggctgatgcaggcacttatcatcaacaggagccgccatgagtag

SEQ ID NO: 367196 - DNA, 297 bp, Pseudomonas aeruginosa
atgacgaacgaaaccaagacagaccgccagcggcgcctggcgcgggaacgccaacgggcgaagcgcgagcgcgatgccctgcgtcgcgctgcgctgggcggccgccgcttcaacatggacatgtaccagggaacggctgatgcactcgatctgatctgcgcggccggtggcttcgccgagccggccgaggcggtcaccttgctcctacacaacgttgccgaaattgcagagcgtgacgcgtcacgttttgccgagttgatccaaaagagaagccatccagggaggaccaagcgatga

SEQ ID NO: 367197 - DNA, 270 bp, Pseudomonas aeruginosa
atggccgtatacaccatcaccctcagcgacaccgaaggcggaatagatttctccatgcaaggcccgccgctgcacgactccgaagcatcgaagatcgcctatgcccttatgcaagcgacgatgtccctcggccaggaactcgcaaagcagaacggagctggtaacggcgtttcctgcgcctgcgacgagtgcctggcgcgccgcgctcgcggcgaagaaccgcagcaggaaatccactacaccaaggccaagaaccgcaccgtccattga

SEQ ID NO: 367198 - DNA, 282 bp, Pseudomonas aeruginosa
atgaccaagacgttcgccatgtgccgcatcgacggcctgatcgagctgcgggaggaacacccaggcgagggctacttcgcccttgccgtgggcgacttggccagcgtgcgggcggcggtctttgcaaccgctgagccgcaccaggtcggcaagaaagtcgcccggcgcgtaccgggtgtgagccccgacgccaccgaccgcgagaacctgggttccatcgcccgctacatccagaccctgggccagcaggatcggcctggcttccgtgcgctgggggtgtga

SEQ ID NO: 367199 - DNA, 309 bp, Pseudomonas aeruginosa
atggcccgcaaccgcgcgcaacagctgtgcatcgtcaccttggactatcagcgtttcctgttaccccaggctgatgcactcaagctgatagacatcatgagtcgagccgcagaggttcaggccgactacgcctctggagctgggttcaagtacaccgtcggcgaagcgccggaagtcgagttgacggtagtgcgccccagtcaattggtcatgccgcaggccgagccggccccagctacaccacgcgctcgccggaagtctccggcccaggtcacgcacgatgccattcggctgctggaggggctctga

SEQ ID NO: 367200 - DNA, 618 bp, Pseudomonas aeruginosa; identical to SEQ ID NO: 361708

SEQ ID NO: 367201 - DNA, 312 bp, Pseudomonas aeruginosa
atgagaaccgcattgcccttgaaagtcttgacgcctgacttggccctgagcctgcgcaccttcaacgatgccgcccggttgctccagcgcatgggggttcgcctgcatcgcctggagccgacagaggggcgcgtgaccattgccgcagatgacgcccgccagctcctggagaaaggctacctgatgggtttccagcgtgacgcctcggccggcagcacccgttatatcacccgcttccagggcatcaccctggcctggagcgaaccgatcagctaccgcgacttcgccggcagcaaacccgtaattcactga

SEQ ID NO: 367202 - DNA, 414 bp, Pseudomonas aeruginosa
atggaacgcgcaatcgatctgtcggcctggggcgagcgtccgcctgtcttcgtccagctgctcgccgctgaggtggcccgcagcagccagacgaaagccggcgaggcaatcggcatgagccgttcgaccgtcagcaccatcctcgccaaccgctacccgtcgccctcgacgatccgcgtcgagcgccgcgtcctggccgcgctgagccgtattgagtgcccggccttgggcgaggcggtgacctcggtcgagtgcagcgagtacctccagcggccggcgccgctgaacaaccccgtcgcgatgcgctgctggaaagcgtgccgcgcctgtccacgcaacccgcataccgcccccatgaaacgagaggaacaaggccatgagaaccgcattgcccttgaaagtcttgacgcctga

SEQ ID NO: 367203 - DNA, 636 bp, Pseudomonas aeruginosa
atgcaaatgcatgcacagcaaggcggtagcgccgcgaaggctagcacaagccactttcgcggcactacgaacattgaggagtacatccgcgacatggcgagccgtgggttcagtcgtcgggccgtgagtaaggccctgggtatgcagtcgcggaagtttaaggaactcctggaactcctgccagaaatggactgggtgcctccttgtcagtcgtgggaccgcctgcgcgctgaccaggagaagaagggacgcaagtgtccgatgacagaggggcgtctgcgctcgattgtcgcggcgaggcgcgccgcgatggcaaaacacacccgctacaccgcgtttggtgtaacagccaccttgccggagctggtgagccagttcggccaggtcaccgccgccaccgtgcgcatgcggttggccaagggaatgcctctggagcaggcccttgcctccgtgcgcagcgatccttgtggaaggaaggtcgctgatagccatccctggaaacaggaggcgcaccagggggctatcaatcaccttgagcgtcaaaccgctgcaatgcaggaacgcgttcagggggagcgcctggaccgggcggcctcactgctgagccaggaggtgccgccatgcgccgaacactga

SEQ ID NO: 367204 - DNA, 666 bp, Pseudomonas aeruginosa
atgagcctcggcaaaaacccggctcacctgtccatggtcgggggcaagagcccccgccagcagatgtgggaagtcatccgggccaaccgcgaagagttcaccgtctaccgcgtggcgcgccgctccaaccagcacgacaagactgtcgagaagtatgtcgcctgcctgcgcctgggcggctacgtcgaggcgatccgcggattcaagcgcggcgaagaggtcgtgtttcagctgatccgcgacaacggcgtcgaggcaccgaacctgaacgccgatggcaagccatcccagcagggatacaccaccgaggcggtctggcggacgttgcgaatcctcggtccagcgaccccggagcagatcgccgcatcggtggcggcctcgggcacgaccgtctcgcccagcaccgttcagcgctacttcatcgacctccaaaacgccggatacctgacccgcaacggccgccattacgccctcaagccaggccgctacaccggccctcggccgcccatcgtccagcgcgagacgcgccgccaggtctacgacccgaaccttgaccaggtcatgtggagttcgcacggcgagtaccagcacaaccggagtcgttcgcggggcgctgcccaggctggcgtggcggataccgaagaaaacaacgaatcaggcggctga

SEQ ID NO: 367205 - DNA, 753 bp, Pseudomonas aeruginosa
atgaccaccccgaaaaccacccaactggccaatggcatggccgacatcgccaacatcgccctttgcgatatcgccctggagaaagcgctgtcgcgtacctccacgttgcccggcctggtctgcttctacggcccgtccggcttcggcaaatccgtttcggccgcctgggtcgccaatcgccgccgcgcctactacgtccaggccaaaagcgtctggacccgcaagcacacgctgaagtcgatcctgggcgaaatgggcatcaagccggccggcacgatcccggaaatggccgaccagatagccgaggaactggccgccagcggccgcccgctgatcatcgacgaaatggaccacctggtcgcctctggccaggtcgagctgattcgcgacctgtacgagtccagccaagcctccatcttgctgatcggcgaggaaatgctgccgaccaagctgaagaagttcgaacgcttccatggccgcgtgctgagctgggttccggcccagccagtgtccctggaggacgcccgcaacctggcgccggtctacagccccggagtggctatcgctgacgatctgctcgcgcacctggtgaagaagtccctgggctctgtccgtcgcgtcgcggtgaacctggagcagttggccgaggccgccaccgttcagggccggcgcgagctggaactggccgacctccagcgcctgaacctggagctgtacaccggtgcggccccgagcccgaggacttcgaaatga

SEQ ID NO: 367206 - DNA, 2070 bp, Pseudomonas aeruginosa
atgagtgagtggttcagccctcaacaacttgcgggtatgcctggcctcggttcaacagtacgagctgttcagttgcgcgccaagcgtgaaggctggaccagccagcgtagagtcggcactaaagcgatggagtaccacgtttcggccctgccgaaagaaacccgcgccgcactgctgaacgccgccctgggcgaggtggccaccaaggtggtccgccaggagacgcagttggccctggtcgaaaccaaccgccagcagctggtcgccgatgctcggcagggggtgctgcacgccctggacctgatgatggcccgcaccggctacagccggaaacgctccatcaccctgatgctggacatggcgcgcctcggccaggtcgagccgcagctgctcgcgatgctcaagatggcccgcgatcctcgcggccgcccgagcgcggatggcctgccgagcgtgcgcagcctggagcgcttcctggaccaggccgagcgtggcgccctggtgccgaaggtccgccgcccggacatgagcgttcccgactgggcgccggccttcatgacgatctaccaggggccggagaagcgcagcgcccgcgctgcccatgcactgctggagaagcactggcaggggcaaatgcccagcctggaccaggtctatgcgttcctgcgcaaggtgggcaacgtcagccgcgaggtcgggcgcatgggtgagcatgaaatcaaggcgctgcgcccgttcattcgccgcgacttcaccaagctgctgccgaccgacgtctattcctgcgacggccacacgttcgacgccgaggtccagcacccgatgcacggccggcccttccggccggaaatcaccaccatcatcgacatccgtacccgtcgaattccgggctggtccaccggcctggccgagtcggccctggtggtggtcgatgccttgcgcgacgcctgcaccaagggcggcatcccggccatcttctacgttgacaacggctcgggctacgtcaaccacatgatgcgcgacgaggcggtcggccttatgggccgcctgggcatcgatatgaagaacagcctgccatacaacagccaggcgcggggcgtgatcgagcgcgtccaccagagcctgtggattcgcgccgccaaggaactgcccggctacatcggcgccgacatggaccgccaggccaagctggccgccttcaagctgacgcgccgggccatcgccaagggcggcaccatgccgctgatgtcttgggaatcttttgtcgcgttctgcgaacagcagattgccgagtacaacgaccggccgcacagcagcttgccgcgcatcgttgacccgaacaccggccgccgccgccacatgacccccaacgaggcctgggcgctgcacgaagcggagggtttcagcccgatgcgcgtcaccgacgacgaggcccggccgctgttccggccccaggtgctgcgcaccgtccgccgctgcgaactggagttcatcggcaaccgctacttcgcccgcgagctggaggaattccacggcgaccaggtggccgtgggctacgacatccacgacgccagcaaggtgtgggtctacgacggcgaggggcgcttcctctgcaccgcagagctgaacggcaacagccgcgactacatgccagcttcgtatgtcgagcgtgcccgcgagaaacgcgcagaggcccgcgagaagcgcgccctggctcacctcgacgagattcgcgccgagcgtgacggcgggtatgccctggaaatggatgcgccgctgtccatccccggcctcggcacaatcacccccgagcaactccggtcgcgcagcgccgcgacccttgaagtgcaggccgagcggatcgacgaaccgcgcccggccgcagccaccacccaagccaccactgcccaggtcttcaccctgccgaccgctcccgcccagcgctaccggcagtggtgcgagctggccgagcggcagcgctccggccaacccatcgagccggacgccgcccagtggttcgaggtttaccccaaatccaaagaattcgccgcccagcagcggcaagcatga

SEQ ID NO: 367207 - DNA, 435 bp, Pseudomonas aeruginosa
atggcccgccgcaaagacgatcgaacgctggacatcttcgatgttccgcagccggccctcgctatacctggtgagtgcaactacgccgctcaagtcagcgaactggtcagcgaaattctgaaggcttgcgaccttgaccgttacgaggtcgccgcccggatgtcgcgcctgtccggcgatgacgtgagcaagaacatgctcgacgcctggtcgagtcccgcccgaactgatcacaacttgcctttctaccgcgccgcccttctggaggacgtctgcgcgagccatctgctgaccaactggctggtcgatgtacgtggcggccgcgtggcttacggccgcgatgcactgctcgccgaactgggccgccttgagcggacccgcgaggaagcgagccggcaggcacgtgaactcaagcgacttatgggaggtatctga

SEQ ID NO: 367208 - DNA, 357 bp, Pseudomonas aeruginosa
atgaacagaaccgaaatcccccgcgacaacaacgtccgctgggagtggatcaaataccagctccgtgccagggggtcgtccctggctgaggtggcccgctccctcgacgtctccagcccggcagtcaaaaacgccaagctgactccctaccctcgggtagagcgcgccatcgctgctgtactcgacctcagcccgctagtgctgtggccagagcgctggctagacgacgagaatccgaagcggcaacggccgaatcgctcggagaccttgcaggcatatgtcagacatatgccaggtgctgaggaaaataccagatacgctgaccaagcgcagcgtaaagccggcgcgggggcttga

SEQ ID NO: 367209 - DNA, 456 bp, Pseudomonas aeruginosa
atgcacagcgctgccccggatgaagccgcagaggatgacacctacgcctacgtacccctctacgacgcgcgggtgagtgctggccacggttcctggatggagggcgcgcggaccttggccaagctggcgttcactcgctacagcttgcggaagcaaggtctggagatagcgaatatgtcagccgttcgcatcggcggtgactcaatggagccgctgttgagcgatggtgatacggtgatgattgaccacagctgcggcgaggtccgcgacgaggctatctacgtcattcggttggatgaccacctatacgccaagcgaatccagcggcaaatcaatggcggtctagcgatcattagcgctaattcggcctaccagacgatgtacgtgtccaagcaagacctagaggcaatcgacatcattggtcgcgtggtatgggcaggccgctggatgacttag

SEQ ID NO: 367210 - DNA, 720 bp, Pseudomonas aeruginosa
atgacggacgccaaggctttcaggcgctacatattcgagctgtacttcgatccggcacggctcctcgaactggacgacgaccagcacctgcaacggatagagcgcttcctcgatgccctcgcgcccctccatccggtgctggagaactggtacctgtgcggcgactccctgcgcgatgccctcagccacaacgtcaccgagcaccgccaggatctcgccaaggccctgtcgcgtgaccgacgcacccgggcggtggaactggtgctatggaacggcgaggaggatccgctcaagggcgggttgtcgctggactacgaggccagcggcagggccgtctcgtccaggctccagttggaagatgccggcagcctgctgcaggtgttcgacgcaccggcgtcctccttcgtcgcgatcttcctcgcggcgctggaaatctggcccgaaacgacctggggcatgctcgctccgcatgcgtacttcgtacaccagcggaccttcccggaccgccgcagcatcggctggatcggcttctgcccgcatccgctaagggccacggacttcccggcggctacggagctggtcgacattcccggccgtggcaccctgctgctgaacggccgcgaaccgatggacgaaacccgtcgcgaacatttcgagcgcgtcggcgaagcggacatcaagctgatggaactgggctacctgccgccgctgcgcggctga

SEQ ID NO: 367211 - DNA, 786 bp, Pseudomonas aeruginosa
atgagcggcataggcgcgcttttccgaccgctgccccgcatgggtccgcggctgcccttcgaactacccgcgccgccccggccgcacttgccgatgccggcgccgcgcccgctgccgcgaccggcccccggcgcgctgcccaggccggtaccgcgtccgatgccggttccgcagaccctgcccaggaccgagaccggcacgctgagccgcgaccggacccgggaagccgagcgcgattgcagcaagagccagggccgcgacaaggactgcgtggagtgcccgccgtcccggggcgaaatggccatcgccaataacggcaagggccacagcatgtcggacctgtccgcgcgctaccagcagtgggtgaccaatttcccgtttccccacgaatggttctggagcggcacctggtgggacggcttcgacgagccgcgctgcaccctgctggaggcgaaggccaactacgccttcctgttcgtcccgctgctcggcgtgcccaggccctgggcgcgggccaaggtgaagtcggacctgctgcagaaggccgaggtccacagcgacaaggcccgaccgaccccgccggtgttcgtcgaatggcacttcctgcagcggatcgtctacgagtactgcgccgcggagtacctgcgcatgggactggccaacctgaaggcattctggaatccgatgccgggaacggacgagcacgacgactaccaggaaacccgcgcgaaggaacaggaagagatgaaaaggttttgcgaagagaacccggggtattgcgcatga

SEQ ID NO: 367212 - DNA, 384 bp, Pseudomonas aeruginosa; identical to SEQ ID NO: 322668

SEQ ID NO: 367213 - DNA, 528 bp, Pseudomonas aeruginosa
gtgagccggctccagccggcgctcgcggcgcctacgccggacagccgcctgttcgccctggcggacggcgcccgctacctgaccctggacacccgcctggaaaaggccgcgggggaaatccgctcgcgctggctgctggccgggagcgagctggacgaaatcgcccatgccgggccggtcctgatcgaattcatggacagcgccccgctttcgtcatcgggcgagttcctcggctggctgcgcgactgggaccgccgctcgcccatggcctcctggctgtggagccgggcgtccttcgaaaacctcgcgaaacacttcgccgggctgctcttcacccgcatgcccgacggccgccgggcgctgttgcgctactacagcccggaagtgcgccgggcgctggaacaggtcatgaccgcgcggcaatggacgcaagtgatggcgccgctggaacgttggcaggtctggcagcccctgcagggcggctacctcgtctatgaccgggaaacggagcggaccgccgatgcttga

SEQ ID NO: 367214 - DNA, 396 bp, Pseudomonas aeruginosa
atgagcggcaaacccgctgcgcgcctgggcgatccgaccgcgtgtccgctaccgggccacggcagcaacccaatcgtcggcggctcgcccgacgtcttcttcgaccatcggtccgccgcccgccagggcgacgccaccgcctgcggcgccaccctcagcgccaacgtcatcgccaacgtactgatcaatggcaagcccgccaccgtggtaggtagcgtcggcacccacggcaacctggtggtcggcggggcgggcacggtgctgatcggcaacagcggcggcggcgcacccgctctcgccctcgccccaccgaagctgtgcctgcaatgcctgctgctggcggcacgccgcaaccaggccctggtgcccctggaaagcctcggcggcgcaccgtga

SEQ ID NO: 367215 - DNA, 1584 bp, Pseudomonas aeruginosa
atgaccactcaggccgccgaagtcgcgaagcgccgtaccttcgcgatcatttcccaccccgacgccggtaagaccaccatcaccgagaagctcctgctgatgggcaaggcgatcgccgtcgccggtaccgtgaagtcgcgcaagtccgaccgccacgccacgtccgactggatggagatggaaaagcagcgcggcatctccatcaccacctcggtgatgcagttcccctaccgcgagcacatgatcaacctgctcgacacccccggccacgaagacttctccgaagacacctaccgcaccctgaccgcggtggactcggcgctgatggtgctcgacggcggcaagggcgtcgaaccgcggaccatcgccctgatggaagtctgccggctgcgcgacacgcccatcgtcagcttcatcaacaagctcgaccgcgacatccgcgaccccatcgagctgctcgacgagatcgaggcggtgctgaagatcaaggccgcgccgatcacctggccgatcggctgctacaaggacttcaagggcgtctaccacctggccgacgacaggatcatcgtctacgtcccgggccacggccacgagcgcatcgagaccaaggtcatcgaaaagctcgactccgacgaagcccgcgcccacctcggcgatctctacgacaatttcgtcgaggagctggagctggtgcagggcgcctgccacgaattcgacaaggacgccttcctcaagggcgagatgaccccggtgttcttcggcaccgcgctgggcaacttcggcgtcgaccaggtcctcgactgcatcgtcgactgggcgccgcagccgctgtcgcgcgccacccacgaacgcagcgtggagccgaccgaggagaagttctccggcttcgtgttcaagatccaggcgaacatggatcccaagcaccgcgaccgcatcgccttcatgcgcatctgctcgggcaagtacgagaaaggcatgaagatgcgccacgtgcgcctgggcaaggacgtgaagatcgccgacgcgctgaccttcttctcctccgagcgcgagcaactggaagaggcctatgccggcgacatcatcggcctgcacaaccacggcaccatccagatcggcgacaccttcagcgaaggcgagaacttcggtttcaccggcatcccgcacttcgccccggaactgttccgccgcgtgcgcctgaaagacccgctgaagtccaagcagttgcgccagggcctgcaggaactggccgaggaaggtgcgacccaggtgttcttccccgagcgcaacaacgacatcatcctcggtgcggtgggcgtgctgcagttcgacgtggtcgccagccgcctgaaggaggaatacaaggtcgagtgcgcctacgaggcgatcaacgtctggtcggcacgctggatcgagtgcgatgacgagaagaagctcaaggagttcaaggacaaggccttcgagaacctctccgtggacggcggcgggcacctcacctacctggcgccgacccgcgtcaacctcagcctgatggaagaacgctggccggacatccgcttccgcgcgacgcgcgagcatcactga

SEQ ID NO: 367216 - DNA, 462 bp, Pseudomonas aeruginosa
atgaacggagtatccagactgctctccctggcgttgctgggcgcggcgctgcactgggcgccggcgcaggccgaggagcagccgcggctgttcgaactgctcggccagcccggctacaaggccacctggcatgccatgttcaagggcgagagcgacgtgccgaaatgggtttccgacgccagcggcccgagttccccgtccaccagcctgagcctggagggccagccctacgtcctggccaacagttgcaaacctcacgattgcggcaacaaccgcctgctggtggcgttccgcggcgacaagagtgccgcctacgggctgcaggtgagcctgccggacgagcccgccgaagtcatgcagacgccgagcaagtacgccacctatcgctggtacggcgaaccctccaggcaggtccgcgagctgctgatgaaacagttggagagcgatccgaactggaagtga

SEQ ID NO: 367217 - DNA, 2355 bp, Pseudomonas aeruginosa
atgtccccgtcacgcgccctgtcgccgctcagccgcgccctgctcctcgcctgcctcggcggtcccgtcctggtttccgccggcagcgcctgcgccgccgagatccgcaccgatgcccgccagtactaccgcctgcctgccgagccgctggagcaggcgttgaaccacctaggccgccaggccggcgtgctgatcgccttcagcccggaacagaccgccgcgcgacgcagccaggcgctggacggcgagtacaccctggaggaagccctggccgccctgctcgccggctccggcctggaggcgcgcgcccgcggcgagggcgcctacaccctggaagcgctgccggtggaagacccggccaacctgcaggcgctcaccgtggtcggcgactggctggccgacgccagcgccgccgacgtcttcgagcatcccggtgcgcgcgacgtggtccgccgcgagcagttccaggcccaaggcgcggccagcacccgcgaagtgctggagcgcattcccggggtcagcgcgccgctcaacaacggcaccggcagccacgacctggcattgaacttcggcattcgcggcctcaacccgcgcctggcgtcgcgctcgacggtgctgatggacggcatcccggtgcccttcgccccctacggccagccacagttgtcgctggcgccggtgtccatcggcaacatggacgcggtggacgtggtccgcggcggcggcgcggtgcgctacgggccgcagaacgtcggcggcatcgtcaacttcgtgacccgggcgatccccgaggacttcgccaccaagctcgacgtgcacagcgaactcagccccagctccagccaggacggcctgaagaccacccacaacgtgctgatcggcggcaccggcgccaacggcctcggcggcgccctgctctactccggcacccgcggcggcgattggcgcgagcacagcgatacgcggatcgacgacctgatcctcaagggccgcttccagcccagcgacgaacacacgttttcggcgatgacccagtactacgacggcgaggccgacatgcccggcggcctcggcaccgcggcctaccgcgacgacccgtaccagtcgacccgtccctacgacaagttctggggccgccgtaccctggccagcgccagctacgaatacacccccaacgccagccagaagctcaacgtcaccggcttcttcaccaagaccctgcgcagcggctacctcgaccagggccgcaacctcaccctgtcgccgcgcgaatactgggtgcgaggcctggaaacccgcttcagccagggcttcgagctgggcgaaagtcgccacgaagtgggcatcggccaccgctacgtcaacgaagccagccacgagctgcgctactggacccgcgccgacagcggccagctacccagcaccggcagccgcaacgaccgcgacacccgcggcagcaccgaagccaacgcgttctacatcgacgatcgcatcgacatcggcaactggaccatcacccccggcatccgctacgagaagatcgattccgaacagaagaacctgctgaagaacagcaaggacagcggccgctacaacgcctcgctaccggcgctcaacgtgatctaccacctcacgccgagctggaacctctacgccaacaccgagggctcgttcggcaccgtgcagtacagccagatgggcaaggcggtgcgcagcggcgacatcgagccggagaaagcccgcacctgggaactcggcagccgctacgacgacggcatcctgcgcgccgaactgggcgccttcctgatcaacttcgacaaccagtacgagagcaaccagcagaccgacagcgtgaccgcccgcggcaagacccggcacaagggcatcgaggcggcgatcgcctacgacctggccgatctcgacccgctgctctccggcttcgacgtctatgccagctacgcctacgtcgacgcgagcattcgcgaggacgggccgaacaagggcaaccaggtgccgttctcctcgaagcacaagggcacccttggcgccaactatcgcaccggcgcctggagctacaacctcgacggcagcttccagaccagccagtacgccgacaacgccaacaccgagagcgaaagcgccgacggcagcaccgggcggatcgccggctggatggtctggagcgcgcgcggcacctacgacttcggcccgcaactgaacgacctcaagctcggcctgggggtgaagaacctgttcgatcgccgctactacacccgctcgttcgacgacaacaacaagggcctctacgtcggccagccgcgcaccctgtacgtacaggcctcggtcggtttctga

SEQ ID NO: 367218 - DNA, 954 bp, Pseudomonas aeruginosa
atgagcctgcccgccgcacccaaggtgccgccgcaggtggctgaacaggccgtgcgctggctggtcgagctgcagggcggcgccgacgacgaacgcctgcgccaggcctggcagcgctggcgccaggcggccccggaacacgagcaggcctggcgccacatcgaggcggtcaaccagcgcctggccgggataggcacgccactggccctggccgccatcaacgcaccgcattcgccgcaacgccggcgcgcgctgaagaccctgctgctggtcctggccgccggcggcagcgcctggggcctgcgcgagagcggcagactgcagcgctggagcgccgactatgccaccggcgtcggcgaacgccggcgcctggccctggccgacggcagtcgcctcgagctgaacagcgacacggcggtggatgtccgcttcgatgccggcgaacggcgcctgctcctgctgcgcggggaaatccagctcagcaccggccacgacccgcgcccgctgcacgtgtacagcgcggaaggccggctgcgaccggtgggcacccggttcgacgtgcgccagttcgccggacgcacccgcgtcgccgtccacgaaggcgcggtacaggtggagaaccgcgccggccagggcctgctgttgcccagcggccggcaactggacttcgaccgcgagcgactcggcgctccgcagccgctgccggtcggcagcggcgcctggaccgacggcatgctggtggccgccggcatgcgcctggacgaattcctcgccgaagtcgcgcgctaccgccccggccggctgggctgcgacccgcgcatcggcggcctgcggatttccggcagctatccgctggacgatagcgagcggatcctcgccaccctgccggcggtgctacccgtggaggtacggcgcgtcacccgctactgggtcggcgtgcacccgcgcgaatga

SEQ ID NO: 367219 - DNA, 510 bp, Pseudomonas aeruginosa
gtgtcgagcgccgacctcgcccatgcggccgcgttgcataccctctacagcgaccaccaccactggctcacgggctggctgcggcgccgcctcggctgcccgcagaacgccgccgacctggcccaggacaccttcgtcaaggtcctggtttcgcgccaggccgcgcgcatcgacgaaccgcgcgccttcctcaccaccatcgcccgccgcgtgctgtgcaaccactaccgccgccaggacgtcgagcgcgcctacctggaagccctggccagcctgcccgagcgggaagtccccagcgaagagacccgcgccatcgtcctggagaccctggtcgagctggaccgtctgctcgacggtctgccgccgctggccaaggagaccttcctgctggcccaactcgacggcctgggctacgccgagatcgccacgcagctgggcatctccctgagcagcgtcaagcgctacatgctcaaggctgcgcaacgctgctacttcgccgagctgccatga

SEQ ID NO: 367220 - DNA, 891 bp, Pseudomonas aeruginosa
atggccggcatgcaccaacccagtgattttcaggtattccgcaccctcgaccggacctccaatgcgcgcctgctgcgcagcagcacgctcagcgacggcctggcgctcgcccattggtaccgcgacgaagcggagatcctcggctacagcgaccccggccatcacaccctgtcgctctacctgcagggcggctggcagaccttccgccgcgatcgtcccgggctctatggcggccccgaccgcttctgcgtgatgccggccgaacaccactccgactgggcggtgacacgcggcctgggcttcatgcacctgtacatcagcccggaacgcctggccggcgcggcggtacgcaccctcgattgcgaaccacgcagcctgcaactggaggagcgcacctacatccaggacgagccgctggccgccctgtgccggaccctggaacgacaggactggaacgaacccggcgagcgcctgctatgcaccagcctcgcccaccaggcggtggaccacctgctgctcaccgggtgcggcaggcgtaccgacgtgcgctggcagggcgggctggccgcgcacgtgcggcggcgcctggccgactacatcgaaagccacttggagcagccgctggaactggggtcgctggcggagctggcggcgctctccgagtaccacttcgcgcgcatgttccgcgtatccttcggcctgccgccgcaccgctacgtgctggaacgacgcctggcgcgggcccgcgacctgctggcgtactccgcgcagccgctccaggaggtctcgctggcctgcggcttcgccagtccgagccatttcaaccggcgcttccgcgaagcccatggcgccaccccggggcagtaccgcgccgccctgaaaggctcctga

SEQ ID NO: 367221 - DNA, 903 bp, Pseudomonas aeruginosa
atgaatctttcgctgtacctgctcaccgtgctcatctggggcaccacctggatcgccatcaagctgcagatgggcccggtggcgatcaccctgtcgatcgcctaccgcttcgccctggcggcgctggtgctgttcgccgtgctgctgctcggccgccgcctgcaaaggctggacgcacggggccaacgcctgtgcatggcccagggcgtatgcctgttctgcctgaatttcatctgcttctataccgccagccagtggattcccagcggcctggtggccgtggtgttctccaccgccaccctgtggaatgcgctgaacgcccgcctgtggttcggccagcgcatcgcgtcgaacgtgatggccggtggcggtctcggcctgctcggcctggggctgctgttctggccggaattggtgggtcaccaggccaccccggaaaccttctacggcctcggcctggccctgctcggcacgctgtgcttctccaccggcaacatgctttccagcctgcaacagaaggccggcatccgcccgctcaccggcaatgcctggagcatgctctatggcaccctgatcctcctggcgctgtgcctgttccagggcgtgccgctgagtttcgactggagcgcgcgctacgtcggctcgctgctgtatctggcgatccccggctcggtgatcggcttcaccgcctacctgaccctggtcgggcgcatgggcccggatcgcgccgcctactgcaccgtgctgttcccggtggtggcgctgaacatctcggccttcgccgagggctaccgctggaccgcaccggcgctggccgggctggtcctggtgatgctcggcaacgtcttggtgttccgcaagccgaaggcgccggcgctggccgggccggcgcgctcgacctag

SEQ ID NO: 367222 - DNA, 978 bp, Pseudomonas aeruginosa
atgaaaaagaacgtcttcgtcttcagccgcctcgcccccgagcatctcgaacgtctgcaacgccagttcaacgtccgcgtgctcgaaccgaaacagggcgacatcgacgcccagtacgccgccgccctgcccgatacccacggcatgatcggcgtcggccggccgctcggcgccaggcaactggaacaggcgaagcagctggaagtcatctccagcgtctcggtcggctacgacaactatgacctggactacctgaaccgccgcggcatcgccctcaccaacacgcccgacgtcctcaccgagaccaccgccgacctcggcttcgccctgctgatcagcgccgcgcgacgggtcgccgagctggacgcctgggtcaaggccgggaactggaagcgcaccgtcgacgccccgcagttcggcaccgacgtgcatggcaagaaactcggcatcctcggcctcggccggatcggcgcggccatcgcccggcgcggccgtttcggcttcggcatgcaggtgctctaccacggcaacaaccgcaagccggaactggaacaggaactcggcgcgcgcttcctcggcttcgacgaactgctcggcgaggccgatttcgtctgcgtggtggtgccgctgggagcgcagacccggcagttgatcggcgcgcgcgaactgggtctgatgaaaccctcggcgatcctggtcaacgtcgcccgcggccaggtggtcgatgaggccgcgctggtcgccgccctgcgggagaagcgcatcctcggcgccggcctggatgtctacgagaaggaaccgctggccgaatcgccgctgttcgccctggacaacgtggtgaccctgccgcacatcggctcggccacccacgagacccgccgggccatggccgagcgggcgctgcagaacttcgaggcggccttgcgcggcgagcggccgctggacctggtcaatccgcaggtgtggcgacgcggctga

SEQ ID NO: 367223 - DNA, 954 bp, Pseudomonas aeruginosa
atggacaccctgcaaaacatgcgagccttcgtctgcgtggcggaaaccggaagcttcaccgcggcgtcccagcagctcaacaccaccaccgcctatgtttcgcgggcggtggccaacctcgagacgcacctgcgcacccgcctgctcaaccgtaccactcgtcgcatcgccctcaccgaggccggccagcgctacctgctgcgctgcgagcagatcctcgcctacgtcgaggaagccgaggccgaagccagcgacgcccatgcccgtcccgccggcaagctgaagctgcattcgatgaccggcatcggccagcactacgtgatccgcgccatcgccggctaccgccagcagtaccgcgacgtgaccttcgacctgaccatggccaaccgcgtgccggacctgctcgacgagggcttcgacgtggccatcgtggtggcctccgagctgcccgattccggcttcatttcccagcgcatcggcgagacctacagcattctttgcgcctcgccggagtacctgcgcctgaacggcacgccgagcgagccttcggagctggccagccacgactgcctgcgcctggtcagcccggtggtgccgctggatcgctggctgttcgacggtcccaacggccaggaaatggtctccatcggcgcctcgccgttccaggtcaatgtcggcgacgccatgaccgaggcaatccgctccgggctgggcatcggtatcctgccggtgtattcggccatcgaggacctgggcaagggcaccctggtgcgggtcctgccgcaacaccgcctgcaacagctcaacgtctatgcgctgtacccttcgcggcagtatctcgacgcgaagatcaagacctgggtggaatacctcaaggaaagcctgcccggcctgctccagcgcgacgaagcggcgctggtggagctggggctggaactcggaagatcctcctga

SEQ ID NO: 367224 - DNA, 1521 bp, Pseudomonas aeruginosa
gtgccgcgtgctctcaggaaggaactgaccttggtcggctccttcgtcggttttctcgtcgttttctccgcaatatccggttgtgtcagtacaggcgatatcgcccccgaggccgccacgctcgacgccaacgccctggccaccgaccatgcgatccaggctgccgcccgcgaggccggctggccgcaggcgcagtggtggaaggtgtatgccgatccgcagctggacgcctggatcgagaaggcgctggacggcaatccaggcctggcggtagcccatgcgcgggtacgccaggcgaagtccatggccgggctggtggagtccatcgagtcgccgcagatcgagggcaagggctcgctggtccgccaccgctggccggacgactatttctacggccccggcgacctggcgcggaccacttcctggaacaactccaccgagatcggcctgaactacaagctcgatctctgggggcgcgaccgcagcgacagcgagcgcgccgtcgacctggcccacatggccgccgccgaggcgcgccaggcgcagctcgagctggagggcaacatcgtccgcgcctacgtccagctctcgttgcagtacgccgagatggacatcgccaaggccatgctgcaacagcagcgcgacatcctcgccctggcccagcgtcgcctgcgcggcggcatcggcacgcatttcgaggtcagccaggcggaagtgccgctgcccgagaccgagcgccgcatcgaggtgatcgacgaagaaatccagctcacccgcaacctgctcgccgcactggccggcaagggcccgggcgagggccgcacgatccgccggccaagcctgaacctggcggcgcagccgagcctgcccagcgccttgccggccgaactgctcggtcgccgcccggatgtggtcgcccgccgctggcaggtcgccgccctggccaagggcgtggacgtggcgcgcgccgacttctaccccaacgtcgacctgatggcctcggtcggcttcagtgccgtcggcggcggcatgctggagttcttccgcagcgccaagtacacctacagcgccggcccggcggtgaccctgccgatcttcgacggcggccgcctgcgttcgcagttgggcgaggcggcggccggctacgacgcggcggtggagcaatacaaccagaccctggtggatgcgctgaagaacatttccgaccagttgatccgcctgcattcggtggacatccagaaggacttcgccgcgcaatcggtggcttccgcgcagaagacctacgatatcgccaccctggcctaccagcgcggcctcaccgattacctcaacgtgctcaacgcgcagacccggctgttccagcagcaactggtccaggagcaggtgcaggccgcccggctggccgcccatgccagcctgctcaccgccctcggcggcggcgtcggggccggcgccgatacgccggtgcagcggaagctggcgccggagaacgtcccggtcagagcggtgtcttcgcgatga

SEQ ID NO: 367225 - DNA, 2196 bp, Pseudomonas aeruginosa
atgagcggccgctccgctggtttcgccctgcccagccgcgacgagtggcggcgcgcgctggccgagtgggcgcgcagcgacggggcgacctggatctacgtgttcaaggtgctctgcgcggccttcctgaccctctggctggcgatgcgcctggaattgccgcagccgagcacggcgaccatcaccgtgttcatcgtcatgcagccgcagagcggccaggtgttcgccaagagcttctaccgcatcctcggcaccctggtcggcctcagcgtgatggtcaccctgatcgccctgttcgcccaggagcgagtgctgttcctgctcagctcggcgatctggatcggcctctgcaccgccggggccgcccgctaccgtgacttccgctcctacgcctgcgtgctcgccggctacaccgcgacgctgatcggcatccccgccaccagccatccggaaggcgccttcatgcaggcgatctggcgggtcctggaaatcagcctggcgatcctctgctcgggggtggtcagcgcggtgatcatgccgcagaccaccagcgcggcgatgcgcaatgcgctgtacgtgcgcttcggcctgttcgccgcgttcgtcctcgacagcctgcgcggggtcggcgggcgcgagcgcttcgaaagcagcaacgtggccttcgccgcccaggcggtgggcctggagacgatgcgcgcggcgagcgccttcgaggatccgcacatgcgcctgcgcaatggccggctgattcgcctgagcagcgagttcatggccatgaatacccgtttccacgccctccaccaactgctcgaacgcctgcgcgcgcagggctccacccaggtgctggaagcgttcgaaccgtgcctggaggaaatcaccgggctgctcgaggagatccgtggccgcgccgtcaccgaccatgacgccgagcgcttcgcccagcgcctcgccgactgccgcgaacgcctgatggcgcgcatccgccaggcgcgcggagaactgctggcgcgggagccgggcgaagaggcgcggctggacttcaataccgccgccgagctgctctaccgtttcgccgaggaaatgcacgactacgccctgacccatgcctcgctggccgcccaccgccacgagcgcgagcagtggaaggacgccttcaccgccaaggccaacgcggtggcggcggcagtggcggggatgcgcaccgggttgatgatcctgctgttcggctgtttctggatctacagcacctggcccagcggcggcaccttcgccctcaacgcggtggcggtctcggcgctggcctcggcggcgccgaacccgaagaaggtcgccatgcagatggccatcggcaccatggcggcggcgctgctcggcttcagcgagatgttcttcgtctacccgcatatcgacggtttcccgctgctatgcctggtactggcgccggtgttcgccctcggcgcgttcatctcctcgcggccgcagtgggccggctacggtctcggcctgctggtgttcttctgcttcggttcggtgccggcgaacctgaccgtctacgacccggcccacgtgatcaacgagtacatcgccctgatcctctcgatgctgctctcggccgcggccgccgcggtcattctgccgcccaacagcgcctggctgtggaagcgcctcgagcgcgacctgcggatgcgcgtggtgttcgccatcagcggcaggagcagggggcttggctcggccttcgaaagcggtacccgcgacctgctgaaccaggcctatggcgtcgccgccgggcgcccggacgtgcagcgcgggctgctgcgctggatgttcctggtgctcgaggtcggccacgcgatcatcgagctgcgtcgcgagcaggagcgcctgccggacgaaccctgctacgctgaggccatgccctggcgccaggcgatccgcgccatggggcgggccctgatccggctgttcgtgcgccccggtgcggagaacctggagcgcgccctggcggctgtcgaccaggccatccacgcggccaggcacaccgacgaaccctgcgcgccgcacttcgacagctcgccgctacggcgggtgcgcagctacctgcacttcatccgttcttccctgctcgcgccgacctcgccactgaccgaactggccggccggacgagcggccaaggtaccgtccatgcctcgtga

SEQ ID NO: 367226 - DNA, 201 bp, Pseudomonas aeruginosa; identical to SEQ ID NO: 322683

SEQ ID NO: 367227 - DNA, 909 bp, Pseudomonas aeruginosa
atgaccttgaaatccgtaatcagcctgctggcgaccctgctgatcctgctggtcgccgtattcatcgggcggaccctgtgggtcaactacatggacaccccctggacccgtgacggtcgcgtgcgcgccgacgtgatcaatgtcgccgccgacgtttccgggatcgtcgtcgacgtcccggtgcgcgacaaccagttggtgaagaaaggcgacctgctgatgcagatcgaccccgaccactaccgtattgcggtgaagcaggccgagtcgctggttgcctcgcgcaaggcgaccctggagatgcgccagttgaacgcccggcggcgcgcggaaatggatgagatggtggtctcccgcgaaagccgcgacgacgcccacaacaccgccgccgcggcgatggccgactacgagcaggccaaggcccagctcgacgccgcgcgcctgaacctggagcgcacccgggtggtggcgcaggtcgacggctacgtcaccaacctcaacgtgcaccgtggcgactacgcgcgggtcggcgaggcgaagatggcggtgatcgacaagaactcctactgggtctacggctacttcgaggaaaccaagctgccgtacatccgcgaaggcgacccggtggacatgcagctgatgagcggcgaacacctcaagggccacgtggaaagcatcgcccgcggcatctacgaccgcgacaacccggaaagccgcgagctgaccgccgacgtcaaccccactttcaactgggtgcgcctggcccagcgcgtgccggtgcgggtacacatcgacgaagtgccggacggcgtgctgctctcggcggggatcacctgcacggtgatcgtcaagccgcaagggcgcgacgaccaggcctcggcggtgcaggcgccggggcgggccggttga

SEQ ID NO: 367228 - DNA, 1164 bp, Pseudomonas aeruginosa
atgatcgaactggacaagctcagcaagaccttcacccagaagaacggcaaggagttccgcgccgtcgattccgtcagcctgaccgtggagaaaggcgagatctgcgtcttcctcggcccctccggctgcggcaagaccaccaccctgaagatgatcaaccggatcatcccgccgacctccggccgcgtgctgatcgacggccaggacaccgcggacctcgacgaagtcaccctgcgccgccacatcggctacgtgatccagcagatcggcctgttcccgaacatgaccatcgaggaaaacatcatggtcgtgccgcgcctgctcggctgggacaaggcgcgctgcaaggagaaggcccgcgagctgatgagcatggtcaagctggagcccaagcagtacctgcaacgctacccgcgcgaactctccggcggccagcagcagcgcgtcggggtaatccgcgcgctggcggcggacgcgccgctgctgctgatggacgagccgttcggcgcggtcgatccgatcaaccgcgagtcgatccagaacgagttcttcgaaatgcagcgcaagctcggcatgaccgtgatcatggtcagccacgacatcgacgaagccatcaagctgggtgacaaggtggcggtgttcaagagcggccggctgctccagtacgaccacccggacaccctgctggcgcacccggcggacgagttcgtcagcgccttcaccggccaggacagcacgctcaagcgcctgctcctggtgcgcgccgaagacgccgccgacagcagcctggtcaccgcccggccgcagaccccggtggccgaggcgctggaactgatggacgagaacgaccggcgctacctgatcgtggtggatgaccagggcaagggcctgggctacgtgcgacgcaaggacctgcgccgccaggagggcacctgcgcgccgttcgtcaccccgttccgggtcaccgccagccacgacgagcacctgcgcatcctgttgtcgcggatgtacgagttcaacagctcctggctgccggtgctcgaccccgaccagcagttcctcggcgaggtcacccaggaatccatcgccgactacctcagctccggccgctcgcgcggcggcaagggcctgatcgtgtcgccggccgaacaggtcggggcctag

SEQ ID NO: 367229 - DNA, 663 bp, Pseudomonas aeruginosa; identical to SEQ ID NO: 322686

SEQ ID NO: 367230 - DNA, 936 bp, Pseudomonas aeruginosa
atgaaccgactgatccgctcactctgcctggcctgcgccggcctgttcgccgccggcctggcgcaggcggaaaccctgcgcatcggcggcaagaccttcaccgagcagcgcatcctcaccgccatcaccgcgcagttcctgcagaagcgcggctacgacgtgacggtcaccaccggcctgggcagcaccctggcccgcgccgcccaggaaagcggccaactggatatcgtctgggagtacaccggctcgtcgctgatcgtctacaaccacatcgacgagaagctcgacgccgcggcttcctaccgccgggtcaagcaactcgacgaagcccagggcctggtctggctgaagccgacccgcttcaacaacacctatgccctggccatgcccgaggaacaggccgagcgcctgggcatccagagcgtcagcgatctcgcgcgggtgctcgccgaacagcaggaggccgagcccgggagcacccacctgttcgccatggacccggagttcgccggccgccccgacggcctcggccccatgagcgagctgtacggcctgcacttcacccgcaacgacatccgccagatggacgccgggctggtctacaccgcgctgaagaaccgccaggtgttcctcggcctcgtctacaccaccgacggccgcctgaaggatttcaagctgcgcgtgctgaaggacgacaagcagtacttccccttctacaacgccgccccggtggtgcgtaaggaggtcatgcagcgccatccggagttcgccacgctgttcgatccgatcatcgagcggctcgacgacgccaccatgcaggcactcaacgcgcgggtcgatatcgagcagcagacgccacagaaggtcgccgccgacttcctccgcgaacaccacctgctcgacgacggccaggccggccagggaggtagccagtaa

SEQ ID NO: 367231 - DNA, 723 bp, Pseudomonas aeruginosa
atggtgaaaacctgtggcaaggccctgctcggcctctgcgccgcagccgccgtactggccttgctgatccactggatcacccccgcgaccatcctccactaccgcgaggacctgctgttctacttgcaggcccacctggtgctggtcttcagttcgatggcggccgccctgctggtcggcgtgccggccggcatcctgctcagccgtcccggcatgcaggcccaggccgaacgcctgatgcaggtgttcaacgtcggcaacaccatcccgccgctggcggtgctggccatcgccctggcgatcatcggcatcggcaacggcccggcaatcctcgccctgttcctcgcctcgctgctgccgatcgtgcgcaacacctacgagggcctgcgcaatgtctcgccggcgctgaaggaagccgccaccggcatcggcatgacgcccaaccaggtgctgctgcgggtggaactgccgaacgcggtgccgatcatcgtcggcggcgtgcgcgtggccctggcgctgaacgtcggctccgcgccgctggcgttcctgatcggcgccaacagcctgggcagcctgatcttccccggcatctacctgaacaaccaccagcaactgctgctcggcgccgcctgcacggcgctcctcgccctgctgctggacgccctggtggtgctgttcagccgcatgttcctggaacgcggcctgaccgccaaggaggcctga

SEQ ID NO: 367232 - DNA, 1275 bp, Pseudomonas aeruginosa; identical to SEQ ID NO: 322689

SEQ ID NO: 367233 - DNA, 246 bp, Pseudomonas aeruginosa
atgcactggctggactacctgcaatggcccgccatgctggtcacggtggtggccgcctggctggtggcgtcggcgcatcggcgaagacgcaaggtcggcttctgggtgttcctcgccagcaacctgctgtggatcgcctggggcctgtacgcccaggcctatgcgctgatcctgctgcaggtctgcctggcggcgatgaacctgcgcggcacccatcgcaacgaagcgccacaggacagcgcctga

SEQ ID NO: 367234 - DNA, 900 bp, Pseudomonas aeruginosa
atgagcgatgccccgacctccccgcgcttcagcgccgccaccagcacccgcctgctcgaccatgcgcaactggaggcgctctgcgccgactatgacggcttccttctcgatctctggggcgtagtgatggacggcgccgaggcgttccccggcgcccttgcctggctcgcccggcggcacgccgaaggccgcccggtctggttcctcagcaactcgtccagcagcgtggtggaaatgagcgccgggctcgagcgcctgggcatccggcgcgactggttcgccggcatcaccacgtccggccagttgaccatcgacgccctgctgcaaaccgccgaataccggcgtggcggtctctacctggccggcgtcggcctggcccagcagagctggccggcggaaatccgcgagcgcttcgtcgaggacatcgcccaggcggcgctgatcgtcggcgtcggcagctttccccaggatgaactggaacagcgcttcgcgcccctgcgcggcgccaccgacctgccgttcctctgcgccaacccggaccgcgtggtggtttccggcggccgcacggtatacggcgcgggcatgctcgccgagctgttcagcgaggaaggcggccaggtcagctggtacggcaagcccgacccggcggccttccgcatcgcccagcggcaactggaagcgcgcggcgcgcggcacatcctgttcgtcggcgactcgctggtgaccgacgtccccggcgccctcgccgcgcgcatcgatacgctctggctgggcgccaccggcatccaccgcgaagccctgggcgccgagttcaacggagcactcgtcgaggagcgggtcaggtcgctgctgcacggctatccgatccgaccgcactttgccgcgccagggctggtctga

SEQ ID NO: 367235 - DNA, 657 bp, Pseudomonas aeruginosa
atgcaccgttcaccgctcgcctggctccgcctgctcctcgccgccgtgctcggcgccttcctgctcggcggcccgctgcatgccgccgagactgccgccacgcgttcgccagcctgggcgcaagcggtcgacccgtcgatcaacctctaccgcatgagccccaccctctatcgcagcgcgctgcccaacgcacagagcgtcgcgctgctgcaacgcctgcaggtgaagacggtggtcagcttcatcaaggacgacgaccgcgcctggctgggccaggctccggtgcgggtgctcagcctgccgacccacgccgaccgggtcgacgacgccgaggtgctcagcgtcctccgccagttgcaggcagccgagcgcgaaggtccggtactgatgcactgcaagcacggcaacaaccgcaccggactgttcgccgccatgtaccgcatcgtcgtgcagggctgggacaagcaggccgcgctggaggaaatgcagcacggcggtttcggcgacgaggacgacatgcgcgacgccagcgcctatgtgcgcggcgccgacgtcgacggcctgcgcctggcgatggccaacggcgaatgcagcccgtcgcgcttcgccgtctgccatgtgcgcgagtggatggcccaggcgctcgaccggccgtaa

SEQ ID NO: 367236 - DNA, 387 bp, Pseudomonas aeruginosa; identical to SEQ ID NO: 322693

SEQ ID NO: 367237 - DNA, 831 bp, Pseudomonas aeruginosa
atgagccaacccgtcgccttcgtcaccggctgctccagcggcatcggccgcgccctcgccgacgccttccagcgcgccggctaccgggtctgggccagcgcgcgcaaggaggacgacgtgcgtgccctggccgaggccggcttccaggcggtgcaactggacgtcaacgacgccgccgcgctggcccgtctggccgaggaactgggagtcgaagccgccggcctcgacgtgctggtcaacaacgccggctacggcgccatgggtccgctgctggacggcggcgtcgaagccatgcgccggcagttcgagaccaacgtgttcgccgtggtcggcgtgacccgcgcgctgttcccgctactgaggcgcaagtccggcctggtggtgaacgtcggcagcgtctccggcgtgctggtcacgcccttcgccggcgcctactgcgcctccaaggccgcggtgcatgcactgagcgatgccctgcgcctggagctggcaccgttcggcgtcgaggtgctggaagtgcagccgggcgccatcgcctcgaacttcggcgccagcgccagccgcgagctggacagcgtggtcgacgaacgctcgccctggtggccgttgcgccggcagatccaggcgcgcgccgcggcatcccaggacaatcccacgtccgccgaagacttcgcccgccagttgctagccgccgtgcagcgccgtccgcgcccgccgctggtgcgcatcggcaatggcagccgggccctgccggcgctggcccgctggctaccgcgcggcctgctggagcggctgctgaagaagcgcttcggtctcgacacgcgcctctga

SEQ ID NO: 367238 - DNA, 750 bp, Pseudomonas aeruginosa
atggaaacccgccgtctgttcgaccagggctccgctgcctacgccagcgcccgcccgcgttatcccgatgcgctctaccgccatctcgccgggctctgcggccagcgccggcgcgcctgggactgcgccaccggtaccggccaggccgcgctcggcctggcgcagtacttcggcgaagtcctcgccagcgacaccagcacgcagcagatcgaacacgccgttgtccatccgggtatccgctacagcgtgcaggacgccgaagccaccgactatcccgacgccgccttcgacctggtctgcgtagcccaggcctggcactggttcgaccactcgcgcttcaaccgcgagctgctgcgcgtgctgcgtcccggcggcgtgttcgccgcctggggctacggctggttcagcatcgacgcgcagatcgatgccgccatcgacgaggaatacctgcgcccgatcggcccgtactgggcgcaacagaaccgcctgctgtggaacgcctaccgggatgtcgagctgccgctgggcgaactccccgcgccggccttcgtcatcgagcaacaatggagcctggcccggttgttcgactacatggccacctggtcggccagccgcctgtgccgcgaggcgcagggcaacgctttcgtgcgccaggccctgcaacgggtcgccgcgctctggggcgagccgacctcgacacgcagggttcgcatgccgctggcgctgcggatcgcgcgcaaggacgcctga

SEQ ID NO: 367239 - DNA, 465 bp, Pseudomonas aeruginosa; identical to SEQ ID NO: 366932

SEQ ID NO: 367240 - DNA, 396 bp, Pseudomonas aeruginosa
atgatgttcgaacgcagccccgacgatccccttcccctggtctacgcctgctccggctgctccaacgtggcgcaactggccaacgatctcgcgctgcgcctggatcgcgcccggctggcggagatgtcctgcatcgccggagtcggcggcgacgtcccgctgctggtccgccgggcccgctccgggcgaccgatactggccctcgacggttgcccgctgcattgcgtgaaaggctgcctggcgcgccacgaggtagtcccgaccctgcacctgaccctcagcgaacacggcctgaagaagcgctacggcgaggactgcgaggcgcaggacgccgagcgcctgttcgtcgaactggagcgtctgctgacgccgggcggcaagcgccgctgcgaatga

SEQ ID NO: 367241 - DNA, 660 bp, Pseudomonas aeruginosa; identical to SEQ ID NO: 354637

SEQ ID NO: 367242 - DNA, 1869 bp, Pseudomonas aeruginosa
atgaacaaggcgaccgcgccggacgctgaccagcgggacagattctttggaggtagtgacagggccggaaagccgatcctgcgccgctccctggtagtccgcttcggctgctacctcaccctgctggtatcgctggcgctgatcgggatgttcagcgccctgctcttcgccgactacacgcaccaggacgccgcggtgatcaaccacgccggctcgttgcgcatgctcacctaccgggtcgccctggagcccagcctggaaggccgccaggcgctgctcgggaccctcggcgaacgcctcgacagcggcgacatccgccgcctgctgcaacgccaggacgccgacgacccgatccgccagttgcaccaggagctgcgcgagggcctcgcgcgcctggacccgcgcgcgctgcccggacgcgccgtgctggacgcctacgtcggcgacatcgaccgtttcgtcggcatcctccaggccaaggccgagcgccgctcgcaactgctcagcacggtgcagggcctgtgcctgttcctcagcctgctggtggtgttcgtcaccctctacgacctcagctatcacgtcatcggcccgctgcgcgaactcaccagcaccgcccgccgcctgggccgcggcgagctggacgcgcgggtcacctacagcggcgaggacgaactggcgcaactgggcgagcgcttcaaccagatggccggcgagctgaagagcatctacggcgacctggaagagcgcgtggaggacaagacccgcgccctctcgcagagccaccagcgcctcgaactgctctacgccagcgcccgccggctaggcgagaacccctacgacagccgcaccctgcaaccgctgctgaaccagttggagaaagtgctcgacgccggccgcgtgaccctctgcctgaacaaggacggggtcgagcgcgcctacagttcgctgaccaccaccgagcgcccggcggacttctgcctgcagggcgactgcggtagctgccgcgagcaggccagcgcctgcgaccaaccctcgtccctggcccagccattgctgatgcagcccctgtccatcgccggccaccgtttcggcgaactgttcatcgaaagccgcagcggccgcctggagaactggcagcagcaactgatcgagaccttctgcgacaacatcgcccgcaccttcgccctgtccctgcaacaggaacaggaaagccgcctggccctgttcgccgagcgcggcaccatcgcccgcgaactgcacgattcgctggcacagtcgctgtcctacctgaagatccaggtcagccgcctgggcaccctgctcaagcgcgaggcgccggcggagaagatcgaggacaccctcgacgaactgcgcgaaggcctcaacggcgcctaccggcaactgcgcgaactgctcaccaccttccgcctcagcctcgacgagccgagcctggaagccgcgctggggaacgccgtggccgagttcggcgagcgcggcgaggtgacgatcgaactggacaaccgcctgcaacacgtgccgctgagccccaacgaggaaatccacgtcctgcagatcgtccgcgaggcgctttccaacgtggttcgccattcgcaggcgcaacgggcctgggtgcgcctgagcagccaggccgacggccaggtgagcatcgccgtcgaggacgatggcgtcggctttgatccgcagcagaaccgcagcggccattatgggcttaccatcatgcaggagcgcggccagaccctcggcagccagttgcgcttcgaagcgcgcgcgccccacggcacgcgagtgctcttcagcttcgtgccgaccgccctgcaaccctccgccgccaaggagccgaccccatga

SEQ ID NO: 367243 - DNA, 1407 bp, Pseudomonas aeruginosa; identical to SEQ ID NO: 319739

SEQ ID NO: 367244 - DNA, 3786 bp, Pseudomonas aeruginosa
atgagtcacctgctcgaccgcctgcagttcttcaagaagaagcagggcgaattcgccgatggccacggcgagaccagcaacgagagccgcgcctgggaaggtgcctaccggcagcgctggcagcacgacaagatcgtgcgctccacccacggggtgaactgcaccggctcctgctcctggaagatctacgtgaagaacggcctgatcacctgggaaacccagcagaccgactacccgcgcacccgtccggacctgcccaaccacgagccgcgcggctgcccgcgcggggccagctattcctggtacatctacagcgccaaccgcctgaagtacccgaaggtgcgtaagccgttgctcaagctctggcgcgaggcgcgggcgcagcacggcgacccggtgaacgcctgggccagcatcgtcgaggacgccgccaaggcgaagagctacaagagccagcgcggcctgggcggcttcgtccgttccagctgggacgaggtcaccgagatcatcgccgcggccaacgtctacaccgccaagacctacggtccggaccgggtgatcggcttctcgccgatcccggccatgtcgatggtcagctacgccgccggcgcccgctacctgtcgctgatcggcggggtctgcctgagcttctacgactggtactgcgacctgccgccggccagcccgcagatctggggcgagcagaccgacgtgccggagtcggccgactggtacaactccagctacatcatcgcctggggctccaacgtgccgcagacgcggaccccggacgcgcacttcttcaccgaggtgcgctacaagggcaccaagaccgtctccatcaccccggactattccgaggtggccaagctcaccgacctctggctcaaccccaagcagggcaccgacgccgcgctgggcatggccttcggtcacgtgatcctgaaggagttccacctcgaccggccgagtgcctacttcgtcgactactgccgccagtacaccgacatgccgatgctggtgttgctggaagaacacgccggcggcgcgttcaagccgacccgctacctgcgcgccgccgacctggcggacaacctcggccaggacaacaaccccgagtggaagaccatcgcctacgacgagcgcagcggcgggctggtctcgcccaccggcgccatcggctaccgctggggcgagtcgggcaagtggaacatcgccgagctggacggcaggagcggtgaccagacgcgcctgcaactgtcgctgctcgatggcccggaacatgcctgcgaggtggccttcccgtacttcgccgggcaggagcacccgcacttcaagggcgtcgccaacgacgaggtactgctgcgccgggtgccgttccgcgagatcgtcgcggcggacggcaagcgcctgcgggtggccaccgtctatgacctgcagatggccaactacagcatcgaccgcggcctgggcggcgacaacgtggcgacctcctacgaggacgccgacacgccctataccccggcctggcaggagcgcatcaccggcgtcccggcggcgcgcgcgacgcaggtcgcccgcgagttcgccgacagcgccgacaagacccgcggcaaggcgatggtgatcatcggcgcggcgatgaaccactggtaccacatggacatgaactaccgcgcggtcatcaacatgctgatgatgtgcggctgcatcggccagagcggcggcggctgggcgcactatgtcggccaggagaagctgcgcccgcagaccggctgggcgccgctggccttcggcctggactggagccggccgccgcggcagatgaacggcaccagcttcttctacctgcacagctcgcaatggcgccacgagaagctgtcgatgcacgaggtgctgtcgccgctggccgacgccagccgcttcgccgaacacgccctggactacaacatccaggccgaacgcctcggctggctgccgtcggcgccgcaactgaaccgcaacccgctgcgcatcgccgccgaggccgaggccgccggcctgccggtcgccgactatgtggtgcgcgaactgaagagcggcggcctgcgcttcgccagcgaatcgccggacgatccgcagaacttcccgcgcaacatgttcatctggcgctccaacctgctgggctcctccggcaaggggcacgagtacatgctcaagtacctgctcggggcgaagaacggggtgatgaacgatgacctcggcaaggccggcggtccgcgtcccaccgaggtcgactgggtcgacgacggtgccgagggcaagctcgacctggtcaccaccctggacttccgcatgtcctccacctgcatgtactcggacatcgtcctgccgaccgctacctggtacgagaaggacgacctcaacacctccgacatgcaccccttcatccatccgctgtcggcggccaccgatccggcctgggaagccaagagcgactgggagatctacaaggccatcgccaagaagttctccgccgtcgccgaaggccacctcggcgtggagcaggacctggtcacggtgccgctgctgcatgacacccccaccgagctggcgcagccgttcggcggcgacggccatgactggaagaagggcgagtgcgagccggtgccgggacgcaacctgccgacgctgcacctggtcgagcgcgactacccgaacgtctaccgcaagttcacctcgctcggtccgctgctggacaagctgggcaacggcggcaagggcatcggctggaacaccgagaaggaagtgaagctggtcggcgacctcaaccatcgcgtggtcgagagcggcgtcagccagggccggccgcgtatcgacagcgccatcgacgccgccgaggtggtcctcgccctggctccggaaaccaacggccaggtcgcggtcaaggcctgggaagcgctgtcgaagatcaccggccgcgagcacgcccacctggcgctgcccaaggaagacgagaagatccgcttccgcgacatccaggtgcagccgcgcaagatcatctccagcccgacctggtccggcctcgaggacgagcacgtcagctacaacgccggctacaccaacgtccacgagctgatcccgtggcgcaccatcaccggtcgccagcagttctaccaggaccacccgtggatgcaggcgttcggcgaaggcttcgtcagctaccggccgccggtcaacacccggaccaccgagaaactgttgaacaggaagcccaacggcaacccggagatcaccctgaactggatcaccccgcaccagaaatggggcatccactccacctacagcgacaacctgctgatgctcaccctgtcgcgcggcggtccgatcatctggctcagcgagcacgacgcggccaaggccgggatcgtcgataacgactgggtcgaggtgttcaacgccaacggcgcggcgacctgccgcgcggtggtcagccagcgggtcaaggacggcatggtgatgatgtaccacgcccaggaacgcatcgtgaacgtacccggcagcgagaccaccggcacccgtggcggccaccacaactcggtgacccgcgtggtgctcaagccgacccacatgatcggcggctacgcccagcaggcctggggcttcaactactacggcacggtcggctgcaaccgcgacgagttcgtcgtggtgcgcaagatgagcaaggtcgactggctggacgaaccccgccacggcggactcggcggcgacgccctgccgcaaccgctgccccaggacatttga

SEQ ID NO: 367245 - DNA, 1542 bp, Pseudomonas aeruginosa
atgaaaattcgttcgcaagtcggcatggtgctgaacctcgacaaatgcatcggttgccacacctgctcgatcacctgcaagaacgtctggaccagccgcgaaggcatggagtacgcctggttcaacaacgtcgagaccaagcccgggatcggctacccgaaggaatgggaaaaccaggagaagtggaagggcggctgggtgcgcgcggcagacggttcgatccgcccgcgcatcggcggcaagttccgcgtgctggcgaacatcttcgccaacccggacctgcccgagatcgacgactactacgaaccgttcgacttcgactaccagcacctgcataccgcgcccaaggccgagcaccagccggtggcgcgcccgcgctcgctggtctccgggcagcgcatggagaagatcgagtggggcccgaactgggaggagatcctcggcaccgagttcgccaagcggcgcaaggacaagaacttcgaccaggtccaggcggacatctacggtgagtacgagaacaccttcatgatgtacctgccgcgcctctgcgagcactgcctgaacccggcgtgcgtggcgtcctgcccgagcggggcgatctacaagcgcgaggaggacggcatcgtcctgatcgaccaggacaagtgccgcggctggcggatgtgcatctccggctgcccgtacaagaagatctacttcaactggaagagcggcaagtccgagaagtgcatcttctgctacccgcgcatcgaggccggccagcccaccgtctgctcggagacctgcgtcgggcgcatccgctacctcggcgtgctgctctacgacgccgaccgtatccacgaagtggccagttgcgagaacgagcgcgagctgtacgagaagcaactggagatcttcctcgatccgttcgacccggcggtgatcgcccaggcgcgcaaggatggggtggccgacagcgtcatcgaggcggcgcagaagtcgccggtgtacaagctggcgatggactggaagctggccctgccgctgcacccggaataccgcacgctgccgatggtctggtacgtgccgccgctgtcgccgatccagaacgccgccgccgaggggcacatcggcagcgacggggtgatcccggacgtcgagtcgctgcgcatccccgtgcagtacctggccaacctgctcaccgccggcgacaccgcgccggtgctgctggcgctcaagcgcctgctggcgatgcgcgcctacaagcgcgccgagcacgtcgaaggccgccaggacctggaggtgctggccaaggtcgggttgagcgtggagcaggtggaggagatgtaccgctacctggccatcgccaactacgaggatcgcttcgtgatccccagcgcgcaccgcgaggaagcgctttccgatgccttcgccgagcgttccggctgtggcttcagcttcggcaacggctgttccggcggcagcaactccgccgtcaacctgttcggcggcaagccgaccaaccgccgcgacgtgatccaggtcgtgcagatccaggagtga

SEQ ID NO: 367246 - DNA, 741 bp, Pseudomonas aeruginosa
atgaacgatcacagccaactgttccgcctgctcgccctgctactcgactatccacgcgccgagctgcgcgaggagagcctcggcctgcatgcgctgatccgcacctgcgaactgccggaagcgctgcgcgacggcctcgcggcgctgctcaacgagctctgccagggcgacctgctggacgtccaggcgcgctacgacggtctcttcgagcgcggccgctcggtctcgctgctgctcttcgagcacgtccacggcgagagccgcgaccgtggccaggcgatggtcgacctgctcgaccgctataccagggccggcctgcaaatcgacgtaccggagctgccggactacctgccgctgtacctcgaatacctgtcgctgctgccgttcgcggcggccagcgaagggctcgccgaagtggcgcacatcctcggcctgctggcgctgcgcctggaggaacgcggcagcgcctatgcggcgattttcgaggcgttgctggaactcggcggcgagcgcccggacctcggcgcgttgcgtcgcgaccaggcccaggaacagcgcgacgacagcctggaggccatcgaccgggcctgggaggaaaccccggtgagcttcaccgaccccgccggcggttgcccgtcgagcagcggccgccgtccaacggcgtccaccgaacaaccattgcaatgggtcgcccagccggtaccgcagatgcagtaccgcgcggcccgcgaaggagtctga

SEQ ID NO: 367247 - DNA, 684 bp, Pseudomonas aeruginosa
atgtcgaccaatcttctgttcttcgggatctatccctatgtcgcgctgctgatctgcctggtcggcagctgggcgcgcttcgacctctcgcagtacacctggaaggccggttccagccagatgctcagcaagaagggcatgcgggtatacagcaacctgttccacgtcggcgtgctgttcatcctcgccggccacttcgtcggcctgctgaccccggcctcggtctaccaccacctgatcagcaccgagaacaagcaactgctggcgatggtctccggcggcttcttcggcgtgctctgcttcatcggcctgagcggactgatcctgcgccgcctgaccgacgcacgggtgcgcgccactggcaacgcctccgacctgatgatcctgctggtgctctacgcccagctgatcctcggcctctccaccatcgtcgcctcgacccatcacatggatggctcggtgatggtgatgctcgccgactgggcccaggccatcgtcaccctgcgtccgctggcggcggccgaggccatcgcgccggtgggcctggtctacaagctgcacgtcggcctgggccttaccctgttcgtgctgttccccttcacccgcctggtgcacatcgtcagcgcgccggtgtggtacctgggccggcgctaccagatcgtgcgtcagaaacgtcctgcctga

SEQ ID NO: 367248 - DNA, 819 bp, Pseudomonas aeruginosa
atgagttgctcccactacgaagaacgcgtcgagaaggtcgaactgccgcaactgaaggtcaacggcgtggccatcggtgaagacctgctggcccgcgagctgcaataccacccggcggacagctacgcgctggcgctggaggccgcctgccgtgcgctgatcgtccgccagttgctcctgcaacgggccgacgcgctgggcatcgaggcccgctgcgaagacggcgagacgccggaggaagcgcgcatccgccaattgctggaggaagaggtgcaggtcccggaagccgacgaagacgcctgccggacctggtacgcggccaatccggggcgcttgctcggcccctggcgcctgcaattgcgccatgtgctgctggcctgcgcgccggacgacctggaaggccgcgagacggcgcgcaagcaggccgcggagctgctcgacgagttgcgcgggcatcccgagcgcttcgtcgacctggcccggcgtttctccgcctgtccgtcgaaggaggcgggcggcgacctcggctggatcgagccggggcagaccgtccccgaattcgagaagcgcctgctgcgccgcgcgcccgggctgctcgagcatccgctggaaagccgctatggcctgcatgtggtggaactgctggcgcgcgaaggcggcgagccgctcgacttcgacgcggcccgcgcacagatcgccgcgcacctgcaagcgcaggtgttgcagcgagcggtgggacagtacatcggcgtgctggcgggagacgcctgtatcgagggcttcgccttcgagggtgcggatggggcgctggtgcaatag

SEQ ID NO: 367249 - DNA, 990 bp, Pseudomonas aeruginosa
atgaccgactggatcgatggccaaggccgacagatcgactacctgcgcctgtcggtcaccgaccgttgcgacttccgctgtgtctactgcatggccgaggacatgcgcttcctgccgcgccagcaggtgctgaccctggaggagatcgagcgggtcgcccggctgttcgtcgccggcggtgtgcgcaagctgcgcctgaccggcggcgagccgctggtgcggcccggcatcgtcggcctgtgcgagcgcctggcggcactgccggggttgcgcgaactgtgcatgaccagcaacggctcgcaactggtgcgctacgcccggccgttgtacgacgccggcctgtcgcgtctcaacatcagcctcgacaccctcgatccgctgcgcttccgggcgatcacccgcaacggcgagctggacaaggtgctggccggcatcgacgccgcccaggccgccggtttccgccggatcaagctgaacgcggtggtgatgaaggggcgcaacgccgatgaggtgccggcgctggtggacttcgccatcgcccgcggcctggatatcagcttcatcgaggagatgccgcttggccaggtcggccgcgaacgtggcgagagcttctgctccagcgacgaagtacgcgcgctgatcgcccagcgccacgccttgctcgacagcgccgagcagagcggcgggccggcgcgctacgtgcgcctggtcgagcatccgcagacacgcatcggcttcatctcgccgcactcgcacaacttctgcgccacctgcaaccgcctgcgcctgaccgtcgagggccgcctgctgctgtgcctcggccacgagcattcgctcgacctgcgcgcgctgctgcgccgccacccactgcacgacggaccgttgctggaagcgatcggcgaggcgctccagcgcaagccggcgcgccatgaattcagcgccgccggcgaggtgcaggtgctgcgcttcatgaacatgagcggcggctga

SEQ ID NO: 367250 - DNA, 513 bp, Pseudomonas aeruginosa
atggccaaggcgggttgcgagcgagtgttcgaagacactgccagcggcgccaaggccgatcgaatcggcctggccgcgcttctcgccaatctaaagcggggcgacacggtggtggtctggcggctggaccggcttggccgctcgatcaaggacctgatctacctggtcgagcaattggaggatgccggcgtgggtctgaagagactccaggagaacatcgacaccacatccaccggagggcgtttggttttccacctctttgccgcgctagccgagttcgagcgcaacctgatcagtgaatgcacccatgcgagactatctgcagcacgtgctcgcggtcggctgggcggccgcaagaaacgcctggatcccgccaagcgcaaagtcgccctgaagctctatcacgagcgccaatacaccgtggtggagatctgtcggatgatgggaatcggccgctcgacgctctacaactacatcaccgaggcagaacggaatgcccaccagcaggcgtaa

SEQ ID NO: 367251 - DNA, 2295 bp, Pseudomonas aeruginosa
atgacaaataatagtgcgccaccacttgtcgtgaccagaggaaatgataatggttacgagcctgggtcgatggttattacgcatgtacaggctagtgggctagacataatccagtacattccaggtcggtcaagctacggtactccaccatttgtcccgccaggaccaagcccgtatgttggccctggaatgcaagagtacaggaggctaagagatactcttgataagtcccattcagaactcaagaaaaacctgaagaataaaaccttgaaggaggtagatgaactcaagagtgaagcggggttgccagttaaagcggtcagtgccaatgacatccgcgatgaaaagagtatcgttgatgcactcatggatgccaaagcaaaatcgctaaaggccattgaggatcgcccggccaatctttatacggcttcagactttcctcagaagtcagaggcgatgtaccagaatcagttgctagccagtcgaaagttctatggagagttccttgatcgacatatgagtgagctggccaaagcgtacagcgctgatatctataaggcgcaaatcgctatcttgaaacaaacgtctcaaggactggagagtaaagcccggtcaatggaggcgcaagcccagcaggtcactcaacagctcggtgccgacttcaacgcgatcaccactccgaccgccaccaaggtccagcaacgtgtgaaagcagtggatgctagtctgtctcaggtttccacccaggtcagtggtgcagtcgcctcggcaacccaggcggtgcaggtcaagacagcgcaagcccagcaacaagccaacagccagatttcgtccagccagaacctgatcagcgcggcatttcggaatcagattgccttggcagcacaggccagtggagaagcccaggtcacggctttcaacaccaaagtcaagcagatcgtcaacgaagccacggcgttttcgacagcacgaaaacaagcgctggctcagtttgctgccaatgcggccgccgaggtcgaaaccgaggtcaacaggctaaccgcccaggtcaaggccagccccaccaaggcggcttcgcaagctgcacaagcaacccttcgacaattcactgaaagcacctatgccaaggtgaacacctatgcccagcagaccgaagcagcgctgcaggccaaagccaaggaggtttcggcagcggtagccgaggcacagcgtgcggcgaccaacgatttgcaaaaaacagccgatgtagtaccaggtcagatcattcaggctgcgaacaccttggcgatgccggctacctctacgccgctggtttcggtggccgggtttggtagtgcggcagtggagacggctcgcctggcggcttccctaacgaatgctgtcaatcgcctggttcagattgctggtagtggacccggcgcatactttgccaccttcgcggtgctgtcgctgtattccgaccaggctggtaaagacagtgacaaggttcctgccggcgttcgcaatgcattggcactggaggcgtccgctctggggcttcctggcacggctgatttgcaaagcgtcgccaaggcaggtggcacggttgatatgccggtacgactcacgagtgctgcacaagagagcccgagtggtaaatcgcagattgccgcgatgttgaccaacggtgcaactgtccccaagggcgtgcctgttcgcgccgcgaccctcaatgctgtgacgggccggtatgaggtgacggttcccgcaaagtccaccgtgccgaatacaccaccgctgatcttgacctggacccctgccacccctccaggaagccagaacccctcaagcaccactccggtcgtaccgcagccggttccggtgtatgagggagcaacgatcaccccagtacaggccgagccggagtcctatccgggagtgccgttagatctggacgatctgatcgtgatcttcccggtgggctcgggggttaagccaatctatataatgttcaatcataaccctcatgatgttgttattgatgataagatcagagagcaaattccaattagagggtggactgaggttgaaattagagatgttatcggaaaaggtgcaacaggtagttcttcagataagcgtcggcctaataagacgatagatgggctggggcggaatgactctgcaacagtatatggaagtcctcctaatggatatatagttgtgaacgataggacaggtgaaattattcaaattgcagatcggaacgattccgcatgggcggttgacgggcgaatcatctggagaaataagtaa

SEQ ID NO: 367252 - DNA, 792 bp, Pseudomonas aeruginosa
atgatcaagtcgctgaacaccaagaacctgctgggaggcctgctgctcggcgtgctcgccagcggatccgccgtcgccgccgatggcaacctgcgaatcggcatcgaggccgcctacccgccgttttccttcaagaccgccgaaggcgaactggccggcttcgactacgacatcggcaacgcgctgtgcgcgcagatgcaggtgaagtgccagtggatcgagcaggagtacgacggcctgattccctcgctgaaagttcgcaagatagacgccgcgctgtcctccatcaccatcaccgaggagcgccggcgctcggtggacttcacccacaagtactacttcacaccgggccgcctggtgatgaaggaaggcgcccagctcgacgacagcttcagccagttggccggcaagcgcatcggcgtgcagcgcggcgctaccgccgaccgcttcgccagtgcggtgctggccaaggccggtgccgaagtggtgcgctacaccagccaggacgagatctacctggacctggtggccggccgcctcgacgccaccttcgccgactccatcccgctgcagaccggcttcctcgataccccgcgcggcaagggctacgccttcgtcgggccggagttcaaggacccgaaatacttcggcgagggcgccgggatcgcggtgcgcaagggggacgccgagctggtcggcaagctcaacgcggcgatcgacgcgattcgtgccgacgggacctacaagcgcatcgagggcaagtacttcaagagcgacatctacggcgactga

SEQ ID NO: 367253 - DNA, 633 bp, Pseudomonas aeruginosa
atgagcccgagccaagaccccagcctggagaactaccgggcgatcgccgacggcatcgccaccctgttcttcccccacgccgaagtggtcctgcacgacctgcgcagccagcgggtcgactacatcgccaacaacctgtccaagcgcgaggtcggcgacgactcggcgctggaagacatgctcgaaggcgatagcgacgagcgcaacatcggcccctacgagaagctcaactgggacgggcagaagatccgctcggtcagcaccgtgctgcgcgactccgccggccagccgctggcggtgctgtgcatcaacctgaacatcagcctgttcgagagcgccaaggcggcactcgacctgttcctctcgccgagcaagctgatcccgcaaccggacgcgctgttccgcgacgactggcaggagcgcatcaacaccttcctgcacggctggctgcggcagcgccagctcggcttgaacctgctgacccgcgagcacaagcgcgaactggtcctggccctgcacgccgagggcgcgttcaagggcaagagcgccgccaactatgtggccaacgtgctgaacatgggccgggcgacggtctacaagcacctcaaggagctgaaggaaggcggcgactga

SEQ ID NO: 367254 - DNA, 1128 bp, Pseudomonas aeruginosa
atgatcgaagcggattacctcgtcatcggtgccggcatcgccggcgcatccaccggctactggctgtcggcccacggccgggtcgtggtgctggagcgcgaggcgcagcccggctaccactccaccggccgctccgccgcgcactacacggtggcctacggcacaccccaggtgcgcgcgctcaccgccgccagccgggccttcttcgacaacccgccggccggcttctgcgagcatccgctgctcagcccgcgtccggaaatggtggtcgacttcagcgacgatccggaagaactccgccgtcaatacgaaagcggcaaggcgctggtgccgcagatgcgcctgctggacgcggaacaggcctgctcgatcgtgccggtgctgcgtcgcgacaaggtcttcggcgccacctacgaccccaccggtgccgacatcgataccgacgccctgcaccagggctacctgcgcggcatccgccgcaaccaggggcaggtcctgtgcaaccacgaagcgctggagatccgccgggtcgacggcgcctgggaagtccgctgcgacgccggcaactaccgcgcggcggtgctggtcaacgccgcaggcgcctggtgcgacgccatcgccgggctggccggcgtccgcccgctgggcctgcagcccaagcgccgctcagccttcatcttcgccccgccgccgggcatcgactgccacgactggccgatgctggtcagcctcgacgaatccttctacctgaagccggacgccggcatgctgctcggctcgccggccaacgccgatccggtcgaagcccacgacgtgcagcccgagcaactggacatcgccaccggcatgtacctgatcgaagaagccaccaccctcaccattcgccgcccggaacacacctgggcagggctgcgctcgttcgtcgccgacggcgacctggtggccggctacgccgccgatgcggaaggcttcttctgggtcgctgcccagggcggctacggtatccagacctcggcggcgatgggcgaggccagcgccgcgctgatccgccaccagccgctgccggcgcacctgcgcgagcacggcctggacgaggcgatgctgtcgccgcgccgcctgtccccctga

SEQ ID NO: 367255 - DNA, 948 bp, Pseudomonas aeruginosa
atgagcgccgccactcccctgatcgtccagcaggccgaagccgagcaactgctcgcccgtatcgacgtcctccaggccatgcgccagctgttcctcgacctggccgccggccaggcgctccagccggcccagcaactggtggagttccccgccggtcgcggcgacttcatcaactacctcggcgtgctcgcccaggaacaggtctacggagtcaagacttcgccctacatcgttcgcgaacagggcccgttggtcaccgcctggaccctgctgatgtcgatgcagaccggccagcccttgctgctctgcgatgccgcccggctgaccaccgcgcgcaccgccgccaccaccgcggtggcggtggatgccctggctccggccgaagccggccgcctggcgctgatcggcagcggaccggtagcccatgcccacctgcaatacgtgaagggcctgcgtgactggcagggcgtgcgagtccattcgccgagcctggacgagcgccgcctgcaaagcctgcgcgccatcgacccgcgcgccgaagccgccggcagcctggaggaagcgctggacgaagccgatgtgatcctgctctgcacctcatcggcccgagcggtgatcgacccgcgccaactcaagcgcccggcgctggtcacctcgatcagcaccaacgcgccccgcgcccatgaggtaccggcggaaagcctggcggccatggacgtctattgcgactaccggcacaccaccccaggctccgccggcgagatgctgatcgccgccgaacagcatggctggagccccgaggcgatccgcggcgacctcgccgaactgctcagcggccaggcgccacgtccggaataccggcgcccggcgttcttccgctcgatcggcctgggcctggaagacgtagccctggccaacgccctctaccgcctgcgccaggcaggctga

SEQ ID NO: 367256 - DNA, 1572 bp, Pseudomonas aeruginosa
atgctttacactggcgcccgttcattccttaaccactacgagatcgccgtgctcaaagcactcaagaaaatcttcggcaaggccgacggaacccagccgcagagcggttcctccccggtcccgcaaggccctgccggcgctaccgcgaaaggtaccgcccccaccggcgaaaagccgaccgagaaacgcccacgcaaaccgcgccccccgcgcgccgacaacgagtccggcgccccgcgcgccgctgaaaaggccgagaaaggcgaaaagcccgccaaacccgccgccaaagaaggccgggacgccaagccgcgcagcgacaagccgcgccgcgaacgcaagccgaagccggtggacaactggaagctggaagacttcgtggtcgaaccgcaggaaggcaagacccgcttccacgacttcaacctcgccccgagcctgatgcacgccatccatgacctcggcttcccctactgcaccccgatccaggcgcaggtactgggcttcaccctgcgcggccaggacgccatcggccgcgcccagaccggcaccggcaagaccgccgcgttcctcatctcgatcatcacccaattgctgcagaccccgccgccgaaagagcgctacatgggcgagccgcgcgcgctgatcatcgccccgacccgcgaactggtggtacagatcgccaaggacgccgcggcgctgaccaagtacaccgggctgaacgtgatgaccttcgtcggcggcatggacttcgacaagcaactcaagcagctggaagcgcgcttctgcgacatcctggtagccaccccaggccgtctgctggacttcaaccagcgcggcgaggtgcacctggacatggtcgaggtgatggtcctcgacgaagccgaccgcatgctcgacatgggcttcatcccgcaggtccggcagatcatccggcagaccccgcacaagggcgaacgccagaccctgctgttctcggcgaccttcaccgacgacgtgatgaacctcgccaagcagtggaccgtcgatccggcgatcgtcgagatcgagccggagaacgtcgccagcgacaccgtcgagcagcatgtctacgccgtggccggcagcgacaagtacaagctgctgtacaacctggtggcacagaacaactgggaacgggtgatggtcttcgccaaccgcaaggacgaagtccgccgcatcgaggaacgcctgaccaaggacggcatcagcgccgcccagatgtccggcgacgtgccgcagcacaagcgcatccgcaccctggaaggcttccgcgaaggcaagatccgcgtcctggtggcaaccgacgtggccggccgcggcatccacatcgacggcatcagccatgtgatcaacttcaccctgccggaagacccggacgactacgtgcaccgtatcggtcgtaccggccgcgccggcgcctcgggcacctcgatcagcttcgccggcgaggacgatgccttcgccctgccgccgatcgaagaactgctgggccgcaagatcacctgcgagatgccgccggccgaactgctcaagccggtaccgcgcaagcactga

SEQ ID NO: 367257 - DNA, 1899 bp, Pseudomonas aeruginosa
atgaatccgtccccatcgatcgtcgggctgagcgatatcgaagccctggaacgcgtgccgctggaacagcgcgacctgccgtccagcacctacgaactgttgcaacgctcggcccagcgccacggccagcgtatcgccctgagctgcctgctgcatggcagcgccgccgaagaaccgttgcggatcagctatgccgagctgttcgcccgcgtcacccagaccgccaacgccttgcaccggctgggcctggaaagccaccaggcggtgtccttcctgctgcccaacctgccgcagacccactacgtgatctggggcggcgaggctgccgggatcgtcaatgcgatcaacccgctgctggagccggagcacatcgccgagctgatccgcgcctccaacacccgggtgctggtgaccctggcgccgttccccggcaccgacctgtggcagaaggtcgccggcctgcgcgcgcagttgccggagctgtacgcgatcgttgtggtcgatccggccaacctgttaccggcgccgcagcgcgaggcgctcaaggcccagcgcgggccgctgccggagggcgtgctggacttcgatacgctgatcgccgactgcccggcagaccgcctggagagcggacgggcgatccatccggacgacgtcgcttcctatttccacaccggcggcaccaccggcacgccgaagctggcgccgcacagccacttcaacgaggtggcgatggccgagatcatgggcctgaacgccgactacggggtggacgacgtgctgctctgcggcctgccgctgttccacgtcaacggcgtgatggttaccggcctggcgcccttccatcgcggcgcccaggtgctcctggccgggccccagggctaccgcaatccgaccctgatccaggacttctggaagctggtggaacgctaccgggtcaccagcttcagtggcgtgccgaccatctacgcggcgttgctgcaggtccccagcgatggccgcgacctgtccagcctgcgtttcgccctgtgcggcgcggcgccgatgccggtggagctgatccgccagttcgaggcgcgtaccgggctcaaggtgatcgagggctacggcctcaccgaaggtacctgcggcaccagttgcaacccgcgtggcggcgagcgccggccgggttcgatcggcctgcgcctgccgtactgccaggtgaaggtcgcggtgctcgacggcgagggcaattacctgcgcgatgccgcgccgaacgaggtgggcaacctctgcctgaagggcccgacggtgttcaagggctacctgcaacaggaccggaaccgcgatatctggatcggcgatggctggttcaataccggcgacctcggtcgtatcgacgaggacggctacatctggctcaccgggcgcagcaaggacctgatcattcgcggtggccacaacattgacccacagatgatcgaagaagcgctgcaccggcatccggccgtggccctggcggcggcggtgggcaagccggacgccaaggccggcgagctgccggtggcgtatatccagctcaagcccggcgccagcgccagcgaggaagagctgctggagcacgccagccgccacgtaccggagcgcgcggcggtgcccaaggatatctggctgatcgagagcatgccggtcaccgcggtgggcaagaccttcaagccggcgctgcgcctggacgcgatccgccgggtgctggaggaggaaagccggaggatcgccgaggatatccgcgtggaggtggtcgccgacgagcgccacggccagctcgcccacctgcacgttcccgcgcttgacgaaagacgccaggcggcgctggaagagctgctcggcggctacgcgctgaactaccggctgcacgccgtctga

SEQ ID NO: 367258 - DNA, 648 bp, Pseudomonas aeruginosa
atgagcgaacccctgatcctcgatgccccgaatgccgacgcctgtatcatctggctgcacggcctgggcgccgaccgtaccgacttcaaaccggtggccgaagccctgcagatggtcctgccgagcacccgcttcatcctcccccaggcgccgagccaggcggtgacggtcaatggcggctgggtcatgccgagctggtacgacatccttgccttcagtccggcgcgggccatcgacgaagaccagttgaacgcctccgccgaccaggtcatcgctctcatcgatgaacagcgcgccaagggcatcgccgccgagcggatcatcctcgccggtttctcgcagggcggcgcggtggtcctgcataccgccttccgccgctacgcccagccgctaggcggggtgctggcgctatccacctacgcgccgaccttcgacgacctggcgctggacgagcgccacaagcggattccggtcctgcacctgcacggcagccaggacgacgtggtcgacccggcgcttggccgcgcggcccatgacgccttgcaggcgcagggcgtggaggtgggctggcacgactacccgatgggccacgaggtgtccctggaggaaatccacgacatcggcgcctggctgcgcaagcgcctctga

SEQ ID NO: 367259 - DNA, 1026 bp, Pseudomonas aeruginosa
atgacaataatgaaaggtacctggctgctgctggccgctgtctgcctcggcgccagcgccacggccgaggccggtgcgacgctggatgcggtgaagcgcaagggctacgtgcagtgcggcgtcagcgacggcctgccggggttctcctacgccgacgctaagggccgtttcaaggggctcgacgtcgacatctgccgggcgctggccgccgcgctgttcggcgatgccgagaaggtgcgcttcaccccgctgtccgccaccgagcggttttcggcgttgcagtccggcacggtcgacctgctgtcgcgcaacacctcatggaccagctcgcgggataccgcgctgggcatccacttcaccggcgtcacctatttcgacggccagggcttcctggtcaatcgcaagctcggcgtgtccagcgcccgcgaactgaaggacgcgacggtgtgcatccagtccggcaccaccaacgagctgaacgtggcggactacttccgggcccacggcatccgctacaaggcggtgctcgacgacagctacgagaagagcgcccgtgccctggaggcggggcagtgcgacgtgctcagctccgaccagtcgcagctctacgcccagcgcctgaagctggccaagccggagcagtacgtggtgctgccggaagtgatctccaaggagccgctcggcccggccgtgcggcagggcgacgaagcctggttcaacatcgtccgctggaccctgtacggcctgctcaacgcggaggagctgggggtcacctcgagcaacgtcgagcgccaggccagggacagccgcaacccggacgtcgcccgcctgctcggcagcgagggcgacgccggcaaggacttgcaactgccgcgcgactgggtggtgcagatggtgcgccaggtcggcaactatggcgagatcttcgcccgcaacgtcggcgacggcagcccgctgaagatgccgcgcggcctcaacgcgcaatggaatctcggcggcctgcactatgcgccgccgattcgctga

SEQ ID NO: 367260 - DNA, 699 bp, Pseudomonas aeruginosa
atgactcccatcaacaaagccaaggcctggggcgtccacgccgtcaccgccagtggcgtgatcctggccttgctggccctgctcgcgctggtcgacaacaaaccccaggcctgcctgctctggctcggcctggccctgctggtggacggcctcgacggcaccctggcgcgcaagtacgaagtcaaggaaatgctgccgcatttcgacggctcggtgctcgacctggtgatcgactacctgacctacgtgttcatcccggccatcttcatctaccgctacatccccctgccggagcatttcgagctgctggcggtgggcgtgatcctggtttcatcgctgttctgcttctgcaacgtcaacatgaagagcaccgataactacttcgtcggcttcccggccgcctggaacgtggtggcggtgtacttctacgtgctcgacctgcacccctgggtcaacctcgccacggtgctggtgctggctgccctgaccctgacccggatgaagttcctccacccgttccgcgtgcgccagttcatgccgctgaacatcgccgtgactttcgtctggctgatcagcagcggtctgctgatagttcagcagccggccgacctgccgatcctgctcggcctgtggttcgccgcctcggcctatttcgtcggtatctgcctctggcgcagcgcccgcgagtggttcggctga

SEQ ID NO: 367261 - DNA, 483 bp, Pseudomonas aeruginosa; identical to SEQ ID NO: 333395

SEQ ID NO: 367262 - DNA, 702 bp, Pseudomonas aeruginosa
atgatcacgctcttccagtttcccgccgcattcaacgtacccaatgccagtccctactgcctgaaactggaaacctggttgcgcctggccggcctggagtatcaggtgaaggtcgtcagcgacccgcgcaaggcgcccaagggcaagctgccctacgtgcgtatcgagggcgaggcgatcggtgacagcgagatcgtcatccgtaccctcggcgagcgctacggggtcactctcgacgcaggcctggatgcccggggcaagggctgggcacgggcgatcacgcgcctgtgcgacgaacacctgtactacctgatgctgtatttccgctggttcgatgaggacagctggcgcgtgctcaagccggtattcttcggctcgctgccattcggcgtgcgcgacgcggtggcctgggccatgcgccgcaaggtccgcgctaccctcagggcgcagggactcggggtccacggcagggacgaactgctggccttcgcccgcgacgacctcgatgccctcgacggcctgcttggccaggtcccgtactacggcggcgaacatccgtgcagcgccgatgccgccgcttacggtatcctcgccaacctcatcgaggcgaccctggataccccactcagccatgtggcgcgaggctatccgcgcctggtggcgtattgcgagcggatgcgggagcgggtctggagtgagtga

SEQ ID NO: 367263 - DNA, 315 bp, Pseudomonas aeruginosa
gtgagtgaggcgacggccgccacggcggcgatcgggaagtgttggtcggtctacctggtgagggcggaaaacggcgcgttgtactgcggcatcagcgacgatccgctgcgccgcttcgacactcattgcagcggcaagggcgcgcggttcttccattccagccccgcccgcgcgctggtctacgtcgaggcctgcgccagcaagggcgacgccctgcgccgcgagcgggcgatcaaggccctgagcaagcgcgccaaggagcgcctgttggtcggcgtaccggtgttgcgcgaggtcggcgagccggcaatctag

SEQ ID NO: 367264 - DNA, 690 bp, Pseudomonas aeruginosa
gtgggttatctgaagaatcattggtggaaacgctggatccgccgccgcggctgcaagctggccggcggcccggccagtgtcggcaagcgcaccacgctggtgctcgaggagcaggtcgaactcggccacctgcgcatcgtcccgccgaggctggagatcggcgcctacagctatgtgcgcagcggcaccgacctgtccctggtggcgtccatcgggcgtttctgctcgatcggctcggactgcttcatcggccaggaaaaacacacccatcccagcgactgggtgagcagccaccccttccagcacaccggcaccgcgctgcgctacgagccggcgctgagctacgcggaaatcggccacgacgtctggatcgggcacagcgcgatggtgatggaaggtgtcaaggtcgggactggggcgatcatcgccacgcgcgccgtggtcactcgcgacgtgccgccctatgccatcgtcgccgggactccggcgcaggtgatccgctaccggcatccgccggagatcatcgagggcctgctcgcctcacgctggtgggagctggatagcgccttcctcaccggcctgccgctggaccgactccgggagttcctcgccgccctggaggcgcgcgaggcgccgcgtgcggcgtaccggcggatgaccatcacccgccaggggtgccggctggattga

SEQ ID NO: 367265 - DNA, 936 bp, Pseudomonas aeruginosa
atgtcagagctgatcctgcatcactatcccacttcgcccttcgccgagaaggcgcgcctgctgctcggtttcaagcaactgtcctggcgttcggtgatgattccgccggtgatgcccaagccggacctggtggcgctgaccggcggctatcggaagaccccggtgttgcaggtcggcgccgatgtgtattgcgataccgcgttgatcgcccgtcgcctggagcaggaaaaggcggttccggcgctgtttcccgaaggccaggagatggttgccgcgagcttcgcccagtgggccgacgcggtgctgttccagcacgcggtaagcctggcgttcgccccggagtccatcgccgtgcgtttcggcaagctgccgccggaattcctcaaggccttcatggccgatcgcagccagctattcagcggcggcagcgccggccgcctgccgctggaacaggcgcgccaccagtggccggcattcatggcgcgactggagcgccagttgtcgcgcgaggacggcgatttcctgttcggcgaagcgtccgtcgccgacttcgccgtggcgcactgcctgtggttcctcaagggcacgccggtcaccgcgccgctggtcgacgattacccgcaggtgcaggcctggttgggacgggtgctcggcttcggccatggcgcgccagccgagatgagtgcggaggaagccctggaggtggctcgcggcagccagcccgcggcattgccggacgaatccttcagcgaccccaacggtttcctgcccggccaggcggtcgccatcgccgccaccgactacggtgtcgacgcggtacagggcgaactgctcttcgccggcagcgaggaactcatcctgcgccgcgaagacccgcgggcgggtaccgtgcatgtgcatttcccgcgcctgggctttcgcatcgaggcgcgttga

SEQ ID NO: 367266 - DNA, 753 bp, Pseudomonas aeruginosa
atgccggcggagaccccgccgctgcggccggacgccgatccgccgcagtgcgcgttgcccgaggcgaggccggaccgcgacgccggcaccaagctgcgcgccgcagtgctcggtgccaacgatggcctggtgtcgaacctgtgcctggtgatgggcgtggcgggtgcgagcatggcgcattcgtccatcgtcctcaccgggatggccggactggtgtccggggcctgttcgatggccctcggcgagtggctgtcggtgaccaacgcccgcgagatggcgagcaagcgcatcgccgaggaagaacgcctgctcaggctctgcccgaacaccgagacccaggaactgatcgatatcttcactgccaaggggctgagcgaggtgtccgcccggcgcgtggccctgcaactgatgaacgacggtcgtggcgcgctggacaccttgtcccgcgaggccctcggcatcgatccgacggagttgggcggcaacccgtggaacgcggcgggcacgtcgttcctgctgttttcccttggcgccctggtgccggtggcgccgttcctgttcctcgacggtgccgcggcgctggtcgcaagcctgctgttcagcctgcttgcgctgctgttcagcggcgcggtcaccgcccgtttcaccgggcggccgctggcgttctcggcgttgcgccaggtgctggtcggtacccttgccgcggccttcacctatgggttgggcaccgcgctcggcgtgggcctgggctga

SEQ ID NO: 367267 - DNA, 1005 bp, Pseudomonas aeruginosa
atgccgatccatcacgccatcgtccacctgatcgagaagaagcccgacggcaccccggccgtgctccacgcgcgcgacgccgagctgggcgactcccaggccatcgagaacctgctggccgacctcaacgaaagctacaacgccaagaacaaggcctggggcttcttccagggcgagtccggggcctacccgttcagcggctggctcggtgagtacctggagggcgatcgcgacttcgtcggcttcagccgcgaagcggtcgagcacctgcagaagctgatggaggagtccaatctctccaccggcggccacatcctgttcgcccactaccagcaaggcatgaccgactacctggcgatcgccctgctgcaccacagcgaaggcgtggcggtgaacgagtcgctggaggtcaccccgtcgcgccacctggacctcggccagttgcacctggccgcgcggatcaatatctccgaatggcgcaacaacaagcagtcgaagcagtacatctcgttcatcaagggcaagggcgggaagaaggtctccgactatttccgcgacttcatcggctgccaggaaggggtggattcgccgagcgagacgcgcaccctgctgaaagccttcagcgatttcgtggaaagcgaggacatggccgaggaacaggcccgcgagaagaccgagacgctggtcgactacgccacctcccaggcgcgcatcggcgagccgatgaccctcgacgcgctttcggaactgatggacgaccagcaaccgcgggcgttctacgactacatccgtaacaaggactacggcctgtcgccggaaatcccggcggacaagcgcaccctcaaccagttccgccgcttcaccggccgcgccgaaggcctgtcgatcagcttcgaggcgcacctgctgggctccaaggtggaatacgacgaagagcgcgacatgctgatcatccgccagttgccgacccagttgaaggaccagctcaagcggcgcaaggactga

SEQ ID NO: 367268 - DNA, 1356 bp, Pseudomonas aeruginosa
atgaatcgcatcaagcacctgctcaaggacctcgccatcctgatccgcgccaacctctggctgatcccggtgatcgccgccctggtcgccgcggtgttctatttcgtcgccccaccgccgccgatgagcgcgaccatggccaccggcgccgagggcggcggctacgccgtgttcgccggcaagctccgggaaaagctcaaggagcagggcttcgaactgaagctggtgcccagcgccggctcgcgcgacaacctggagcgcctgctcggcaccggcgaggtcgacatcgccctggtccagagcggccaggagcgccagctcgaagccgggcaggcacgccagttgcagaccctcggcgcggtctaccaggagccgctctggctgttccaccgcagcaacgtgcacatcgaccagctcagcgacctgctgcacctgcgcctggccatcggcagcgacggcagcggcacccgcgccgccaccgaggcgatcctgcaggccaacgacatcgccccgggacactatccgatcacctgggaagcccgcggcggcaacgcggtggtcgacgacctgctggccggcaagctggacgcggcgttcatcgtcggcccggcggagaacccggcgatccagaaattggccgacaacgaccagcttcgcctggtcaacttccgccgcagcgccgcctacgaggcgcgcctgccgttcctcaagcgggtcgaggtcggcgagggcctgctcaacctgccgcgcaacgtgccggaacgaaacatcagcaccctgtcgccggtggccaccctggtgatcaacgaacgcttccacccggcgctgatcccgctggtgctggaagccgcgcgcgaggtgatgaaggacggcagcctgctcgacaagcccggcgccttccccagcgccgagccgcgcaccctgcgcctgcacgaggacgccgagcgctactacaagagcggcctgccgctgctgcagcgctacctgccgttccgcatcgcctccctggcggaccgctacatcatcctgctgatcccgttcatcgccatcctcatcccgctgatgaagtccatcggcccgctgtatcgctggcgcatccgcgcgcgcatctaccgctggtaccgctacatccgcgacatcgaccgcaagctcgacagcggtaccgacgccgagcaactgagaagcgagatcgagcggctggagaaactggagagcgagctgaacaccgtggaggtgccgctctcctactaccacgagctgtacgagctgcacctgcacctgaacttcgtgatcaagcgcctgcacggtctgcaggaacgccaggcgacgcaggcagaagccggcaacctcgggtaa

SEQ ID NO: 367269 - DNA, 471 bp, Pseudomonas aeruginosa
atgaatatcagcctgcatttcgaatcgcgcctgcaggccagccccgaacagctctggcggtggataacctcggtggacgggatactccgcgagatacgcccgttgctgagcatgagcgtaccgcccggtatccgcagcctcgaagacctggaggtagtgccccggcgcccgctgttccgcagccacatgcgcctgttcggcttgctgccgctgggcacttcgcaactgaccctgctggagctgacgcccggccacggcttcatcgaacagtcgccgatgaccggcatgcgcctctggcgccacgagcgacgcatcctgccgacaccgggcgaggccggggaatgcctgctggtcgaccagttgaccgtgcgcccgctattcgccgccggactggtacgctggttcctcacccgcatcttccggcatcgccaccgggtgctctgccggcagttccgcacggaccgccggtga

SEQ ID NO: 367270 - DNA, 543 bp, Pseudomonas aeruginosa
atgctgatccgcgccgcaacctcgaccctgctggtggtcgatatccaggaacgcctgctgccggccatcgacgacggcccggcgctggtcgagtacagccagtggttgttgcgcgtggcccgcgcactggacgtgccggtgctggccagcgagcagtacagcaagggcctggggccgacggtggcggccctgcgcgatgagctggacgccacgcagatcctcgagaagctggatttctcggccgccgccgacggtgccctgctgcgcgcgcccggcggcgaccgccggcagttcgtggtttgcggcagcgaggcgcatgtctgcgtgctgcagaccgtgctcgacctgcttggccgtggtcgcgaggtgttcgtcgtggaggaggcgatcggctcgcggcggccgagcgacaaggcactggccgtggagcggatgcgccaggccggggcgatgatcgtgtcgcgggagatggtcgccttcgaatggatggaacgcgccggcagcgaccgcttccgcgagatcagccgcaacttcattcgctga

SEQ ID NO: 367271 - DNA, 897 bp, Pseudomonas aeruginosa
atgagcgacctccctcccctcaccgcgctgcgcagcttcgaagcggtcgcccggctcggcagcatcagccaggccgccagcgagctgcacgtcacccactcggcgatcagccagcagatcaagctgctggaaaacctcctcggcctggccctgttcgtccgcgaggggcgcggcctgcgcctgagcgagaacggccggttctacgccctgcaggtacgcgcctctctgggcgagatcgccgacgccacgcgggtggtgcgggcgcgtccgcgggagggcgagctggtggtaacggtgatgccgtccttcggcctgaactggctgctgccgcgcctgccgcgctttcgcgagcgccatccgcactgtcgcgtgcggctggtggccagtctcgacgtgcagaacctgcgccagggcctggccgacctcggcgtacgcatcggcaagggcgactgggaaggggtcggtcgggaacgcctgttcgacgacgagttgctgatggtcgccgcgcccgacttcaacggcggccgcctgccgcgcacgccgagcgagatcgtcgcctgccctaccctgcgctccaccgaatcctgggcgctctggtgccagcgtgccggcgtggcggaaccgcagcacggactgctgatcaacgactcgaacctgctgctggaagccgtgcgcctaggccagggcatcgccctggaacgtcgcagcctggtcgccggcgccctcgccgagggccgcctggtgcaactgggcggcatccgcgtgccctacccctatccctactggctggtctggccgcagcgcgagccgccgagcgaccgccaccaggccttcgccgactggctgcgcgaggaggcccggcgctaccaggccgagcaaccgccgctcagcgaatga

SEQ ID NO: 367272 - DNA, 612 bp, Pseudomonas aeruginosa
atgcaactgatcggtatgctggattcgccttttgtgcgccgggtcgccatcgccctgcgcctgctggacctgccctacgagcaccggccgctgtcggtgttccgcaatttcgaggcgttcagcctgttcaacccgatggtcaaggcgcccacgctggtgctggacgatggcaccgtgctgatggactccagcctgatcctcgattacctggagtgcctggccggccgcgaacgcagtctgctgccgcaacggccgcaggcccgtgcacgggcgctgagtctgatcggcgcggcgctggtggcctgcgagaaatccgtgcagatctactacgaactgaacctgcgtcccgaggaacgccgccatggcccctggctggagcgggtggaggggcagttgctggcggcctacgactggctggaggcagcgctgcgccaggagccgctggcacgcgacggcggcatcgagctggtcggggtgactgttgcagtggcctggcgcttcagccaactggtggtcgcggagcgggtcgccgccagcgaatacccggaactggcaagctattcggattatgcggaagggttgccggtgttcctcgagacgccgccggtctga

SEQ ID NO: 367273 - DNA, 123 bp, Pseudomonas aeruginosa; identical to SEQ ID NO: 319710

SEQ ID NO: 367274 - DNA, 351 bp, Pseudomonas aeruginosa
atgaatccactctaccgcgccaccatccaccagctttttctcgctctcgatctcccgacgcccaatgacgaggagagcgtactcagcctgcaggtgggcccgcatctctgccatctggcagaacatccgaccgatcacctgttgatgttcacccgcctggaaggacaaggagacgctacggccagcgagcagaacctgttcagccaggacccttgcaagccgatcctgggccgcgaccccgaaagcggcgaacggctgctctggaaccgccagcccttgcagttgctggacagggcccagatccaccatcaactcgaacaactggtcgccgccgccgaagagctgcgctga

SEQ ID NO: 367275 - DNA, 1362 bp, Pseudomonas aeruginosa
atgcatattcaatcgctccagcagagtccgtctttcgccgtcgaattgcaccaggccgccagtgggcgtttgggacagattgaggcccgccaggtcgccacccccagtgaagcgcagcagttggcccagcgccaggacgcgccgaagggtgaggggctgctcgctcgcctgggcgcggcactcgtgcgtcccttcgtggcgatcatggactggctgggcaaactgttgggctcccacgcccgcaccggcccgcagcccagtcaggacgcgcagcctgcggtcatgtcctcggccgtcgtgttcaagcagatggtgctgcagcaggcattgcccatgaccttgaagggactcgacaaggcgagcgagctggcgaccctgacaccggaaggactggcccgggagcactcccgcctggccagcggagatggggcgctgcgttcgctgagcaccgccttggccggaattcgtgccggcagccaggtcgaggagtcccgtatccaggctggccgcctgctcgaacggagcatcggcgggatcgcgctgcagcagtggggcaccaccggcggtgccgcgagtcaactggtgctcgacgcaagcccggaactgcggcgcgaaatcaccgaccagttgcatcaggtaatgagcgaggtcgcactgttgcgccaagcggtagagagcgaggtcagcagagtatcggccgacaaggcgctggcggatggcctggtgaagcggttcggggcggatgcggaaaagtacctgggcagacagcctggtggcatccacagtgacgccgaagtgatggcgcttggtctctacaccggcattcactacgcggacctgaatcgcgctctgcgtcaggggcaggagctggatgcgggacaaaagctgatcgaccaaggtatgtccgcggccttcgagaagagcggacaggctgaacaggtagtgaagactttccgtggcacccgtggtggggatgccttcaacgccgtggaagagggcaaggttggccacgacgacggctatctctccacctccctgaaccccggtgtcgcgaggagcttcgggcagggcacgatatccaccgtgttcggcaggtccggaatcgatgtcagcgggatatcgaactacaagaatgaaaaagagattctctataacaaagaaaccgacatgcgcgtgctgctgagcgccagcgatgagcagggagtgacccgccgggttctcgaagaggcggccctgggggagcagagtggccatagccagggactgctcgatgctctcgacctggcaagcaaaccgggacgttcaggcgaggtccaggaacaggatgtacgcctgaggatgcgtggcctcgatctggcctga

SEQ ID NO: 367276 - DNA, 1011 bp, Pseudomonas aeruginosa
atgccccgcccgaccagcccgcatcccgacgccgagcgcaagagcgccagcccgctgcacccgcgcaatcgccacctgggacgctacgactttccgcgcctgatcgccggcagcccggaactggagcgcttcgtcatcctcaatccgtacggcaggcagagcatcgacttcgctgatccggcggcggtgaaagccttcaaccgcgcgctgctgcaacagttctacgacgtacgcgagtgggatatacccgatggttacctgtgcccgcccattcccggtcgcgccgactacctgcactacctggccgacctgctcggcgccagccacgatggcctgattccacgcggtcccggcctgcgtgcgctggacgtcggaaccggagccaactgcatctacccgctgctcggccaccacgaatacggctggcgcttcgtcggcgccgacatcgacccgcaatcgctggcctcggccgctgcgatcctcgccgccaacccacgcttcgccgctgccatcgagttgcgccggcagcctgatcgcaggcagatattccagggcctgatcggcgtcgatgagcgcttcgacatgaccctctgcaacccgcccttccacgcctcgctggacgaagccacgcgcggcagccggcgcaagtggaagaacctcggcaagctcgacccgacccgtaccctgccgctactgaactttggcggccagggcgccgagctgtactgcgagggcggcgaagcggccttcctggccggcatggccgaggaaagccgggcgttcgccacgcaggtgttctggttcaccaccctggtatccaaggcgagcaacctgccgaacctccaggagcgcctgaagacgttgggcgccagcgatatccgcgtggtggacatggcccagggacagaagcagagccgcttcgtcgcctggacctacctcgacaagaagcagcgccgggcctggcgcaaggagcgctggacagcagccctcctggaaccactgggcgaatag

SEQ ID NO: 367277 - DNA, 795 bp, Pseudomonas aeruginosa
atgctcagcgcgaagaacctgaagatcaccttcaaccccggcacccccatcgagacccgcgccctgcgcggcctgtcgctggacatcccggccggccagttcgtcaccgtgatcggctccaacggcgccggcaagtcgaccttcctcaacgcagtctccggcgacctgccgatcgacagcggacagatcctgatcgacgacgaagacgtcacccgcaagccggtctgggcccgcgccaaccgcgtcgcgcgggtgttccaggaccccatggcgggtacctgcgaggacctcaccatcgaggagaacatggccctggcgcaacgtcgcggtgccgggcgcggcctcggcagggcggtgcaggcatcgatgcgcgacggtttccgggaaagcctggcgaccctcggcctcggcctggagaaccgcctcggcgaccgcatcggcctgctctccggcggccagcgccaggccgtcagcctgctgatggcggcgctgcagccgtcgcgtatcctgttgctcgacgaacacaccgcggcgctcgacccgcgcaccgccgacttcgtcctgcatctcaccgcacggatcgtcgccgagaagaaactcaccaccatgatggtcacccacagcatgcgccaggcgctggacgtgggcgagcgcacggtgatgctgcaccagggccaggtggtgctggacgtctccggcgagcaacgcaagggcctcgacgtaccggacctgctggcaatgttcgagaaggtgcgcggcgagaagctcgccgacgacgccctcctcctcggctga

SEQ ID NO: 367278 - DNA, 891 bp, Pseudomonas aeruginosa; identical to SEQ ID NO: 319704

SEQ ID NO: 367279 - DNA, 978 bp, Pseudomonas aeruginosa
atgatgcaggcctataagaataaatggttgcccctcagtgccctggcccttggcatggccctgtccttcggcgccaacgccgaagagcagaagtcggtggccgtgaccgccatcgtcgagcacccggcgctggacgccgctcgcgacggggtcaaggaggccctccaggaggccggctacgaagacggcaagaacctcaagtggcagtaccagagcgcccagggcaacaccggcaccgccgcgcagatcgcccgcaagttcatcggcgacaagcccgacgtgatcgtcggcatcgccactccgtcggcccaggcgctggtggccgcgaccaagagcatcccgatcgtcttcagcaccgtcaccgacccggtcggcgcgcacctgacgccgagctgggaagcctccggcaccaacgtcaccggggtttccgacatgctcgcgctggacaagcagatcgagctgatcaagaaagtggtgccgggcgccaagcgcatcggcatggtctacaacccgggcgaagccaactccgtggtggtggtcaaggagctgaaggaactgctgccgaagatgggcctgagcctggtcgaagcctcggcaccgcgttcggtggacgtcagctcggcggcgcgcagcctggtcggcaaggtcgacgcgatctacaccaacaccgacaacaacgtggtgtccgcctacgaggcgctggtcaaggtcggcaacgacgcgaagatcccgctgatcgcctccgacaccgacagcgtcaagcgcggcgccatcgccgccctcggcattaactacaaggagatgggcaagcagaccggccgcatggtggtgcgcatcctcaagggcgagaagccgggcgagatcaagccggagaccagcgacaacctgcagctgttcgtcaatcccggggccgcgcagaagcaaggcgtgaccctgtccgacgaactgctcaagtcggccgcggaagtcatcaagtaa

SEQ ID NO: 367280 - DNA, 414 bp, Pseudomonas aeruginosa
atgctcacgaccatcggccgtttttcccatcccctggaggcgcagatcgctcgcgcccgcctggaggccgctggaattccggcgttcgtcgccgacgagcacaccatcaacatgcagtggctgtactccaacgcactgggcggcgtgcgcctgcaagtgcccatggtctgtcgcgaagacgcggtggcgctgctggccaccgatgaaagcgaggcgctgcgggccgagcagggcagcagcgagttccagtgcttgcgttgtggcagcgaccaggtggcctggaaggtggacggccgccgcctggccttccttgggatcctgctgctcaacgtaccgctgtggccgatccggcgtcggttggtgtgcgaggtctgcggtttccgcagcgaagtaccgatgcctctaagcgagtga

SEQ ID NO: 367281 - DNA, 2853 bp, Pseudomonas aeruginosa
atggacaagacttaccagccgcacgccatcgagacttcctggtacgagacctgggagtccaacgactacttcgctccgagcggcgaaggccagccctacaccatcatgatcccgccgccgaacgtgaccggcagcctgcacatgggccatggcttcaacaacgcgatcatggacgcgctgatccgctaccgccgcatgcagggccgcaacaccctgtggcagccgggcaccgatcacgccggcatcgccacccagatggtggtcgagcgccagctcggcgcccagggcgtgagccgccacgacctcggccgggagaagttcctggagaaagtctgggaatggaaggaacagtccggcggcaacatcacccggcagattcgtcgcctgggctcctcggtggactggtcgcgcgagcgcttcaccatggacgacggcctctccgaagcggtcaaggaagccttcgtgcgcctgcatgaagacggcctgatctaccgcggcaaacgcctggtgaactgggacaccaagctgcacaccgcgatttccgacctggaagtggaaaaccacgacgagaagggccacctctggcacctgcgctacccgctggtgaacggcgcgaagaccagcgaaggcctggattacctggtggtcgccaccacccgtccggaaaccctgctgggcgacgccgcggtcgcggtgcacccggaagacgagcgctacgccaagctgatcggccagttcgccgaactgccgatcgtcggccggcacatcccgatcatcgccgacgagtacgtcgaccgcgaattcggcaccggctgcgtgaagatcaccccggcccacgacttcaacgactacgaagtgggcaagcgccacgacctgccgctgatcaacatcttcgacaagaacgccgcggtgctggcccaggcccaggtgttccacctcgacggcagcgtcaacccgaacctcgaccccagcctgccgcagagctacgccggcatggaccgcttcgccgcgcgcaaggccatcgtcgccgagttcgaggccatgggcttgctcgagaaggtcgacgaccacgcgctgaaagtaccgaagggcgaccgctccggcaccgtcatcgagccctggctgaccgaccagtggtacgtcagcaccaagccgctggccgaagacgccatcgccgccgtggaagacggccgtatccagttcgtgcccaagcagtacgagaacatgtacttctcctggatgcgcgacatccaggactggtgcatcagccgccagctctggtggggccaccgcatcccggcctggtacgacgaggccggcaacgtctacgtcggccgcgacgaggtcgaggtgcgcaccaagcacaagctcggcaacgaggtcgagttgcgccaggacgaagacgttctcgacacctggttcagctccggcctgtggaccttctccaccctcggctggccgcagcagaccgagttcctcaagaccttccaccccaccgacgtactggtcaccggcttcgacatcatcttcttctgggtcgcgcggatgatcatgctcaccatgcacctggtgaagaaccccgacggcaccccgcagatcccgttcaagaccgtctatgtccacggcctggtgcgcgacggccagggccagaagatgtccaagtccaagggcaacgtactcgacccgctggacatcgtcgacggcatcgacctcgataccctgctgcaaaagcgcaccagcggcatgatgcagccgaagctggcggagaagatcgccaagcagacccgcgccgaattccccgaaggcatcgccagctacggcaccgacgccctgcgcttcaccttctgctcgctggcctccaccggccgcgacatcaagttcgacatgggccgcgtcgaaggcttccgcaacttctgcaacaagatctggaacgccgccaacttcgtcatcgagaacaccgatggccaggacaccggggtcaacggcgagccggtcgagctgtcctcggtcgaccgctggatcatctcccagttgcagcgcaccgagcaggaagtcacccgccagctcgacgccttccgcttcgacctggccgcccaggccctctatgagttcatctgggacgagtactgcgcctggtacctggagctggtcaagccggtgctgtgggacgagaacgcccccatcgagcgccagcgcggcactcgtcgcaccctgatccgcgtgctggagacggccctgcgcctggcgcacccgttcatgccgttcatcaccgaggaaatctggcagcgcatcaagggccaggccggcaaggaaggtccgaccctgatgctgcaaccctggccggtggccgacgaaggcaggatcgacgccgccgccgaaggcgacatcgagtgggtcaaggcgctgatgctaggtgtgcggcagatccgcggcgagatgaacatctccatggccaagcgcatcgacatcatcctcaggaacgcctcgcccagcgaccaccgccgcctggccgacaacgagccgctgctgatgaaactggccaagctggaaagcatccgcgtgctggaagccggcgaggaagcgccgatgtccgccaccgccctggtcggcgacatggaagtattggtgccgatggccggcctgatcgacaagagcgccgaactggggcgcctggacaaggagatccagcgcctggaaggcgaggtcaagcgcgtcggcggcaagctgtccaacgaaggcttcgtcgccaaggccccggccgacgtgatcgacaaggaacgcgccaagctcgccgaggccgaacaggccctggccaagctggccgagcaacggcagaagatcgccgcgctctaa

SEQ ID NO: 367282 - DNA, 369 bp, Pseudomonas aeruginosa; identical to SEQ ID NO: 319700

SEQ ID NO: 367283 - DNA, 429 bp, Pseudomonas aeruginosa; identical to SEQ ID NO: 319699

SEQ ID NO: 367284 - DNA, 813 bp, Pseudomonas aeruginosa; identical to SEQ ID NO: 319697

SEQ ID NO: 367285 - DNA, 159 bp, Pseudomonas aeruginosa
atgcatccttctcgcgaaatgaccgaggctacagctagctatgtcaatagcgtgctgggcaagcaagtgtcggtatggaacaaaaagaacagaaagtactttgactggcatttcaatgctcatgggtttgaacctgcagagctggcaaacataaattga

SEQ ID NO: 367286 - DNA, 609 bp, Pseudomonas aeruginosa
atgcgttcgctggcgcggaagtcggcggaaaacaggccgccatcggcatcgaggatcgccaccagggtgacccgtgggaagtggtgccccttggcgagcatctgggtgccgaccaggatgcatggctcaccgctgttgatggtggcgaagaggtcgcgcatggcgtgcttgcgcgaggtgctgtcgcggtcgatgcgcagcaccggatggttcgggaagagaatccgcaggcgttcctcggcgcgctcggtgccggcgcctaccggacgcaggtcgagcttgccgcattgcgggcagttcatcggcggccgctggcggtggtcgcagtggtggcagcgcaactcgccgctgccctggtgcacggtcatccgcgcgtcgcagcgcgggcattggctgatccagccgcagtcgtggcaaagcagggtcggagcgaagccgcggcggttgaggaacaccaggacctgctggccggccgccagggtatcgccgatggcctgttgcagcgggcgggaaaggccggcgtcgagcggcatgctcttcacgtcgaggcggatgaacttcggcgggtgcgcgccaccggcgcgctgggtcaggcgcagcaggccgtag

SEQ ID NO: 367287 - DNA, 1212 bp, Pseudomonas aeruginosa
atgaacaacagcttctggaaggccggccatgcgccgaccctgttcgcggcgtttctctatttcgacctgagcttcatggtctggtacgtgctcggcccgctgggggtgcagattgccggcgacctgcaactgagcacccaacagcgcgcgatgatggtcgccacgccgatcctcgccggcgccgtactgcgcttcctgctcggcctgctggccgatcgctggtcgccgaagagcgccggcatcctcgcccaggtcatcgtcatcgccgccctggcggccgcctggctgctgggcgtgaacagctatgcgcaggcactgctgctggggttgttcctcggcttcgccggggcatccttcgccgtggccctgccgctcgcatcgcaatggtacccgccgcaacaccagggcaaggccatgggcatcgccggcgcgggcaactccggcaccgtgctcgccgccctcttcgcccccggcctggccgccgcgttcggctggaacaacgtgttcggcttcgccctgctgccgctcgtcctgaccctcctggtgttcgccatggtcgcgcgcaacgccccgcagcggccggcgcccaaggccatgggcgattacctgaaagccctcggcgaccgcgacagctggtggttcatgttcttctacagcgtcaccttcggcggcttcctcggcctggccagcaccctgcccggctatttccacgaccagtacggcctgaacccggtgaccgccggctactacaccgccgcctgcgtcttcgccggcagcctgatgcgcccgctcggtggcgccctcgccgatcgcatcggcggcatccgcagcctgctgatggtgtacaccctggccgccatctgcatcgccgcggtcggtttccacttgcccagcgcgatggccgccctcggcctgttcgtggtcgccatgctcagtctcggtgccggcaatggcgcggtgttccagttggtaccgcagcgcttccacaaggaaatcggcgtgatgaccgggctgatcggcatggccggcggcatcggcggcttctgcctgactgccggcctcggcgcgatcaagcaaagcaccggcgactaccagctcggcctgtggctgttcgccagtctcggcgtgctggcctggttcggcctccacggggtgaagcggcgctggcgcaccacctggggctcggccgcggtcaccgccgcgcgggtctga

SEQ ID NO: 367288 - DNA, 273 bp, Pseudomonas aeruginosa
atgagccgcaccgtgatgtgccgcaagtaccacgaagagctgcccggcctcgaccgtccgccgtatcctggcgcgaagggcgaggacatctacaacaacgtgtcgcgcaaggcctgggacgagtggcagaagcaccagaccatgctgatcaacgagcgtcgcctgaacatgatgaacgccgaggaccgcaagttcctccagcaggagatggacaagttcctctccggcgaggactacgccaaggccgacggctacgtgccgccatccgcctga

SEQ ID NO: 367289 - DNA, 174 bp, Pseudomonas aeruginosa
atggcccgcgccagcaccgacgcggcgccgccgccgagggcctggagcaccctcagcaggaccagttgccccgcgctgtcggccagcgcgcaggccaggctgctgaacaggtacaaggcgataccggccagcagcaccgggcgccggccgaaacggtcggacaaggggccgtag

SEQ ID NO: 367290 - DNA, 1023 bp, Pseudomonas aeruginosa
atgcaggtcggcctcgcggctggccagcagctcggcgagcaggtgggcgcccatcagcccgctggcgccggtgagcaggatgtgccgtggcgcgagcaattgggcggtgtccatgggccggctgaaatccacgtcggcgggcaggcgcacgtcccgttgcagctcctgggccggttcgctgtccagcgccggcggcgcttcgccggcgcgccgcgccaggctggccgccagttggcgcacgctcggggtgcggtagatgtcgtggatgtaggcacggttgccgaagcgtcggctcagttcgcgcaccagggcggcggccagcagggaatggccgccgacctcgaagaagctgtcgtccaggccgaagtcggtatgccccagcacttcctgccaggccagagccacttgcagttcgccgggagtgccgaagcgttgctcgtcgagtcgttcctggcattgttcctccaggcgtcgacgcagggcctggcggtcgatcttgccgttgaccgtggtcggcaggctgtccagcgacagatagcggctgggcagcatgtagtcgggcagttcctggcgcagggcggtcttgatggcggcgagcacggccctggcatcgccgccccgctggcgggggaccacgaaggcgctcaattgctggctaccgcagcgtgggtcggcatgcgccagcaccaccgcgccatggatcgccggctggcgcagcagcgcggcttcgacgtcgccgagttcgacgcggtggccgcggatcttcacctggtcgtccagccgaccgaggaactgcaggctgccgtcggccagccagcgggccttgtcgccggtgcgatagagccggcgccgcagtgcctgcgagtagtggaagcgcctggcggtcatgtccgggtcgcgcaggtattcgcgcgccaggcagacgcccgccaggttcagctcgccgggccggtcgccatggcaaggccggtcgtcggcgtcgagaatgaatgcctcgcaaccgtcgatgggcgtgccgattga

SEQ ID NO: 367291 - DNA, 465 bp, Pseudomonas aeruginosa; identical to SEQ ID NO: 361983

SEQ ID NO: 367292 - DNA, 1245 bp, Pseudomonas aeruginosa; identical to SEQ ID NO: 325666

SEQ ID NO: 367293 - DNA, 750 bp, Pseudomonas aeruginosa; identical to SEQ ID NO: 325665

SEQ ID NO: 367294 - DNA, 1320 bp, Pseudomonas aeruginosa
gtggcgatagggcgcctggttggcgtcgaccagggcgacgaaggtctcgctgccgacgtaggtcgagcgcgggcccttgcgccgctgcttgctggacagcacgcgcggttcgcggcgcacgctgaagtaggcctgctcgcggccgtagcgcgccgggtcgcgcaccgcgtagaacggttggaagggttgctccggaccgctgccgtggccgctcacctgttgcagcgaatgcacctcgaaatccagcggacgggtgcggtcgacgatcacatgatgctcgttgacccggtcggacaggtggatgcggtcgcagcggcgcgggaacaggttgatcgccggggtgcagaacggcaccagttgctccgcgtccaccgtgccctccaggcgctggtcgtgcttgccgaacagcacgaccagttccagctcctcgccgtggcatcgacgcagggcgcggttcaggccggagaactcgacgaacaggaagcgcgccggcagggcgaagtattcctgcagcaggcggtagccctggaacgcccgcggcaccaccggcagcagcgcgtcctcgtcgtcgaagccacgcgcacgcaggctgctcgtcggcaggcgttcgacccaggcattgtccggggcgcggacgaacaccgcgcaggcgttgccgagcaattgttcgtagaggcggtagggttgttcgtcggcgccgtgcaggtagagcggcagggcgtccagcgacaggctgtcgaacgggataccggcgccgctgcgcaggcggatgcgcaggccggccttggcccgcggctcgctggcggcgaggcggccgagcaccgcggcgggattgccgaagtagtcggcctgggccacttccagcggccacagggtcaccgggtgggcggtgcggtattcgcaggcggtctggtcatcggggccgagctggccgcgcagggaggccccgcgctcgacgctgaagccgctgctcagggcgccttcgttggggtccgggcgcagctgcaccacggtcatcgacggagtcggcgccaggtagtgcgggtaggcgatttccagcaggttgtgggtgaaggtcgggtactccgcgtcgagcttcagctggacccgcgcggtgagataggcgaagccttccagcaggcgctcgacgtaggggtcggcgcactcgaagccggacagcgacaggcgcccggcgatcttcgggaactcctcggcgaactccgcggcgctttcgcggatgtgttgcaattcctggttgtagtactcgagcaggcgcgggttcatgtacgcctccgctcgccctgggcgacgcgcacgtga

SEQ ID NO: 367295 - DNA, 372 bp, Pseudomonas aeruginosa; identical to SEQ ID NO: 319306

SEQ ID NO: 367296 - DNA, 561 bp, Pseudomonas aeruginosa; identical to SEQ ID NO: 319307

SEQ ID NO: 367297 - DNA, 1569 bp, Pseudomonas aeruginosa
gtgactgaccaggcggtcgacgcgcaggacctgggcatccatgcgctccagtttctcgcccaggtagtcgccgtcgaggccgacgctgttcatccgctggcgcatgttgaacagggtcatgcgcagcacgtgcagcggctgcttcacctcgtgggcgaggccgctgaccatctcccccaggctggccatcttggcgccttgcgccagttgctgctgggcccggcgcaccggcgtgttgtcgcgccccaccgcctgtacctcgcacaattcgccacgggcgtcgaacaacggccgctcggcccacaccagccagagaaaacgttgccccggcaggttgaagcgcagctccggcacctcgctggcgccctcccgcggcgagcccagcagacgcgcgcgcaaggcgctggcgtcttccgccgccagccactcgtcgagccggcgaccgaccaggcgctccgggctggtcgcgaggctatcggcgaaggtccggttcacgtaggtcagcaccaggtcggcggtatagcgacagatcagcgccggcgaatcctccaccaggacccggtagcgttcctcgctctcggcgatacgctgtgccgccaggtgctgctcggtcacgtccagccacaggcccaccgcttcgctgggcaggccctgggcatcgcgcagcagcttggcttcgtcgtagagccagtgccagttgccctggccatcggcgaggcgatagcgggtcttcacccggccctcgcgaagcaactcgcggccacgggcgaaaaaggcctccagatcatccggatgcacccgttcggcgagcgcctgccaactctgtccctgcaagtcgaggccgagcaggttgctcgcgctttcgctgtagaactccggcaccaggtgtccctgctcgacccgctggacgtagatcaccaccggcgcgctgtcgatcaggctgcgcagccgcgcgtgggccgcctgtgcccgttcctcctggcgccggccttcgctgatgtcgagcagcacgccggacagccccagcgcgctgccgcgccccagcggtcggccctcgatgcgcagccagcggcgctcgccgcagctatccggctgacgcaggcaaaggtcctgggccagcgcctggccgctgcgcaggctggcacgcaggcgcaggccgagttcgtcggcgtccgccggttgcagcaggccctgcaggtgttccagcggcacccgacgatactcgccggtcaaccccaggctgtcgtgcaaggccggcgccagttcgaagagttcctgctccgcccagtaacgccaccagccgccgccgatcatctcctgcaacagccccagcttgcgcgaactgtcgtgctgctcgtggagttcgcagcggtccgccacctggttcgccagcagttccgcgaggtattgccagtcctgcggcgcgggcccctgggcgagctgctccagcgacatcggccgcaccagcaatgcccccaggcggccaccgcgcatcgccgccggcaccaggtagagcgcgtcctcgccgatctgccggagcagcgtcgaggcgccttcgccacggcgtag

SEQ ID NO: 367298 - DNA, 720 bp, Pseudomonas aeruginosa
atgtatagcaaggcgcaagcgcagaactcccaggagcaactgatccagcgttacgcaccactggtcaagcgcatcgcctatcacctgctcggccgcctgccggccagcgtgcaggtggaggacctgatgcaggccggcatgatcggcctgctcgaggccgcgaagaaatacgacgccggcaagggcgccagcttcgagacctatgccggcatccgcatccgcggggccatgctcgacgaggtccgcaagggcgactgggcgcctcgttcggtgcaccgcaacacgcgcatggtgaccgacgcgatccgcgcgatcgaggcgagaaccggacgcgacgctaaagatcacgaagttgctgccgaactccaattgagcctcgaagattactacggcatcctcagcgacacgcagggcagccgcctgtacagcttcgacgacctgttgcaggacggcgaacatggattgccggaagacaccagcctcagtcacaacgaaccgatccacggcctgctcgacgaacgtttccaggcggccctggcggatgccatcgccaagttgccggagcgcgagcgcctggtgctggcgttgtattacgacgaggaactcaacctcaaggagatcggcgaggtactgggcgtcagcgaatcgcgggtcagccagttgcacagccagtgcgccgcgcgtttgcgtgcgcgcctggccgattggcggtcggcctga

SEQ ID NO: 367299 - DNA, 849 bp, Pseudomonas aeruginosa
atgcgaagcctgatcgggatgacgttcctgaactcctccgtgggccagcgccggctgcgccagcacttcctctgcgtgcccctggaacacctgctcgagagccccgctccagcctgcttgcggatcgccctgagcgtcgacggcaaccctgcggaactggccgagctggtctacccgctgctggagcgctacgaaatgccagcgagcgccttcatcggcggcgacccgcgcagttggcgcgaagcggtcgccgacaccctctggcaggccgatgcggctaccgccgagccattgctggaactgctggagcgttacggcggcgctgcgctcatgcgggtgctcgaacgcaccggcgacgaccagcgtcgcagccgtagcctcgacctcctcctgcgcaagctggaacgcctcgacccggcttcgcagcaggccttgcgcgcggcctgcacggcccccgcggcgtacggcgcgggcgattgggaacgggtccgccgcctagaaaacagcggcctggttcgcttcggcctgcacggccaggacccgcacccagcgacaggcctttgcgccgaggactgtctcggccgcgcccaccgccagctccagcagcattgcgccgcccctctgccggtgttctgccaagctcgcgccacgcccgccgcgacgcctgcgcaacccggcctgcgcgccgccctcggccggcttggctaccgcttcgccttcggcgcgcgcaatggcctggtggatacccgttgcgacccgctggacctgccgcgcatcgaggtggacgcggcgatcgccgcccgtcccggccggctggcctggcgcatctatcgtggagcccgtccatga

SEQ ID NO: 367300 - DNA, 369 bp, Pseudomonas aeruginosa
  misc_feature (354)..(363): n is a, c, g, or t
gtgcgcctgtgcgacaacggccaggtggaatatgtcggccgcatcgaccaccaggtgaagatccgtggcttccgcatcgaactgggcgagatcgaggcgcgcctgctggagcatccgcaggttcgcgaagcgctggtcctggcgctcgacagcccgagcggcaagcagttggccggttatgtcgccagcgcggtggccgagcaggacgaggacgcccaggcggcgctgcgcgaggcgctgaaaacgcacctcaagcagcaattgccggactacatggtgccggcccacctgctgttgctcgccagcctgccgctgaccgccaacggcaagctcgaccgccgcgcgctgccggcnnnnnnnnnntcgtag

SEQ ID NO: 367301 - DNA, 1497 bp, Pseudomonas aeruginosa
gtgtataagagacaggacgaacaccgccgcgaacgccccatagagggacagcggctgccagccgtcgtcgagcaggagcccggccaccagcggcgagaggatcgccccaccgcgaccgacgccgatcccccagccgaccccggtggcgcgcaccgaggcgtcgtagaggctcggcgccagggcatacaggccggccacgcaggcgttggcgcaaagcccgatcagcagtcccagcggcaaggccgcgccgggcagcccggcgctcagcgagaacagcgcgagcagagcggcggtaagcagcatgaacagcgccagcacccgttccaggcgaaagcgcgcggcaagcccgccgagcaaggcggcaccgaagatcccgccgatgctcagcagggtgccgccggtgatgccctgggcggtggacaggccggcggcgaccagcagcttcggcgtccagctcatgatgaagtagaagccgaacatcaccaggaagaacagcgcccagagcagcagcgtggtgcgtcgctgggcgacgcagagcaaccgggcgaggcggctaccgtgctccgctccgccgccaggcgggctcggcagttcggcgagcgccgcgcggcccaggcgccgggccagcgcgttgacccgttgcaacgcccgcggcggccggcgcgccaggaggaagtccagcgactccggcaggcacaggcagaccagcgggatcaccgccagggtcaggccagcgccgaagacgaacaccgagcgccagccccaggcgccgatcagccataccgcgagcagtccgccaagggtcgcgccgagcgcgtagccggtggattgcaggcttaccgccaggccgcgccaacggcgcgaggcgtactcgctggcgatcacgttgctgctggcgaggatgccgccgatacccagcccggtcagcccgcgcagcaacgccagttgccaggccgcctggctcagcgccgaggcgagcatgcccaggcccgacagcgccaggcaggcgaggatcagcgggcggcgcccccagcggtcggcccagggcgcgatgaacagcgagccggcggccatgccgaaaaggccggcgctgagcagcaggccgatctcggcgccgcccaggttccattcggcggccaccgaagatgcggtgaaggccatcaccagcacgtcgaagccatcgatcaggttgagcacgatgcacacagccaccgccagccactggaacggccgcatcggttcgtcgtcgagagcgcggcgcaagtcccggttcatgggcggccctccccgagcggacaggaaagaagcgacggcaggcgggagcgaggcgcgggaatgcaggaatccatcatcgggaagaccctttttcttgttgttgtaggcacggcaagcgcaggcaccctggcaccgttgcgtcgatgccgcaatcctattggatccatttgtgcgacaagaaaacggaaggccagcggatattccactgtcagcgaaatctga

SEQ ID NO: 367302 - DNA, 1635 bp, Pseudomonas aeruginosa; identical to SEQ ID NO: 327732

SEQ ID NO: 367303 - DNA, 408 bp, Pseudomonas aeruginosa; identical to SEQ ID NO: 325648

SEQ ID NO: 367304 - DNA, 897 bp, Pseudomonas aeruginosa
atggaggttgccgccaccgagcatgccgccgccgctcaggcgcgcgcgctgctggtcgccctcgttgccctcgccgccgctgtcgccggtgatcagcccgcgcagggcctgggccaggcgggtcgcctgggcgttgcgcaagtagaccacatggaggttgccgggattgctttgcacgctgtccagcttgccgatcaggtcgcgcgccaattgcgtgcgctccgggctcggcgagcggatcacgatgctgttggagcgtgggtcggcgagcaccacggtcttctggccctgctcggcgccgccgctgccctggctgtcgagcagttcggagacggtgctggcgatgtccaccgcgataccgttctggatcggcaccacgtcggtgtcgctggcgctggggatgtcgatgctggcgatgatcccggcgacccgatcgaggttttccgcgtagtcggtgaccaccacggtgttgttccccggataggcattgatcgggttgttctgcgcgacgatcgggcgcagcaccgggatcaggttcaccgcgttctcgtaacgcaggcggaaggtccgcgtgaccatgccgttggccgccggccggtcggcgccgtagaccggcccgccgagcagcttggcgtcggcctccggcaccacctggctgaccccgtcgacgtcgaccacgctgaagccctgcatgcgcagggcgctggtgagcatgcggtaggcggtgcgcgccggcacctggccttcggaaaccagggtcagcttgcccttcacccgcgggtcgaccaggaactgccggccggtggcgcgcgacagcgcgcgcaccaccgcttccacctcggtatcgacgaaattcaggctgaccggctgctcgccgagttcggccgctgccgctga

SEQ ID NO: 367305 - DNA, 666 bp, Pseudomonas aeruginosa
atgccggtaatagtgcagcaccacggcaacccagtccggcccggagaaggcctgggcggcctcctggaaatcgcgctcggcataccatcccggcggcgaccaggtgtcccacatctgccgggcgaacgcctcgccctcctcgcgcagcgcgcgctctccgcgtggcgtagccatgaaccactggtaccagaagctacgggcctgcggcagggaaagaacttgctgcggatcgttgctggcgtaccccaccgagagcatcaccaggtgcgaggcgccgccctcgcgcagtccgcaggcactggccaccgcgcgagccccccagtcatggccgaccagcaggggacgttgcaatgccaggctgtcgacgaatgccagcacatcgcaagccagagccgccagttgcccgctgcgcggagtagacgcatcgcggaagcgggtcggggcgaatccccggagggctggtgccagcacccgatagccggcgtccgccagggactccgccaggtctttccaggtatgcgggctgtccggccaaccgtgcaacaagacggcgctgcgcgccccctgcggattccactccaggtaggcgatatccaggacatcggtggaaacgaaggcatagcggctcatcggacctctccaagagaaagcgaagggacatcctag

SEQ ID NO: 367306 - DNA, 312 bp, Pseudomonas aeruginosa; identical to SEQ ID NO: 325389

SEQ ID NO: 367307 - DNA, 849 bp, Pseudomonas aeruginosa
gtggaccagcagcacgttgcccgccaggcgcgccggcgcggtcacctgctgcttgaagaaggtgaggatgttggccgccttgctctggtcgaggtcaggcatgttctgcgggaacgccaccgactcctcgaagcggatcggcgtgaagctgccgttggtctgcggggtggcctggacgatgatgcgcttgaggttgccgccgcggtagcgggtgatgtggttccagagcacttcgacaccgttcttcgggatcgggaaggcgtagtagcggctcttctcgaaattcgacaggccgttgccgtcgttgatcggctgcacgttcagcgcgctctgcctgaccgcctcgtcgatctcggccggcagggccaccgtgcgatgggtcttgtacaccgggatccggtaggtctcggggtagcgcttgaacatcgccaactggccgtcggagagcttgtccttgtattgctcgacgttctgcgcggtgatggtgaacagcggcttctcgtcggcaaagggatcggaaaggaaacccttgccgtcgaccttgccggcgctggccgcaaggccgccggtccaggccgggatgctgccgtcggcgttgccttccttctgcgcgccgatgggggtcaggctgctgccgagcttggcggcctcgtcgggcgaaaccgccgccgtcaccgaaccggccagcaggctgagggccagcgccccggaggacaggagtcgtgctgttttcatgcgtcgttatccttgttcgtatccgcgaaagcggccgccccgaggggcggcggacctcagaagttcaccccgaagctcaccgcgaggaagtcgcggtcgttgatcgggttgtag

SEQ ID NO: 367308 - DNA, 669 bp, Pseudomonas aeruginosa
atgcagcaggcgctgacgcagggtctcggcgtcgcgcaccaggtggcgttgcggctcgcccctggctttgagcgcgaacagggcgaaggtgacgtccgaatactcatcgttgaccagcgggccgatcaccccggtaggcagcgtcttggcctcgtcgctgatcttcttgcgcgcctggtagaactcctcgagcacctccgagggtggggtggtgtcgagcagcgacagggtggtgaaggccagccccgggcgtgtataggtttcgctgcggtcgtaccagcgcagttcctgcaggcgcttctcgatcttctcggcgacctgatcctgcatttcctgggcggtggcgcccggccaggcggtgacgatggtcatgaccttgatggtgaaggccgggtcttcggcacgccccagcttgaagaaggcgacgagacccgccagggagatcaggcagaccaggaacagggtgacggagcgctcgcgcacggcgagggcggagaggttgaaacgactttcgctcatggctggcctttctcgactgccgccacggtggccggctcggccaggcgaacggcctggccgtcgtgcagcaggtgcgcgcccagggcgacgatctggtcgcccggcttgatcgcgccgctgatgcgggcgctctcatcatccagcgactga

SEQ ID NO: 367309 - DNA, 264 bp, Pseudomonas aeruginosa
gtgttacgcatgaggatgccggacagcgcgatcagcccgaccagcgcgttgatgccgaacggctgctggaacaggatcagcgtcggcactacgccgatcagccccagcgggctggtgagaaagaccatgatcatcgcggcgatcgagcgcacctgcaggatgatgatgatcaacgtgacggccagcatgatcgggaacagcggcagcatggccttgctggctttgcccgattcctcgatggagcccgcttgctcgatgcgatag

SEQ ID NO: 367310 - DNA, 597 bp, Pseudomonas aeruginosa
atggccaccggcctcgatgccctgggcgaccaccgcatcggcgccggcggcctccaccagagccgcttcctccggcgtggtggcactgaccagtacgcggatgcccgccgcctgcaacgcgcgaacctggtcgcggggcggcgcgccgaaatggaagctgaccgccgccggccgctcttccagcagcatcggcagcagggtcgggtcttcgaggaagctcaggtagatgttgttcaggcgcgccggcggctcggcgccgaactcggcgaacagcggcttcaggtagtccagccaggcgcgctcgcgggccgggtcggcctgccccgggcggtggcagaacaggttgacgttgaatggcttgtcggtcagcccgcgcacctcgcggatcagcgcccggcctttctcggcggcgctaccggtgatggcgatcgaaccgagcccgccggcgttcgatacggcggcggccagcgccggcgtggagacgccgagcatgggtgcctggatgatcggctgctggatgccgagcaggcgcgtgaagcggtcagtcatggcgattccctctcccggtcggacgacaccgcgtcggccgacgcttga

SEQ ID NO: 367311 - DNA, 951 bp, Pseudomonas aeruginosa
gtgcggggtgaccgtcatcaccgcgcaggtgggatagcgtttcagggtcacgtagcggtacagcccgatggcacccggccagttgctgtaccagccgccccagttgccgcccacgtgcgcctggccgacggtcggcgcggtcaggcccggccccttgatggcgatgtaggccgccggctgggtgtaggaatagggctgcgagaggatcgtcggcgagtagtagcggatcgcctccagcggcgcgctgtacagctcggcgcgtaccgctgcgaggttcttcgccttgaccagctggaagccgcgcgagtcgatgtccagcccggagagctggcgctccttccagatcggcgtgatggtttcccccgtctcgacgttggtcaggcgcagcagcacgttgggccaggcggtccggtaggcatcctgcaggccgatgtcgttgcccaccgtgtcggcgccggtgtagtagccgctatagagatcgtcgccgttggtagaaaacatctcgtagacggcgtccccggcgctacagcggaagaacacccgctcggggtcgtagccgccggtggcgccgtactgggtcagcggcgccaccgcgctggcgatgagcgtcggatagggctggaaactctcgtcgctgacgttgaccacgctgggcaggccgagcgagccattgcaggtgtcgcaggcgccggtccaactgcccgcagtgccttcgccggggcggatctgggtggtcgaggtggtcgtctcgctgcctaccgaggtgacccggtagcaggttgcctgggcgctggcgggaaaccccagcgacacgccgagggccagcgcggacgacaggagaatcatgtggttcatctggcggtctccgggttggaatcgatggcggctgcccggcaggtgccgcgcaggcggatcagcacctggtcgcggggcgcgccggccaggtcgtag

SEQ ID NO: 367312 - DNA, 633 bp, Pseudomonas aeruginosa
atgtgtataagagacaggcggcaagcccagggcggcgccttcgcgctgcgggtcgagcaccagggtggaggcaaagccgcagcgggcgaaggccgcctcgatttccgcggcattgcggtagtgcaacggatagcttccccgcgtcagccgcccgatgatccccactccccagcggatctgccggtagcgcgggtgctcgcggagatcgggatagaggtcggtcaggtaggtgccctgggggaagcgtttaagttcggtcgccaggcgactccagaaggcctcgatcaccgggcgctggaaatagttcaccagcccctcggtgatcaccaccagcgggcgctcgcggtcgagcccggcgaacagcgcggcgaggcagcgctcgccgtcctcggcgaggatatccacagccgccaccgcgtgctccgggcccagccaaccctgctcgcgaagcagcgccgccttgcgcgcggccatcggcggcaggtcggcctccaggtagcgcaactgtggatagcgttgccggaagcgtcgcccgcgcggcgagagtccgcaggccatttccaccacctggaccactccctcgcgttcgacggcctgggtcaggcgcgcgtcgatcatgaggtgtctttgtaa

SEQ ID NO: 367313 - DNA, 798 bp, Pseudomonas aeruginosa
atgtgtataagagacagcctcgttggccttcatcgaaccgatctgcgcggtgaaggcgctggcggtgcggccggccatgaggatcgcggtgagcagcacggcgaactcgcggaggaaggagaacaccaccaggttgaccgtgtagatggtcgcgccgaagttggccagcaccgtggcgccgaggaaggcgatcaccgcgccgaccaggaaggtcagcagggcgatgatcggcaccgcgtccaggccgctcttctcgatgttcgccaccagcggcgtgacccgccaactggccgggcggaccaggctgcggaacagggtctccagggtcaggccgatgaagccgaggagtgccttgaggtgcagccagaaggtctccatggcacaaccgatgcgagccagcagttcgatggcggtggtcggcggcttgggtttctccggctcgcagaagtcgtgcagggcgtggccgacggtcttcagcagggcctggcgctcgcgcggcaggccgggctccagctcggcgaggtcggccaggcgctcggcgccgagcaattcggcgagcagggcggcgccggcggtatccagggcgcccagttggctcaggtcgaagctggcgttgcccgccacttcgctgcgcaggcgcgtcacctcgcgctccagagccgtgtagtgggcgagcgtccaatcacctatggctctgacgcgggcgggctgggtggagctatccaggctcacgtggccgggttgcggctgtgtcgtcatggtgcagaagcttacaccggcttttcagtccctgagtag

SEQ ID NO: 367314 - DNA, 3006 bp, Pseudomonas aeruginosa
atgtgtataagagacaggcgggcaggagcaggtcaggttgcggtcgccgtagacgttgtcgacgcggcccaccggcggccagtacttggcctccaccaggctggccagcggataggcggcctgctcgcggctgtaggcatggttccattcgccgagcagttcggcggcggtgtgcggcgcgttcttcagcgggttgtcttccttgtccagctcgccgcgttccaccgcgcggatttcctcgcggatgcggatcatcgcgtcgcagaagcggtccagctcggccttcgactcgctctcggtgggctcgatcatcagcgtgccggccaccgggaaggacatggtcggcgcatggaagccgaagtccatcaggcgcttggccacgtcgtcgacgctgatcccgctgctgtccttgagcggacgcaggtcgaggatgcattcgtgggcgaccaggccgttgccgccggcgtagagcaccgggtagtgctcctccagccggtgggcgatgtagttggcattgaggatggccatttccgaggcgcgcttgaggccttcgccgcccatcatgcggatgtacatccaggtgatcggcaggatgctcgcgctgccgtacggcgccgcgctcaccgcgccttccttgcgctcgccgcgagcgtggccggggaggaacggcgccaggtgcgcgcgcacgccgatcgggccgacgcccgggccgccgccgccgtgggggatgcagaaggtcttgtgcaggttcaggtgggaaacgtcgccaccgaacttgcccggggcgcacaggccgaccatggcgttcatgttggcgccgtcgatgtacacctggccgccgcagtcgtggacgatggcgcagatctcgcggatcgcttcctcgaacacgccatgggtggacggataggtgatcatcagcgcggccaggcgttccttgtgctcgctggccttgttgcgcaggtcctcgacgtcgacgttgccgcgcgcgtcgcaggccaccaccaccacgcgcatgccgaccatgctggcggtagccgggttggtaccgtgggcggaggacgggatcagacagatgtcgcgctggctgtcgccgcggctctggtggtaggcacggatcgccagcaggccggcgtactcgccctgggagccggcgttgggctgcaacgacacggcgtcgtagccggtggcggaacagagcatcgcctccagttcgtcggtgagctggcggtagccttcgctctgctcggccggggcgaacgggtgcaggttgccgaattcggcccaggtcaccgggatcatctcgctggcggcgttcagcttcatggtgcaggagcccagcgggatcatcgtgcggtccagcgccaggtccttgtccgccagcttgcgcaggtagcgcatcagctcggtttccgagtgatggcggttgaagatcgggtggctgaggatcgccgactggcgcagcagctcgaccggcaggcggtccccgctgctggcggcaagggcggcgaagtccgggagcgcctggccctcttcggccagcaggccccagagggtctccacatcggcctggcggacggtctcgtcgagcgacaggccgagacggccggcatcgatctcgcgcaggttgatcccggcggcgcgggccttggcatggatcgccgcggtacgcgcgccggtggccaggctcagggtgtcgaagaaatgcttctgctcgacggccacgcccaggcgctccaggccggcggcgaggatcgcggtcagccggtgggtgcgccgggcgatgcgcagcaggccctgcgggccgtggtagacggcgaacatgctggcgatgttggccagcagcacctgggcggtgcagatgttgctggtggctttctcgcggcggatgtgctgctcgcgggtctgcatggccaggcggtaggccggcttgccgtggcggtcgatggagacgccgaccaggcgtcccggcatgtcccgcttgaaggcgtcgcgggtggcgaaataggccgcgtgcgggccgccgaagccgagcggcacgccgaagcgctgggcgctgccgatggccacgtcggcgccgaactcgcccggcggggtcagcagggtcagcgccagcaggtcggcggccaccgcgaccagcgcatcgaccgcatggaagcggctgaccagttcgcgatagtcgacgatctcgccgtcgcaggtggggtattgcagcaacgcgccgaagtaggcggagaagtcttcgatggcgctctcgtcgccgaccaccacctcgatgcccagcggctcagcacgggtgcgcagcacgtcgagggtctgcgggtggcaatggcgggaggcgaagaatgcctggctggtgcggttcttcgacaggcgcttgcagaaggtcatggcctcggcggcggcggtcgcctcgtcgagcatcgaggcgttggcgatcggcaggccggacaggtcgctgaccagggtctggaagttcagcagcgcctccaggcggccctgggagatttccggctggtacggcgtgtaggcggtgtaccaggccgggttctccaggaggttgcgcaggatcggtgccggggtgtggcagttgtagtagccctggccgatgaaggaacgcaacgcgcgattgcgcgcggcgatcgccttcaggctggccagcgcctcggcctcgcccatgccggccggcaggtcgagcacgctgctgcccttgatgctgtccgggatcacgttgccgatcagcgtgtccagcgagtcgtagcccaggcgctggagcatggcctgggtgtcggcggcgcgcgggccgatatggcgggcgatgaattcgtcgtcggtgcccaggtcgatggtgccgaggttcaggttatcggtcatgacgggatcctcaggcgtcggcgttggcgttcagcaggcggtcgtaggcggcctggtcgagcagcttttcccaggcgccggcgtcggccggacggaagcggaagaaccaggcctcgccgagtgggtcctggttga

SEQ ID NO: 367315 - DNA, 2415 bp, Pseudomonas aeruginosa; identical to SEQ ID NO: 364700

SEQ ID NO: 367316 - DNA, 666 bp, Pseudomonas aeruginosa; identical to SEQ ID NO: 321290

SEQ ID NO: 367317 - DNA, 951 bp, Pseudomonas aeruginosa
atggtcgccggagaacaccacgatggtgtcgtcggccagcccgcattcctccagggtcgccagcagcgcaccgatctgcgcgtcgacgtagctgcaggcgccgaagtaggcacgccgggcggcgcggatgcgctcctcgggcaacggcttgtcccacaggtcgatgaccttcagcaggcgttgcgaatgagggtcctgctcctcctgggcgaagcgctggcgcggcagcgggatgtcctcgtcgcggtagagattccagtagctcgccgggatgctgtaggggtcgtgcggatgggtcatcgacacggtcaggcagaatggctggccggcgtgctggcgaacatggtcgtagaggtactggcgggccttgaacaccacctcctcgtcgaagtccagctggttggtgcgcacgcagggaccggcctgcaaaaccgaggacatgttgtggtaccagctcgggcgcacctccggctcgtcccagttcaccgcccagccatagtccgccggatagatgtcgctggtcaggcgttcctcgtagccgtgcaactggtcgggaccgcagaagtgcatcttgcccgacagcgccgtgcgatagccgaggttgcgcaggtagtgggcgtaggtgggggtatcggcggcgaagtcggcggcgttgtcccaggcgccgatgcgagtaggcaagcgaccgctgaccagggtgaagcgcgacggcgcgcagagcgggctgttgcagtacgccgagtcgaacaccacggcccgttcggcgaggcgcgagaggtgaggcatgcgcagcaccgagcgcggatcgtgaagcggcagcagcggcgcggccatctggtcggccatgatgaacaggatgttcggcgaggtcttcatcgggcggcttatcccatgcgattgggttatgcgatagtgctgcgtcgatcatcagtgcatcgaaatccctggtaa

SEQ ID NO: 367318 - DNA, 195 bp, Pseudomonas aeruginosa
gtgctgagcctggagttcaagctcaacctgttgcgcccggcgctttgccagcgcctgttgtgtcgcgccgaggtgctcaaggccgggcgccaggtgacggtggtcgaggccgaggtgttcgccgagcgggacggtcggcggcgcctgttcagcaaggccaccgtgaccatggcggtggtggcgctggccgaatga

SEQ ID NO: 367319 - DNA, 231 bp, Pseudomonas aeruginosa
atgagcgatgtgagcctctcggctcagggggtcgtatccctggcttcgcataatgtggacgggattacgttaggccaggcccgaccgaagagagaatgcgatgcccggaaaatctcccttccgggcgagcatttacacgtaatccccattatgcgatgccacaacggccccaggatcgacgaaagcccctcggtggtgttctcccgaggggttttgcgttttaggggctaa

SEQ ID NO: 367320 - DNA, 663 bp, Pseudomonas aeruginosa
atgcgtgacatcatcgacggctttctccgcttccagcgcgacgcctacccggcgcgctcgcaactgttcaagtccctggccacccggcaagcccccaaggcgctgttcatcgcctgctcggacagccgggtggtccccgagctgctgacccagcgcgagcccggcgaactcttcgtgatccgtaatgccggcaacatcgtccccggctacgggccgcagcccggcggggtcagcgcctcggtggaatacgcggtggcggtgctcggggtcggcgacatcgtggtctgcggccactcggactgcggcgcgatgggcgccatcgcgtcctgcgcctgtctcgaccagttgccggcggtggccggctggttgcaccacgccgaggccgcacgggcgatgaacagcgcccacgaacacgcctccgaggcggcgcggctggacgccctggtgcggcacaacgtgatcgcccaactggccaacctgcgcacccacccctgcgtcgcccgcgccctggaacagggtcggctgaacctgcacggctgggtctacgacatcgaaagcggccgcatcgacgccctcgacggcgccagccggcgcttcgtctccctcgccgagcatcccgaagtgcgcgcggtaggcggcgaccccgggcaggcggtcgcctga

SEQ ID NO: 367321 - DNA, 873 bp, Pseudomonas aeruginosa
gtgctcgacggcgccgcgccggcgcgcaaccgacgaacgccggcacgtctggcacagctccaggcgctgcgccaggaaagcctggaggaggcgctgccgaccttgctcggcgcggccgagaacggcctcgacccgcaacgcctggtgcaatccttcaaccgcccgcgcgagcactggcggctgccggaagaggtggtcgaggtgcagacccgcctcggcccccggttgttcgccggggagcgctggttcgccctggtcgagcaactgctcgccggcctgcggcgcttccacgaagagctaccggacgaactcggtcccgaccgcgaccgcctgcgtcgctacgccctgccgcagctggagcggccggtgttcatcgccttgctcgaggccgccctggccggcggcgacgtgcacagcagcgggccctggctgcacctgcccggccatgaagtgcgcctgagcgatagcgaggagcaactgcgcgcgcgcctctggccgctgctcgaagccggccgctacgacccgccctgggttcgcgacctggcccgcgagctgcgccaggacgaagccgccatgcgcaacctgctgcgcaagctggcgcgcctgggccagttgcagcaggtggtgcgcgacctgttctacccggaagccaccctgcgtcaattggccgagatcgccgtgcaggtccgcgaccccgccgggctgatccgcccggcggaattccgcgaccgcctgggcatcggccgcaagcgcagcatccagatcctcgagcacttcgaccgcatcggcctgacccgccgcatcggcaacgaccgtcgcctgcgcgagggctcggcgctggccgaacagttgctcggcggcgtctcgccctga

SEQ ID NO: 367322 - DNA, 279 bp, Pseudomonas aeruginosa; identical to SEQ ID NO: 328609

SEQ ID NO: 367323 - DNA, 1080 bp, Pseudomonas aeruginosa
ttgaaccagccactcaccgtcaccctcgcccgccgggccggcggccgcgtcaccgctatcgcgctcggcgcagccttcgccacgctgctggccatgccgctgctgcacctgctgccggcggacagcgcgctgcacctctcggcctacagcctgaccctgaccggcaagatcctctgctacgccatcgtcgccctcgctctcgacctggtctggggctacgccggcctgctgtccctcggccacgggctgttcttcgccctcggcggctacgccatgggcatgtacctgatgcgccaggcctccggcgacagcctgccggcgttcatgaccttcctttcctggaacgaattgccctggtactgggccggcacccagcacttcctctgggcgctgtgcctggtggtgctggtgcccggcgcgctggccttcgccttcggctacttcgccttccgctcgcggatccgcggcgtgtacttctcgatcatgacccaggccctgaccttcgccggcatgctgctgttcttccgcaacgagaccggtttcggcggcaacaacggcttcaccgacttccgcagcattctcggcttcccgatcaccgcgccgggcacccgcgccgccctgttcctcgccaccgtcgcgctgctcgcggccagcctgctgctcggctggcgcctggcgcggagcaagttcggccgggtcctcaccgcgctgcgcgacgccgagaaccgcctgatgttctgcggctacgacccgcgcggctacaagctcttcgtctggaccctgagcgcggtgctctgcggcctcgccggcgcgctgttcgtgccgcaggtggggatcatcaaccccagcgagatgtcgccgaccaactccatcgaagccgccgtctgggtcgccctcggcggacgcggcaccctgctcggcccgctgctcggcgccggcgtggtgaacggcgcgaagagctggttcaccgtggccttcccggaatactggctgttcttcctcggcgcgctgttcatcgtcgtcaccctgtacctgccgcgcggcctgctcggcctgctgcgcaaggagaaggagcaatga

SEQ ID NO: 367324 - DNA, 1443 bp, Pseudomonas aeruginosa
atgcccagcaccgtctcgtcgtcgcggctcggcctcgccgggctctgcatcctgctggcggggcaactgttgccgatgatcgatttctccatcgtcaacgtcgccctcgacgccctcgcccattccctcggcgccagcgaaaccgaactggaactgatcgtcgccgtctacggcgtggccttcgccgtgtgcctggcgatgggcggccggcttggcgacaactacggccgtcgccgcctgttcgatctcggcgtcgccctgttcgccgtcgcctcgttgctttgcgggctggccggttcggtctggctgctgctggtggcgcgcgccctgcagggcgtcggcgcggcgctgatcgtgccgcagatcctcgccaccctgcatgtcagcctcagcggccacgcgcattcccgcgcgctggccgcctacggcgccatcggcggcctggccttcgtcgtcggccaggtgctcggcggcttcctggtctccgccgacatcggcggcctcggctggcgcagcgtgttcctgatcaacctgccgatctgcctcggcattctcctttgcagccgccgctgggtaccggagacccgcgccgagcatgccgcccgcgtcgacgcgccgggcaccctgctgctcgccgcgctgatcctctgcctgctgctgccgctggctctcggcccatcgctgcactggtcctggccctgcgccctgctgctggcggcggcggtgccgctgctggcctggctgtggcgcaccgagctgcgccaggaacgccgccaggcctggccgttgctgccgccgtcgctgctgcgcctgccgagcatccgcttcggcctgttgctggcgatcctgttcttcgcctgctggagcggcttcatgttcgcccttgccctggccctgcaggccggcgccggtctctcgccggtgcaggccggcaatgccttcatcgccctcggcgcctcctacttcgtctcggcgctgctcaccgcccgggtggcggcgcggatcggcccggtacgcctgctgctgctcggctgcgtcatccagatgtgcggcctgctcggcctgatgctgaccctgcaacgggtctggccgcagccgggcatcctcaacctggcgccggcgaccctggtgatcggcttcggccaggcgttcatcgtcagcagcttcttccgcatcggcctctcggaggtgccgaccgcccaggccggcgccggcagcgccatgctcgccaccgtccagcaggcctccctcggcctcggctcggcgctgctcggcgcggtgttcgcgcacaggctggagcgccatggcgactacctggaagcgacgcagacgaccctggccgtcgagttcgtcctgatgacgctgctgctcggcgccacctgcctcttctacctgcgccgcgtgcgcacggtgccattgcgctgcgactcgccgggcaactga

SEQ ID NO: 367325 - DNA, 783 bp, Pseudomonas aeruginosa
atgagcgaggtggatgtgcagcgccagggcgacagtctcctgctcggcggctacctggaggacaacgcccggcgcctggcgctgcagcgctacctcgatggcagcggcgtggactaccgactggaagcacggagcatggaagacattcgccagggcgtggatttcatcctgcagaaattcggctatcggcagatcctcagcagcaacgcggacaagcctggctgggtccggctcaacggcgaactggcggaacaggacgaacgctgggcgcggatcgacgcattgctggagtccgaggtgccgggcctgctcggggtggaaaaccaggtccgggtggccggctcgcacctgcgccgcctcgaacgcctgctggcggacgccggcctcgaccggcaactgagtttccgcgagcgcggcgagcgcatcgagttgagcggtacgctcgacgaggtccagctcagcgccttctaccgcctgcagcgcgagttccagcaggagttcggcaaccgcccgagcctggagctgctcagtcgcggcaagcgcgccagcggcgacgaactggagttcacggtgcgctcggtgtcgctggggcgggtgccctatgtagtgctcggcgacggccagaaatacccggtgggcgcctcgacatcccgtggtgtgcgaatcctcgccatcgagccggagtcgatcctggtggcccgcggcaagcagcgtttcatcatcaatctcaaaggggaggtgctccatgatgacagccttggaaacgcgactgtcggtcgctga

SEQ ID NO: 367326 - DNA, 204 bp, Pseudomonas aeruginosa
atgatgacagccttggaaacgcgactgtcggtcgctgacggcacgcatgccgcagcgctccggcagcgtctgcaggcggcgctggcggagtgtcgccgggaactggccagaggcgccggcccggagcgctttcaattcctgcaacagcaggcccgggccctcgaaggcggtctcggcattctttcgcagctcacagaggactaa

SEQ ID NO: 367327 - DNA, 666 bp, Pseudomonas aeruginosa; identical to SEQ ID NO: 364695

SEQ ID NO: 367328 - DNA, 1344 bp, Pseudomonas aeruginosa
atgggcgaaggcgcgattgtgggtgggcacgtagccttcgggggtacaggcgatggcgaacaccaggttgcggttgcgctccagcaactgctcctggatgcccggcaggacctggtcggtgtagctgtcgaagcgggtccggtacttggtcggctgggtattgggcaacggctggtagctgcggtcgaacaggtcgtcgaggtcgatgcgcccgctgcgcacgtcctcctcgaagcgagcggcgatagccgccgcgccctcccgggcgaggtcgtagaccgactggtggtaggcgtccaggctgacctcggcgaggcgctcgctgatcacctcggcctggttctccaactggctggcggcttcgccgaggcgcagggtctgttcctcgctggcgctgaggtcgccgcgcacttgctcgaccgcggcgaacaggctggcgagttggctgcggttgatctcggcgccctgggcgatctcggtaatctggctctccaccccggccgccagttcggcaatgccttccagttgccgaccggtcagctcgacctggccgaccccttcgcccaactcttcggaaagctggcggatctgctcgaccacctcgctggtctggcgctggatctcggcgaccatctggccgacttcctcggtggcctcggcggtacgtccggccaggccgcgcacctcttcggcaaccaccgcgaagccgcgcccgtgctcgccggcgcgggccgcctcgatggccgcgttgagggccagcaggttggtctggctggcgatgccctggatcaccagggtgacccgctggatgtcctcgctgcgctggttcagcgcctcgatcgcctcgcggctggcgcccatccgctcgctgagccgatgcatgcgctcgatggtcgaggccagcagcacctggccctcgtcgctgccggcgcgcgcccgggtggcggcgtccatggcctggcgcgccagattggaggtggcgcgctcggtgtggatcatcacttcggcgctgccgacgatctgttcggcggcgtcgagctgggattgcagcttctccgccaggcgcttcaccgagaacgccacgccggcggccgacaatgcgttctggctggtgttatgggacaggtcgcgagccagccgggcgatgtcgggctcgccgacggtcgccaccgctgtgcggttgccgggaagcagccagggcaaccagagcagcgccacgccgagcggcagggccaggtacagcggcagccagccatgccgggcgccgaccagcaggagaaccagggccaggctctgcaacaggcagacgaagaggatgcgggaacgagcgggctgcatgagtaa

SEQ ID NO: 367329 - DNA, 249 bp, Pseudomonas aeruginosa
atgttcggcggtgtggcgaccagggtcatcatgccgctgatcagtccggcgaaggccagcggcatcatcagccggcccggagggatcttcagcttggcggcgatgctcaggaccaccgggatgaagatcgccaccaccccggtggaactcatcactgagcccaacccggccaccgccagcatcagcagtaccagcaggcgcgcttcgctgctgccggcgcgggcgatcagccagtcgccgacctggtag

SEQ ID NO: 367330 - DNA, 1260 bp, Pseudomonas aeruginosa
atgccagaggccgatgcagaagctcagcgccaccagcacgatgcagggcggatagatcgcggtgagcaccgggatcgagacctggatcagcttggtcaggccgaggttggaaacgatgaaggagaaccctgccaggatgatcaccaggctgcggtaggacagcggcaggcgctggcagaagtactcggcgcaggcgcaggtcaggccgaccgcggtgaccaggcaggccagcgcgataagtcccgccaggaacgagctgccgaggctgccgaaggtatgttgcacgtaggcatgcaggaccgccgcgccgttgctggcgtcggcggcgatggcatggctgccggcgccgagccggaacaggctgacgtagaccagcaccaggccgacgccggcgatcagcccggcgacgatggcgtagcgggtgatcagccgcggcgactgcacgccgcgggaacggatggcgttgacgatgacgatgccgaagaccagcgcggcgagggtgtccatggtcaggtagccgttgacgaaaccctgggagaacgcggcctgggtgtactccggctgggccgtgccgatcgggccggcgggccagaggaaggcggcgacgccgagaatcgccagggcgaggatcttcagcggggcgaggaagcgtccgacggtgtccagcaggcgaccggggtagagggagatggccagggcgaggaggaagtacgccaggctgtagacgaacagcgccgtgccgctctcgccgagcagcggcaccacgccgacctcgaaggacaccgtggcggtgcgcggaatggcgaacagcgggccgaccgccaggtagcagaccgccgccagcaggccgccggcatacctgccgatcggatggctgagggcgtcgaccgaaccgccgaccttggccagggcgatcacggtgatcaccggcagccccaccgcggtgatcaggaagcccagcgccgccagccacacatgggggccggactgcaagccgacgatgggcgggaagatgatgttgccggccccgacgaacagggcaaaggtcataaaaccaagcgccaggatgtcccggcctttcaaagcgttcatgctggagaggtaccgcgctgctcgaggaaattcacagaagggtttcccgggggggtaggggaaacggcactcatctggatgggacgagcaggggaggcggccgccgtccttgtgggagccgggccggaaacttggcatgctaacgaaaatgccggggtcgcgggatag

SEQ ID NO: 367331 - DNA, 648 bp, Pseudomonas aeruginosa
gtggtcaagccggtggacggcgagcagggccagggcgtggcggtggacctgcgcaccgcggaagaggtcgaggaggccatcgaggccgcccgccatttcgattcgcgcgtgctgctggagagctaccacgccggccacgacctgcgcgtgctggtgatcggctacgaggtggtggccgccgccatccgtcgtcccgccgcggtgatcggcgacggtcggcacagcatccgcgagctgatcgaggcgcagagccgccggcgccaggccgccaccggcggggaaagccgcatcccgctcgaccacgagaccgagcgcaccctgcgggccgccggctatggctacgacgacgtgctgcccagcggcgaacacctggccgtgcggcgcaccgccaacctgcacaccggcggcatcctcgaggacgtcaccgacgccctccatccggccctccgcgaggccgcgatccaggccgcgcgggccctggaaataccggtggtgggcctggacttcctggtcgaggccgccgaccagcccgactacgtgatcatcgaagccaacgagcgcgccggcctggccaaccacgagccgcagccgaccgccgaacgcttcgtcgatcttctcttccccctcagccgcgaggtgccttcatga

SEQ ID NO: 367332 - DNA, 306 bp, Pseudomonas aeruginosa
gtgcagttccaggggcgcctggcgggagagcagggcgacgccgtagtggcctttctgcccgtggtagtggacgtggtagccgagcgcctcgatctcggcctggggaaactggtcgtcggcgaccttggtttcctgcagcccgatcacgtcgggctggtgccgctcgatcagcgccgccagctggtgcggccgggcgcgcagaccgttgatattgaaagagacgattttcatggtgggcgtcctggcaaaaacaggaatgctagcccagccgggggatgcctggcgaccctggaggcgctgtgctag

SEQ ID NO: 367333 - DNA, 228 bp, Pseudomonas aeruginosa; identical to SEQ ID NO: 326022

SEQ ID NO: 367334 - DNA, 1377 bp, Pseudomonas aeruginosa
atgtccctgagtgtcttcgatctgttcaagatcggcatcgggccgtccagctcccacaccgtggggccgatgcgtgccgctgcgcgcttcgccgaggggctgaggcgcgaggggttgctggaggccactgccagcgtcaaggtcgagctgtacggctcgctcggcgccaccggcaagggccacggcagcgacaaggcggtactgctcggcctggagggcgagcagccggacacggtggataccgccgcgattcccgcccggctcgatgccatccgttccagcggcgagctgcgcctgctcggcgagcggccgatccgcttcgtcgagaaggaacacctggcgctgatccgcaagccgctggcctaccatcccaacggcatgatcttccgtgccttcgacgccgccggcctgcaggtccgcagccgcgagtactactcggtgggcggcggtttcgtggtcgacgatgaggccgccggcctcgaccgcatcgtcgaggaccgcacgccgctggtgttccccttcaagaccgcgcggcaactgctcgaccattgcgtccgcgaaggcctgtcgatcagccagttgatggccgagaacgagaaggcctggcgccccgccgaggaaacccgcgccggcctgctgcgtatctggcaggtgatgcaggattgcgtcgaggccggctgccgcaacgagggcatcatgcccggcggactgaaggtcaggcgccgcgcggcggcgctccaccgccagttgtgccagcggccggaggccggcctgcgcgatgctctcagcgtgctcgactgggtcaacctctacgccctggcggtgaacgaggagaacgccagcggcggccgcgtggtgaccgcgccgaccaacggcgcggcggggatcattccggcggtgctgcattactacgcgcgcttcatccccggggccgacgacgacggcgtggtgcgcttcctgctcaccgccgcggcgatcggcatcctctacaaggaaaacgcctcgatctccggcgccgaggtcggttgccagggcgaggttggggtggcctgctcgatggccgccggggcgctctgcgaagtgctcggcggtagcgtgcagcaggtcgagaacgccgccgagatcggcatggagcacaacctcgggctgacctgcgacccggtcggcgggctggtccaggtgccctgcatcgaacgcaacgcgatggcttcggtgaaggcgatcaacgcggcgcgcatggccctgcgcggcgacggccagcacttcatctctctcgacaaggtcatccgcaccatgcgccagaccggcgccgacatgaaaagcaaatataaggaaaccgcgcgcggcggcctcgccgtgaacatcatcgaatgctga

SEQ ID NO: 367335 - DNA, 681 bp, Pseudomonas aeruginosa
atgctgaaccgcgccgctgcgccggcgcttcttttttctttcccgacaatcgatcgcggctctccggcagacaggaggccgggatgccatggagtgaaacatgaccgcagaaaccctcgccaagacgcccctgcacgccctgcacctggaactgggggcgaagatggtgcccttcgccggctacgacatgccggtgcagtacccggccggggtgctcaaggagcacctgcacacccgcgagcaggccggtctgttcgatgtctcgcacatgggccagatccgcctggtgggcgccgatgcggcgctggccctggaaagcctggtgccggtggacatcctcgacctgccggtgggccagcagcgctacgcgttgttcaccgacgagcagggcgggatcctcgacgacctgatggtggccaacctcggcgattgcctgctgctggtggtcaacgccgcctgcaagcaccaggacctggcgcacctgcgtcgtcacctggagggccgttgcagcgtcgagccgctgttcgaggagcgtgccttgctcgccctccagggaccggcggcggtgcgggtgctggagcgcctggcgccgcaggtggcgcaaatgaccttcatgcagttcgcccgtgtcgagctgctcggccaggactgctacgtcagccgctccggctataccggtga

SEQ ID NO: 367336 - DNA, 435 bp, Pseudomonas aeruginosa
gtgacgctctatcgcctccacgaagccgatctcgagattcccgatgcctggcaggaccagagcatcaacatcttcaagctccccgccagcggccccgcccgcgaagccagtttcgtcatcagccgcgacgccagccagggcgacgcgccgttcgccgactatgtcgcccgccaactggaaaacgccgagaagcaattgcccggcttcaagctgcacaagcgctgggacatcaacatccacggccacgccgccgtgctcctcgactaccagtggcagcgcgagggccgcgacctgatgctgcgccaggtattcatcgagcgccgcccggcggtgctgatcaccaccctgaccaccaccccggctgacctgccgcaccacgagccggcctggaagcaggcgatgcagaccctggtcccgcgcccgacccctagctga

SEQ ID NO: 367337 - DNA, 210 bp, Pseudomonas aeruginosa
atgaaggtgttctggctgccggtcttgatgtgcgcgccgcagaccatcttgctctgcaggcgcgccgccggcttgccgttgatgtacacggtggcgctgccttcggcgatcagcaccgggaacggccacagcggatggttcagcggcaggccgctgcaggtggcggagacgtcgtcgccggcgcgcatcgcgttgcgactgttcacgtag

SEQ ID NO: 367338 - DNA, 279 bp, Pseudomonas aeruginosa; identical to SEQ ID NO: 325377

SEQ ID NO: 367339 - DNA, 1086 bp, Pseudomonas aeruginosa
atgcaacgcggcggggcgagcaaggacacctgggtgctggccgagcgagcagtcggcggcgagccgttgcgaccgcgccggctcggcgtgcgcgacctggtccgcgaggatccctacctgccgtcgcgggtggtggagaacctgttctggtacggccgctatgccgagcgttgcgacgaccatgcgcgcctgttgcgggtggtgctgtcgcgctacgtggatgccgatggcgacgaagaggcgttgcgcagcgccctggccctggccggcggcatcggcctgctgcccggggatggcgagccgttggaaaggtgcctgttgcgggcgttgctcgacgagcactggccggcgagcctgtgcgccaacctgcggcgcctgcactgggcggcggcgcaggtgcgcgggcgcttgtccggggagaactggctggccttgctggagctgcaacgcgacatgcaggcgctcgatccggcacgcaccgacctcggcgaagcgctggacttcctcaaccggctagtgatgtccctggcagccttgtccggtttcgccctcgacgacatgacccgcgacgacggctggcgtttcctgatgatcggccggcgcatcgagcgcgtgcgcttcttcgccgagagcatcgccgccttcctcgacggcggtagcgcctgggacgccggcgcgctggaatggctgctggaactgggtaacagcggcatcacctaccgctcgcgctacctggcgtcgccgcaactggtcccggtgctcgacctgctcctgttgcacgagcagaacccgcactcgctgcgcttccagttgcaggccctggagcgttcgctggagcgcctgcacgaggagttcggcgcgccacgcgagcgggaactcaggaccctgggcgaacgcctgcgcagcttcgatctggcggccctggaaagcccgctgttcggcgcggcaggactcgacgaggtgctcgtcgggctggcgcgactgctgcgcgacatcgccgcctgcgccggacaggtctccgatcggctaggcttgcgctatttcgcccatgtcgacgatgtcagccagagaacggtatccacctga

SEQ ID NO: 367340 - DNA, 459 bp, Pseudomonas aeruginosa
atgaccgccttgcattccgatcccaccatcgccgcacgacagcgctggatgggcgtgctcgcccgcgcccgtcgcgaggagctggacgcccatgcggacgccctgcgcgatgccgactatcacctgctgcgcgccgccgagaccggcatgaccctggtgcgcggacgcatgggcggcaccggcagcccgttcaacttcggcgagatgaccgtgacccgctgcgtggtccgcctcgctgacggacgtaccggctacagctatgtcgccgggcgcgacaagcgccacgccgaactggccgccctggccgacgcgcacctgcagggcgccgatgcggcggcctggcaggcgcgcctgatcgaaccgctggcccgcacccaggccgagcgccgcgccgcccaggaggcggaaatcgccactaccaaggtggagttcttcaccctggtccgaggagaagattga

SEQ ID NO: 367341 - DNA, 165 bp, Pseudomonas aeruginosa
atggcgctgtgcgacagcgaatacggcggcgcgccgagcagcaataccaggctgctccagaacaccccgaaggcggcgaacatcaacagcccgagcaggccgcgcacctgcagcacgcgctggctcgccagcaggccgaacatcgagccgagcagctgccggtag

SEQ ID NO: 367342 - DNA, 348 bp, Pseudomonas aeruginosa
atgtgtataagagacagggtcggtcgcctggcggtcgctgcctcggtgaccctggcggtgctggccggcgtgcgtctgtacaaccagaacgacgccctgccgcagatggcgcaacaggggaccaccccgcagatcgccctgccgcaggtgaaaggcccggccgtgctggccggctacagcgaagagcagggggcgccgcaggtgatcaccaactcctcgtccagcgatacccgctggcatgagcagcgtctgccgatctacctgcgtcagcacgtgcaacaatccgccgtcagtggtacagagagcgcgctgccctacgctcgggcagccagcctggaaaaccgctga

SEQ ID NO: 367343 - DNA, 255 bp, Pseudomonas aeruginosa
atggaacagccattcgatctggctgcagagttagccaagcaaccccatctactggaaatagccggcaacctgttgatgaagggcggccccgaagactatatcggtgccgtgctttgcctacgcggtactctctacttcaaagaggcccataccccactggtacgtgagtcattatgccaatgcttcgatgagttcaagcgcctagggaatctccgaacaagccttcagttatgcgagaatccccgcaacacctga

SEQ ID NO: 367344 - DNA, 906 bp, Pseudomonas aeruginosa
gtgatccatggcggccgcgagcaggtcgatgccctcctcacccacccggacatccgggcgatttccttcgtcggctcggtcgccgtcggccagcacgtgtaccgcaccggcaccgcgcacctgaagcgggtgcaggccttcgccggggcgaagaaccacatggtgatcctccccgacgcgaacaaggcccaggttctcggcaacctggtcggtgccagttgcggcgccgccggccagcgctgcatggcgatcagcgcggcggtgttcgtcggcgcggcgcgcgagtggattcccgaactggccgagcggatggccgccctgcgccccggccactggcaggacccggacgccgcctatggtccgctgatcagtccgcaggcgcgccagcgcgtgctgcgcctgatcgccgaaggcaaggcggaaggcgccgagtgcctgctcgacggctcgcagtgccaggtcgaaggctatcccaacggcaactggctcggtcccaccctgttccgcgcagtgacgccgaagatgggcctgtaccgcgaggagatcttcggcccggtgctggcttgcctggaggtcgataccctggaagaggcgattgccctggtcaacgccaatccctatggcaacggcaccagcctgttcacccgctccggcggcgccgctcggcgctaccagcacgcggtgcaggtcggccaggtggggatcaacgtgccgatcccggtaccgctgccgttcttctccttcaccggctggaaaggctccttctacggcgacctgcacgcctacggcaagcaggcggtgcgcttctataccgagaccaagaccgtcaccagccgctggttcgacgatgaaccgacgaccgacgaatcgtcggccggcccgaacatgaccatccatctcaagtga

SEQ ID NO: 367345 - DNA, 291 bp, Pseudomonas aeruginosa; identical to SEQ ID NO: 336196

SEQ ID NO: 367346 - DNA, 240 bp, Pseudomonas aeruginosa
atgctcgggttcacgacgaaagctgaggcgcgacgcatcggcgcctcgcaccacgggagctattacggcataccgatgtggctgggggatgtcgatagcgattgccccctggcgttcgccaagtgggcgccgcttgagatggtcgtctctctgttctcggtcattgagggcatcgtcaactcgatgctcgatcaagagcagacgttcatgttcaaggttggtcggaggatcgaccagtga

SEQ ID NO: 367347 - DNA, 1329 bp, Pseudomonas aeruginosa
atggcacgtaagggactctatctgggcggcagcgcgctgctgctcgccgtggtactgctgctggtgttctgggggcgtcccgccgacgccgagatccaggtactgaaggcgcctcgcgcggtggtctggaaagacttcctcggggtcaacgcgcagttcctctggttcagcccggagcgttacaacaagcagatcgaccgcctgcaggacctggggctggagtgggtgcgcctggacctgcactgggaccgcctggaaaccgccgaggaccagtaccagctggcctccctcgaccagttggtcaaggatctcgaggcgcgccagctgaagtcggtgttctacctggtcggctcggcccgcttcatcaccaccgcgccgttctactcgcccttccaggaccagtatccgccgcgcgacccggaagtcttcgcccggcgcatggcgatgctctcgcagcgctacccgagcgtggccgcctggcaggtatggaacgagcccaacctgatcggcttctggcggcccaaggccgacccggaaggctacgccaagctgctccaggccagcaccatcgccctgcgcatggtcgacccggagaagccggtggtttccgccggcatggccttcttcagcgagatgcccgacggccgcaccatgttcgacgccctcggccacctgggtgtggagagcctcggcaccatcgccacctaccacccctatacccagttgccggaaggcaactacccgtggaacctggacttcgtctcccacgccaaccagatcaaccgcgccctgcgcaacgccggcgtgccggcgatctggagcaccgagtggggctggtcggcctacaaggggccgaaggagttgcaggacatcattggcgtcgaaggccaggccgactacgtgctgcgtcgcctggcgctgatgagtgcgctggactacgaccggatcttcctcttcaccctcagcgatctcgaccagcgcgccagcgtgcgcgaccgcgactacggcctgctcgacctggacgccaaccccaagccggtctacctggccctgcaacgcttcctcaaggtcaccgggccgaagctgcgcccggccgacccgccggtcaccgaggacctgcccgacggttccttcagcatcggctggacccgcgaggacggccgcaacgtctggctgttctggtcggcccgcggcggcaacgtgcgcctgccgaagctcaaggaggccaccctgcacgatccgctcagcggcaaggtcacgcccttgagcggcagcgacggcctggaagtcccggtgaagtccagcctgcagatgctggtctgggagtga

SEQ ID NO: 367348 - DNA, 765 bp, Pseudomonas aeruginosa
gtgaggcagacgctgcgccagggcgcgctaggcgtcgccgggctgctggcgctgttcgccctgtggtggctcggcgtggccctgttcggcgccgccgacggcctttcggcacgcttctcgccgcaggcgacgttgctcagcctgggtgaactgctggaacgccgcgaactctacgagcacgtgctggtgagcctgaaacgggtcctgctgggcttgttcctggcgctgctggtgggagtgccgctggggctgctggtgggcgcctcgcgcaacctggaagcggcgaccactccggcgttccagttcctgcggatgatctcgccgctgtcgtggatgcccatcgcggtgatgctgatgggcgtgggcgaccagccgatctatttcctgctggccttcgccgcgctctggccgatcctgctgaataccgccgccggcgtgcgccagctcgacccgcgctggctgcaactgagccgcagcctcgccgccacgccctgggaaaccctgcgccgggtgatcctgccgggcatcctcggccatgtgctgaccggcgtgcgcctggccatcggcatcctctggatcgtcctggtgccttgcgagatgcttggcgtcagcgccgggctcggctactacatcctcgacacccgcgaccgcctggcgtactccgagctgatggcgatggtgctgctgatcggcctgctcggctacctgctcgacgcggcggcgcgcggactctaccggcgctgggcgcacggggcgctcgggtag

SEQ ID NO: 367349 - DNA, 1116 bp, Pseudomonas aeruginosa
ttgcccctgcgcccagtagctcatcccccggtagatcgccgcaatgtccctcagcagtgtccaggcttgggcgcgagactgcaggttcagatcgcacagaaagcgcggctcctggccgcccttcccgtctggcaccaactggtcgcaatactgggcgatcttgtacatctcccacttgtccaccatccagggcttgatccgcttgcccaggccgaagcgcgcattggtactgatgtcgtaggtgacccatgccgggttgttggtccaggcctgtttcatcgtgccgtcccagatgccgaggtaggcccgggtctccggatcgtaattgctcggcacttggaccttccgcccgcggcagtcgactgtgacagccggaatgttgctgaactgctctgcgctgaactcgacgtacagcagggccgtgttcgggtagcgcagcttcgcgtcgatcacctcggtgtagccggcgaccagcatggtgtcggcgatgcggttgttgttctggttcggcgtcaggcggcggacgcgcacctgccagccattggtggccgccggcaggtcgatccggcgggaacgctcgtagcgggtggtggtcttgccatcgacggcctcgcgcagcacctcctggtaggcgccgccgtcggtggccagatctacggcgtattcgatccggtacccgccgatgttgccgttggtgtcctgctgctggagcgctggccaggcgaagcgcaggcgcactgcggaaagctgggtattgctcagcgagcgcacccagggcgtatcgctgcgcaactcgacgttgacagacgtctcgttctcaacggcagggatgcccgggatgtagtcctgatccaccgaccccgcgcgccactcccacttaacgttcgggaagttcaggttaccgctcgggtccatcagcggggtgttgtcgaggtagatgtcgcgctcgctcggaacaccggcgaactcgccctcgccaacggcgagcagaatcttggccatcgcgaccgagcgcaggctgtcgggtgcctcgaccggctgtttcggcttgctactgccgcccttgcggccggccaggtgcggatgaactgcgcccatgctttcctccgggcatga

SEQ ID NO: 367350 - DNA, 252 bp, Pseudomonas aeruginosa
gtgcggcaagccggcgatgaccgctgcttggcgagcggcattctgcccagcaccggcagtgagtacgtggccgagaatcacttcatccacctgaccgctatccagagcagtctgctcgagcaggtggcggatcaccgtggcgcccaattcaacggcgggagtgccggccagactcccctgaaaagcaccgatggcggtgcgagtggcggcaacgataacgacttcgatcatctggaacacctcatgtcatag

SEQ ID NO: 367351 - DNA, 213 bp, Pseudomonas aeruginosa
atgaagcgaaacgccaacccggcggcgaccgttgctgcctggaattccgcataccccgtcggcaccgaggtcgactaccggttccatcgcggcgcggcgccgaagcgcacccggacgacaaccgaagcccaggtgctcggcggacacactgctgtcgtctggctcgccggggtgtccggttgcgttgccctttcccactgcgagccggcctga

SEQ ID NO: 367352 - DNA, 1641 bp, Pseudomonas aeruginosa
atgaccgctgtcgacctgctgctggtcgcgaccctgctggcggccctgctcgcctggtggatacccgccctgcccggccgccgtggcctgctggcgctcgcctcgacgctggcgctcggcgccggcctgtacgctgcatgggatgaccgctggcaagccggcgtcggcgccttcgccggtttctccctgctgctcggcgcctgcctgcgccggaagcccgagcgcggcctgccgttccgaaccggttcgctgtacggcctgctggtgctgctggcaatcgccgcgctgtacctgttcccggtcgcgccgctgccggcgccgagcggcccctatgcggtcggcgtgcgcgatttcgaactggatgaccccagccggcccggcctgctcggcaccccggccgggcagccgcggcgcctgctggtacgcgcctggtacccggcacgcccgatcgccggcgccgcgccgcgtcactatttcgatccaggcgaggcgcgcagcaccgcgcggggcttcggtgaaatactcggctttccgccgttgctcgcctacctcaagcacctgcgcaccaattcctatccggacgccccgctgcgcgacgattccgctcgcctgccggtggtgttctacagccatggctacagcgccttcgccggcggcaactggaccctgatggaagaactggccagccacggctacgcggtctacgccatccagcacagcggcgacgcgtcgccgacccgcctgcccgatggcacgctgctgcccatggaccccgggctggtcgaacacctgcgccgggccgcccacgacggcttgccgcaggccatgcgccagggctatgtcagcgacgatctcgaccagcgcctcgacggccagttgcacaccgccctcgacctgcccgccccggccaaccgcgccatcaacctcagcgcgccggtatggctggccgaccgcctgttcgtccatgaccgcctgcaggccggcgcggtcccggacagggtcgccgacctcgtggccgccagcgacttcgcgcacaccggcgagatgggcatgtccttcggcggctcgaccaccggcgcggtctgcatggtcgaccgacgctgcgcggcggccgtcaacctcgatggcggcgacttcgacttcgcgcccttcgatagtgatctcccggcaccgctgctgatgctgcacgccgaccttggcaacttctaccggctgttcggcatcgaaccgccggcccgcccgagaagcttcaacgacttttcctacgaacgcttcgagcacgccggccagcgccaggacattcatcgcctggtactgcgcgattcggcccatgccgggcttaccgacaatccgctgttcatccgccggccgctgcgcgacgggctgctcggctcggcaccgacggaagtcctcatccaggctcccaacgccctggtgctgggtttcttcgatcactacctgcgcggccgcgccaacgactttccgcaagcgcagatggcgcgcttccccgcctggctgacgcgctacgacaactcggcggtgcgcgactggtggctggccaagccggaagcccagcgcctggcgctgcgacaacgcatcgacgaaatgaaacggcgcaagaccgggctggatcttccctga

SEQ ID NO: 367353 - DNA, 762 bp, Pseudomonas aeruginosa
atggaaaccaagcaggaaacgccgaaggccaagccggccatcgtgccgcaaagcgcggcctctcacatcgacagggccctcgctcagccgtcgaccgcgtcaacgccatcgtcgcagccaacgaggctgcccgacaggctgctggaacggctctgggtgaagatgaccgagatgtacgggcaccgctggacgtcgagttttggcgacaacccgaatcctgacggcgcctgggctacggtgctccaggggctgaccggccagcaattggcccacgggctcaacatgctgacgttcatgggcagccggttcgattggccgccggcggcgccgacattccgggagctctgcttgagcgtccagccggagtcgctcggtctgccggaccacgacaccgcgttcaaccaggctctggcgtgccgctaccgccaccaggtggtcaaggccgccgccgaggccaccggcgttttcgatctgcgcaccggcgaggtgaacgacgatcgcctccgcaagcgcttcgggttccactacgcagagatggtccggcggtgggcaaacaacatcccgctgagccagcccgtcatccacgcgattgagcatgacaccgggaagagcctgctggacctggccgaggatgaggccgagcagcagctccgccggcggatgcaagcccagggcctggatgggctcagtggcgcacaggcgcgggaactgctgctggccaagatgcgccggaaagcgccggaggtgcgccgtgatgcatga

SEQ ID NO: 367354 - DNA, 534 bp, Pseudomonas aeruginosa; identical to SEQ ID NO: 347682

SEQ ID NO: 367355 - DNA, 342 bp, Pseudomonas aeruginosa
atgaacgaccgcacactactcgaactggcggcgcgggcggctgggatgaacattcagcggagcaggctagacgacccgctacatcgtgattttttgatgaatggcgaaggggtaaggaatccaggtcagtgcagcttcccgtggaacccgctcaccgacgatggcgacgcgctgaggctagcagccagcttagaaatggatctgcggttcatcggtgcgggcgccatcgctcgcgctcatttcgagaattcgatctggccaaagatcaaagacgatgactacaagcgcgcaatcgtccgcgccgccgccgagatcggcaagtctatgggaggtggggagtga

SEQ ID NO: 367356 - DNA, 462 bp, Pseudomonas aeruginosa
atgagtgaggtgaagcggtatcacttcgaggcgttcatcgacaactactacaagcactatcagttcatcctagcatccgactacgacgccctcgccgccaggctagccatggctgaggacgcagcagcaaagggagatgctgctcgccagcaatgcggcggaatggagatggagatcgaggaacttcgcgctgaactagcggaactgcgcgcaagggtggtggttgtgccgaaccgcctgccgcgcagttctgacatcgcgtcgattcatcaccacagcattggctggaacgcctgcctcgacgaactggcgcgcctcaacggcctgacggtcagcgaggagctgttgaggctggccttggagttcattatggcaactaactgccagggctctatcccgctttggctgattgaagaacttcgcgccctgctcaaccaggacaaggagaacggcaatggctga

SEQ ID NO: 367357 - DNA, 1059 bp, Pseudomonas aeruginosa
atgagcgagatattcagcaacctcacgttcaatagaatcatcctgcataacgtgcataaacctaacgacaatggtgctgttcccgccagcataagcctagagctaacgacccttgacaaagcaggaaaacagctactccaagagcgcgtaagcaaagtcttgggtagcgggtcaggctccctagccatggatgtagcgaacaaaacaccagcaagttgcttcgaatactcaaaacagttgctgcaagcaaatgacaaagtattcatttcaacatctgcagcaattgcacaccatcacacagccatacataccagcaggcgctggccaggcggcacccttgtgattatttccggaacaaccggtaccgacagcaggcgatgcattattatcatcaaggcagaacagcaagcggggtttaccgaaacagcggaagacgggaagatcacactggcctatcttgaaaatcttattcttacaccccagtcaaagctttacaaaataggaatattctacgagaccgtcgcaaagacaagcgggacaattgaagatctgaacgctcacgtatttgatagcaatataaaatccgatgacgacagacaagctgcgaaatatttttactctggcttccttgggttgaaaatacccgagaatgcaatacaaaggacccgtgatttttttgaatatgcttctgacttcataagcggcatggataccgagcccgagcgaaagattgatctacagcaagcgctctacacttacctaaagacagacaaatccacgacaattgaaacggcagagtttgcgcaaaagtacctgaacaacgaagaatcggatgactttagccattatatggaaagcaagggatttccagactctgcagtaacaaaagatactaagctaattaatagaaagcttgcccgtcgtaagctaaactttaccaacaatgtaaaaatcaccgctccagctgataacttctctgagctcatccaggtattggaatcaacggaagacgataccacactgaaaatcagaggagtcttactgagccaggataaatga

SEQ ID NO: 367358 - DNA, 1005 bp, Pseudomonas aeruginosa
atgacagaggaagagtatctcaaacgttttagagatgagaccccacgcttacaggcatggggtctctttgtcatttccgaactaaacaagtcacttatcgccgaatatggcgatgaggcttatgaacgctggataaagatccctccaaaacttcgcataaagagcgaatcctcgctaatagcaaaggcatttatcctcaacagaggatggttcaccaacatatacgaagacattaccgacaaagtcggcgtacgatatgtggttggactgaccgatcaaatattaaaaatctcagagctaataaaaaagtcgcacaactgggcagagactaatagcaaagagtttgatgagtggaagcgtacagaccctcgaatctttgattaccaatcagcccatttcgtcctaacgtcacttgatgaactgcactacgatggtataaacatcccgccgggcaccaagtgcgaaatacaaataaggacgctactacagcatgcttacgcagagcttagccacgacactctttataaatcaaatgtaactagcgaaccggaagtacatcgtcttttcgccaagagcatggctctgatggaaacgaccgacgatatgctccttagggcgcacactagctctctcgaatcaattacacacttagaagatattaagagagaaataacagaagccaataaaacacacttcccccagctagagtttagcagtaagccgcgggaaaacgattatctgatagatcagcttagaccgcttataaagcaaaacctcaacacagacctaagtaattttctaaaaaaatactcaacatctattgcaaataaaatctctgacagaagagcgtcaagcccattattcgaactagaagccataacacttgtatactacttggcaaagagaaggtcatcctcactaccgaattactggccatttgaaaagtcctcattagaggcgatttatagcgatgtgggagtcgctccaccttggactaaagactga

SEQ ID NO: 367359 - DNA, 192 bp, Pseudomonas aeruginosa
atggccaagctttcccccatcgtgtccgaattcgagacagacgagcaggcagccagctacgaccgctggttccgccgcaaggtgcaggagtccttggacgatccgcgccctggggttccgcatgaccaggtgatggccgaaatggaagccatcatcgtccaagccgaggcccggcgccgaggcaacgcctaa

SEQ ID NO: 367360 - DNA, 276 bp, Pseudomonas aeruginosa
atgctgccgatcatctggcgcagcagcgccagaactgacctggcagagatcatcctctacatcgccaacgaagacccccaggcagccaggcgcctcaaggatcgcctggagtcggccgtcctgccgctggcggaacatccctacctgtaccgtcctggacgggtgcctggcacccgcgagctagtcgcccaccccaactacgtcctggtctaccgggtggtaaccgaatgcatagaggtggtgaacgtcctgcacgcccgccaggaatacccctga

SEQ ID NO: 367361 - DNA, 1050 bp, Pseudomonas aeruginosa
atgaaagcccaggaagagattttcgagatcgtaagaacagctcgccaacgaatgaaggagctgccgtccagaaggctatctcagtctactgataatggttatgttcgcgaatttaaccgtctggttggcgatgaaggtgctaatccagagaagctatggttagcaatctgcgcgactcaaagcaagtccacatataggagaagagtggctgcaacaatgcactgctgtcgtgttcagcttcaggaggcattgcggaaccaagacgcggcccagcgtgtaggtgatatgagcgccctcagataccaagtagcagttatcgaagaggtgatcggaattctaaatatcattgaagggcacaaggggcaatgccccctggacaatacagtaagacggaagtcaaagcgatctgacttgaaatatctacctggcaattggcgggctcaattgcataagcaacttgagggaagcaagtacggactggcatatctagtggaggcagtgtcgggatgtcggccaggtgagctcgagaagggcgtcaaagtgatttgctccaaagagagcaggctgttgactgtccggattgacaacggggtcaaggtgactgaccagaaaggccagccctggcgcgagatcacatatcgcgttgatcagaatccgttggtcagggctctttatgaggcctgcacaaaggttctgccgggaggagaaagaatcgagacgacagttatcgacatcgagaaagctaccaactggcgtgcagcgctgtcgtcggccgggcagaagctatggccgaggctcaaattcaggatctgcccctaccacctccggaatgccgcggctagcgactggaaacgggccgggctgggtgaagaagagatctcggccgcattaggccactgcgtaaacaagacctccagcaactatggtcagttccagatagggcagggaggtggcgggctaagtccgatcgaggtgggagctgcacgacctatcctggatacccggactctttatcttcaaatgggtcgacttgccccacccagaccctag

SEQ ID NO: 367362 - DNA, 633 bp, Pseudomonas aeruginosa
atgcgcccagtcgaatcgtattcgaacaaagttgttcgacatgcgtatccgctggggcttgagccatgccgtgaatgcccagactgtcatcattccggggctcgacgatgtcctttcccctatccccaacaccctgctggaagccatccgagcagcggaaaagaatggtgcgaggatcgcatcgttgtgcagtggcgccttcatcctggcacgcacgaggctgctagatggcttgcgtgccaccacccactggcgtggtgtacaacttctggcagatctcttcccacaggtcacagtcgaccccaatgttcttttcgtggacaacggtcggatactcacctcggcaggcgcgtgcgccggaatggatctgtgcctacacatgattcgacaagactgcggcaatgccgttgcagcagacacagctcgatgtgccgtcatgcctcttgcacgagatggcgggcaggcgcagttcatcgcctacgatccccctggcgcaccttccaatctcagcccattgctgcaatggatcgaagaacggctagatcaggaactaaccctgaaagacatggctgggcaggctgcgatgagcagccgcaccttgagtcgacggtttcaggaacaactgaacactag

SEQ ID NO: 367363 - DNA, 909 bp, Pseudomonas aeruginosa
atgtctttgtcgaaacttcgtggtgcactcggcgcactgatagcgacattcgcgctactagccgccgcgccggctacgttcgccgcaacccgggattacaccgtcactgcccccgatggagtggtgctggccgtccaggaagctggtgatcccgagggttctcccatcattttcattcatggcctgctgggcagccggctgaactggagtaagcaattgcaggaccctcgactccagcattaccgattgatcacttacgacctgcgcgggcacggcctgtcgggcaagccggccgaggccagctcctacaccgacggacgccgctgggccgatgacctggccgcgatcatcgaatcgacacacgcgcgcaagccggtgctcgtgggatggtcgctgggcggtgccgtgatatcgaactacctggcggcctatggcgacaaaggtatcgccggcgccgtctatgtcgacggagtgatcgagctgaagcccgaccagatcgtggcgcacccagacgtctatcgcgacatgattgcttcggacttgcaaacccacttggacggcgagcgcgctttcctgcggctgtgcttccaccgccagcccgacgcgaccacgttctccttgctgctggccaacgccgcgctggcatcgtgggacatgcaacgtgccgtgcagtcgatgacggtcgaggcagccaaaggattgagcaaggccgaggttccgctcctgctgatctacggcgcccaggacgcgctcgtgaaggccaagcccagtatcgtcaaggccacgagcctcaacccacggatccgcagcgagctgtattccgattcgggacacgcgccattcctcgaagaaccggagcgctttaaccgggacctgtcggatttcgttcgcatggctctttcacgctag

SEQ ID NO: 367364 - DNA, 936 bp, Pseudomonas aeruginosa
atgtcgggtatcgacggcattgcatcgtggaactcatttgctggattctcagagttgcacatcgaggcgggcggcgtggcgttccgcggcgtcactggcggctccggaggaccgcccgtgctgctgctacacggctacccacaaacccatcttgcatggcgtcatgtcgcgccacggctggcacagtcgtttacggtcgtggcgccggacctgcccggctacggtagcagtcgggctgactcggatcggccgcgctggaccaagcgccgcgtggccaacgccttgattgccttgatggccaaacttggacaccgccggtttgccgttgtgggacacgaccggggggcacgcgccggataccgccttgcgctcgattacccggggcatgtgacgcacttcgcctcgctggccgtgattccgaccctggatgcatgggatctggtggacgaacgatttggacgcaccaatttccattggttcttcctggcccagccattcgggctcccggaaaagctactgtccgccgacccgcaggcattcatcgatgctgcgctggcccgtatggcgggcgggctgggcaatgtcgagccgttcgctctcgatgcctatcggcgtgcgttccaagatcccgatgttcggcacgccatctgcgaggactatcgggcagcagcgcaggaggaccgcgcctgcgatgcggccgaccgtgccgtaggcaggaagctgtcctgccccgtgcttgtgctttggccacaagggtgggaaggcccgtcccccatcgacatctggtgccgatgggccaacaacgtccaaggcgtacccatccggggcggccaccttcaaccggaggagtcgccagaagatgtattggcagcgctgcttccgtttcttatgggcacaggggcttgcggcataccgatcgcagactcgtcagcctaa

SEQ ID NO: 367365 - DNA, 885 bp, Pseudomonas aeruginosa
atgggtctactggtgtcgttggatgttctgcttgaagaggccaacgtcactcgtgcagcacgacgcttagccatcagccagcctgcactctcagcccaactggcccgcttgcggcaggtgcttgatgatcctttgctggtgccggccgagcgcggccgaggtatgcggttgacgccacgtgcagcgcagctgaaatcacccctgcatgagttgctgacacggcttgaggatcttgtcgaggcgccctacgctttcgatcccagcacggccaagcgcgatttcacgatcgccctcaatgacaatgccgcgatgacgattggactggatctcatcgagtgcattcggaagcagtcgtatgcaggcattagattggccatgctccagataccccgggatgaggtcctggatcttgcaactcgcggccgcatcgacctggtgatcggcacccgagccttcatgccccctggtttgcgcacccatgatctggtcgacgacaggtttcaggtggcccaacgcaaagggcatcctcgcggcacggctgcaatgacgctggagcaatactgcgcttatgagcatgtgctggtgtctaccaatggcagttatcacagtgggatcgatgattttcttgcagagctggggcattatcgacacaccacggtatccgtgcagtactacacagcggtgccaccgatacttgagcgcacgaactgcctggcgacactgcctgagcgcttcctacaccgctttgatcacatgatcgaccgcttcgacctcccattcgcatttgatccgttccagctgcaggtcggttggcatccgcgctttgacgaagatttagggcatcagtggctgcgtgaacagctgattgcggcgaggcccttctga

SEQ ID NO: 367366 - DNA, 393 bp, Pseudomonas aeruginosa
atgcatacctacgaaacaaagcttgctttggccaagcagtttcatgccgcactgacccgccgcgactggcaggcgatccgtaagcttcttaccgacgatgccacctgggttctgcccggagacaatcagatctctggtccagcggtcggtgcggaagcagtcgttgccagagctgagctaattgccagcttcggcctgaatttcgagctcaagcacatcctggtaagccgggataatgtcgcgctctcgctgcataacaccgcacgccggaatgacctcgtgctggacgaacacctggccacggtctgcaccctgcgcgatggcaagatcgctgctatcgagacctatctgtccgacctgccgggcatgaatgccttttttgccaggaactga

SEQ ID NO: 367367 - DNA, 789 bp, Pseudomonas aeruginosa
atgaaggtcgaatcgaacggcatagagatccatgtcgaggaacaagggcaaggtgatccgtcactcgtttttctgcattactggggcggctcgtctcgcacttggaagcatgtctgctccaggctggcgccgaacttccatacgcttgctctcgatcatcgcggctggggtcgatccgacgcgccttcgatgggctacgggctggcagaccttgcagccgatgcggagggcgtgatcgcagcgctgcacccgaagcgctacgttctgatcggtcactctatgggaggcaaggttgctcagcttatggcgtcgcggcggcctgtcggactggtcgggctggttctcgtcgctccttcaccgccatcgccaatgatcttgccgaaagaggcacgcgaaatgatggcaggagcctacgcaaatcgcgaaacagtggaggcgactatcgacaacgtgctgacggccctcccactgtcagcggaggatcgcgaacaagtgatcgcggacagcttgcgtggcgcgccagcggccaagctagcttggcccagagcgaccagcttggaagacatcaccggacaggtaggtgccatcgacgtacctacgcttgttattgcaggcgagcgggatcgcgtggattcgcccgaggtactgaggaaagaattacttccccgcgtatcgcaagccgtcatgaccgtagtaccaggtgcagggcatttgcctatgttagaaacaccggatgcattgactccattgattgagaatttctgccgttcactgccagggaaggggtga

SEQ ID NO: 367368 - DNA, 927 bp, Pseudomonas aeruginosa
atggatagattgctcagcatggcggtgttcgtctccgcagtcgaagaaggcagcttggtaagcgccgctcgacggtttggcctgtcaccctcgatggcgggcaagcacgtttccgcgatcgagggacagttgaaagttcggttgcttcaacgaagtacgcgcaagttgacgctaacagatgtagggcggtcctactacacgcgatgcaagcgcttactggaagagtacgaggacgcgaatcgcgaagcccaggacgcgcaacagagtgtgcgtggaatgttgcgcgtggctgcgccgacaacctttggggcactgcatcttggtcgcgttgtatcgaattatctggctgaataccccgatgtctcgatcgagaccacgctgagcgatcgctatgtcgatctactggcagatggcatcgacattgctatccgcatcggccgtctgcaagactccgatctcgttgctcggcggctcgcctcgtgtcgcatgatgttctgcgcagcgccatcctttttggcacgacatggcgagccgagaaccgtcgaacagctccgccaggcacctcggctcgctttctcccaggcggtttcagccggagactggagcgtcacggatgctaacggccagacccatcacattgatggtgcgatccggctcgctgcaaacaacatgcagatgctgctagcggcagcgctgacaggggcgggggtggtctacggccccagcttcgtgttcgagcagtccatcgccagcggtgcgcttcgtgtcctgctgcccgaccacaaaacaactgatttggcgattcatgccatctatccgagcaagcggcatgtgtcgttgaaagttcgccgcttcatcgagcatctgagcatgagcttcggcgacacgcagccatgggatctcatgcataggagcactacggcttga

SEQ ID NO: 367369 - DNA, 690 bp, Pseudomonas aeruginosa
atgagtgcggttgcaggaccagtcgatggtgaggcgggatttccgctgaagatctacgatttccctcggggcccttacccgacgcgtgtccggatcgccctagcagaaaaaaacctccagtcacgcgtggagttcgtgatggttgatctccgcaagggggagcacaaggatcccaggttcatctcggataaaaactactccggaacggttccggtgcttgagcttgcggatggagcgtgcattgccgagtgcaccgccatcacggagtatctcgatgcgcttgtcggcggtccggttttgacgggctccacagcgttcgagaggggaatgattcacatgatgagcaagcgcgccgaactggagctgcttgacgccatcagtgtttacttccaccatggaacgccgggtttggggccactggtggagcaataccagaacagggaatggggactcaggcagcgcgacaaggccttgcgtggcatgcattatttcgacgatgtgcttcgcaagcgagcttatgttgccggcgacgcgttctccatggccgacattacggtcatcgccggactgatattcgctgatatcgtcgacttggcggtacccgccgaatgcacggcgctcttggcatggtacgaaaggatgaaaatgcgccccagcgtaaagagccaacccgcatttgctcgcaggtag

SEQ ID NO: 367370 - DNA, 894 bp, Pseudomonas aeruginosa
atgtccgagttctccgacatccgccttttcaccctggtggcgcgccatcgcagcttggctgcggccgcgcgcgaacttggcgtcaccccgccagcggtcagcaagcgcctggcgcatttggaaaagcggctcggcgtgcgcctgacccatcgcacgacacgacgcctgacactcacgccggagggcgaacgctacctggccgagggatcacgcctgctcggggaattgcaggaacttgagcaagtgctgatccgcggccatgccgaaccggccggactgctccgtgtcaatgcctcatacggtttcggtcgtgcgcgggtggcaccggccatttcggcgttcgttgcccgctatcccgccatacgggtgcaactgcaattgaccgaccagcccttgaacctgcgcgaacacggttatgacatcggcatccgcttcggcgatcctcccagcgcccggatcaatgcaaggttgttgctgcgcaatcaccgtcttgtatgcgcttcgccggcctatgttgcccggaacggtaagccgaacgttccgcacgacttggtgcgtcacgcctgcttggtcgttcgggaaaacgatgcggcctacggcgcttggcatttccgccgcggaaagtccaccgagacggtcaaagtcgacaatgtgctatcgagcaacgatggcaacgccgtgctgcgctggacgctggacggccatggcatcgccatccgctcagcgtgggaaatcgcaccctacctggcccggggcgaactgattccattgctgagggattggaagctacccaacgccgacatctacgcgacctacctggaacgcagcgaggtgtcgtccgccaaagtgcgcgcgtttcttgacttcacggcaaaatacttggcgacgagttga

SEQ ID NO: 367371 - DNA, 879 bp, Pseudomonas aeruginosa
atgttcgaaggcttttccgacgtatccgccacggtcgatggcatcaagattcatgcgttgatggccggcaccgggccggcgctgcttctgctgcatggacaccctcagacacacgcgatctggcacaaggtggctccgacgctggcgcggcaattcacggttgtcgttgcggacctgcgcggctatggcgacagcgggaagccgccaggcgagccagaccacgccaactatgccaagcgtcggatggccttggaccaagtgcgattaatgcaggcgctgggcctgccgacgttcgcggtgatcggtcatgaccggggtggtcgggtcgcggcgcggatggcgctggatcatccagatgtggtatcccgcctggtcacgctggatgtggcacccacgctggcgatgtaccagcagacctcattcgaattcgcgcacgcctactggcactggttcttcctcgtgcgaccgtcgcctttcccagagacgttgatccgggccgacccggatctctacctgaagcagaccatgggagcccgcagtgccggcctgaagcctttcgcgccggaggcctatgctgcctatctgcgttgcctgtccgatccggcaaccgcacatggcatctgcgaggactaccgtgcctcggtaggtatcgacctcgaacacgatcaggccgatcttgccgcgggcaagcagatccaatgtcccttcctggcattgtggggacgcgatggcgtgatcgaacggtgcttcgaccctctggccgagtggcgccgctggaatcccggcgtaaagggtatggcgctgccctgcggccactacatcccggaggaagcacccgaggtgttgctcgatcacgtcctcgccttcctgccttcatga

SEQ ID NO: 367372 - DNA, 1419 bp, Pseudomonas aeruginosa
atgccagcgacgacgctttaccgaaaactggtcgattcgcacaccgtcgaacgcctggatgtcgacaacgtgctgctatatgtcgacctgcacatcatgaacgaatacaccagcccacaagcttttgcaggactggcgcaacgtggattgcgggtgcggcgcccacaccagcaaatgggcgtggtcgatcacgtcatccccacgcgcccggtgccgatcgcggcgcgtacgatcgacatcgcccccgccgcacggcaagcggcgaactttgccgccaactgtgctgagcaggggatcgagctgttcgacgtgcgtgatccgatgcaaggaatcgagcatgtcgtcgcgccggaacttggcctgatccgtcccggcatggtcgtattatgcggcgacagccataccacgacctacggtgccctcggggcactcgggttcgggatcggcacgtcggaagtggagcatgtgcttgccacgcagactctggtgtaccgcgtggccaaggacatgcgaatccaagtcgatggtcgactgcctctggggacgacgtccaaggacctgatcttgcacatcatcgccaagatcggagcacaaggcgcgcgtggctatgcggtcgagtatgtcggcgaagctatcgccgcactgtccgccgaggcgcgcatgaccttgtgcaacatgaccgtggaagccggtgcccgcgcggcgctgatcgcgcctgacgcgatcacatccgactacgtgtccgagcggatctgcgatatggacgacgctgcgctggcggccgcgcacacggcatggaagcaactccgcacggacgcatcggcgcgtttcgatgccgagcatcgcttcgatgcttccgaggtcgccccctatgtcacctgggggaccagtcccgaccaggcgctgccggtgaatggcaccgtgccgccattgagcgacgcctcgggtgatatcgagaaggcaacttggcacaaggcgctggattacatcggcttggcgcctggcacgccgatcgaaggtattccgatcgaccgcgtgttcatcggttcgtgtacgaatgcccgcatcgaggacctgcgcgaggtggcgcgggtggtgcaggggcgcaaggttgcaccaagcgtgcgggcgatggtggtgcctggctccgggctggtccgtgaccaggccgaacgcgaagggatcgcgcaggtgctggtcgaggcagggttcgaatggcgacagccgggctgttcgatgtgcctggcgatgaacgacgacgtactcgcgccgggcgagcgttgcgcctctacgaccaaccgcaacttcgagggtcggcagggccggggcagccgcacgcatctgatgagtccggccatggctgccgctgccgcaatcgccggacgcatcgtcgacattcgcaaggagttccgtgcatga

SEQ ID NO: 367373 - DNA, 702 bp, Pseudomonas aeruginosa
atgagcgaaacgcaccgtatcacaggcgtggcggcgccattgccaatcggcaacctggacaccgaccagatcatgcccaagcagttcctgctggggatcgacaagagcggattggcagacggactgctgcatgacctgcgtttcgacaccgaagggcggcttcgcccggacttcgtgctcaaccgtccggaatatcgcggcgcgcgcattctgttgggcggggcgaacttcggctgcggatcgagccgggagcacgcggtatggggattgcagcaggccgggttcgatgctgtcgtcgcgccgagttacggagagatcttctatttcaatgcgatgaacaatcgcctgctgcttgtcaccttgccgccggagcaggtccaggcgttgatggacagcgtggcgcatggccaggaaaagcgcctgaccatcgacgtggagaagcaaatcgtttccacgccgcagggcgatgaatatcccttcgatttgcaacccaggcagaagcggatgctggtcgatggcttggacatgatcggcatgaccttgcgcgatgcagcagccatcgaccggttcgaagctgagcattggcaggtacgtccctggtgccgtgtcgatatcgccaggacgcgggcaagaaaacgcggtgcgggcttgaattccgtacgcagccaaggacaggccttgtcctccgaaaaggaaaggtag

SEQ ID NO: 367374 - DNA, 153 bp, Pseudomonas aeruginosa
atgcaggtcaacgatctgatcgttggcctcatcgcccacgagctcaaagcgttcccggccagcaaagggcagtacgggtacgtctatgcgctcaacgcctcccgcgaccatgtggtctgccgcggcattccttccgccgaggacatccagtag

SEQ ID NO: 367375 - DNA, 372 bp, Pseudomonas aeruginosa
atgaagcacaccgcaggcatgaccatcgcagcgcgactcggccgctggctgggcggcgtatggcgcggttggctgcgcgcggagcgtcgggtgcatcgatggctgatggcgcaaggactgccggcgggcggtgtagcggtgctgatctggggggtcaagctggcgacccttggggtgttgctgtacatcgcggtctgggcggcgctgttgccggtcgctctcgtcgtggcagccaggatggcggagcaagcgccgcaaggcgacgatgatttcctcggacgcaaggccgaagagctggatcatcgcgaaagccttgcctacgaccccatcaactacagcgatgacccagatccacgattcgaagacgattga

SEQ ID NO: 367376 - DNA, 519 bp, Pseudomonas aeruginosa
atgacgtcgttctccgacccgacggcggtatcgggttatgcggaaagaaccgcgaggatcgtgccgggcctgcgcgacctgcaccggatggcgggcgtgctgctggccgaacgcgcgccggccgacgcgcgcatctatatcgacagcgcccccaaggggcccttcgatggcgcgacctgcctgctgacactgcatttcctgccgccagccgagcggctgaagacgctgcagcaaatacacctgcgactcaagcccggtgcgtcccttgtcgtcacgcatcacagttttcccggcgacgatcccgtcagggacagatggctctcgcgcaatgcggcgtttgcggctgcttccggcgtaccagtgcgtcaagccgaaggcagcatcgcggcgatcaaggaacggctgcccgtgctttcgcccgcgcaggatgtcgatctgctccgcgaggctggattcacggacatcgaccttttctattgcgcgttcaccttcaagggttgggtcgcccatcgagcatga

SEQ ID NO: 367377 - DNA, 924 bp, Pseudomonas aeruginosa
atgaatcacgatgtgatcgtcgtcggcggaagctactcaggaatggccgcgaccctgcaactggtgcgcgcacgcaggtcagtgctggtgatcgatgcgggccagcggcgcaaccgcttcgccagccattcacacggatttctcggtcaggatggtgtgccgccaggtgaaatcgctgcaaacgcacgccgccagcttcaagcctatccaacgctgacctggcttgaaggtcgggtggaagctgtcgccgggcaggcggatgaattcaccgtcacgacggctgatggcgagtcgcacctggggcgacgcattctgttggcgacgggggtgaccgaccagcttccagccatcgacgggctcgcgcaacgctgggggaagacggtttttcactgcccgtactgccatggctatgaacttggacaaggccgcatcggcatcgtcggtgccagcccgatgtccatccatcaggctgaactgctcacggattggggggatgtcaccttgttcgtcaacggtgcattggaactcaatgaggaaatcaggtccactttggaacgccgaggcgtggtcatcgaagaggcgcgcatcgacaaaatcgaggggcatgccgacgtgacattggtggacggaaggcgactgagctttgcgggcctgtttgttgcaacgcgaaccgttccctccgaccctttggccaggacaatcggctgtgcactggaagaaacgcccatgggcatccagatccgcacggatgccgagagcaagacctcggtgcctgggatctttgcctgcggcgatgtcgcgcgggcaccgcattcggtgtcgctggccgtgggcaacggtgccatgaccggcgcccagattcaccgatcactgctttggcccgagacgatcgagccagcgcaagcggaaggccgcgctcgatga

SEQ ID NO: 367378 - DNA, 549 bp, Pseudomonas aeruginosa
gtgcaggtgcgtagcggcgcgaccatggtcggctactacaaggagccggagaagaccgcagaggtgctcaccgccgacggtttcctgcgcaccggcgacaagggcgagcaggacgccgaaggcaacctgcgcctgaccgggcggatgaaggaaatcttcaagaccagcaagggcaagtacgtggcgccggcgccgatcgagaaccgcctggcggtacacgatcgcatcgagcaggtctgcgtggtcggcgagggcctcagcgcgccgttggggctctgcgtgctctccgaggtcggtcgccgggaggccctcaacgggacccgcggggcgctggaaagcagcctgcgggcgcacctggaacaggtcaacggtgcgcttgacaagcacgagcgcctggtcggcctggtcctggtgcgggaaacctgggcggtggacaacggtttcctcacgccgaccttgaagatcaagcgcaatatggtggaaggtgcctatggctcgcgcttccacgaatgggtggaacgccgcgaggccgtgctctggcacgaatga

SEQ ID NO: 367379 - DNA, 1056 bp, Pseudomonas aeruginosa
gtggtcactgcaaatcgtctgccgctcgaagtcttcttcgagcgcgaaaagcgtcatccgcaacggcgttacctggtgcagcccatcggtggcggccgggtcgaggagctgagctggggcgaggtgggcgaccaggcgcggcgtgcagccgcctggttgcgcagcctggatctccccgccggcagccgtatcgcgatcatctcgaagaactgtgcgcactggatcgtcactgacctggcgatctggatggccgggcacgtttccgtccccctctatcccaatctcaccgccgagtcggcgcgccaggtgctggagcattccgagtcggcggtggtcttcgtcggcaagctcgacgattggccggcgatggcgcccggagtccccgagggcataccgaccgtggccatgccgttgcacccggaagggcgtttcgaccgccagtggagcgacctgcaggcctgcgcgccgctcgaaggcgacacgccgaccgctgccgagcaactcgccaccctgatctacacctccggaaccaccggcgtgcccaagggggtgatgcacaacttcagcagtttcgccttcgccgccagccgcggcgtggaactgttcggcactcgcgaagacgaccggatgctctcctacctgccgctgtgccacgtggcggagcggatgttcgtcgagatggggtcgctctacgggggaaccacggtgttcttcgccgaaagcctggacaccttcgtcgaggacatgaagcgtgcgcggccgaccctgctgttcggcgtgccgcgcatctggaccaagttccagatgggggtgtattcgaagatgccggcgcagaagctcgaccgcctgctgaagctgccgatcctcggccgcatcgtcggtcgcaaggtgctcgccgggctaggcctggacgcggtgcgctacgcgctctgcggcgcggcgccggtacccgaggcgctgctgctctggtatcgccgcctgggcctggatgtgctcgaggtctacgggatgaccgagaacagcggttactcccacgtctgccggcccggcaggtag

SEQ ID NO: 367380 - DNA, 2664 bp, Pseudomonas aeruginosa
atgaagtttgagactccagaattaaaagacctaaaaaacgagagcgatgtagagcagaagcttatatttccattagtatgtagccctgccccctatgggctttcacatcctcaacaacacatccttactaagcaaaatataaaatccctagaaataaataaaggaagacagacaaaatcctatttccctgactatctaatcacctctcgcgggtacccgcttatagttattgaggcaaaagctcccggtgaggatttagacgaagcctatagagaagccaggctatatgcacaagaaataaatgctctctatccgtcaggcataaacccctgttccctcataattgcctgtaatggagaaaaaataatagcaggcgctagcgacagcttcgaacctagtttttcaatccctttaaacaacataaatccatcaaattcagaattttcaaaattctgtgaaaccttcaattcctcagcgacagaacttttttgcgatagatttgatgccaagattaaaccagaatatctaaaaaaaccccgaaggctggtaggtgggaaatctgtacaaaatgaggaggtaggccataactcatttggcgcaacaatagccgcggaactaggacatatattcaatccaaacaccattgaagacagaatatatatagtcaaaaatggatatatcccttcaaaaagaagggagcgttatatagatccaattgacaagataattcgcgcctccaaaccaccaagcgagttaaactcttcactaattgaagacactgccaaccctaaagagatcatccaagcactttcccgcggcaaaaatctcgagcataaagtaattttacttgtaggaagcgtgggatcaggaaaaactacatttattgactatctcagagaagtcgcactcccccgcgacataatagaaacatccctctggataagaataaatatgaatgaatcgccagtagcaagcgatgaaatttataactggcttagagtccaaatagcagaaggctgcaaaaaagaaacccccgacctcgacttcgaagagctagaaataataaaaaaactgtacgccccggaagtaaataaatttgaaaaatctattggcaggctactaaaggggacacctgagtacaatataaaactagcagaattaatagagagactagaatctgacattcactcaacagcaatagcattcactagattctgtgggtctgagcgagggaagcttcctataatcgttctcgacaactgcgataagcgcacactcaacgaacaactccttatgtttcaggccgcacaatggctacagagtgaattcaaagcacttgttattcttcctttacgggaagaaacctatgacaaccatcgagaacgccctcctctagacactgcactcaaagatttggtcttccgaatagagcccccaatgtttcaaacagtccttgtcaaaagagttcaactcgcacttagagaaatgagcagaggacaaaatggttctctccggtatgatcttccaaatggttacactgttgagtatagcaagaccgatacctcactatatttaatgtcaattttaaggtccattttcgagcacgacatttatattagaagaattatagtaggactgtctgcaagaaatatccgtagagcaatggagattttcttagaattctgtactagcggacacataaaagaggatcaaatttttaaaataagaaaaagcgaaggcagatacgcgctgccactccatcaagtttctcgcgttctattaaggatgaatcgcagatattatgatagcgacgcctcttacgtaaaaaatattttttcaacaacacaatttgacgctagaacaaattacttttcacgtttcctgatcttaagatggcttaagtctagattccatcaatatggttcatctagtgtaaaaggatattttaaaatctcagacatcaaatcaagcatatcaatttatggatttgatgacgccattataactcgagacatagaataccttttaagttcacactgccttgtgtcggaggatttcagagttgaccagctagcagacgatgacctagtaaaaatagcacctgccggcttcgttcatttagacttactcagaaatatcacttatcttgcggcattagctgaagacacgctattctcagatgagtcaactgcaaaaagaattgcccatagaatagtcgacctcgaacatcagtacgatgcccacatcgcttatgaaaacgccaaagacttagtagattacttacactcagaacgacaaagacaatcacagttgtcggaagccttcttaaggcgaagtgaattcatggagcttacagatattggagaaatggagcttgccttaaaagatttcctagcaaacagcgccactccaatatggcaaaaaatcgaagagctttaccccataggatctatacatactggatgcataagaaacattcactacaaatatggagtattcgtgacactacatcaggaggtgaccggcctcgtacataaaagcaaactcaaaaacctttcagaagtaaaaacaagcttaaaggaaggtgacgatataaccgttagaattgagagcacaaacatgctaagaaaaaaaatagaactatctatagttgaaaatatgtag

SEQ ID NO: 367381 - DNA, 162 bp, Pseudomonas aeruginosa
atgctcaccggtgatgccagcaatgccgacccggtatgcgccaagtcgcccgaccatgacttgatcctgaaggcccgcgagcaggcgcaaagcgccgacctcgccatagaacagatgactttccgaaatgaacgaaactcccgtgtcatcgcccgaggctga

SEQ ID NO: 367382 - DNA, 1089 bp, Pseudomonas aeruginosa
atgtcgtcggggtcttatttcccgccgccggtcaaggttgttgagataccgaaggcatcggggggtatacgcaggctgggagtgcctacggtcagcgaccgtatcgcacaaactgtagtcaaactcctcatcgagccgaagctggatgcgcttttccatccggactcatatggataccgaccagggcgttcagccaaacaggccatagcgatcacacgcgagcgctgctggcgatacgactgggtggtggagtttgatatcaaggcggcttttgatcacattgatcatgaactgctgatgaaagcggtgcgaacccatatcaaagaggactggatactgctgtacatcgaacgatggctggttgctccgttcgaggcagcagatggcgttcgcattcaacgcgaacgtggcaccccgcaaggcggcgtgatcagtcccatgctgatgaatctgttcatgcattacacctttgacgcttggatgcaacgaaacagcccaaactgtccttttgcccggtacgccgatgatgcggtagtgcattgtcgtagcgagaggcaggcagaacacgtgatgcgttcaatcgcttcacgtctagcagtttgtggtctcacgatgcatcccgagaaatcgaaaatcgtgtactgcaaggacagcaatcgacgcgcggagtatccgcatgtgagctttaccttccttggtttcacttttagacccaggaaggcaatcggccaacagaacaaccttttcaccagcttcctgccgggagtcagtgcgcaagcgttgaagcggatgcggcgagcagtgcgcgagtggcgggtcaaccgccaaactcacgtgacgctggctgctgtggctcggctttacaacccagtgatacaaggttggtggcagtactatggcgcgttctatcggacggccatgcttggcatctttcgacatatcgatagcgcactcaagcgttgggccggtcgtaagtacaaaatacttcacgggcgcaagcggcgcatatctcaatggttggacacggtgcagacggctgcccctcgactgttttatcactggcaagtaaccgagcaacaggttggataa

SEQ ID NO: 367383 - DNA, 234 bp, Pseudomonas aeruginosa; identical to SEQ ID NO: 341916

SEQ ID NO: 367384 - DNA, 192 bp, Pseudomonas aeruginosa
atggatcaggccaaggactacgtgttcagcaacctgggtggtgtgcctgcgcagtggctccaggtcctggggcttctgcaggtcgatgtttgcatcaacatcctgttctccgcgtacatcgcccgcgctgtgctgtggggtatggacaagtctggcggcaagtccggcatgcgctggaccgggccgaagtaa

SEQ ID NO: 367385 - DNA, 318 bp, Pseudomonas aeruginosa; identical to SEQ ID NO: 339241

SEQ ID NO: 367386 - DNA, 510 bp, Pseudomonas aeruginosa
gtgttccagcatgtacagggcgtgaagaacgccgtgtccggctacgacggcggcgcggccaacacggcgcagtacgagtcggtcagcgagggcgacaccggccacgccgagtcggtgtcggtgacctacgatccgagcaaggtcagctacggcaagctgctgcagatctacttctcggtggcccacaaccccaccgaactcaaccgccagggcccggacagtggcacccagtaccgctcggagattttcgcgcaaaatgccgagcagcaaaaagtcgcccaggcctacatcgcgcagctcgatgctgccaaggccttcgccaagccgatcgtgaccaaagtggagatgggcaaggcgttttacccggccgagtcctatcaccaggacttcctcaccgagaacccgtcctacccctacattgtgatcaatgacctgccgaaagtggcgcagctgaaaaaactgttcccggaccaataccgcgcagaacccgtgctggtaaaaaaccaataa

SEQ ID NO: 367387 - DNA, 276 bp, Pseudomonas aeruginosa
atgtcgcgtatccacatcgaacgtccgcacagcctggggctggacgccgcacgggccaaggcggagaaactggccgaacgtctggcgaaggagcactgcgtgcagtgcgaatggcagggcgacgagctgaccttcaaacgcagtggcgtcgacggcaggatcgcggtgggggcggacaaggtcgcggtggacgtcaagctcggcctgatgctgtcggccatgagcggcctgctcaagagcgagatcgagaaggcgctggacaaggcgctggcctga

SEQ ID NO: 367388 - DNA, 300 bp, Pseudomonas aeruginosa
atgatcgaagagaaacaggctccagagcaggacctggccggcgccatccgcgacctgctggcacacctgcgcggcccgaaagtggctccggaggacgaactctggaccacgagagaaatcggcgagtacctcaagctctcgccagccacggttgaaggtcgcgtggtcactcgaccggacttccctgccccgctgcagccatgcggcacggtcaaggcgtccaagcgatggtttgcgatagacgtaaagaagtgggcgaggcagaacagcagcaagctgccgaaaggacgaaggcgttaa

SEQ ID NO: 367389 - DNA, 606 bp, Pseudomonas aeruginosa
atgtcacttttcagtcaacttgaagagcttcaatggaagcagctgcagcatgacgaaaagtaccacaaagatatctggcttttaaatgttcagcagcgcataacgcatatgactttgcatttagcaaaatatagcgcaaagctttcggtttctgcattcgaaaataacgaaatcgaatttaaaaaaaccatagtcgactgccttataatcgtattttcttcagcaaatatttttaactctagaatttatgatatttcgctgaacgaacaagaaaaagatttccccgacatcaaaagtctagccaactatttggctaacagcgaacgggtcagatcgtcaaatgacaggctaggtgatttttctaaagccttttccatacagaccggaattatgtgcaaagctgcagaatccctagaccacctagagccttttccattcaggcagacaatcaccgagagcctcgggaagcttttcaagacttcccttaccgctctttattgcctcacagaccaagacctggaaagtttattttctgagcgactagttgctgttgagaggaaaaatattttcttcaaccggctcggcaattacgaaacagggtactaa

SEQ ID NO: 367390 - DNA, 525 bp, Pseudomonas aeruginosa
gtgcaacccaagggcaagaccgggcgcgccgacatcgccctgggcttgatcaacaagctctacggcatcgagcgcgacctcaaggcggcgagcgacgaagcccggcaggccgggcggcagcagcacagcgtgccgctgctcgcgcagctacgcgcctggctggagaaaacccagccccaggtcaccgcgcagaatgccctgggcaaggcgctgagctacctggccagcaactggagccgcctggtgcgctacgtcgaagccggctttttaccgatcgacaacaacgcggccgagcgggccatccggcctttcgttatcggccgcaagaactggctgttcagcgacacgccccggggcgcgtccgccagcgcccagctctacagcctggtggaaaccgccaaggccaacggccaggaaccctacgcctacctgcgccacgtcctcgaacgactgcctcaggcccaggccgtcgaggactacgacgcgctgctgccgtggaactgcacaccgaccctgcctcgctaa

SEQ ID NO: 367391 - DNA, 273 bp, Pseudomonas aeruginosa
atgaaagcaccctgggcattgcccatattaaatttcttcacctttgcgcacgctgattctttcactccttcacattcgtgctccgaaccatacaagccacttgaattcaacaaccagtgggaattagataattttaatagcgaggtggaagattacaaacaatgcatctctgattttgtcgacgagcaaaatgacgaagctaagaagcatcaagaagccgctcaagaagcaatcgaagagtggaatcactacgttaactatgagctcaattag

SEQ ID NO: 367392 - DNA, 519 bp, Pseudomonas aeruginosa
ttgatcaatcgcatgattctgggcggcgcgctggcgctgggcctggccgccggccccgtagccgccgctgaagtctcgggcgctctgggcgtcaccgggcagggcgacatgaccttccgcgccagcctggcgcaggcatgggacaagagctggtggcaaagcgaaaccggccagctgagcggctactgggacgcggcctacacctactgggaaggtggcgacgactattccggcgcgcactcgctgtcgttcagcccggtgttcacctatgagttcagtggctggcgctacaccccgtacgtcgaggccggcatcggcgtcgcgttcttctccaagaccgacgtcggcgagcagcagctgggctcctcgttcaacttcgaggatcgcctcggcgtcggcctgaaactgccgggcgagcgcaaggtcggcctgcgtgccatgcattactccaacgccggcatcaagcagccgaacgacggaatcgaatcctactcattgttctacaacaaagccttctga

SEQ ID NO: 367393 - DNA, 1458 bp, Pseudomonas aeruginosa
atgaagttcaagcctttgaccctcgcggttgccctggcactgggcggctgcagtctgatcccgcagtaccagcgaccgcaggcgccgatcgaggccgactggccgcagggcgcggcctacgatcaggcggagcagggcgacacgcgcgcggccgatctgcgctggcaggagttcttccgcgacgccgcgctgcgcgagctgatcggcgtggcgctgcagaacaaccgcgacctgcgtcaggccgcgctgaacgtcgaggcctaccgcgcgctgcaccgcatccagcgtgccgagctgttccccggcgtcgatgcgggcggcagtggcagtcgccagcgcctgccggacgacctctcgccgaccggcgaggcgggtatccagagccgctacgacgtagcgctgggcgtatcctacgagctggacgccttcggccgcatccgcagcctcagccgcgcggcgctggagcagtacctggccagcgaagaagcccagcgcagcgtgcacatcgctctggtcggcgacgtcgccaccgcctatttcgcctggcgcaccgaccaggcgctgctggagctgagcgaggccacgctggaaagctaccggcagagcctgtcgctgatcgaagccagtgccgaagccggcactgcctcggaactggacgtgcgccaggcgcgcacgctggtcgatcaggcgcgtacgcagaaggcgctgtacacccggctcatcgccgaggatgtcaacgccttgcgcctgctgctgggcgcggcgattccgaacgatctgccggcaggcggcaagttgcagatggatacgctggccgatttccccgccgggctgccggccgatctgctgctgcgtcgcccggacatccgcgccgcggagcaccgcctgctggccgccaacgccaatatcggcgcggcacgcgcggcgttcttcccgagcatcagcctgaccggcagcgccggcaccgccagcagcgaactggacggcctgttcgacggcggttccggggcctggagtctggtcccgcggatcaacctgccgatcttcacggccgggcggttgaaggccaatctcgactatgccgagatccagaaggacatccacgtcgcggcgtacgagaaggccatccagaccgccttccgcgaggtcgccgacggcctcgccgcgcgcggcacctacgacgaacaggtacaggcgcagagcgatctggtcgacaataaccgcgcctactaccagctggcccgccagcgttacgacgagggcgtggatacctacctcaccgtgctcgacgcccagcgcgagctgttcgcgtcgcagcgccagctgctcagcgaccatctgttgcagctgaaccgcgaagtccagctgtatcgcgccctgggtggcggctggaagacggacacggccgagcgttcggccgcgggggctgatggccccgcaacactcaccatgaactga

SEQ ID NO: 367394 - DNA, 1149 bp, Pseudomonas aeruginosa
gtgaatcaccgaaaagctaaatcgcgcgcatggcattccgttccgctggcggcactgttgctggccggctgcgtggagtcggacaagacgcaaaccgcggcgccggtgcccgaggtcggcgtctacaccgtacaggcgcagccgctgaccctgaccaccgacctgccgggtcgcaccagcgcctaccgggtcgccgaggtgcgcccgcaggtttccggcatcctccagcagcgcctgttcaccgagggctcggaggtgaagaaaggccagcagctgtaccagatcgatccgcgcacctacgaggcgcgcctggcccgcgccgaagccaacctgaccaccgccgagaacctggcccgccgctacgagcgcctgctgaagaccaatgcggtcagccagcagcagtacgacgacgcccaggccgcctggaagcaggcgcaggcggaagtgcaggtggcacgcatcgacgtgcagtacaccaaggtgctggcgccgatctccgggcgcatcggccgctcggcagtgaccgagggggcgctggtcaccaacggccaggcccaggaactggccaccgtgacccagctcgatccgatatacgtggacgtcaaccagccgatcaccaagctgctcggcctgcgccgcgcgctggaatccggccgcctgcagaaaaccggcagtgaccaggccgaggtcagcctgacgctcgatgacggcagcgcctatccgttgcccggcaccctgaagttctccgaggtgagcgtcgacccgaccaccggttcggtgacgttgcgcgccgagtttcccaacccggaccgcaagctactgccgggcatgttcgtgcatgcgctgctcaaggaaggcacccagcaggacgccatcctcgtgccgcagcaggcggtcagtcgcgatgcccgcggcgtacccagcgtctgggtggtcaagccggacgacagcgtcgagcgccgcgaggtcgagaccctgcgcaccgtcggcaatgcctggctgatcggcaagggcgtcgccgatggcgaacgggtggtcaccgaaggcacgcagcgggtacgcagcggcatcaccgtcaagccggtggcggccagcaacgtcagactggtcgccgagttcgctccgaagaccgacgccgtcgccaactga

SEQ ID NO: 367395 - DNA, 1371 bp, Pseudomonas aeruginosa; identical to SEQ ID NO: 344112

SEQ ID NO: 367396 - DNA, 330 bp, Pseudomonas aeruginosa
atgtcattgcagtgtcctcgctgtcattcccccaaagtcgcttccttccatcacgccatgaagatcaccgctgcggtaggcgccgccggcggcgcggctcgtggcgtcagtgctgcgttagcaggcggtcagactggcgcggccattggcgctattgccggccctgttggcatcgccatcggttcagtttccggcgccatcatcggtgggttggttggcggcgttagcggttgtgcgctgggcgcccagcttggcgacaaactcgaccgccacgtgttggctaacaacctgtgtctgctctgcgggcatcgcttcaacctgccggcctga

SEQ ID NO: 367397 - DNA, 804 bp, Pseudomonas aeruginosa
atgaaaaagatcattagcattctgctgttcatgttctgcaccaccgctctggccggtgagagtatggaccaaagggactggagcagagtcatttacccagacgagacgtccaccgaaggtctccctgaagtcatcccgtgtcgatcggatgacttccaaggcaaagcctttatcgtctgtacctggctgtcatccgaccggcaggtggtcgtttgggatgcccaacgtcaacagaatgtgcgttactggaataaggtgcgcggcaggtgcattcgcggcacgtgtcggataagcggaggggaagtaggtgaatttggtcaggatgttgagtttacactagctatctggtaccgcatcggtaccagtactgatggcaagccggtagcctaccgcctcgacaccaatcgccaggtctcatatgtcgaggctggctctaccttgatcaagttctacctggatagcggtattcccgataataagcttgccagtgtgttcgacgttcgctatgacggcggttacgcagcgtggcaagcccagaaaggagaagtacgcgcaaagactcagcagtcgacgtcagcccccagtcgctttcaatggccagaagttaagagtgcttggtgcaacccccgcatggacgatgactgctacatcaatgaggagcccgtggcgatcgaagatctaggcaagtggctccccgcaattcatcctgaagaagttgcggaagttgaacaggaaggcgggtactgcgaaaccatcctctgcttcaatagcgccgacaaaccactgggcttcaaaccgcaataa

SEQ ID NO: 367398 - DNA, 696 bp, Pseudomonas aeruginosa
atgcgagacgagatcgccaagtgcttaaaacaacgcgcgaatcgcattcttagcatcccgtcaaaaaaggatcggttactgctattggacgaaagactgggctggattgaagaggggaacgaaaggcaacataaatggttgctcgcacgcatcgagcaactgacaggcattcgaatcccgcgggagctggttcatctcgaagggaaagaccaccttgttgccatgattgatctttgggacatagagcttgaaacgaaggcacgcgaagtcaattccttgcgggaggaatggctccgccacgtggcgcgggatagtgccttcgagtggttctctgacaaaaaggaaagcaaaaaacgttgcacttgtgcctgggagtggctcgaaaaacaccacctccgtccgcactccagacagctcccgatcagtaactacaacgagctgctaatgttcttcgaccatgccgcgctcggccgccatgagcaaaaggcgatgatccaagagatcaaaaagcgatggaatcgccagcaatttgacgagcgtaacgccgacaagaaacagatcaacgtgatgctatcaaaagcagtgattgccaagctggatgagctagccaagcaacatggcctgaagcgcgcgcaagtgattgagaccctggtgagaatggaggcagaaaccagcgcgcacctggcgagcacttga

SEQ ID NO: 367399 - DNA, 1323 bp, Pseudomonas aeruginosa
atgatgaataccaatacacagtcgattctgctgctgacttcttatttctcaaagtcggctggcgacgctaaaccgctttctccaacggagtgggggcgtttcgcactgtggctcaatgagcagggcaagacgcctgcagacctggttacttcagacccgcgtgcagttttgcagggctggcaagacgacaagatttcgctagaacggatcgagcagttgctggggcgtggacatgcgctggccttggccctagaaaaatggagccgcgccggaatatgggtgctgacacgctcggatgcagactatcccaagctactcaagcaacggttacgtaatagcgcaccggctgtgctgtttggatgtggtaatgctcggttgcttaaccaaagcggtgtgtgtgtagttggtgcgcgtaagaccgatgatgccgatcttggctatgcgagtgctttgggtgagcggattgctaacgcaggcttctctgtagtttcgggtggtgcacgcggtgtcgatgaggccgcgatgctgggcgggttgaagcaggagggaactgtaatcggcgttatggccgatagcttgctgtcggcggcaatggccaggaaatggcggcagggattaatgagcagcaatctcgtgctgatttcgccgttttatcctgaggccggttttaatgctggaaacgccatggcgcggaacaagtacatctactgcctgagccaggcggcggtggttgttcgttcagatactaaaggcgggacttggaacggtgcgatagagaatctgaaaaaggcctgggtacctctgtgggtcaagcgtgaccaggacgttcaatctggaaaccaggcgctggtgtcgcaaggtgggcagtggctggaggagagggtcgagcatctggacattgccagtttgtttgccccgacgaacctcaagcaggacgttgctgacattttttctacggagcatgggccagctgttgctgactcacgtcaacccgatccaactaccgtcatggaagaaattccgcaaatatcttccgccgtttctgggccggctaggcaacaccttgagaccagtacaacgcaaaccattgctgcatcagaaatgagtttctatcagttctttctcagtaagctggcatgccttccagaagctgtcactgcagatgagttggctgaggattgggacgtgcccaagaaacaggtcaatgattggctcaagcggtcggtcgatgaagggcttgttctgaagttggcaaagcctgtgcgttatcagttcaggagtggagtggacccggccacgcagttagggctgggtctcgattaa

SEQ ID NO: 367400 - DNA, 597 bp, Pseudomonas aeruginosa
atgacgggcagcctgattgatgaggtgacatcccacctaccgacggattgcagcgcttggggtaacgagctccgtaagctgcgcaaggctcgaggcaaaacgcttgctgagctttcggtattggttggtcgttcaccaagcttcatcagtcagcttgagcgcggtcgcaccgagggatcgattactgacctgaaggtgcttgcagctgcgctcggtgtcccgttgggttggttcttctctaacgacagtacacctgttgccgaagtgggccgggtggtccgcgctaacagtcgacgtcgtctgggggcatttctggatggactgacagaggagctgctttcgcctgacatcggtggccaatatgaaatgtttctcagcacttttgcggtcggtgctactcgccccgcagctgagccgcgggacactgaagaagaactctatgtgttggcagggcaattcgatatctggataagcgagaagaaattcagtgttagcgctggcgacagcgtgcggatcgttcgtgaaccctatcgctgggtgaacactggcgactgcgaggtaaaggtagtttgggtcattgcgccacccatatattga

SEQ ID NO: 367401 - DNA, 708 bp, Pseudomonas aeruginosa
atgtctgcgatgagcatacgagctgcaactttatgcggaatggccgccatcggcctgtggagcacagcgaccggtttcttgcgtagcgtgacgcagatttatggtccgctgggaggcacagcattaatctatacggtgggagcagtcgcactgttcgcattttttggtcggccacgcctgagaaaattcaaccccgtctacctgatcgtcggtaccactcttttcgtcggctacgaggtctgtatgtcgctggcacttggcttttccaccagcgatagacaagcgatcgaagtagccctggtgaattacatgtggccgtcgctcacgatactgctggcgatcttcatgaacggccagaacacccgctggggttttgtgcctggcactgccgtagccctgtttggaatcgtgtgggtagtcagcggcgacggcctttcgtgccaaagcatggcaaacaacctcgcttcgaatccgatcagctatggcctggcggcggcagcactggcgttcgcgatgtactgcaatgtcactcggcgctttgccggtgggggcaatggagtacccctgttctttctggtgaccgccgcagtcctctggattaagtacggtgtcagcgatgaaagccttcctgcattcacgctgaaaggtactgccgagctggcaaccgccggcgtatccatgccgcaggctatgcgttatggaacatag

SEQ ID NO: 367402 - DNA, 594 bp, Pseudomonas aeruginosa
atgcaaactgccgttctaagcaaggccgaaaagacccgggagcgcatcctggccgcagccaccctggaattcgccatccatggggtcgcaggtgcacgaatcgaccgactagccaaggccagcaaggccaacaagagcctaatctacgaatatttcggcaataaggagcagttgttccagaaagtgttacaacgtcatctgagggaggtgtatcaaacggtcgatttttcagccgatgacctgccaggctatgccacccggcttttcgacttcgccatggatcatccacacttaatgcgtctggtaacctggaacggcttggagcaacagccgcgctggccactggacgagaactccagcttggacacccaggtccgtgcgatcaagcacggacaggcgcaaggcgtgatcggtgccagctatccagcggagttcctgctgacgctaatcatcacccttgcgtcagcctggacagcagctaatcccttcggcatctccatcacgccggacctacccgcacagagagcctccctgcgcgccgcgatcgcggatgcagttgagcggctctgcttgcagcgccccgatcgagcctga

SEQ ID NO: 367403 - DNA, 780 bp, Pseudomonas aeruginosa
atgctgatcgccgggttgatcatggcgtccttcgcagtccgcgatgcgattcgattcaagacgacagtgccgatcgccatcgtgcttggcgcggcagcttgcgtgtatccggagagcgtcgacaactatctcgccggctgcttctggtcgacgtcgcacgatccggacaagctgctctatttcctcatgggccgtagattcgactactacgttgccatcatgtggtggacgttcggcacggttctcgggtacctcttctacatcgcgcttcggcggaatgtgacgaccgctggactgtggattgctttcgccctttctggcattgccgacatcgttatggaagaactccttctgcgctatggcggtatctacacctatttcggccgtcagccgctggttcttcttggccacttcccatggtggtggttgttcgtgaacgtttcggcgctctatctgagcatagcgatcacctaccgtttccgcgaatggctcaacggatggagaagcatctttgtgatcgctctggtgccgcttgcctatatcggtggcttttccttcgccgcgctgccggccttgtatgtgattcagggtgatttctcatggttcacgacgcaggcggctggtgtcctctccgccatcatcgcgctggtacagaccgggggcatcttctacttcgtcctcggccgaaatccgatcgcgttcaatgagcgcgagaagacgggtgccggtgatgttctgaagcccgcaacggccgccggggctgcagctgcccgaacctaa

SEQ ID NO: 367404 - DNA, 1035 bp, Pseudomonas aeruginosa
ttgatcaacgaactcaaggtgcacggacagctgctattcgtagtcgaccaacccgccaccatcggtgcgctatcgatggctgtcgctcgcaacgagggcgtcttggtcgcctatctgccagggcaggccatgcgccgtatcgccgatctgtacgccggcgaagccaagaccgacccccgtgatgcggcgatcattgccgaagccgcccgctcgatgccgcacaccttgcgctcgctgcggctggccgatgagccgctggccgaactcaccatgctgtgtggcttagatgatgatctggccttccaagttacccaaaccagcaaccgcattcgcggcctgctcacccagatccatccagcactcgaacgggttctcgggctgcgcctggaccatcccgccgtgctcgatctgctcgagcgttacccgtcacccgccgcacttgccgcgaccagtgagacgacgctcgccaaccgtctgactaaactcgcccctcgtatgggcaagcgcttggccgccgagatcgttcaagcgcttggcgaacagaccgtcgtagtgcctggcacccaagccgccgccgtcgtcatgccacgtcttgccaagcaactcgctgccttgctgcagcaccgcgacgaggtcgccagtgaagccgagcgcctggtgcatggacactctctttacccggtcctgaccagcacgcccggagtcggcgtcaggatcgccgccagactcctgaccggagtcacgcacaaagccttcgcctcagccgcacacttggccgcctatgccggcctcgcaccggtcacccgacgctcaggttcgtccatccgcggcgaacacccctccaggcgtggcaacaaggtgctcaaactcaacttgttcctctccgcgtttgctgccttgcgagacccggcctcacgcgcctactacacgcgcaaaatccaacaaggcaagcgccataaccaagcgctcatcgcggtggccagacgtcgatgcgacgtcctgttcgtcatgctgcgcgatgcttggctgttatga

SEQ ID NO: 367405 - DNA, 366 bp, Pseudomonas aeruginosa
atgctccggatgtacgtggctcagcagtgcttcggcctgtcgggcgaaggcatagagcatgcgctctacggcagccaagcgattcgccgttttgtgggcatcgacctggggtgtgagtcggcgccggatgcaacgacggtattgaagtttcgccgcctgctggaaaagcacgaactgaaccgcgagattctcgacaccatcaatgggcagccagccgcacggggcttgttgatgcgcgaggggagcatggtagatgccacgctgattggcgcaccgccatccactaagaacaaagacaaagcccggaatccagagatgcaccagaccaagaagggcagccagtggtactttgagagtgcgacctga

SEQ ID NO: 367406 - DNA, 621 bp, Pseudomonas aeruginosa
atggacaatacatgcgcgctacgaccaagtgatgacgcttctgagaagattgacgctcgcttcattcgcaccaagctcgcgttgagacaggcaattcttgagcttgctgccgaatttgatgtcagtacgttgtctgtctcggcggttacacgatatgcccaaatcaatcgagctactttctatgcgcatgcagaaagtcccggctcgttgctcatcgacgttctttcagaggaacttgatgctatgcggaaacgcaatgttgcgcgggttaaagaacacggcagactttccgggaacagcgccagacaagcgatggaagagatcattaatcatgttgtactgcgcgaggccatctattcaaatcatgcaaaatcattactgtctgtccgtgcagtattagtcaaacacgtagaactctcggtgcgtgaggttctggaacagggttactcaactgctccagtgtctggcgaaatggctgttttgatattatctggctttatagccaatggtgtgattggtgccgtggaggcttggttgatgcttccagcacctcgcgacagagtttttttggtatcagtgattgagcatgcttacccgatctggtatgccggtggaaattag

SEQ ID NO: 367407 - DNA, 900 bp, Pseudomonas aeruginosa
atgggaatcatcgggaaaatcctaggagcactatccttatctgcattcagcgcgattgcatggggaggccaaacaggtagcgttgcgacagggatcgacgaggttttcggtttaccaaagccccctgtcgactttgcttataacttcaaatgggcgctcacggatagcatcgcatcattgattctcgcttttatcgttattggatttgcaatatcgcacgcgcggagaagaggaacatactttccagttgtcgtggcatgttcggggctgctatttggcattcccgaggtgttaatcgatatcgcgggcgcctgctggtgggctgttggacctgatcaagtcgtattcacaattatggggcgccctatgacttggttgcctatggcttcatggttcgcatttgccgcgctactgatttatatcccatatcatctattggtgaaaaaggtcagcaccaaagcgctctggattggttttgccgttacttgtcttgtcgatccggtgtttgaagaaataaatctgagaatccccggactttacacctactacgggcatcagccactcgtattttccgtattccccgtatggtggatgtttgtaaatgccgcaggatgcttcgttgcagcggcgttgatctatcgatttgaaaaacagctcagtggttggaaatctatcgcagtatttttcctggcccccctagcctacatggctgcttttggattctcaggtgttcctgctgcaattgttatcaatggcgactactcttggcttgctacacagctaggcggtttgatcactgtggcactggcaatagtcagcgtggcgctcactatgtccgtcgtgttggacagaaacccatttccatttattaaaggccagaggattattagccctgcataa

SEQ ID NO: 367408 - DNA, 234 bp, Pseudomonas aeruginosa
ttggggccgttcgtcaaccccggccgctgcacgcgcatgcaaatacaccgtacgatgtcgcaggatgacatggtcatgaacgagcggaccgaaacctgggaatacgaaggaacgaccgtggtgcttccggtcgcgggagtgttccgaatcgaggacggaaagattgcgcgctggaacgactacttcgacgaaaagaccatcaaacctttaatcgagcggttctacgcgcaatga

SEQ ID NO: 367409 - DNA, 216 bp, Pseudomonas aeruginosa
atggtcgcccgcaccgattcgcttgggcgcgctcaatcgggctgttcgcgccgcgtagatgatctgggagttcatcgcggcaatccgaaggtgcaatgcgagccggcactcagcgcctttatcgaggacatgggctccgcaggtgtagtgttcaacgttcaggcctacatgagcagcccccgcctgccccgcggctcgcaggagcttgtgctatga

SEQ ID NO: 367410 - DNA, 660 bp, Pseudomonas aeruginosa
atgtcaacgccgagtggacacgaggttcgcagcgccaaaacgcgcgctcaactgattgaagctgccgtcaatgtcattggcgccgtgggctatgaaggcgccagcacgcgaacgctgacgaaagtagcaaacacgccgctgtcggctatcccttaccactttggtggtaagaaggagctgtatctggcggcggcgcagatgattgccgattacgcccgccagcgcttcgacgaagtgactaagattcttgacgatgacagcactgtcggtgcgaccggcgcaaccgagaaggcgctccatcatcttctgcacattatattgagcgacgcagaaccgcactcctggacatctttcgttgcacgctgtgcgtacgaaaacgacgaggctttttcactgatccacacgcaggcaatcgaacccatgatggcacgcctggtgcaggctgcgtcagcgattccccaaagtggcctggacggtggggcgatccggttgcgtgtcaacgccgtcgtgaccgccattttcagtttcagattcttgcgcggtgtcatcatccgcggcatggattggcaagggatgcccgaagcgggcgcaactgcgctgcggcaaatgatcagcgacctgtgccgcagtagttttttcccagtcaggcctctctcgtaa

SEQ ID NO: 367411 - DNA, 609 bp, Pseudomonas aeruginosa
atgagcacgaaaacttacctccatgaaacaattacatggaccaagcagcgtctggacgagttggacgccgggattgtggccgttgaaaaagccgcagatgacgctaagggagatctccgccaacaagccgatgaggcgctagatcgactgcgccaggcccgcagcaagatgcagatacgctatgaggcgctgcgcgcgaaggccgatgcggcgcgccaggacatcgtagcggcgcaggacgcgttggaagccgaatggatcgaggttgagacttccttccagtcgttcgcgttggccgtcggcgaacatgcgcaagcggcgcgtgacatcgtgcgtgcgcgtatccaggctcaacgcgcctcgtgggaagctgccctgcgggacctgcgcggcaaggctgcggatgccgtggagaaggcccgcaccgaacttgatgtcgccatccagcacgtgtcggaggaagcagagaagctccaatcccgaatcggcgaagtcaaggatgccggtgatgcatcctggaccgcagtccggagcgggctcgaagaggcgcgggaggtgcaatcgcgcacgatccagaagatccgcgacgcattcgcggccctgttctga

SEQ ID NO: 367412 - DNA, 678 bp, Pseudomonas aeruginosa
atgcccaaacaccaattccacttgagccagccagtagcgccatcttctagaacacgttggagatcgtcagttagccgccactcgatggctgccgccatctccttgctggctgtgctgttaggcgcctgcacgacgctacccagccctccaccaagcgcctcgctctacgacttcggcctacctgccgccgatgcgcacgcgcctgatgtgcaggcgggatcgtcgcgggtgctgatgctggccggcgtcacggcagcgggtctgccggtcgggcaccaagatctgctataccgctatgcatacagcgacgaccatcacttacgggcctaccagcgggcccgctggagcctgccggccgaacaattgctggcacagcgcctgcgccagcagctccagtcgggctgggccgtgttgactccagaggtcggccggatccggccatcgccagaactcagtgagcctttggtgctgcacgtcaacctggagcgtttcgagcaggtcttcacggaagccgagcggtctgtcggcgtgatccagctgcaggcgacggtgcacaaagccagcgatggcagcctcgttacccagcgcgtgttccagcgctcggtgcctgcgcctagcgccgccgcgcggctggcctgcgccgatctcgaccagtggttgcagtcgcttgggcagtaa

SEQ ID NO: 367413 - DNA, 978 bp, Pseudomonas aeruginosa
atggaaaacaagtcgcatgcgatcgccgccggcatcttcgtgctggttgtcctggggctgttggccgggcttgcggcctggttggggcgggaccaggctagctacgacagctacgagctgaccacgccccaggcggtcactggtctacagccgcaggcggcggtgcgctacaagggcgtgacggtcggcaaggtggtctccatcggcttcgaccccgaggccgctggtagcgtgctcatccatatcgatatcgatcgtacggcgcccctgaccctgaagacctacgccacgctgggctaccagggtatcaccggtctggcgcatatcgacctcgacgatgctaccgagaaccagccagaccttgggatgtctcccggcggccaccggcggctggtcatgcggccgtcgaacctgagcctggtcgcggcgcagggaccggaattgatgggcgacatccgcgagatgatggtgcgcgccaacagcctgctgtccgagcacaaccagcgtatgctggtcgaggccattagcaatttgggggaggccgcgcgcagtaccgcgtcgctggctcaggagatggagcgcggttggagccagcgccttgaacccgccatgctccaactggcccgcgagggcagcaccaacatgcaggcgatgcgcggtgcggcgcttagcctggaaacaatgagccaggaaatcgctcggtccgtgcatcgcatcaacatgcctgacggtgcgatcgaccaactcacagcgtccgcgcgcacgctcgccagcattggcagcgagatcgacggcgctaccctgccgcgcatggcgcgcacgctcgacgacattggcggcacggctcgcgacatcggggcgctagcgcgcgggatttccagtaacccgcaggccctgatctatgggcccgacacaacccagccaggaccgggcgagccgggctatgcaccgccagtcctccgagcatcaccaaaataa

SEQ ID NO: 367414 - DNA, 837 bp, Pseudomonas aeruginosa
atggtgcagcccttaacgaacgatgttgccctggtcagcgtcgaacaggtctggagcgagttcggccagggcgccttcgcattctgcgtgcaccaggcgctggacctgcgggtgcgccggggggaaatcctgacgctggtgggtggctcgggaaccggtaagaccgtgctgctgcggcacatcgccggtctgacccagccgacccgcgggcggatccgcatcgacggcgtggataccgccgccctcggccgcgcaggcgcctcgtcccggctgggcatgctgttccagcacggggcgttgtactcggccttcagcgtgattcagaacatcgcctttcccctcacggaacgacgcgggctgccgagtgaggtcgtgcgcgatgccgccatggtcaagctgcgcatggtcggactcaagcccgaacatgcgcaacgcatgccttcggatctctccggcggcatgatcaaacgggtggcgctggcgcgggcgctgatgatggatccgccgctgctgctgctcgacgagccgaccgccgggctggatccttcaagctctgacgaattctgcgcgctgctacgcgagctacaccacgaattggggctgaccgtgatcatggtcacgcacgacctggacacgctgtatgcgttgagtacacgcgtggcggtgctggcggagcggcgagtgatcgtcacggacacgcccgcgcaggtggtgaagttcaggcatcccttcattgaacatttctttctgggcgaacgcggattgcgcgcactcgaacccttgccgaagcccttggcgcctgccgactcggcagtcaccgaacaggagaaccgatag

SEQ ID NO: 367415 - DNA, 1149 bp, Pseudomonas aeruginosa
atgctgccggctgacggagagcgactggaggcgccgcaggtcgcgattgagtccgggccccagggcgtgacagtgcgtctgcgcggacgctggaccgctgcggtcgtcagcgacagaacgcagtggcgggctctgaatgctgggctacgcggcgcctgccggcacgtggagggtgtctgggacctgtcagcactgcatgggttcgaccacgtcgctgcacaagtcctttggcatgcctgggacgggcgctggcccgcgcagctgcaggccaccagcagccagcgcgcgattctcgaacgcgtcgcggcactcacgctgccggcacagacggggggccagggtgaggccagctggagacaggccggccggaacctgggccgcatgtcctacagcggcgttgggcacctcgtggatatgatccagctgctcggccgactgttcctggacacgggtggactgctgcggcgcccacttgccggaccgtggcgggatctttccggtcatctctaccgcatgggcgcacaggcgctacccattactgcgctggtcggcttcctgatcggcgtcgtggtggcttatctactggccttgcaactgcgccagttcggcgccgatgccttcattgtcgacatcctcggcatctctctcacgcgagaactcgggccgctgctgggcgccatcctcgtggccggacgttcggggtcggcgatcgcggcgcagatcggcgtcatgcgcatcaacgaggagctcgacgcgatgcacgtcatggggatcccgcatagctttcgcctggtgctgccccgcgccctggcgctcgctctggcgatgccactggtcagtgtatggaccaccctgtcggcactgctgggcggcatgtgcgccgccgacgtcagcctgggtatttcgccagcctacttcatgcatgccctgccgggtgccgttgacgtcgcccacctctggctgggcacggccaaatcggtcgttttcggcatcgctatcgctctggtcggctgtcactggggcctgcgggtcaaacccaacactgaaagcctgggcgtatcgaccacggcctcggtggttacgtcgatcacggtcgtgatgctgctcgacgccgtcttcgccatactctttcgcagcgtggggttctag

SEQ ID NO: 367416 - DNA, 681 bp, Pseudomonas aeruginosa
atggcagaactgggacaactggtgggtatcgggctggcgttaatgctgccgctcgcgaacccgctcacatccatgacactgctcctgtcgctggggcggcggttgtcggcgctcgaacgccagcgccagatatcacaggcggcgctctatgtgttcggcatcatggtcgtggcctattacgccggctcctggaccatgcagaccttcggcatttcgatgcccggtctgcgcattgccggtggactgattgtcgccagcatcggcttcagcatgttgtttccctcttcgcatatcgacgaggacattccggaggcggaggccgtctcggaacgcatggccaccaggaaatcgaccaatatcgcattcgttcccctggctcttccgggcactgcgggcccggggaccatcgcgatgatcatcagcacggcagcgtccatcagcccttccatgacggctgcctacgcaccctggacgcttgcaatggctccaataatcgtctttgcgctgctcaccctgttgttctggatcgccctgcgctcggcagatcgcatcgtggccgtcatcggcctgggcggcgtcgaagccatcgcgcgcgtgatgggcttcctgctggtatgcatggcagtgcagttcgtgatcaatggtgtgttggaaatcgtgggtaactatgctgccggctga

SEQ ID NO: 367417 - DNA, 1293 bp, Pseudomonas aeruginosa
atgtcaactaaacaacgtatcgtcattgtaggtggtggcattgcaggcttggcactgtccacacaactcggcaaacgcttgggccgcagtggtaaagccgaaatcactctgctggaccgcaacagcgcccacgtctggaagccgatgctgcacacattcgcggcaggaactgctaactcttaccagcagcgcatttccttcgtggcccaggcggcacgctgctcgttccgttttctgccgggcgccatgcagcacgtggatatccaggcgcgcgaactgctggttagcccgatcatctccgctcggggcgaaaaggtgctgggcgagcgcacgatcggctacgacaccctgttcctggctgcgggcagcaaggcgaacgatttcggcacacctggtgtgggccagtactgcttcttcatcgatgacctgcagcaggccgaggcattcaatgacggcctctatgccggcttgctgcggacggcggcattggacgaaccgttgacgatcgccatcgttggcggcggcgccaccggtgtagagctcgcggctgaaatcagccagttgctcgatgtcgcatcgagctatggcacgggggacctgcgcccccgcctagcgctcaccctgatcgaaagtagcccgcgcattcttgcggcgttccccgaagaggtcgccgaggccgcaacgcagcaattgcgggcactgggtatagatatccgtaccggagtgcgcgtcgttgccgcagacgcaaccggcttggagcttaatgatggctcacgcatcgatgcatcgttacgtgtgtgggccgcgggcgtcaaggcgcccgacgccgtcgcgggcctccaaggcttcgatctcactcccgccgggcaagtcaaagttcacgagaacttacagagcacgacggacgagcgcgtgtttgccctgggcgactgcgccagcctgactcctgcaggagcatcgcgccccttgccgcccacggcgcaggtcgcccgccagcaggccatgcacttggcccggcatgttcccggctggctggaagaccaatccatccctgccttcgtcgttcgcgaccttgggtcgctggtttccctcagccgctacaacgcttttggcactctgggacgtcacggcctgtttcgcaaccgcttcatccgcggacgtttcgcacagctcagccatgccttgctgtaccggctgcatcaggccgaactgcatggcctaggccgggccggcctgatctggctgtcggacgccattgccgcaaccgtgcggcctcgcatccgagtcgattga

SEQ ID NO: 367418 - DNA, 618 bp, Pseudomonas aeruginosa
atgaatgaccctaatgagtaccgtgggcgccggtcggatgcccgtgccaacgacgcgaaagtggtcgaggtagcgaggcaactggccggcaaggatggccgcctgcctgggatgcaggccattgctgatgcggctggcgtcggggtaaccacgttatatcgacgattccccaccaaggaacggttggccagccatatccaggcgctggacttctgcgatcaactggcgccggccttcgagcgggcgcttgccgacccggattcgcgtgcgggcataagggcagtgaccaacgagatggttactcgggcggctcacttcatggatccgcggcgcggggtggcggccgtatcggtggcggatctattcgatgcctacttggagcgattcatgcccgcgatggtgcaactcatgcgtgatgccaaggcgcgcggcgctttgcgcaccgatatcgaggaagctgacatcccacgcatttgcgcaatcatgctcggaggcttggttcttcccgagcgattcaacgatgcgccggagcgctacatcgccttgatctttgaggggttggaaaagcctggtgatgtgccgttgccgccgctagcgcgacccaaggggctgatttga

SEQ ID NO: 367419 - DNA, 1131 bp, Pseudomonas aeruginosa
atgaagcactatagaaaagcctatctgggggccggcatcacgattgtggccgcctgcctgtcactaaccggatgccagaaggtgccagacagcacgccggcgtcgccccccgaagtcggcgtggtgacactgcagccccaaagcgtgcaactgtcgacgccgttgccaggacgcgccgtcccgtacctagtcgcagaagtccgtccacaggtcggcggtattctgcgtgagcgcgcattcactgaaggaaaagacgtcaaggcagggcaagctctctaccaaattgaccctgctccctatcaagccgcgctgtccaggacccaagcgaacctggatgcgacccagtcgctgttgcgtcgctatgaacaactgatcaagactcacgccatcagccagcagcagtacgatgacgcacgctcgcagtacctgcaggccagggcagccgtcgagagcgcgcgcatcgacctgggctatacgcggattaccgcgccgatttcggggcgcgtcggtcgctcatcggtcacacaaggcgcgctgctgacagccaaccaggtcaatgcactggcgactatccagcagctagacccgatctatgtcgacatcgttcagccttcggccgcactgctgcagttgcgcgaggatttggccagcgggcggctcaagagcaccggcgaaggccaggcggagatccgcttggcgctggaaaatggcaaggactatgcccatccgggcaagctccagttctctgaggtttccgtcgacgaaagcacgggcgccgtgacgctgcgtgcagtctttcccaatcccgacggcgtactgttgccgggcatgttcgtgaccgcctcgttgcaagaggggattagggagcaggcgctgctggtgccgcagcgcggcgtcacgcgcgacagccaaggccgggccatcgctttcgtattgggcgaccaggacaaggtggaactgcgcccgctgcagaccgaacgcagcctcgacggccaatggttgatccgcgacgggctgcacgccggcgatcgcctgatcgtcgatggcctgcagcgcatccagcccggcatgcaggtcaagccggtcgccgccgcggttaacgggggtgcaacccccaccgtgactaagtga

SEQ ID NO: 367420 - DNA, 3129 bp, Pseudomonas aeruginosa
atgtccagattcttcattgaccggccgatcttcgcttgggtcattgccatcgtcattatgctggctggcgcactctcgatccggtcgctgccagtcaaccaatatccgaatgtcgcaccgccggcgatcgccatcatggcccagtacccgggggcctcggcgcagaccgttcaagacaccgtcacccaggtgatcgagcagcagctcaacgggctcgacggcctgcgttacatccgctccgagagcaactccgatggcagtgtcaccatcgtcgtcaccttcgaacaagacgttgatccgaatattgctcaggtgcaggtgcaaaacaagctgcagctggccacaccgatgttgccgcagacggttcagcaactgggtctgcgcgtggtcaagtaccagattaacttcatggtggtagccgcgctggtatccgaggacggacgcctggataactacgcgctgggcgacctgatcgtctcgcagttgcaggacccactcacccgcaccaagggggtgggcgacttcttcgtgatgggcgcgcagaacggcatgcgtatctggctcgacccgggaaagctcaacagctacaaactcatgcccagcgacgtgatggcggcgatcgaagcccaaaacgtccaggtttcgtccggccagctcggcgggcggccgaccggcgacaaggtcggtctcaacgctaccgtgatcggcaagaccctgatgactacgccggagcagttcgccgaaatcctgctcaaggtcaatccggacggctcgcaggtccttctgcgcgacgtagccgaggtcggcctgggctctgagagttacaccttcaacaccatgaccgacggccagcctagtgctggcatcgcactgcgtttggccagcggcggcaatactctggaagcggttcgctcagtcaaggacaccctcaagcagctggagcccacgttgccgccaggcgtaaaggtgatttacccctacgataccgcgccggtggtcagcgaatcgatcaatggggtggtgcacaccctgatcgaggccatcgtgctggtcttcctgatcatgtacctgttcctgcagaactggcgcgccacgttgatcccgaccatggcggtaccggtggtactgctcggaaccttcggcgtgatggccgcgttcggctttaccatcaacatcctgactatgttcggtctcgtgctggccatcgggctgctggtcgacgacgccatcgtggtagtcgaaaacgtcgaacggctgatggtggaggaagggctgtcgccactggaggccacgcgcaaatcgatggatcagatctccggcgcgctggtgggcatcgggctggtgctgtcggcggtgttcgtgccaatggccttcttcggcggttctaccggcgtgatctatcggcagttctcactgaccattgtcacggcgatggcattctccgtactggtcgcgcttattttcacgccggcgctttgcgcaaccatactcaagccggtcgagcacacggaaaagaagggcttcttcggctggttcaaccgcactttcgagcgtagcgcacaacgctatgagaacggcgtcggccgggtgatcgccggacgcggccgctatatgctggcgttcctgctgatcgtggtggcgttagccgcattattcccgcgcatcccgacttcgttcctgccggacgaggaccagggcacggtgttcgttcaggtcgaattaccatccaatgcaaccctggacgagaccgatgccgttctgaaccaagtgacccagtatttcaaagaaaacgaaggcggcaccgtcgactccgtcttcaccgtcagtggattcaatttcgccgggcgcggccagaactccggcctcgccttcgtccaactcaagccttgggaagaacgtaccagcagcgtgttcgatttgcagggacgtgcgatgcagcatctcgccaccatcaaggaaggcgtggtactggcgttcccgccgccggcgatcatggagctgggcaacgcgacgggcttcaacctgttcctgcaagacttcagcggcctgggccacgagcatctgatgcaggcgcgaggccagttcctgaccgaggcgtccaagcatccagcgctggcgatggtgcggcacaacggcaagggcgacgaaccccagtatcaggtgctcatcgacgacaagaaggcgcgccgcctgcgcgtgagcctggatgacgtcaacactactatgacagccgcctggggttcggcgtatgtcaataacttcattgatcgcggccggatcaaacgcgtctacgtccagggcgtccctcaatcgcggatcacggaagaagacttcggcaaatggtacgtgcgcaacgccagcggcgacatggtctccttctcctcgttcgcgaccggcaaatgggtccagggctcgcccaagctggagcgctacaacggcgtcccggccattgaaatactcggcgagccggcccccggctacagttcgggcgatgccatgcaggcgatcgaggagatcgccgccaagctgccgtccggcatcaatgtcgcctggaccggcctgtcctacgaagagcgcctgtcgggctcgcaagcgccgatgctgtacgcgctgtcgatcctggcggtgttcctgtgcctggcggcgctatatgaaagctggtcgatcccgttctcggtgctgctggtgattccgctgggcgtcatcggcaccgtgctcgcaactctgatgcgcggcatggaaaatgacgtgttcttccagatcggcctgctcaccacggtcgggttatccgccaagaacgccatcctgatcgtcgagttcgccaaggatttgcacgagaaggaaggccggtcactggtgcaggcggcgatagaggcagcgcggctgcgcctgcggcccatcatcatgacctcgttggctttcaccatgggcgtgctgccgctggccatctcaagcggcgctagctcgggcagcaagcacgccatcggcaccggcgtggtcggcggtatggtcacggccacgttcctggcgatcttcttcatcccattgttctacgtggtggtgtcttcactgttcaagaagaaatccgccacaccacagcccgaactcctcgcggagtcctcacgatga

SEQ ID NO: 367421 - DNA, 1488 bp, Pseudomonas aeruginosa
atgaaaaacagatcttgcgcccgtattatgttccccctgcttgcgggagctctattggccggctgcgctggcaccatggcgccgcgctatgagcgaccggctgcgccggttgccaccgagtggccggtgcaggccgcgagcgttggaggacccggcgatgcggctggcatgacttggcacgcgctgttcgccgacgtcaagctgcgccaggtggtgcaactggcgttggagaacaaccgcgacctgcgggtcaccgcgctgaatatcgagcgggcacgcgctcaatatggtatccagcgctccctgctattgcccgacgttggggttggtgtgaacggcgattccgggcgcacgcccgcatcggtttcgccgacaggtagtgctgtcaccagccacgtctacagtgccaatctagggatcagcgcctgggaagtggacctcttcggtcgattgcgcagcctcaaggatcaggcgttgcagcagtacctggccagcgaggcaacgcagcgcgccacgcgcctgggtctgatcgccgaggtcgccggtacgtacctgggcatggctgcggatagcgaacaacttgtcctggcgcgcgaaacccagcgcagccggcagcaagcctatgagctgcagcgacaattgcgggatgtgggcagcagctcggagctggacctgcgccaggccgagggcgaattggaagccgcgcgcgatgccgtactagcgctcgagaccacggtggcaaccgatcgcaacgcgctggaactgctggttggctcccccttgccagcgcatctgcatcccgatgcgccgctcgaggccatactggccaagcaggatctacccgccggcattccttccgacctattgcagcggcgcccagacatcatcgccgccgaacatacgctgatcggtgccaacgccaatatcggcgctgcccgtgctgccttcttcccgagcataagcctgacggccggtgtcggtcgcgccagcgattcattgtcaagtctattcgatggtggcaaccgggcctggagcttcctgccacaggtcagcctgccgatcttcaccggcggccgcctgcaagcgaacttggatcttgcgcgtgtcgaccgcgatatcgccgtggccggttacgagcaggcgatccagagcgccttccgcgacgtcgccgatgctctggccgtgcgcgcccggatagacgacaggctggcagcccagcaaagccaggttgctgcatcgcagcaagcttacaccttggttcagcagcgctatgacaacggcgtgtccagctatttggcagtgctggatgcacaacgcacgctgttcaccgcgcagcagaacttgatcggcatgcggttggcgcgccagaccaacctggtcacgctctacaaggcactgggcggcgactggtcacaactgggccaagaaacgctttcgaaggccgatgaagcacccattgcgcagcaacttcaacgaggtgcaccatga

SEQ ID NO: 367422 - DNA, 855 bp, Pseudomonas aeruginosa
atgaccacgagccaaacgtttaaggacattgcagtattcttcgatactagcgacgccggccagcgcgtattggatacagcagcaaggcttgcgagcacccaacaggcacacttgattgccataacgaccgccacgcctgacaaagtccagcctgccgagtcattcgcacgcggcgcagccattcaagaggtcatcagccgccgtagctctctggctgtagcggaaatattgaaggccggccagttgctgattaagaccgcagccaagcatggtgcggaagatgctgagtttcgggttgttgcacccacagaatcttctaacgattcgctgtcgcatgcgctgcattgcgacctgctagtggtcggtcatcccgaagctcccggcgctccaacttcctggtctgttaatcatgccctgcagcgggcaggcgtgccgttactgattctccccgatggctggaatgggaagctccccggacaacgcatcaccgtggcatggaacgccagccgggtggcacgccgggcgctcgccgacgcaatgcccctactacgcagggcgcaggaagtgcatttgctaatcgtcgacgcacctcgccaccgcgaagcacacggcgaggaacctggggccgacatggccgcctatctggcgcgccatggcgccagagtcgagcttcagcgcctggattccgccggcctcccggtcgcagaggtaatcgaggagcaagctcagatcaaccaagccgatctcctcgtgttcggtgcctacagtcgaacgcgggtcagtgaaacggtatttggcggtgtcacccggaccctgctgtcgtctgcgccgctaccgctgtttgtctcgcactga

SEQ ID NO: 367423 - DNA, 1323 bp, Pseudomonas aeruginosa
atgactgattctgctacagacatgcgctatgagcgcgccacgttccatgccgggaggtggtacgtcgttgccgtcctggcaatgctttatgcggtgtcgatgatcgaccgcttcgtcctctcggtcgttgcccaacccgtcaccgaaagcctgggcctgaccaacacgcagatggggatgctgctgggggcgggcttcgccattctctattcgctgtccggcgtgcccatcgctcatctgatcgacaagggcaaccgcaagcgcatcgttgcctgcggcgtattgttctggtcattgatgacggccgcttcggccttcaccaccgaattcaccagcctgatgatctgccgcgccggcgtggccatcggcgaggcggtgctgaccccggcggccatttcgctgatcggcgacatgttcagccgcaaggaccgcgccctgcccaccagttgctacatggccaccagcaacatcatggccaccggctcgttcctgctcggcgctctggtgtacgacatatccagcagccagcagatgctgccgaccatggatccatggcgcatgactctgctgatcgtcagcctgcccggcatcatcctcgccggcgtggtcgccctgaccattcgcgagccggcccgggtcaacgacaacgaagatgctccacaaagtgacagcgccgccgccgtactgcgttttctcaaaaacaacgcacgcaccttcctgccgttcttcatcggcaccggcctgatctcctcgctgaccctcggcatcatgtcctgggcgcccacgctgctggtgcgcatccacggcctgcaagcctcggaagccagctatatcttcggcgcgttcggcatgcccgcctcgctgctcggcaccttcaccctgccctggctggcgacccgcctgcaggaacgtgggcgtcacgatgcggtaatgctggtgctgatgctctgcgtgctgctgccgatcccggccatcgtccacggcatgctctcgccacactattgggcgatggtgctcgggctggtgatgaccatgatgttcctgcccagcgtcactgtgatgacttgcctcggcctgcaactgatcagcccgtcacgcatgcgggcacgcaacgtggcactcaacctgctggtgatcaacctgttcggctacaccgtcggccccttcgtcagcggcttcctcgccgacagggtattcagcggccccacggccatcgcctcggcgctggccgtgatggcagcggcaatcgggccgctgaccctgctctgctacttcctggcccgcaaaggcttccgcaacatggtgcgcagcagcgccacctga

SEQ ID NO: 367424 - DNA, 618 bp, Pseudomonas aeruginosa
atgtccctgtccgcacgagtactagctaaatctcccacgctcaaccagcaagtcagccaacctgatcggacgctgagaaaatcggcagaactgttcgccgagagaggcttcgcacaagtcggtatgcgtgaactggccagacacctgggtatctccagcggctcgatatatcaccacattgaaagtaagcaggcactgctcggcgaattgctcgaagacctctaccaaacactcctggccggaccactaggtactcgagtcttgccgcagcggtcagcccaggaacgcttgcaagacacactgagttggcatctgctgttgcataaacagaaaactgaacaatttctcctcgccgagcgtgatactcactatctggaggaccgataccgaaatccgatagatgccttacggaacgagtaccgtgattatctagccaatcagattgcagcggctagcgggcataccttatcaccgattatccacaccctatcctccagtctgatttcagccctcaacagcattcctacctggctgccacgggaaatggagcagaatagaaaacaccgcgtggccttaagccttgtcacaggcatgatccacaccagcttgtattcctag

SEQ ID NO: 367425 - DNA, 234 bp, Pseudomonas aeruginosa
atgcatggtttcggtatgacggcagagcacttcactttcctgcgtcccaagttacccagagactataagtgtgcgggtgacttgcgccacgaggtacctgagattggcctggacagcaccaacacgttcgtgatggagattttcaccagcaatcgggaaatcatctgcctggccgtggtcgaggatgggttgaccactacacccgtaatttctcttgagcttgtcgaagcgtga

SEQ ID NO: 367426 - DNA, 303 bp, Pseudomonas aeruginosa
atgtggctgatcaaccggctcaaacccgacttcaaaaccatcgccgacttccgcaagaacaacaaagccgcgttcgtcgcgacatgccgggcctttgtgcagttctgccgaactgccggtttgattgccggtgacttagttgccatcgacgggagcaagtttcaggcagtcgcttccgcgcgacgccacctgaatcagcttaagcgtaaggacgagaagcttgataagcggaaatcaggcgtacgctactgggatacggtcgcagattggtggccgaacacagatagcgttgtggtactgtag

SEQ ID NO: 367427 - DNA, 276 bp, Pseudomonas aeruginosa
atggcctacatacaaggagagccccgcagtcagaccagccttttcccgatctcgctggaggaattgatccctgaagatcacctcgtacgggtcatcgacctatatgtcgccaagctggatctgggtcagctcggctttgagaaaactcagcccaaggccaccgggcgctccgcgtacgaccccgccgatcagctaaagctctacctttatggttattccagcgcattcgctcgtcccggcgcctggaagccgaatgcgagcacaacatcgaagtga

SEQ ID NO: 367428 - DNA, 282 bp, Pseudomonas aeruginosa
atgacgggtgggtatggcaattgcggggcgctcgctccaaaccatctccttcagacatccattggtggcttcgccatctaccgtgaagccaacgtcaatctgatcatgacgaagagcctggagcatttcgttgactgtcatctcggcgatccgaacctcggtacgaggctcttcctctcggcagcgggcaagcaattgcgaaagccgcggctgagcaaggctatcggaaaggccaatacgcagccgtccgcagaagccctgagaggcggagtggacgcgtga

SEQ ID NO: 367429 - DNA, 213 bp, Pseudomonas aeruginosa
atgataatgctcgtcgccgcaggctacggcatcgggatcggcctggagtcgcagatagcgctctacagtcatcccgatgtcatcatcaggcaggtcgtggatgaggtccctaacacggcgacgttcattgtggtgccggagaagccggcctccatagagttggagcgcttcataaagcgagcgcaggaaatcggcaaaacctcgcccggctga

SEQ ID NO: 367430 - DNA, 213 bp, Pseudomonas aeruginosa
atgtttcaacagaaccccgctccggcaccggagcggcgcatactgcgccgtgcagaagttgaggcaaagacgggcttcaaacgcgcccacatctacagcctcatgaaagagggtaagtttcccaaggccatgcgacttggcgttcgcgccgtgggctgggactctgccgagatcgaccaatggatcaccgaccgccttaaagagcgcgtctga

SEQ ID NO: 367431 - DNA, 864 bp, Pseudomonas aeruginosa
atgcaggtgatttccgtcatctctaccaaaggcggcgttggcaaaacgacgatcgccgcaaacctcggcggcttcatcgccgacgcgggactgcgggtgctgcttctcgatctcgacatacagcccacgctctcgtcgtactacgaattggctgaccgcgcacccggtggcgtctatgagctgctggcgttcaacgagcgcgacatttcgcagttggcctcgcgcacggcggtcgagcgcctggatatcgttctgtccaacgaccagcaccggcaattgaacaccctgctgttgcatgccccagatggccggttgaggctgcgaaacctgttgccggcgttcgagccgcactacgacctggttttgatcgacacccagggctcccgcagcgtgcttctcgaaatggcggtgctggcatccgggtccgctgtttcgccggtcacgcctgaaatccttgccgctcgcgaaatgcggcgtggcaccgtgcaactcatccaggatatcagcccgtatcgccatctcggcattgagccaccgcccttgcagttgctgatcaaccgggtgcccgccgtgtcatccaatgcccgcctgatccggcagacattgcggatgatcttccgtgagcagacaggcgtccaggttcttgagaccgaagtccccgcgatagaagcatttccgcgtgcggccacgcagagtcttccggctcatcgtgtcgaacaccggcgcccgagaggcaggcgcgcccctgccgcactcgacatcatccgctccctggccaccgagttatgcccgcaatggcgtgagcgtttcaacctggtcaccggcaagatcgggaggaggcatcgtcatgtcgagcgcccatga

SEQ ID NO: 367432 - DNA, 258 bp, Pseudomonas aeruginosa
atgtcgagcgcccatgagcttgcgcgaggccacaagctactcctgcctcttatcgagtttgccttgagcgaaggctgggccgtttcgcgcacgtcgggcggccacctcaaattcataaagccaggattgccgccgatattcacgagctcgacagccagcgaccaccgcgccgggcgcaacgcccgcgccatgttgcgccgcgcgaaccgccagagcgccgaagctcgtcctgatggaaaggagaccggccatggctga

SEQ ID NO: 367433 - DNA, 1725 bp, Pseudomonas aeruginosa
atggctgatatctccgaacaggaaatggcggcgaagctgatgagcgatggcttcggccgcactggcccggtggccggcgcactgaccgatccggtcgcggatacgccgatggtcgtaacgcttgatgagttgcgtccgtacgagcttaatccgcgccttacgcgcaacccgctctatgacgaaatcaaggcctcgatccgcgaacgcggcctggatgcaccaccgccgatcacccgcaggcctggctcagcccactacatcattcgcaatggaggcaacacccggctggccatactgcgtgagttgtggaccgagaccaaggatgaacgcttcttccgtatcggttgcctgttccgcccctggcctgagcgcggcgagattgtcgccctgaccggccacctcgcagagaacgagttgcatggcagtctttcgttcatcgagcgcgcgcttggcgtcgaaaaagttcgtgaactctacgagcaggaagatggcaagtcgctgtcgcaatcggagcttgcccggcgtctcaaagccgacggctatcctgttccacagccccatatcagtcgcatgcaggaggccatccaatacctgctgccggtcatcccgagcgtcctctacggaggactgggccgccatcaggtcgagcaactgaccggcttgcgccgggccggcgccaggatctgggaggcacgcgccgcgaccaaacaggtggatgttgatttcgccacgctgttccaggacgttcttgccgtcttcgatgggtcgcccggcaacttcaacatccagcgcgttcaggacgaactgatcggccagatggccgacctgctcggagtgctgtatgacacgctcgctctcgaaatcgtcgattccgagaagcgctggcaagttttgaccagtgaacccgccgcggcaccaccggccacgcctgccgtggcgacattaccgcaggccgcgcctgcgcaactttccccgcccacaccctcgacgccaccgcagcgtgagacgcctgtcgcggcatcagagtccagcctgcagacgaagccttccccggtgcagcctcccgcacctgacgatcagccggacgatgaaagccagcggtctgcgctgcttcaggagcacattgtctcgcctgttccaacgaccgatcgcctccaatcgatccagcgcctgattgccgaccacactggagaggcgcacaacgacttcgaaagcaacgtccttcaggctatccccgtgcaggtcggcggcctgtatccaatctcggatgtatggcacatcgatcccggtctggacgaacccgaccgtctgcgtacgcatattgcgcagttcgcactggaaattgccagtgaagcaggcgtgggagactatatcgtcccgtccgatgacggcatcggcttctcatgcgcgaccgatatcgagcgcatgggctcagccggcgcaatggcgctccccggtgcaaccctgacgctgctgcacgtcctgagcgcgccttatctgtcggccagcgcctcctctgcgcgtatcgacacttcgcgattggcaggagatttggccgtcctgctgctggggatggcacagctggctatcccctctcggggccagtcccatgttctgaccgacaacggcttggtgaaactgttccggctggtgcggctctcgcgtcgactgctggaaattgaggcaggcaccatggatggcgatagcgccatgcctgggtcatga

SEQ ID NO: 367434 - DNA, 561 bp, Pseudomonas aeruginosa
atgtcgaatccccatcctctcaatcaggcagtgatcgcgcaggcgctccacgatttgcgtaacggtcagttgcgccgcgccaagtccatgggatttgaggacgcggatctcgatgcactcaaacatcccgcattggccagcgcgctggccaatgccctggtttcctggtgctgcgtaacggtcaatcgagatgtcgtgcaacgactgctgcatcaggccgaggacgtgacccaggaggtggtcaggatcgaccggttgctgcgactgggcgccagtacggagctcatcagcaagttcttcggcctgacccaccaggaaatcgccctgcgccgcaatatcattggcctgccgaaacgcaaagggcgccaccctgtcctgacagaagagcaggattgcgatctctggaaccgctggtcggaaaccgtcaaggagcgcggtgtggcgctgaccgacgaaacggcgatgctcgacattgccgcagaccttgccgaaagcatgaatctgcccatctcagtcatctggagcgccatcggcaggtggatcgatgaagggctggtttga

SEQ ID NO: 367435 - DNA, 1191 bp, Pseudomonas aeruginosa
atggaccgctcacgccgatcaagcggtcccgtatcgctgggcgaccttttcgaccaggcgcttcagcgaatgcaggttcagcaaccgcagcccgcaccggcccaaccagccccatctcgccagactgacggtttcattttcagcggcaatcgccatgactccgtgcctcgcgccttgcttacggacaatcgcctgacgccgctagaacgcaacgcctggcaagtgttccggttgttgctcaacgacgatggcatcacggctctcccgacctacgaccagcttgccccctggctggcctcgatgccatgcgccacccgagcctcgcatgaaacggtcgcccgcgcgctgaccctgctacgcctcacacgctggatcagcctggtgaggcgtcggcgcgaccccaggaccgggcgcatccagggcaatctctatgtgctgcacgacgaacctctcacgccgtacgaagccatccagctcgatgccgattatctggggctggtcagccagtcgctggaccatgccagcaaatccatccagcgcgtcggcgtccacacgctcaaggaaatgatcgacgaccctctgctcagcggcagggaactgccgagccggctgcaggtgatatcgcggcgtctggccgcgcaagggtggactgaaccagcgacttattcacagcctggggataatcacgattccgaagacggggaagacgaccttcttcggaatcgtgacgcaccttcttcggaatccgaagtgggcgaaaaaccccggaaaaccggctcacttcgggatccgaagaccgatagtacagtacgtaaagaaaaagaaataaaagaagtacgtacagtaccgcgtgggttgggcatgcttcgccttcccgagcgcttcatgtcgctcaaggcagaacagcaatcgggcgcattggccgcgttgcagccggttgatcccgacctgcatcaggctgttctcgatgagtgggatgcccgctgccgagcgagcaccgtgcgcaatccggcgggttacctgtttggcattatccagaaagccatgcgcggtgagttccgcgcatgggctggacagaggacgccgcccaataaaacggccacaccgcccccggcaccacggcaacctgtagatcctgaagtcgctcaggctcatatcgcccggctgcgctcgatgcttcgcttgtcgtag

SEQ ID NO: 367436 - DNA, 816 bp, Pseudomonas aeruginosa
atgaccaatgagaccgaatccctgcagttgaacctagggtcgttgcgcagcgccatgtctctgacgctacacacccaccatgcatcgcgtatctggcacgggcgggcccccgccgaaggtaagcccggcatcgtcggcctgaatggtttcgttgcgatcatgaacaagctcaagcgcggtgctgagcaggatgatccgtattcggactggtggatgatccgcatcgaggacaagctcgggatcaccaaggaacagctccaggcgctgcgtgagcaggtagaccaggcacttgccattgttcccccggcgctcagcctcggcgaaaacctcaacgtccagccggtcaagctgccgctcttcgtcgcttcccagctgggttttatggcggtctaccttctggccgattacgacgaactcgcccggcggctcatcctggcacatcacacggcgcttatcgatcgcagtacgctggagcggtggctgggggaaggcgctcattccttacgcagcctgttcagcctggcgcagcaataccgctattccggcacccagcgcgacgatttcgccgcaaacaatgccgcagcccgcgccgccatcgagaaattcggtgaagtgccgcaagacatccttgaaggtgtgcggcggtcccgctttgccccgccgatcatccggcgctcccaactgaccactgccgcgtccaggtcagcggctatgtccggcgccgaaccggaggacgactctcacgaagctgtgctagccgatccggctgatgaaggcgctgcttcatctcctgacgacgaggttgcgtcagcatga

SEQ ID NO: 367437 - DNA, 522 bp, Pseudomonas aeruginosa
atgaccagcctcaaccgcttctccgccctggaacacacggacttccagcgtctggaacatgctgcctacctaaaaggccttttaaagccttttaaaggtaatggggagcttgcgacctgggccagccagtgcgaagcgctgcgtgacgacctgattacgctggcgcagcgcaacgtcctggcgcaggcgaggggctatcccttcaacctgcttcccattcaactggcccaacagaccactggcgcaggcacgaccttcttgcgctggcgcaacctcgaccgttcgagcatgggcgtcgcactgtgggaaaacatgatcgccaaccccgctaccccgtcgagcctgatcgcagaccttcatgcgctggagcagcagcgcgtcgtgctcaacatgcagatcagcctgtgccacaccattgcccggcaagcagcggaatgcgccagcaaatcggtgttggcgcaggaggcctaccggcgtcgggtatcgggttcaggcgaggtacatggcaggccgtcgtcatga

SEQ ID NO: 367438 - DNA, 960 bp, Pseudomonas aeruginosa
atgaacatgtccggcgctgacgcagagtgctggatcaatcgcacgcactctggtgattgtcgccagttgctgcgccggatgcagcatgacggcgtgcgcgtacggatgtgcgttaccagcccaccgtatttcggattacgcagctacctgccggacggtcatcccgcgaagcatctggaaatcggacgagagttctcggcacaggattacatccacgaactggtgcaggtttttcggctggtccgcgaagtgctctccgacgatgggacgttatggatcgtgatcggcgatacctatgccgccaatcggacctggcaggccccgagtaccaaaggcggccccaagcattcgactgcccagcacgcagtcggcggcatgcggatcatcgacggacacaagccgaaagacatgatgggcatcccctggatgctggctttcgccttgcgcgctgatggctggtatctgcgtcaggacatcatatgggccaagcccaaccccatgcccgaaagcgtgacagaccgttgtacacgatcgcatgaatacctgtttctgctgagcaagcgccagcattacttctttgaccatgtggctatccgcgaacccactgtcagccctcgcggtcctggcaatatccgcccggttagcgctcctgctagggagcgtgtttccagcggcaacgccaatctgcgcggtagcttgcacaagatcggtccccgcagcacccgcaacaagcgggatgtctggaccatcagcaacaagcctttccatggcgatcatttcgccgtgttccctgacgagctggttactccatgcattcttgccggctcgcaagatggcgacaccgtactcgatccattcatgggcagcggcacgaccgccgcggcagcactgcgcctgcagcggcgattcatcggctgcgaattgaaccggtcgttcatcgacctgcagaacctgcgctga

SEQ ID NO: 367439 - DNA, 396 bp, Pseudomonas aeruginosa
atgagcacgcatttctatggcgaaggcaatatcggttctgcgccggactatcgggagtttcccaacggtaatgatgaaccgcgcaggctgctgcgcctgaacgtctatttcgacaatcccgtcccgaccaaggatggattcgaagatcgcggaggcttctgggctcccgtcgaaatctggcaccgcgatgccgaacactgggctgagttgtaccagaagggtatgcgtgtcctggtcgaaggccgcacggttcgggacgagtgggaggacgcagaagagaacgaacgtgtgaccttcaaggtcgaggctcggcgcatcggcattctgccgtatcgcatcgaggcggtcgctctgggtgcgaagcccgcatctgctgacactgccgaaggccagtag

SEQ ID NO: 367440 - DNA, 2385 bp, Pseudomonas aeruginosa
atgcggcttccattcgaacttgatccgcagatcattcatcacattatctacagccaggctggctccatcggcaaagcgatcattgagttgctgatgaactctgtcgatgcccaggctggcacggtgcgtttgtcattgacccgtgacggtttctcctgccgggatgacggccagggctttgccagcagggccgatgtcatccgctatttcggtcgtttcgggacaccacatgcagagggcgatgcgacttatgggcgcttccgccttggacgcgggcagatcatggcgcatgcctcgacagtctggcactccaacatttggcagatgacggtcgacaccagggcagcgggatatcactacgacctcgtcgaactggccgatgccctgcagggatgcgagatcactggatgctggtatgaaaaactgagcgacgcagaattgatgtcggccatccaggaggtgcgggatctggtgcgatatacaccggtcaacgtcgaactgaatgaccggctgatcacccgtgatccccgctctgagcgctgggatttcgaggacgagttcgcctggtatcgggcaaaagccgacggcgcggtgtccatctacaatcagggcgttctggttcgtcatgatcccgctcacgtgtggggggccggcggactgatcgtgtcgaagaaggccattgggcttaatgtttcccgcaccgaaattctgcgcaagacctgtcctgtctggaaagcgatcgcccggcagttcggcgagatggctgaccggatcgcggcacggcttggcgatcatcgtaaaactgaggcccgacgcgaaaagtctgcacgtgcgctgctctcgtgtgatccggatatcgttcagatctattcccgcgaggaagtagtcaccattctgcctggcaagcggcatatctcgttggaggaattcctgcgcaaatgtcggtacagccatggcaagcgacagaatggcaggtttgctgttgtagagaacgctttcgacgtgccgaagggtgaggcaatcgcccgagaaggtattgccctcctcgttcacccggccactctcgatcgattcggctgctacaacgctcctgatttcgttgactgcatcactcggatcatcgccaatttacgccatgacgtggatcagaacggtacccagttctgggggctcaacagcctgttcactccggacctgatcgcgttttcgacgctccgcgatgccttcatcgaacggacccggatcgtcactgaaaaagatgccctcgatcgggaaacgcggcgcgcatggaccgctctgaggtggtgcctgcatcactacgcggcgctgtgcacgggcgggcaccttatcagtggcgggcagacccgcgcgggtaaatcccttcacatcttcgtcggcgaatccaacgccgcagaagcctggacggatggagaaacatacatcgcagtcaatatcaccattgtacgacggctcaaatcctctccgctcaggacagccgcctacatcttcaccctgatcgagcatgagattgcccacgagggcgacagcctcgattgcgggcacgatgaggcgttctatcaacgtttccatgacctgacgctacaacacagtgaaaaccgtcagcggtacatgcatatgtggctgatgaaatacaccatgagcatggagcttgaaggcaagcgggcggcgggtgaagcctggcgtgagcgttatctggtcgatcgggccggtagcgggcgaaccagccgcgagcttgccccggtgatcgaggatgtcagcgctgatccggtcgtggttggtgcggtccctccggaaaacatgcaactgatcaatcatcagaacagtttgctgatcgagtcgggtgtctgtccagtggccccggactgggaggcaattctggcacaggctcaggttgatcaggcctctcttgacgaccggttgcgcttgcaggcggagcagttcgctgccgaaaggcgccaggccgaggaagatgtggctgcgtactgggctgagatcgagcgctacgaacagacagagcgcgaagctgaatcggcgtcacgccttcgtttcgccgcgctgttcgaggtgccagcagaagaaattcattccgatgccttgcattatctgatgcatgaggaattgagcgacgaccaggctcgatctatctgggcggccaaaccgtggctggaagatgaggattacgatcaagctgatgatctagacctggataacagtggttcagatccggtagcacgtctttctgaggacgctcagaccttggtccgccctggtgaaacagcgtggatgcttgagcgcaacgccgccgccgcaggtttctaccgtatcgaggaatatctgaaatggcgggcgtccatggaggattga

SEQ ID NO: 367441 - DNA, 2031 bp, Pseudomonas aeruginosa
atgcgcgtgtatctgtgcgagaagccctcccagggcaaggacattgcccgtgtcctgggtgcgaaccaacgtggtgccggctgctacacaggttccggaatcgtcgtaacctggtgcataggccatctgatcgaagccgcaccaccggaagcttacggagaacagtacaaacgctggaccatcgagcagcttcctattcttcccgagcgctggcgcagcgaagtcaaaaccgctaccgccacgcaattcaaggcagttaagcaactgctacaacaggccaccgacctggtgattgccaccgatgccgatcgtgaaggtgaaatgatcgcccgtgagatcatcgacctctgcggctatcgcggcactatccagcgtctgtggctgtcggcgctcaacgatgcgtctatccgaaaggcattggacgctctgaaaccgtcgagtgagacgctgcccatgtactattcggcgcttgctcgctcacgcgcagactggttgatcgggatgaacctgagccgtctgttcaccgtacttgggcgtcaggcgggctatcagggcgttctatcggtcggccgggtgcagacaccgacgttacggctggttgtcgaccgggatcgagaaatcgcccggtttgtttctgtcccgtactgggccgtgcaggttcagttgtctcattccgggcaatccttcgtggctaactggttgccaccggagggcaccaccgacacagcgggtcgttgcctgcagcagccagtggctcaacaagccgctgacagtgttcgtgcggggcgtgccgcgcgggtggcctccgtggagacggagcgagttcgcgaagcaccgccactgccatttgatctgggtacgcttcaggaagtctgttcccggcaattcagcctggatgtgcaggaaacgctcgatatagcacagtcgctgtatgagacgcacaaggccacgacgtatccgcgctcggattccgggtatctgcccgaaagcatgctggccgaagtgcctgctgttctcaatgcggtgctgaccaccgatccaagcttgcgcccactaatcgacaaacttgaccgcactcagcgctcgcgggcctggaacgatgcgaaggttacagctcaccatggcatcatcccgacactggaaccgacaaacctttccgccatgtcggagaaggaacgggccgtgtatggcctgatccgtgcatatttcctcgcacagtttctgccccatcacgaatttgaccggacgactgccatgttcgtgtccaacggccaatcgctgcaggcgaccggaaagcaggttgtcgtcccaggctggaaactggcattgctcaccaccgggcccgaagcacctgccgatggcgagggcgatgatgatcaggctcaacgcagccagattcttccgcctctgtccaaggatacgaactgtgctgttgagcaggttgagcttaaagccctgaacacactcccaccgaagccctatacccagggtgaattgatcaaggccatgaaaggcgtcgccaagctggtgacggacccgaggttgaagcagaagctcaaggaaacgacggggatcggcaccgaagcaacacgtgccagcatcattaacggcctgctaggtcgcagctacctggtcaagaaggggcgcgctatccgcgcttcggacgcggcattcacgcttattgatacagtgccgacggcaatagccgatccgggaacaaccgcggtctgggaacaggcgctggatttgatcgaagcgggccaaatgaccctggatagctttatcggaaagcaatcggcctggatcactcaactggtgcagcaatatcggggcgctaccctgtcgatcaagattcccgaaggtccagcttgtccgttatgcggctctgtcacacggcagcgcacgggtaaaagcggatcgttctggtcatgcagccggtacccagactgcaaaggcactgtggcgatcgaatcgtccggtggcaaacgcgccgcgccgcgcaaacggcgcgcgtctccgaaggcttcttaa

SEQ ID NO: 367442 - DNA, 1773 bp, Pseudomonas aeruginosa
atgacccatcccgcccttcagtacggcagcgtgtgcagcggcatcgaagccgtcagccttgcctggaaaccgcttggttggcatcccgcgtggttttcggaaatcgagccgttccccaatgccgttcttgcccaccattttcctgacgttcccaatcttggcgacatgaccggcattgccgatcagatccttgccggaaccgtgctggctccagacatcctggttggcggcaccccatgtcaggcgttcagcgttgccggcgcacggcaaggcctcgcagacccgcgtggtgcgctcactctcaaatatacggagcttgcagatgcaatcgatcaaacccgcagcaacaacagtcaacctccatccatcattgtctgggaaaatgtcccaggagtcctctccgacaagtccaacgctttcggatgccttctgggagcactggccggagaaggctgcgcgctggaaccggcagggcgtcggtggacgaacgctggttgtgtcgctggaccccgccgccgcatcgcgtggaaagttctcgacgcacaatatttcggagtcgcccaacgccgccgccgcgtgtttcttgtggcaagtggtcgagatgatctcgatcccgtcgaagtactttttgagcccggttgcctgcacggggattcttcgccgggcggagcgccgtgggaaatcccttccggaactcctgaaatcagctctggttacgcaggcgtcaatccctgctctctggccggagcctatcagcgcgcctccttcaccttctgcttcggaggtggcaaccggcagggaccaatcgacaaagccgcctgcctgacggcgcggggccataaatgcgacttcgaggtcgagactttcgcgacccaatcgctccatgggcaggtgacacatgccctgaataccgccaatggaggcaaaggttgcagcgaggatgggactgggcgcggcgtaccaatcgtcgctcatcacctccagcgtgatgtgaatgccgtcgccttctcgcagaactatcgtaacgaacttcgcttcgaatccggtcatggtcagatcgtcggcgcgctctcgacaggtggaggaaaacccggccaaggcacgccagcgattgcatttaaccctgctggtgataccgcgccgggaggtcatgacgacgacaaggcaccaatcctgggattcaccgccaatgactacggcgccgacactctcgaaaacctgtctccaacccttcgtgcaggcgggcatgcccatagccatgcaaactctggcgttacacccgccatcgtcttcaagacgttgcaagccaccttcaactataaagtttctggcaccctgatcagccattacagcaggaggcaggaaaaccccgacacgctccttggtccggatttggtcgcaaggagtgttgcactccgtggtcgtgacgatggtgcgaccgccgaattgggtgaagaggtggcgactgctctgcgcgccagcgggggcgggagcgacaaggcacatgtcctgctgcccgcgacggaggcctattttcgtggcgaactgctcccggctgacgaaagcggctggtcacagtgggcaggatggcgcgtgcggcgtttgatgccggtcgagtgtgagcgcctgcagggcatgccagacaattggacgctggtaccgtaccgcggaaaatctgcagcagatgcccctcgctacaaagcgatcgggaattcgatggcggttccgtgcgtggcctggatcggtcagcgtctggagcaggcgttgcgttaa

SEQ ID NO: 367443 - DNA, 561 bp, Pseudomonas aeruginosa
atgacttccatttcccaggaacgcatcacgctcaaaaacctcaaggtggctgaattcgccagcgagggaactctgtgcttctcggcgaccgtgctgcttgatggcgaacctatcgccgtagccagcaatgatggccgtggcggcatgactctcatcctcccacgtgacggcaagcgcccgaagcttttagaggctgaaaagtttgctgcgagcctcccaccggacgtgaccgaatttgacgacccacaggatcgttcaaaacgcctgaccatcgaaatcacactcgactacctggtcgacgatctcgcgaacacaatgcattcggacaagaaaatccgtaccgcattcaatcgcgatattagcaacaaggtgctgttcgtaaaggacggcaaattgctgttcctgaaaggcgtcatgctcaagggtattcccgacagagccgcctatttcgccaacctgcgcgctcggcaaggtcagtccatcaccattctggccgaactcgcgcccgacgaagcgttctccctctggaaacaacacaccatcacaggcggttctcaataa

SEQ ID NO: 367444 - DNA, 285 bp, Pseudomonas aeruginosa
atgcccatgcataatcctccccatccgggagaagcactgcgcgaagatgtgctgccagccatcgatatgagtgtcgcggcgttggcccgccacatcggctattcgcgtggccagttgtcgaccgttctgaacggccgtgcagccatttctgccgatcttgcctatcgcctggaactcgcgggacttggcagtgcgcgtgtataccttgccgaacaggccgcctacgacctttggcaggccgagcaccgggaacaccctcccattgcccgcttgcggttcgcctga

SEQ ID NO: 367445 - DNA, 234 bp, Pseudomonas aeruginosa
atgtccctatcagaactcatgacagctcgtgctgaatccattggttatatcgccctggttggcctcggtgagcatctgccattgcagattctacgcagtgcagccggctactacatcggtaccgctgatgcagatggaccggtatcccgcgagtctgcggaatatttccctcgccaggaacttgctgctgaagccctgaaaacgggcaactggcaacaacgcctggaactctaa

SEQ ID NO: 367446 - DNA, 399 bp, Pseudomonas aeruginosa
atgaacctggcaccgcatattccagcggaaattcttgatcagatcgcgctcgaacaagcgcatttctcggctgcacgtgcggcctttttctctgcctggcaacatggcgtgaaaatagccggccctcgttggttcggtgacggcacgccagaaggtctgcttcgggcggcaagcaaatgggacttgtgccccaatatgccgttgatcgacagcgcattgggagtgctcagcagtggcgagcgccttttcctctcagcaatggtcagtttctacaacgcccaggacggaagcgcgatgcttagccgtatcgggtatcagggtctcgcagatctcggcggcctcgacctggaacgcaggaaagtaatttccgagttggtcctcaattacgggggctggtga

SEQ ID NO: 367447 - DNA, 711 bp, Pseudomonas aeruginosa
atgtctcagaatcccaacccgttcattcgcggctatcagcatttgcattttgtccgcacgctttgcatcacccatgcggacgatagcccacctgtctggcgacctcttcatcccagtcaggcgcatctgctagatgagcagatcgcccagttcccctgcctgctgtgcaacgactttgcgctgatcacggagggccaggaaattccggatgaactggaagcgcaatgcccgatcgatggaatcgtccgaactgttgtctatgccgttaccggtgacgacttcggccagccggttcatgttggcgatacctattcgaaggaagctgcccaggaggtggtgcggcgattgagtttcgagaccggttgctacagccgatgctgggaaatcagttctgcgcacatcaccccagaagctgtcagttatctcgctgagttggccgacatagccacgccgacagagtttctgttcattgcgtttcgcatcccttatagcccggcaatagacgtaaaattgattgcaacgccatggacagatgcaaacctgctgcatgtcgaaggcataactgccagacaactgcgacaagagcatttggacaaggggatgccggaatccttggtgaaagctttgcatcaggccgcactggcggatacccgcatactgattttcgatgcagacgctccagttctcgatgggttaccattccacgaataa

SEQ ID NO: 367448 - DNA, 813 bp, Pseudomonas aeruginosa
atggatcattcagctattcgtgcacagttgcccgccctggtttccggccatgttccgcgcaacatccgccgctttaaattccgcatctatgatgatcagccgcaggcttctgcattcggctttcacatcgatcccaatccgttcgagggtaaggtaatcgctaagaccgacgacgcaatcgtcgtcaagatcgggcgcgccgaattcgcagttctggatcgccaactggccagccaggaacctgatgaaggtgcgaaggtgaaggttcaaccgtatgcacgccatcgcttcgacggtcttcgagcagacacgcccgaagaacgcaccgaacgaacgtctgacggaacttcctacaccgtgaaaacgcacattctcggctcggcgcccgcaaagctaccgatccctgatccgcgttgcccggagttgcaacagctcatcgagcagatggaacagatgcccgctcccgatggtttccggcgcatcacccatatgctggttgatgccggcgcgaagaacttcacctgggttgacccgctgccgcgggacatcatcacgacgccaccggcgatcagcttcgacgtagggtgcgagaaattcacgggccgggtcactgtgctctatgagcgcggcgacgatctctatgccgtggaattgcgacatggcgaggaactgatcgaacgggtggatgaggtgtatttcgacatgcttggcgaagtactggggcggcttatcgatgacggaagctggcgtcagatcaagctgagcgtcattgatacaaagcagccccatcagcgccaggccgtgcaggcatga

SEQ ID NO: 367449 - DNA, 375 bp, Pseudomonas aeruginosa
atgtcactgcgatttaaaggcgctgacttgcgccctgtgcttgccgaggccgcggcaaataactgccgcatcatcctcgcgaaggaccagggcgtgtactttctgtctgagcaaggtgagcggacactcgagggccggatgaagctgttggcctacgccgtcggctgcaatccagatatcgatgcattcgacgactggtgggagctggcgcgcagggagttggggggcgacgattttggggaacatttcgagctgggagatgatgtgttcaagcacatcctgaacagcgaggacgacctcgaactctctgccacaccaacacatctgtctttccagcccgttcctccggcgccgaaggcacccaaagctggttga

SEQ ID NO: 367450 - DNA, 687 bp, Pseudomonas aeruginosa
atgcgcgatccgtttaagatagataagcctacctgcatcagtttcagcggcggtcgcaccagtgcctatatgttgtggcgggtgttgcaatccaatgcagggttgcctgccgatacggtcgtctgcttcgccaataccggcaaggaagtggaagccacgttacggtttgtgcgtgaatgtgccgatcgctggcaagtgccgatccactggctcgaatttcggggcgccgcacgtggtttcgcattgatcgattttgacagtgccagccgcaacggtgagccctttgaggcactgatccggaagcgccaatacctgcccaatcccgtttcgcggatttgcaccagttccctgaaaatccgcccaatgcacaagttcgtccgctcgctcggctgggacgaatgggatcagttcatcggcatacgggccgatgaacagcgtcgggttgcgaaaattcgtgcccgcggccattccgcggaatccagcagcgagaccatgtgcatgccattggccgaagccggaatcaccgtacgcgacgtcacggccttctggcagtcccagccgttcgatctggagttactgacggtcaatggccgaacgctggaaggtaactgcgacctctgttttctcaagcctctggggcagcgcctggcgttgatcaaagccaggccggaagccgcggactggtga

SEQ ID NO: 367451 - DNA, 549 bp, Pseudomonas aeruginosa
atgaccacttcctctaacgaaaaatcctttttcgatctgcacatcaccggcctcgggtatttgaaccgcattcgcgaagtcaaacccaagaaaggcgatcccttcctggcctgcgatatcgcagcgctcaacggtcccagcaatgatgtctcgtacgtgcgtttcgatacgcgcgtgtcaggcaccgatgctcaacacctggttcgtcgctgcatcgaggccgttgaggccgagaagaaggtgatgatcggattccgactgggtgacctgtggaccgacaccttcacctattccaaagggaagcatgccggcgaacagggcgtaagcctgaaagcccgcctgctgttcatcagttggatcaaggtcgatggcgtcatgaagtacaaggccgagccgaagcccgctgattccgaacaggatgcaggagaacaatctccggtgccagcttcagaggtgcaggagccgccagttcaggaaactcctgagccggtctccgaccctgcagaagatgctgatgaacgagaacaagccctggctgaatcgttctga

SEQ ID NO: 367452 - DNA, 612 bp, Pseudomonas aeruginosa
atgatcaccatccccggccagttggccatccgaacaatccatgggcgcaacggcgatttcaacgtcgggcgtcttgcaacatcaattggcgaattcgtcgtgaagaacgccgaactcgaccaatatgacgaaggcaagtacgaaggcgatttcatcatcgctgaaatccgcccgtcgacctacaacacgaacgggcgaatggtcatcgagatccgcgcccatctcggcggcatgacgctttcgaatgttgatcgactcagcaaggatgaagcccagaagctgagtccgcatgaagtcgaccccatagacgaggaagcgcaagcgctcacacctgttcccagaccagctgcgaaaccaaaggctgtcagcccgcatgatccgctggtcgacaccacaccgttcggttcggaaccggaagcggcaacacctgcagaggcctcgaccgacgcagatgacgcagctctcttcggaacgctgtggccgttgggtgcaatcgtcaaactcgatgccaccgtcgatcgccgcgttctgcgtcagcagcgtgaccgtctcgacgccatggggtatcgatttgaacctctgtctcaggattggcatctcgcccaggcctga

SEQ ID NO: 367453 - DNA, 342 bp, Pseudomonas aeruginosa
atgagccgccactacttcggcacgtcgcacaggggcttccccgtcaccgtcatactcggctgggaccggccgatgaattacttcttcctgatgatcgagaagccagccgagcttatcgacagcagcatggaggttgaagacgaagacttcttgtacagcaatctgcacgagaacgacccgttcaaccatgacctggactactaccgtgaagtcctgcgtcacttccagatcgtcataccagagagcatgttcatcgaagtccagtgtgacctcgagggaaatgtcggcaaccgcgtagccgatcatcaggcagacggctcattcaccgaacgggaactctga

SEQ ID NO: 367454 - DNA, 651 bp, Pseudomonas aeruginosa
atgcccgacgcacatgttccaaaagcgttgctgcctatcgatgaaagccccgacctgatggtcgacggctgtatcggtgacgaaagcaacaatctgattttcctgtccgtatgggcacgcgatacagccattcagcaattcctggcccggctcaccctgggcggtaacgaggatggtctggatcagtttcaccttgtcacggatagcggcagttccatcccggtatttgtcgggaatgtcgacaggctggagaaacgctcaacccgtgtcttccgccgcacactgttcggctcgctggtgaatctctggctgttcgacaaacgctgcgtccggcccgacaaggcgaacgccagcgcactgacgctgatgcccagagaatcagatcatcgcctcgatcgcttgtggatgatggttcgggaaacctgcccattaccactgctcgaccactggcgcgaaaccgtgctggatctgttgctggagcaatcgatgctggtgaagcttccgctggccataggccccctggaaggtcatcggctggctctggatgtgcctgtgctcacaagagccctgggccaccttatccgcaacgggacactcgcggccacggtgcatgaacaggcgtcctccacacttctacagcgtgtcgcctga

SEQ ID NO: 367455 - DNA, 1107 bp, Pseudomonas aeruginosa
atggccctcatgttcccccggctcgcccggaattttgcgaaaaacggatactatccgaccgatgagtccacgctcgaaagagcactgaatgcactcgaaccagccacaggccaggtcaacatcattgatccgtgtgcaggggaaggcgttgctatcgccgaagccgcgcatgcacttggccgcgatctggtcggtgcttatgccgtcgaatacgatcccgagcgcgctaatcacgcccgtgggcttgtagatcgctgcatacagagtgatctcatggacaccctcatcagccggcagggtttcggccttctctggctcaacccaccttatggcgatttgtccaaggacgtgaacggcaacctcggctatcaggggcagggccgtgctcgtctggaaaaactgttctatcagcgcacctatccgttgctgcaatacggtggagtgctggtgttcatcgttccacattacgtccttgatgcagaactggtcggctggctcacgcgccatttcaccgggttgcgcatctaccaggctgtcgagacgcagttcaagcaggtggtgatatttggcattcgtgctcgccagcgtgagctgacgaatgatgccaagtccaatcgtaacctgctgctgcagatcggtgctggtgatatcgaagcggaagaactgcctgccgattggccatttcttccatattccatcccaactgctcaggctgagccggagcagttctgccgcgttacgatggaaccggagcagttcgcaatcgaagttcaccgtctgcaaggattgtggccttcgatagacacgcatctcggcgcatcgcagcaatcactgcgcccgccggctcgtgcattatctcactggcatcttgccctggcgcttgccgcaggtgcgatatcaggcgttgtacggtccaaatcgggccgggtgatggtcgtcaaaggcgatacacacaaggagaagtcagctgcggtcgaatacaacgagcgcgacgacggctccatcgcagaaacccgcattctcaccgacaagttcgtgcccgtcatccgggcatgggacatgacacccggttccccgacatggggcgaggtgttgaccatccgctga

SEQ ID NO: 367456 - DNA, 303 bp, Pseudomonas aeruginosa
atggcctatgacgttcgcgacaaatatcgtcgcctattgttcccaatcggcgcgctgattttcagcgaaggtatcgaccgcctcatgcgtgagggccggctcgatccgatgccttatttccaacgccacacccgtggcgactggggcgatatcaccgatgaacaatggcagcagaataacgctgcgctgagttccggtgcccgcctcgactcgttcgacatcgtcacccgcgaaatcagcatccgcattttcagcgaagcagatcgcagcgcaacgcatgttgtgatgccttctgaagcctga

SEQ ID NO: 367457 - DNA, 321 bp, Pseudomonas aeruginosa
atggtaattttcgctggcatttccccattcattggcgttgtcgcgcagccgcgtttcctgatcgggcaactggtcatgacctccggcgtcgatgaactggtccagcagggtaggctcaatcccgccccctatttcgcgcgccatctcagcgcggactggggtgatctcgacgacagcgattggcagtccaatgacacagccctgcgcaccggcgaggaccgcctgttttcatcctatcaggtcgagcctgacctgaagctctggatcatcaccgaatgggatcgcagcgtcacgacgttgctgttgccgtccgagtactga

SEQ ID NO: 367458 - DNA, 630 bp, Pseudomonas aeruginosa
atggacactgaggtgttggacagccatctacgccgggttctttcgccggtgttggggcaacccagcgattcgctgatcgccgatgcctggtttgcgattcgtaatgtgttgcggccatcgcgcattttgcgaacagcctacaaattcacgccgatagggttacagcgtgctgaaaccatcaaggtagaggttaatctcaacgaaagtgtgtctctctatccactggttgaggtcgagctggacacactcgatgaagacggtgatccgattcgagctatagctcgctcctacgacatcaacgaaatgctcggcaccaagacgcgcgcgctgatgcagcgggagcaaggtcgagacctgtttgaccttgctcatgcctggcaattgagcgaggctggctccacaccctatgcggtggacggctacaaagccatggaagcatttacctggtatctggaaaaggaaggcacgcatttcagcgaggaagaagccaatgctcatctggacgctcgattgagcaagtcggccttccgccgtgacatggataccttgttgagaccaggcctgtcggcattcgatgttgatcgggcgtgcgggatcgtgcgcgaagcatatttcaggcacttggcgtag

SEQ ID NO: 367459 - DNA, 816 bp, Pseudomonas aeruginosa
atgaatgcacctagctcactattcgatgtgctagacacagccgagcgcggcggtcgcctgaacctgcgcatcgaggatattgcatctgttttgccgcaactgagcgccgatgccttgcgtcaagccctgcaccggcagcagcgccgcgggcggctggtgcggctatcgcgcggttcagggcattggttgatcgtgccgctgcagcatgccgaagccgggacaccgccgttagaaacctggttgcatcgctatctggcaaaaacattggcagttccctactatgttgccttgctgagcgcggctgaggcttatggcgcctcaccctatgcagtgatggtgacacaggtgatggttcccaagccacgccggccgatgacggtgggacgacacaaaattgtgttccacacccgcgccgggatcgagcaaatgccgacccgttggcacgagacaccggatggccggttcaggatatcgtcgccagagttgacggcgctggaactggtgcaacgggtgggtgttgtaggcgggcgtgctcgtgtgcgagaagtccttcaaggcatcgcacctgcctgttccaccacggggctaggcgaagccctctctgccgcccaggaagtgcatgcagcacagcgtttgggggccttgcttgcgctagatgatcagcctctcctagcccaatatatcgcggactggttacagtcccagctgatgcgcattatcccgctcgatgtcgccgatgcgccggccactcctagcactctgggttcgcgtttcaaggtgcgtgtgccggatgatcttaaaaggtcgaatacatga

SEQ ID NO: 367460 - DNA, 648 bp, Pseudomonas aeruginosa
atgaatacgattcccggtaccgttcggccttcgcgcccaaagctgctgcgcgcagccgcagtcgcgtgggtggtgctcatcagtaccggcaccatcgtcaatcatgtgccgctgtcgaaactgagtacccgtgccgacgccagtgcccaaagcatgcaggtcacggcgctcgaagcccgactggacgaattgggtcagcagatcgaagcgcagcgccaacagcccgatgtggtgacggttgttcgtttcgaggctgagcatcaggccctggaacaacgcctgaccgacattgagctgggactgaagggccatccgaccgcagaaagcctgtcaacactggaggttcgcgtcggcaagttggagtctgacgcaaccaaaactccccagcccgcaccggcactcaccaaaaaacaagccagcaagccgaaaccacgtaatgctgcagagccacctttcacggtcgtcggcctcgaattgcgcggtggcgagcgctttttgtcgatcctgccgaccggctcacccgcgccatccaaaaccggcgtccttcgccccggtgaaaccgaagccggctggcgattggaagccatcgaagatcacaccgccgtgctccagagcgaaggccgggttcttcgcatcgtcgcgccatag

SEQ ID NO: 367461 - DNA, 741 bp, Pseudomonas aeruginosa
atgagccgttcgatcacctctcttaccctgtctgtcggccttatggtaagcagcatcgctgtggtgcaggcgcaaaatacgcatgtggcggaatcccctatagcgtccagcttggaacaagcggcaagcattgttggcagtgatgagcggaaggcgcgtgactgggggctgcgtccggaagaatggtcgcgctacaaggacgtgatgcaggggccgctgggcatcttctctccgaacctcgacccgctgacagcccttggtatcgaagcccgctccgaagaggagcggcgccgttacgccgaactgcaggtgcaggtcgaggcgcgtcgtgtcgaaaaaacgttggcctatcagcgagcttatgatgccgcctggcagcgcctgcaccccgacatgctgcgcgtcaatctgcctggtgccaatgcggcattcggtaccggtgacatgcaaggtgatgcgggcagggttgccgtgtttgtgaaagagagatgcacctcttgcaaccagatcgttcagcagttgcagaatgctgtcacggagtttgacctttacatggttggaagccgacaggatgacggccgtatccgcgaatgggccaagcgagcgctggtcgatccttcgcgcgttcgcagtggctcgatcactctcaaccatgatgccgggcgctgggtttcccttggcctgcaaggggaattgccagccgtggtgcgacaggtcaacggccaatggcaacgccagtaa

SEQ ID NO: 367462 - DNA, 318 bp, Pseudomonas aeruginosa
atgctgccggttcgtagcgagcggctgtctccgggaagtgttgagcgacgggtcatccaggccccagggctgacaccgatttttctcattggtgacgacgagcgctcacgcgcctggttgctcgagcgcaaggccacgctcgtggagttgagcgcaatcggccttttggtcaatgtggaaactgtcgaagcgctcgccgagttgcgcggcctggtaccccctctcacgctttccccggtgtcgggcgacgatctggctcaacgtctaggattggagcactatccggtcctgatcaccgctaccggcatcgagcagtga

SEQ ID NO: 367463 - DNA, 750 bp, Pseudomonas aeruginosa
atgggtgatccggccgctactgcgcagcgtcagcagaaccagcaacaggggctgatcgctggcatcatcacccttccgtttcgcttcttcggcgtcatgtgcggctcgcttctgctgtgcatcgtgatcgaatgcgtcgggatgcacttcttctggccggagcaggggtggcgacatgctcagggtatgctggactacgagcttgcgcagctttccagccagttcacccgaagcgcgctggtgcaggaaccggggcgcacagcgcattggctggtggaacaggcctacgaatggatattcgtgaaatccgggatgctggaatggatgcgcggcgcgtcgagccatgcaagcgcccccagtcagggggctgttcgcgacttccgttactacatcagccaggtttacgtttgggtcgagagctatctcatcgccgcagcattcaccacactcgtatttatcgtgcgcctactggtcctggtgctgtcccttcctctgttcctaatggcggcattcgttgggctggtcgacggcctggtgcgtcgggacattcgccgttttggcgcaggtcgggagtcggggttcatctaccaccgggccaaggccagcctgatgccgctagccgtattgccctgggtaatctacctcgccatccctgtcagcattaacccgctgctgatactgttgccgagcgccgtcctgctggggatcgccaccgacattgctgcgggcagcttcaaaaaatacctctga

SEQ ID NO: 367464 - DNA, 762 bp, Pseudomonas aeruginosa
atggctgacattccagcggtaagcattcgcaacctgtcgaaaagcttttccgacttcgaagtactgcgcgacatcgaactgactgtggccaagggcgaggtggttagcgtgctcggttcatccggctcgggcaaatcgaccctgctgcgctgcatcaactggctggaggagccggatcgcggcaccatccacatcgccgggcagcgcattggcgtcaacgagcagaccggacacaagatgggcaaccgcgaactggctgcgattcgcgccagaaccggcatggtatttcagggcttcaacctgtggccgcacctgagcgttttgcagaacgtcatggaggcgcccgtgcaggtgaaaggcatgggcaaggagcaggcccgtgttatcgccaccgaattgctggaaaaagtcggtatgggtgagaagaagaacagttatccttataccctctccggcggccagaagcagcgtgtggcgattgctcgcgtgctggccatgagcccggaggtgatcctattcgacgagccgacttcggcactcgacccggagcgcgttggcgaagtgctgactgtgatgaacaacctctccgccgagggctacactatgatcgtggtgacccacgaaatggagttcgccagagcggtatcggatcaggtggtattcctggaaaagggcaagatcatcgaaaaatccgccccggagaaattcttcagcagcccggaaacggaacgggtacgcaagttcctcgagctctccgcctga

SEQ ID NO: 367465 - DNA, 663 bp, Pseudomonas aeruginosa
atgaccgaatggagcatcatctgggacgcccgcgaagttttcttcaacgggttactcaataccctgttgttatttgcgctgtcctccagctgcgctttcgtgctgggctgcgcgatgctgtatagcctggaggagcgcacaccactgtctgtcatcgtgcgcagcctgatcaacgccatgcgtatgctacccttcctggtcctaacttacctactttattacggcttaccgagcgtggggctgcgtttggatgcctggacggcggggataatcgctatgatcatctatcatggcgcctattttgccgaaatcctgcgtggcagtcgcttggtgctatcggcgggctatgtcgaagcagccaaggcccatggcttcacgtctttcaaattgtttaggcgcatcaccctgccgcagttggtgatcaaaacccgtaccttgctcggcaaccagttgatcatcgcgctcaaggacaccgcctttctgaccatcatcaccgtgcaggagctgaccgccgccgccaattcggtgcaggccacctacttcatccccatcgaggccttcgtggtggtcatcgtcctgtactggctcatcagcatcggcctggagctagcgctcaaatggtctgcgcgcttcggcgtaaaacgaggattcgaacatggctga

SEQ ID NO: 367466 - DNA, 642 bp, Pseudomonas aeruginosa
atgaatggacaagcttggatattgctgctcgaaggtgcctggacgactctgtggatatccgccatcgccattgccatcggggtggtctgcgggctagccgtagccctactgcgtatggcccgcattccctttgtcgagcagttgctgattctctacaccagcctggcccgcgctacaccgctagtaacgctggtgctgttcatctttctttcgacgccaatttttggcgtcaatctggatcgcaacaccgccgccatactcgccctgacgctgaacaccgcagcgttcaatgcagagatctggcgctcagcgttcataagcttctcccgcgaacagaaagaggccgcgctggcctgcggcatgacccagggtttgttcttccggcgcatcatgctgccacaaatgctgaccagcagcctgcctggactggtcaatgaaatgtccttcttgatcaagagcagccctgcaattgccatcatcggaatcgtcgatctgactcgagtgactaaccgtatcactgcagtaacctatgatccgctgccaccgatccttgctgctggactgctgtacatgctgatcatcggcgtactgctcaagctacagagcatcgccgagaagaaggccaaccgactggcattgtaa

SEQ ID NO: 367467 - DNA, 375 bp, Pseudomonas aeruginosa
atgatggccgaagcgaactgcaacatgggggaagtagttgagtacccgtcttattcggaggcctatgccgacttggcaaacggccgactagattatgtggtcaatgcgctaatcgccatcaacgatctggtcaaaacccgcggcgataccttcgccaaggggattgccgtatcaggtgccggtttcgcggcctggccggtgacgaagaagagcccggaactgcttaaactactcactgagttcatgaatcacatccgagataacggccggttggccgaattgcagaccaaatggtttggcgaaaccttcccggacctgccaacaacccctatcaccagcgtggctcagttccacgagttggcgggcattcagtaa

SEQ ID NO: 367468 - DNA, 357 bp, Pseudomonas aeruginosa
atggcacggttcaaccgctcggcacttgcaaggcgcagcgcgctcgcagcgctgctgcttgccggcctgtcgacggctctgccggcgaccgcggccgacgacagcaatgagaaggaacatctggcggcagtcgttcgccagctggacctgctcgatcacctcgcgaagcagtccgccgcgaccgcatcgcaggagcgcgcccgctatcacttcgactacacgcgccttgccgctgacctgcagcgcatgcgggccggcatcaacgactacctgacgccgcagcgcgcccagccgcgcgaccccgcggcgttgcagggcgactaccgacaggactccgaacaggagccgaagaaatga

SEQ ID NO: 367469 - DNA, 234 bp, Pseudomonas aeruginosa
atgaatgccagccagatcaccgccttccaggccaacggcggcttcaccccatccgccgtgtccgtcgtgctggtcggcgcggtgttcgcagtcctgctgctgtggggcgtgtgggcgctgcgcactgcctatgtcggctggtcggagcagcggatttcccagcgtcagttcctcggcgtcgcggtgcgttttgtcgcgatgtacgtcgtgctgacttttttcctcctctcgtaa

SEQ ID NO: 367470 - DNA, 402 bp, Pseudomonas aeruginosa
atgcctgagcatcaggacgtccggcctgacggaacggtagcgttcctgccgcatcgcctcaatcgccatcccgtggtcgtgcgcggcctcacggcggatgagctgtgggtgtgcgcaggcctgtcgggcgcgtccggcctgtcagtgggcattccgctggcgatcgtcttctcgatgatcgccatcgcgcccaccgccatcgtgctcggcatcgccgccggcgtcttcgccggcggcggcatgctgcgccgccagaaacgcggcagacccgacacctggctgtaccggcaaatccaatggtggatcgcgcggcggcatcctggtgtggcccagttcatcggcggccgcgatctggtgacccgttcgggctactggaccaccagacggaggaccgcctcgtga

SEQ ID NO: 367471 - DNA, 693 bp, Pseudomonas aeruginosa
gtgagccgcttcaagaatgagatcacccatctgcaggcgcacatcaagaccctgcgcctcggcgcgggcgccttgctcctggtggccctggtgatgggagtcggctggtggaacgcgccgcgcgacctgaccatccatgtgccgccggacctgcgctcgggcagcaccaggaaatggtgggaggtgccgccagagtcggtttattccttctcgttttatatctggcagcaactccagcgctggcccgtcaacggcgatgaagactacgaccgcaacatccatgtgctgtcgccgtacttcacgccatcctgccagagcttcctgcgccacgactacgagtaccgccgcacggccggcgagctgcgtcagcgggtacgcgggatctacgagatccccggtcggggctacggcgaagaccccacgctgcgggtaaaggcggtctcggaccgcgactggatcgtcacgctcgatgtcacagcggacgaatactacggctccgaacaggtcaagcgcgccttggtgcgctaccccctcaaggtcgtgcgctcggacgtcgatccggaacgcaacccattcggcctggccatcgactgctacagcggtgcgccgcagcgcatcaccacccccgcccccgtgacaccgaccggtacgacatccggcgggctcggcggcgctttgggagagacgccatga

SEQ ID NO: 367472 - DNA, 909 bp, Pseudomonas aeruginosa
atgaaacatgtcctttatgcccttggactgctggtgaccacgagtttgccgaccacggtccaggcgctggaaatcctgcgctgggagcggctgccgctggcggtgtccctgcatgtggaccaggagcgcgtcgtcttcatcgaccgcaatgtccgcgtcggcgtccccgcatcgctggccggccgcctgcgtgtccaaagcgccggcggcgcaatctacctgcgcgccagcgagccgatcgagcccacccggctgcaattgcaggacgctgacagcggcgcgttgatcctgctggacattgcagccgaacctgcaccggccggccaggcgccgctggagccggtgcgcatcgtcgaagccgagggcgctccgacccgttacggcgacctggcagccgcggcaaagagcgacgaaaacggcacgcaggaagcggtctcccgcacatctcgcgagacacctgtgcccgtggtgctgacgcgctatgcggcccagaacctttatgcgccgctgcgtaccgtcgagccggtatccggcatcacgcgcgtcaatctgaaacgcaacctgccactggataccttgctgccgaccctgccggtgcgggcgcaggcgctcgccgcctggcgcctcgatggcctgtgggtgacggcggtacggctgaacaacacctcgaagcgctggctctctctcgaccctcgcgacctgcaaggcgacttcatgaccggggcgttccagcacaacacgctgggtccggccggcacgcccgatgacacctcggtcgtctatctggtgacgaaggggcacgggctgggtgaatcgctgctgccgacgatcagcccggtcaatgccgcgctgaacctaccggaacccaaaacaccggctcgcaaggatggaggccgtcatgaaaggtaa

SEQ ID NO: 367473 - DNA, 1440 bp, Pseudomonas aeruginosa
atgaaaggtaatggcctactcaagtggttgatgatcccgatggcgctgctgctggtgttcgtcggcgtgaagctgttttccggcggcggaagccagcctggccgggacggcggaacccagctcacacccgaagaagcgagggcacttggcatcgagggcgacacgccgcgggacacggtggccaccctggtcggccaggtccggcaattgcgcaccgaactgcagacggcactgaccgacaacaagacccagaaggcggagaacgaacgcctgcgtcagcgcgagggcgccatcgatcgccgtatccagagcgccctggagaccgagcgcaaccagttgaagagtgaccgcgagcaggttgccagcgaacgccagcaaacccagggcctgctgcaggacctgcagcgccagttcgaaaacctgagcggcaagaacggccatgccgatctgccggtcgggcttggccttgaacccggcgatggcgccgggctcggaaccgatggcgtgcgctggatcgagccggaagatgcgcgcagcgacggcaagagccgcagccccggcaccgccgggagcttcacattcccgaacagcttcggcccggcacagaagacgctggacaccacccgggagacagtcgcggatgccggagccaaggcggccggcatttccaccgccaggccggtctataccgtaccgaccaacgccacgctgatgggttcgatttcgatgacagcattgatcgggcgcgtcccgattgacgggaccgtgaacgatccataccccttcaaagtcctgatcggcccggacaacctcaccgcgaacggcatcgacattcccgatgtcgccggcgcggtcgtcagcggtacggcgtcgggcgactggacgctctcttgcgtgcgcgggcagatccgctcggtcacgttcgtgttccatgacggcaccatccgcacggtgccggaggacggcgagcgtggcggcaaccgccagcagaacagcaacgccaatggcaacagcacacaggatggcctcggctggatcagcgatccctacggcattccctgcgtgagcggtgaacggcgcagcaacgcccagcaatacctgggcacccaggcgctgatcaccgcggccggagcgggtgcggcgtcgctgatcaagtcggacaacggcagcgtggcggtcgtcgccaacaacaacggctcgcttggcacggtcggcatttccggcaacgaagcgatgggccgcatcctggccggtggcgtccaggacatgtcgcagtgggtgaacaagttctacggccaggcgttcgcggccgtgtacgtcaagcccggcgccaaggtcgcggttcatctcgaacaacccctcaccatcgattacgacccgaaggggcgcaaggtcgatcatcgtctcggaggtgcttctgatgcacaggatctggattaa

SEQ ID NO: 367474 - DNA, 1962 bp, Pseudomonas aeruginosa
atggggatcggcatctggtcgatgcacttcattggcatgctggcttttgatctgccgatcgatctcggctacgactttctcatcacgctgttgtcgctcctgttcgcggttgccgcgtccgcctttgccctctgggtcgtcacgcaggaaacgttgagctaccggttgcttgccgctggcgcccttgtgatgggggttggcgtggcgggtatgcactacacgggcatggcgtccatgcggatgatgcccggcatcgtctatgacacgacgctactcggattgtccgtgctcgttgctatttgcgggtctgcagcagcaatatggtgcgctttcgtactccgccggcgctccgcgaaagtgggccggcttcgtctcggagccgccgttgtcttgggcctgacgatcgccggcatgcactatatcggcatggccgcagcgggctttccggctggcagcatttgcggtgcagcacaaggcggtgtgcatgcacactggctcgccctgaccatcattctggctgtgctcgccgtactggccatcgcgctgatcgtctctgtgctcgatcagcgcatggagtcccgtacggccttgctggcaaaagagctggctgaagccaatcaggaactgacgtacctcgccctgcacgacaacctcaccaagcttcccaatcgtgtactccttgaggatcggctgaaccaggctatggagcgcgcacgccgcgagaaaatccgcttcgcgctgatgttcatggatctggatggtttcaaggcggtcaacgacgcctacggacacctgatgggtgacatgcttctcgtggctgccgctggccgcattgtcgagaacacgcggggcagtgacaccgtggcacgcgttggcggtgatgagttcgtggtgctggcccaggtggacgaaccaaccgatgccggagtcctggccagcaagctggtggctgcgattggagagccatacttggtgaacgggcatgagcttcatgtgtccaccagcatcggcatcgccatctatccgggcaatggcgaaatccaggacgaactgctgtccaatgccgatgcggcgatgtatcacgtgaagggtacaggtcgcgacgactactgctttttcgaggcatcgatgaccgccaatgcacacggccaggtgcagctgctgcaggacttgcgcatggcgctcaagcgcaacgaactggttctctactaccaacccaagttcaccgcgcctcatggtccgattaccggcctggaggcgctgctgcgttggaatcatcccgcccatggcatgctcggcccggcgaatttcattccgctggccgagaaaaccggcctgatcgtgcctatcggtgagtgggtgctgaacgaggcatgccggcaaatggccgcgtggcgggatgaagggcgtgaggactggaccatggcggtcaacctgtcggcggtgcagctcgcgcattcgggcttggtggacgccgtgcgcggcgctctggatcgccatgggctggaaccgcaccggctggtgctggaaatcactgagtcgactgccatgcgtgacgtcgatagcagtcaggccatccttcagaagctgcatgacatcggtgtccgcatctccatcgacgatttcggaaccggctattcgagcctgctgtacctcaagcgcttgccggctacggaactcaagatcgatcgctgcttcgtgcatgaccttgcctgcggcacagaggatgccgcgatcgtctcggccatcgtcgccctggggcagacgcttgaccttcgggtggtcgccgaaggcgtggagacggccgagcagcaggaattcctgaccagtctcggctgcgatacccttcagggttatttgctggcgtaccccatgcaggcggatgaagtgattgtcctgtcgaacaacggcgaactgcccgacgacaggcctgccgcaccggatgaaatggaactggtctga

SEQ ID NO: 367475 - DNA, 747 bp, Pseudomonas aeruginosa
atgcactcctctcttttctctcgttttccccttcgccgcatgctcggccccctggtggctctcacgctcaccgtgttgcttctgaccgcctggtacctggcgagcccatccggctcaccggcaaagaccggtgcggaaaacgctgcctcacaacatctccagccgggaccgccatggcggtacggcagggccaacgcgcgctttacactggttctgtacgccgatctggaatgcccttactgcaagagctactacccgctgctcaaggcgtgggtcgatcggaatccggagacgaacctgcaatggcaccatctgccgctctccatgcacgagccggccgcgacacggcaagcccgactggccgaatgcgcgggtgaagccggagggcacgccgcgttctggcaggcggtcacgtggatctaccaacaaacccgtagcgacggggccggcatacctgacaacgtgcgttacccggcactcacgccggcaatgcagacctgcctggacagcacacgcaccgaggcaatcattcaggcgcaggccaacgagggttcgcgtgaaggcgtcaccgcaaccccgacgctgaagctgagcgacaaccagagcggccatacacttgtcctgcctggttccatcgaaggcgacgcactgttgtcagcgctggatttgctatccgccgatggcgatgccgaccaggacacgaacgtcgaaacacccgccgatgcggtcagcagcgtgccaaggtga

SEQ ID NO: 367476 - DNA, 633 bp, Pseudomonas aeruginosa
atgccgcaagtcatacacctgacgaaccgggccgaagccctgttcaccgaactggacagcctgccgttgtcgagacgggttgaagccatcaaccagatccgcctgcggctgcacgagcatagcccgttcgccgacgagccggtggattgtgtgcagtgggtgcgtggcgatcaggtcgaggccaacgactacaaccccaattccgttgccgcaccggaaatgaagctgctggaactgtcgatcgatgccgatggctttacccagccgatcgttacgcacgaacaggaagaaagccatgtggtggtcgacggtttccaccgccagaagatcggcaagaagcaggggccgatcaagaagcggctgcacggctacctgccggtggtctcgatccggagcgggcgcgccgcaacggccgaccggatcgcagccaccatccgtcacaaccgcgcccgcggggtccattcggtgctgccaatgaccgacatcgtggtcaagctcttgcaggccggatggagcgaggtcgacctggcccgcgagctgggcatggacgatgacgaggtgctgcggtttaagcaggtgtccggcctgcctggcttgttcaaggaccatgactattcgagttcatgggattag

SEQ ID NO: 367477 - DNA, 864 bp, Pseudomonas aeruginosa
atgccgactcatccgtccgtgatcagcgatccgggccgcttccccttctaccgctatcgcatggagttcgaggagttcgttcccgcgttcgacgaatggcttgcccaggacgtgccgaccgcctttctggtcggcattcgctccgatgaatcgctcaatcgttttctggcggtcaagcgccgtgcccgggtcaagaagcgcgcctggacaccgccgggttcgtacgtgccaatccagtggagcgcgaaggatcgcccggagagccgggccgttacgttctttcctatctacgattggcgtttcgaagacctctggcggtatgttgccgaccatggccatgcctataaccgcctctatgatcgtatgcacctggcgggtgtaccgttttcgcagatgcgcatctgccagccctatggtgacgatcagcgcaaggggctcgatctgttccacaagctggagcccgagacttggttccgcgtcgtgcagcgcgtttccggtgcgaactatgctgcccgctacagccgccagcgcttccttggctatcgcggcgggatgggattgccgccgaccttcgatacctggcggcaatattgcgaattcctgctgcgcagcatgccggggccgctgcgccaggtctatcagcgccgtatcggggtcttcatcgactggtgggagcagcacaactatccgctggcttcctggcccgacgccggcgttccggaacttgagaaccgcaaagcacaaccctcctggcgtcgtgtcgcactgtcgctgctcaagcaggacatggcccgctcgctgtccttcggctttgcccgccaggacatcgacacgctcgcgctgatcgaagggcagtcgtcatga

SEQ ID NO: 367478 - DNA, 246 bp, Pseudomonas aeruginosa
atgtcgctcgttaatgcactggatcaactggagaaacgcggattgattcagcgcgaactggatccaggcgatcgccggataaaactggtaagactgaccgaggaagcgaagcccgaactcaaaaagatcagactcatcttcgaggctgcccgcaagtccgcaatgcgcaatttctcgccggacgagcgcaaccagttgcattcactgctactacggctgagtcacgatttgctcaatgacgcctga

SEQ ID NO: 367479 - DNA, 1998 bp, Pseudomonas aeruginosa
atgctttcagccctgaaccgccaggttctgatcttttcaacaaaaagttatctggcggcgatgatcgccttgtatatcgccttcagcatgggcctgagtaatccattctggacagttatcacgacctacatcgtgtcacaacccaaggcaggagccgtggtgtctaaggcgatctaccgcctaatcggaaccgtggccggcgccagcatggcgttgttccttgtcccaccgctggttcaatcccaggtacttctggcaatgacactctcgctgtggctggggctttgcgtatttctggcgacaattgacagaacatcccgctcctatctgtttgtcatggcgggagtaacggccagcgtcgtagcctttccctgtcttggcgaaccgatgtcgatcttcgacgttgcggtggcacgtgtcgaagagataacgctgggcattctgtgcgcaactgtggtccatacggtcttctggcccgaatcgtccgcgaagctgctcattgatgaggtagaaaaaacactggacagcgccatgcggtggaccgccggcaatctgacaccgaatcgcccggaaccaattgatgcggagacacgaaagctggctgtcgccgtgaacggcattcacgacctgctcacgcacgcacgttttgagctggggggtggggagatgcacagtgatgtgttcagtgccttacttgttcaactggagcgcctgcttccggtttcggcagacattggcagtctgctcgccgaaatgggccccgaacaactttcaccgcaattgacagaaacactgtccgcagtgcgcgcgctgctggatgtcccccagaatgcgacgacagacgtgaaacaacaacttctgcagcgctgcgcgatacgcgccgccaggttggagcccaacatgtcgtggcatgccacaatggaactgagcatctacgcccggctctccgaacttcttgggatagtcgaggcctgccgtgaactgcatgccgccacattagttgcaagagctggcacgcaattcgtctcaaattttcaaacgcataagaccgagccgcgcattctggagcatgattactttcgtgcgctggccatcgcctgttccgcaaccttctgcttgtttacggccaattgtctgtggatcgtgtcgggctggagtgatggcacgaatgcggtcatgatggctggggtgttctatgccgtgtattcaggatttggcgaccccgcgctggccctgaagaacaaattcgtcggcgtggttatccgaatgctggtgggtgcaatctacgtcacgctgattttgccctccgccgagggatttgaaatgtttgctgtcatgctgtcgccggtactgattgtctccggagccttgttgacactaccccgctacagcgcgctcgcgttcaacctgatcgtcggcctatccagcccatacattatttcgaaccagttcaccggtaatttgatgggttacctcaacaacggtctggcgacattgaccggtatcgcgtacgccttgattatcatgacagccgtacagcccatctggcttaagaacgccgcagatcgcctgatgcgtgccgtctatgtcgatatcgcacagcgcaaatacatggatcagattcgctggcgcagcaacatgatgcatcgaatcgccttgctcgtgagcaacgccgttcgtagcgatgaggaattaggtcaatcgttcgatggtctccgtgagtaccgtacgggctgcctgctggcagaactcaatcgatcccaaaatgactctgcagttcctctgaagaacgacatcgccaggatcctcgacgaaacggcccaacactatgctcgactggcgagcggagactatcgcccgccggccattacggtacgcgaacatatagataacgcgctggcattatcgctggagcaatcttctccgtctgcactattggtgagatcactgtctgatttgcgccgacatctgtttccttatcagggacaaactggctga

SEQ ID NO: 367480 - DNA, 189 bp, Pseudomonas aeruginosa
atggtctcgttcctgatggtgcaggacgaactgcagagcggccagttgcacgcggcctacggtttcagctattgcctgctggcgcctcagccactcgaggaggatgaaaaatgcgtgtttttcaaggcatggctgatggcggaggcggctgtgagcctttctgcgattggcgtgaaccggttattttga

SEQ ID NO: 367481 - DNA, 450 bp, Pseudomonas aeruginosa
atgctcaacccgtttcgcacccaatccgggccgatacactttccatcggtagtcgccagcggcctatgcgttgcactagccctggccagccaggcggccaactccgccgaggtgacggtcttcaccgaccggtccgtcacgctgaaatcggccgagaatgccaatgtcgttcgcctcgacgcagcaaaggaaatcgaggccggcctcgcggccgatcttcccgctaatccccatcgcgcccagaccatcgtccataaacgcctcaagcagggcggcgcccggctgcaacgcgatctggcctccgcctaccagggcgtggccgatgcctggggccttagcgtttccaccgttcccgctgtcgtggtcgaccggcgctacgtcatctacggcgaaccggacgtacccagggcggttgcccgcatcgaggcataccggagggctcagccatga

SEQ ID NO: 367482 - DNA, 945 bp, Pseudomonas aeruginosa
atgaagcgcgcccgtcatctccgcgccgcaattgcggccctcatgcttggaaccgcatcgtcgaccttcgcgctcaacacggccacgatcacggcttcagccctgtctccggactgcctcgaataccgggtcgtcgggatctgctactggctcttctgcaccaccttcggctgctcggtacggacatcggtgaaagtgcgccactacgtgccggacgccgtggtatccagctacgcgaatacaggcgagaacccctgggtcgaagtgcgggccatgagcatgccgaacaccacggcgcaggccggcggagacggcacgacgaaccaggaccacgaaaacaacctgtcaaagttcaagaacgctgacgtgatcggccaccccggcggcgcggtcctgggtcagctcgccagcgcttcgggctattcctgcgaaggtgccggcacggctttcatgccatacctgttgagcacgctcgacacggcggcctggcgctacaacgtgccggaggccgtctatccggaggcgctgatccccggcatgcgcgagatcggcgcgcgaacttctctgaacctgtggggtgctgtctatccacggggcggtttcctgcaccagaccgacgactacaagagcggagccgttgtcgcgcagcgcgccggcgatatcgtcagccgccgtggccagatccacgtctaccagcccctgcttgccaccgctcgcgacggctactggcccgcaggcgagcttgtcgaaggcgatgcctccacgggcaagtggcaggaactcacgcccacgatgtccagttcgtgcgccgtcttcccgcattcgaaccagcgcgcccaggcccagcagggtgactatgcctgggcgctctggcggccctacagctgctgccagcgccggggccagaccttccttggcagcgtcgacttcggtggaggctcctga

SEQ ID NO: 367483 - DNA, 1407 bp, Pseudomonas aeruginosa
atgacttcacgttctcctactcctgccattcacaaacatctacgccggagcctgctcgtttgcgccctgacggcggcatgctctggcgccgtcgcccagacgagcgtcaacgaatacggcctgcaacatcgtggcagcgtgattggcgacgatgtgctgtacagcatcggcggtggccgggccgtatcgatgacgggtgctgccaacatgcgctcgatcggcgttggcgttggctggaacagcaacctcatttgcggcgacatgagcctcaccaccacgctgcagaaccagttgaacggcatcaccaacgggttccagaccatcatgtcgaacgtgatccagaacgccaccagcgcggtggcttcgctgcctgcgctgatcatccagcgcgccgatcccggtctctataacctgctcaccaacggtgtcctgcaagccaggctcgatttcgaccgttcgaaactcacctgcaggtcgatcgcgaacaggatggccgacatggccggtggccagctcggctgggaccagctcgcggaaggcatggcactcaagaaggcggttgccagcaccgatgcggtttccgcgatcgaggaggcggagagcagcaagggcaatgagggcgtgccgtgggtcggtggcgacaatgccggcggttcgggccaggcgcccatccgcgtggtcgctgacgtgatacgggccggctacaacctcgtcaacggccgtagcgtcgatgacacctcgtccatcgattccggcagttgcggcgaccggctgacgtgccagacctggagttctccgcaggctgctgtcacctgggccactcgtgtcctgggcgagcaggagcagcgcacctgcgaaagttgcaccaagacgcagaccacgcccggcgtcgggctgaccccgctcattcaggaagaatacgagaccaagctggaaagcttgcaggaactgatctcgggcagccagtcgatgagcttcgacaatctgcagaaagcaagcagcacgtccctgccgatcacccgcggcgtgatcgaagcgcttcgggatgagccagatcaggacatcctcgcaaggcgcctcgcttccgaggttgcgctcgccagcgtgctggaaaaagccttgctgcttcagcgcacgctgctgaccgggaggatggagccgaatgtagcagccaacgaaatggcccaggaggcggtcacgcaggagagcgacattctcgaccgcgagatcaacaatctcaagaccgagctcgaactgcgccgtgagctggccaacaactccccgatgcagatcatccagcgccacagcacccgggccgccggttcgcgcggcgtctaccaaggcgatcccatccccaatcgcctcgacgagttgcagcgttcgcaatcgggaggaagcaatccatga

SEQ ID NO: 367484 - DNA, 351 bp, Pseudomonas aeruginosa
atgattccggcctggcttcgcatgcggtggctgttcaatcgccgtgtcggttacgcactgctctggacggccctgctgctctttgtggcgatcgccatcaacgtgatcggcatccgtgtgctgggcagcatcgagagctgggagcgctggatggacgaccataacggctatttcctggcctggcgcctgctgctctacgtaggcatcgcctgcggatggcgatggatgcgcaagcgggttctggcgcgcgaacccgatacggaatcgcatgaacgcctcatccgtgtcgaaatcgccggtgtggcggctctggccgttctcgaaggcagcttgttgctgcaatccatttag

SEQ ID NO: 367485 - DNA, 1518 bp, Pseudomonas aeruginosa
atgacgctctacacgtccgactatctggagtattacctcaccctcgtcgggtggatcgtccacaacggcatctggtcggttctggtcaccagcggcctgttcgcacttccgtttcttgccattgtgattcaggaatggctgaaggcgcgcgcggaaggggccgacgaaggcaacaagggcgtgctctcctcgatgcggatagaaaaccgggtgttcgtcgccatcgtcgtgatcatgttcgccggcattcccttcatcgacgtggatctcaacaccatcagcttcgaccagtcccgctccagccagtgccaggtgaacgctcccgcgccaagcgataccggctggggccagtcattcaccacgctcaacaaccagtccgccaaagtgccgatctggtggttcttcatgcattcgatctccaaggcggtcacgagcgccgccgtcgcggcgatcccgtgcggaaccgacctgcggcaaatgaggatggacatcgataacacccgtatcgacgatcccctgctggctcaggaggtgacggatttcgccctcaactgctacggcccggcgcgggccaagctgttcatgaaccggccgaacctcagcgaggagcagatggcggacgtcagttggatcggctccaactactttgtcgacacgccgggatactacgacacctaccgctccagcacgcctcgcgagtcctggccctatgatgacagtcgggatgccgggttgaccgaggtgccgagcggtgctggctatccgaactgccgggaatggtggtcggatggctcaacgggtctgcgtgcccgcctgctggctcaggtcgatcccaatctgctttcgcgcatggcgaactgggccggcttcatctccaggaccgaactggacgattccgtgatccgcgccatcgccgccccacggcaacagaaactgaaccagggcgccgtttacaccgactacggcggacagatcgacaagaccctgccgaatgtcgttacacgggccgcgggcgatgtggggatggcggttggcgccctgggtttcttcccggcgatggacgtcatgcgccaggcgttgcccatgtcgttgtcgctgctcaagatggcgctggtgatctgcattccgctcgtcctggtgatcggcacctatgacctgaaaaccctggtcacggtgagcgtggtgcagttcgcactgttcttcgtcgacttctggttccaattggcacgctgggtcgattccacgatcctggacgcactctatggatggggatggggctacaaccgtccgatgaccactttcgatccggtgatggggctgaacaatgcgttcggggatctgctgttgaacttcgtcatggcgacgatgttcctggtgctgccgacgttttggattaccgcactgacttgggttgggattcgcgctgcaggcgcagttgcaggattggcgaacgcaacaaaagatgccgccgccgccggcgggaagggccctggagtcgtctcaagaaaattgaagtga

SEQ ID NO: 367486 - DNA, 411 bp, Pseudomonas aeruginosa
gtggctaagttcaagcacttcctcgacagcaatgtggtgctttaccttctgtcgagcgatgccgacaaggccgacaacgcggaggcgttgctgaaggcttccccggtcatcagcgtgcaggtgctcaacgaagtgacgaacgtgtgcttgcgcaagcttcaaatgagctgggacgagatcgcccagttcctggaactggtacgtagcttttgccgggtcgttccgcttacggagacgattcacgatcaggcccgatgggtggccgaacagcaccgcctgtcgttctacgacgcctgtatcgtggcggccgcagcagcggccaattgcagcacgctctacagtgaggacatgaaccacgggcagatactggaagacagcttgaccatcagaaatccgttcgtagtgaaatga

SEQ ID NO: 367487 - DNA, 234 bp, Pseudomonas aeruginosa
atgcaggtcgcaaaatggggcaacagtctcgccgttcgtctcccggccacgctggtggaagcgctggaactgcgtgaaggcgacgacattgaaatcattgtggatgatccgcgcaccttcgcggttcgcaagaagcccggtgcggatgccttgttggagcgcctacgcgctttccgcggcaagctgccggcagatttctgcttcagccgtgacgaagccaacgcccgtggctaa

SEQ ID NO: 367488 - DNA, 249 bp, Pseudomonas aeruginosa
atggatcactcggacaccaacaagaaaaccagcgttcatgcgcagcgtgcgtactcgcttatcctgtcgggcgtagccgaatgcgacactgcgctggaccagcgtctgttgctcgactctctcatctgccagtgcgcggtgttcactcgcattctgggcggtgagcgtgaattttatgatttgctggagaagctgaaacgtatcgatctcgatgtggctggcgatttgttgcctgcaacgcagcactaa

SEQ ID NO: 367489 - DNA, 1758 bp, Pseudomonas aeruginosa
atgcggccggaatcggccgcatctctgttggcgacctctcggcgccagaagttgctggaacacatctggcagcggacatcactctcgcgtcagcagttcgcggcgctataccttgccccactggaacgctacgccgagctagtccagcagttcccagcatcggaatcgcatcatcatgcctatcccggggggctgctcgatcacgggcttgagatcgtcgcttatgcgcttaaactgcgtcagccccaccttcttccggctggaacgacacccgaggaccaggccacgcaagccgaagcctggacggctgcaacggcctatgccgcgctgctccatgatattggcaagatcgccgtcgatctgcatgtcgagatgagcgatggcagcgtatggcacccctggcacgggccgttgcagcatccgtaccgcttccgctaccgcaaggaccgcgaataccgcctgcacagtgcagcgagcggattgctctacaaccgattgctcgatcgcgacattctcgactggctcagtggctaccgtgaactatgggcggccctgctttacgtgctggccggacagtatgagcacgccggcgtgctgggcgagctggtcacgcaagccgaccgcgcctcagtcgcccaggaactgggtggtgatcccgccaaggcaatggccgcgccgaagcacgctttgcagcgcaaattgctggaggggcttcgctatctgctcaaggaagagctgaagctgaaccagccacaggcatcggatggctggctgacacaggatgccttgtggctcgtatccaagacggtttcggacaaactgcgcgcgcatttgctgtcgcagggcattaaggggattccggccaacaacacggccgtcttcaacatcctgcaagaccacggcatgctgcaggccacacctgacgacaaagccatctggaaagcggtcgtcaccagcgagacaggctggacgcacacgttcacgatgcttcggctcgcaccggcgctgatatgggaaggcagtgagcgtccgccggcgtttcagggaacggtggaggtagttcaggaggagcacacatcagcagcagcatcctccgctacatcgaccgccgccgagccgccttcgactaccagcgtgacacccactcccgtgctctccccacgttcaccagccgcaaaagcagtcggcaacgatggcgtcgacgccttactcgatttgctcggcacgccagacattgagccaccgcctatcctggaaacatcgagcgaaccaaccgcgcccgctcaggctcctgagccaagcgcacccgaacctacagcgccgctgtcggagatcgaggcggaaggtgcccgaacgtctccatccggggagcatttcattgcctggctgcgccagcatattgaggcccgtaagctgattatcaacgatgcgaaagctctggtgcataccgtggccgataccgtctacctagtcagccctggggtattccagcgctatgctcaggagcacccaaagacggcgcttctagccaagcagaaaaaattgtccgactggcggtgggtacaaaagcacttcgaggaattgcaactacatcgcaaacaggacagtggcctgaacatctggacttgcgaagtcactgggccgcggaaatcacgcaagttgcacggctatctcctgattaattccagggtactgttcgatgaaccacccacgaacaacccctatctgacggtgttgcatgcattaggggaccgctaa

SEQ ID NO: 367490 - DNA, 1839 bp, Pseudomonas aeruginosa
atggcactctcagacatggccgcccggaacgccaaggcgaccggtaaggcatataccctcggcgacatcgacggtctttctctcgcagtttctcctaccgggggaaaaacctggcattatcgctactactgggctggcaagcagaaacgcatgtcgctcggcacctaccccgaagtcggcctccgtgaagcacgtggattgcgtgatgaagcccgtgccctgcttgcgaagggaatcaatccccgtgcagaccgaaagcaaaaacgccaagccgtccggctagcggacgaaaatacctttcaggctatattcgataaatggggcgagcatcgccgactcgttctcaaggaaggccgccagagcacgctttcacaaatcctccgggtcttcaccaacgatgtgctgcctgctcttggtaagcgccccatctatgaaatccagcggcccgacctgttggatgtgatttccaagatcgagaagcggaaggctctcagtatcgcagagaaggtgcggacctggctccggcagatgttccggtacgcgctgatcgtcgtgccgggattgcaacagaaccccgctttcgatcttgatgtcgtcgcgatgcccctacccccggttcggcataacccattcctgcgtatggatgagttaccggccatgcttctgcgtttgcgtaaatatcacggcagactacagacccagctcggcgttcgcttcctgctgttgactggcgtgcgtacaggggaactgcggttggcaaccccggaccagtttcatctagatcagggcctttggatcatcccgccggagatcgtcaagcagttgcaacttgaactgcgcaaggagggcaagcgccccggcgacattccaccttatatcgtgccgctatcggcgcaggccatcgagatcgttcgataccagttggagcagttcaagcctgcacagcgttatttgttcacccattgctgggatctgaaaaagcgcatgagcgaaaacaccctcaaccatgccctgaagcggatggggtatgacgagcagcttacgggtcacggcatccgggcaacgatctccactgccctcaacgaaattggctacccgaaaatctgggtggatgctcagttgtcgcactctgatccggataaagtcagctcggcctataaccacgccgaatacgtggagcagcgtcgaaggatgatgcaggattgggcagaccggctcgacctcttcgagcagttgcaggtggaagccgccagcatgcatctcactgtgcatctggagggagttcccgaggtgcctgagacggtaccagaaaatgcgcaggcacctgccgcaccattccctatcgtcctagtttccaagcccggagccggcatgccgatcataccggaaagcgttcatcgcctgtctgccatcacgggaccgaaaacccagcccgtattatctgatagccagcgtgagcgattggaaatggtggatatctacaaatcgccgcatctcgtgtctgcagcggactacgcgacaatggcggggcggtcacggcggtggatcacatacgaaatttccagaaggaacgtgcttgcgcttggcctgggcaaccttggtcaccgcatccccgaatggcacttcgatccgctgaagcacaagctcattcagactgttttgaagcatgcgcaggatgctgacccctgggatgtctatcgcgcgctggtggcccctcacaggatgctcaagggcggttccccgatcgaagctgtcacatcggataacttccatgaagcggttatggcgacgtgcttaactctgagcggccgtgagacaccatcgctccaaggcatataa

SEQ ID NO: 367491 - DNA, 234 bp, Pseudomonas aeruginosa
atgggactgaatcgtccgagccagaagctgcggggcgacttgcagagcatgtcgtataacggcgaaaacctggcaattgagcttttgaaaatagccgagcagacagacgataatacggcattccgccttctgagactcttggagcgaatttacgtcgatgccgaccggctaaaggctcttgcagatgaggttcgcgccggtcggatcgtccgaaagaggccggacgagccctga

SEQ ID NO: 367492 - DNA, 591 bp, Pseudomonas aeruginosa
atgagcgccaactcgctgcttggcagcctgcgcgagttgcaggtgctggtactcaacccgccgggagaggtcagcgacgccctggtcttgcagctgatccgcatcggttgttcggtgcgccagtgctggccgccgcctgaagctttcgacgtgccggtggacgtggtcttcaccagcattttccagaatcgccaccacgacgagatcgctgcgctgctcgccgccgggactccgcgcactaccctggtggcgctggtggagtacgaaagccccgcggtgctctcgcagatcatcgaactggagtgccacggcgtgatcacccagccgctcgacgcccaccgggtgctgcctgtgctggtatcggcgcggcgcatcagcgaggaaatggcgaagctgaagcagaagaccgagcagctccaggaacgcatcgccggccaggcccggatcaaccaggccaaggcgttgctgatgcagcgccatggctgggacgagcgcgaggcgcaccagtacctgtcacgggaagcgatgaagcgacgcgagccgatcctgaagatcgcccgggagttgctgggagacgagccgtccgcctga

SEQ ID NO: 367493 - DNA, 840 bp, Pseudomonas aeruginosa
gtgaagagattcgggaggctgacctcaaaaagcgtcggtgaatttgaccccaaggactggcagtcagagggacattcactgctccttgcttctagagcgctgagggctcaatggctcgtccagagaagaaagttgatcgattggcctgatcaaatatcacccgcaaattcagggcggctcatccacctgaccaacattgacaaagccttaccgaaatcctcagtgctacttatggggtatgcgattgagatgtacctcaaagcgtctctcgcaagacggatgtcgggatgcgcagaagaactgttcagccatctgtcaagaaaaaagttcgggcacagttacttaaagctcgccaagttcattgagttcccttataccgacgtagatcagaaacactttcagtatcttgagagtgccgtgatatctgacgccagatacccgcttagtttgaagcagggcgaaaactacatagacaaatgcaacagctcgcgcaaaaaaaatactgacaggtctgagtacaggcagtattgcgacttggccaggcggctatctcagtacgcgacaaaaatcggcgggaccagaacgagcacggtattcactgaggggttcacaatcgataacgacggctaccttagcctgagagcgggaggtggtgtctcgacgcggataacattcaagctgagcagcgcactcaaattgcaaaacgatcccttagcggtcttaaaggataacctggacggtgttgcccccatagccgcctcgctttgggataacgccgagatctgggagcatgcagtagatgatgatcagaagatcacgttcaggagaatcaccgaatga

SEQ ID NO: 367494 - DNA, 156 bp, Pseudomonas aeruginosa
atggaccggtttgagctactgatctactcagtgttcggcgtgctctgcgccctggggattaccgctgcgattggttacaagattgccgcttacctggacaagcaacacgccaacagcagacacaacggaacacacccaaactcgactgccgagtaa

SEQ ID NO: 367495 - DNA, 429 bp, Pseudomonas aeruginosa
atgaatctgctcgccaccatttccaacctggtggcctcaatcgtccaaccaacaaaaccgctgtacaccacagtggtctatcccagccaagggaaagcagtcgtgttgcatgacggtctcaacatctgcagtgagcgcatgtggtatcagcatcccaactcactgaccggcgaagaagagaagtcgaccgacccgctcgaccttcatatcgacgataacgcggcctgggtcgagcccgtcatgcagactcaggctgacaattacagcctgctgagcagcttcatggatcagatggacaacacttgggtcaacccggccaacggactgccgatgatggatggctgcgttgacgtcatgggcaacgcttatggcatggactcgatgagcgacggtctgtggttcgatcacggcggcacgttcgcagaatga

SEQ ID NO: 367496 - DNA, 225 bp, Pseudomonas aeruginosa; identical to SEQ ID NO: 363840

SEQ ID NO: 367497 - DNA, 747 bp, Pseudomonas aeruginosa
atgctcctccctttcaggcgagttcaaatgaaatatgtactgtcttcccgggtactttgggccggtttttttttgctttcttctagcctggcaaacgcaggtattaccttgggcggaacacgtgtagtgctgcaggcgcccagtaaggaagcatccattctagtgaagaaccaagcgtcgcaggatgtcatggttcaatcatggatggaggcggaggaggccaattcgtcgcaagacgtgccttttgcaatcacaccacctcttagtcgcctggggggcaacaagcagcagactctgcgtattctttttcagggaaagggcttgccgagtgacagggagtcggtatttcgcctgagcgttcaggagattccgcagaagtccaaatccgataacaccttgcaaattgctttgcgtcagcggatcaaggttttttatcgcccaaacggtttgccgggctctgcagcagaagcaccttcagcgctgcaatggcgcctcgttcgccacggcagtgcgacttttatggaagttaccaataactctgcattccatgtttctttcgctaccgcgaatttgctggtgggagaacgctcctatttggtggaggcagatatggtagcgccaaagtcgagtaaaagttttaaggtgaagaaattttccgatagttggacggctggaatgaaggttgagttccagagtgtcaatgactacggtgggcttgataaaaatacaagctctgtcagtggctga

SEQ ID NO: 367498 - DNA, 657 bp, Pseudomonas aeruginosa
gtgcgcgttcgtagagctggttcagttcgtcgctggacagcggttcgagggtatagacctgcgcgcgcgagcagtgcggaattgaccgccaaccccggatgctcggtcgtcccccccaccagggtcaggagccccgactcgacatggggcagcagggcatcctgctgcgccttgttgaagcgatggatctcatcgacgaaaagcaccgtcgatcgaccatggttgtccagttcggcctgggcctcgtcgatggcttgccggatgtccttcaccccggccagcacggccgagatggcgatgaatcggctgtcggtcgcactggcggccaggcgccctagggtggtcttgcccacgcctggcggcccccagaggatgaacgagtgcaacttgcccgcctcgaacgcgagacgcagcggcttgccggggccgagcaagtgccgttgcccgacgaattcgtccagcgtcttgggccgcaggagttcggccaagggaggcttgggctttgtcgtgaatagatcggtcaagttcctctccctggcatttctgatagttgacgttccgataaggtgggcacctcaatccagagagccggatttatccaacgccgtgggctctttgtcggcaatcgcatgcatgatgatgcgagagccgcggtag

SEQ ID NO: 367499 - DNA, 159 bp, Pseudomonas aeruginosa
atgagcgatagaccgcacgacgaagcaatggccgaggcgtaccgcaagcggccgagcgaggcgttcgccatgctccgggcgctgctgctcggtggcggccagcctggggaatggcgcatcttctggcgtcacgtccggcttgcgctgcgtcggcggtaa

SEQ ID NO: 367500 - DNA, 828 bp, Pseudomonas aeruginosa
atgagcatcaaggcgatgaactgggcgtgggagcagcggctaccacccaattcaaagctgatcctgatggccctggctgatgcggccgatgaggtcggccagtgctggccgcgtgtgcgcctcattgccgaaaagtgctgcacgtccgagcgcacagtacagcgcgtcttgaaggagctggaggcggctgggttcctgcacatcgagcgtaactaccggaaggacggaagccagtcttccaatgtctatagtctcagtctcgcctccccccccgacaaattgtcacccccctctgacagattggcaccggggggcgacacgggcgtcatgcccccggtgacacgggtgaccccccccggtgacagggctacgtcaccccataaaccaccaactagaaccatcaataaatcgtcactacaactaccggcgaaagttatccacacgccgcccccttcgcccgtaccgggcgaggtggagaaaggcgcctgcggcgcattggtgtggccttcgcgcctgaatgagcgggaacgcagtgccatcgcctccatggtgagtggcctcgatgccaacgatgcgcagatgctcctggacgaactcgctggggtaatggcaacgcagagcatcaagaccagcccggagcgctggtttcgcgcggttctggatcgctttcatcgaggacgtttcgccccgtcggccggtcttgccgcgaaggaaaaaagattgcgcattcagaacacaccagttcagacagcctcgcccgaggtcacccgtcactacctggagcgcatccagaccatgctgggcagaaagggggccaccgtcgaatga

SEQ ID NO: 367501 - DNA, 678 bp, Pseudomonas aeruginosa
atggcgcatcggtctaaccgccccctggaaaaaaccgccgcgtcgccggacacaccggaagaacaagcacctgccgacccactcacgatccagttgcaacggttcgaggtgaccggcagcgcgatccgtcgggttgatgcggaaaccgcggtgccgatcagcgtcctgcgcgccgaggaacggcgtgatcgcccgctggaagcgcgtcgccaacgccacctggagccgcgacgcctggcaggccaccctgagcaaccgctgcaccagcggctacaacggctacaacggctacgaccgcgccagccacgcaaggtcggctcgtggaacgtcccgggacctggccggcagctgccgcctcagccatgcgctggagctgaccctcggggtgaagaaccggctcgaccgcgaaccgccgttcagcagacctacaccttccagagcggctacgacccacgctacaccgcccctacgggtgcatcctgtttggcggcctcaactacagctggacgcccggccgccgtggccggcaagcctgtcgacggctgtccagctgccagatccggtagccctgccagatttcacaggcgaccagatctggcaggttgttgggtccccggtgccatgcaacctattacgcctctcgctccccacccgttcgcgcaagaggacaccgcatga

SEQ ID NO: 367502 - DNA, 1431 bp, Pseudomonas aeruginosa
atgagcaataacaacgaggcgtcgcgcccgaagatcgaagtgcgttcgatcgattacgttccccgccacgagcgtcacggcaaggtctggcaccaggcgccgttctggttcaccggcaatttcgtactcaccaccatggtcaccggcttcaccgggccggccctcggcctgggggcgctgtactcgatcctggcgatcgtcctcggcgtctgcttcggcaccttcttcatggccttccatgccaaccagggcccgcgcatgggcttgccgcagatgatccagtcgcgtgcccagttcggcctgcgcggggccatcgtgccgttcgccgcggtggtcttcgtctatatcggcttcaacgtgttcaacgtgatcctcgccaccgacgcgatcaacaccgtgctgccgggataccgcgcgccctggtacgtcctgctgatcggcgtggcggtgttgctcgccatcgtcggccacgacctgctgcataccgtgcagcgctggctgacctacgtgatgatcgcggtgttcggcgtcctcaccgtcagcgcgctgcgcagcctcgaagcggacgcggcgctgggcggtacgccggcgttctcctggagcgcgttcctggtccaactgtcggccgccgccggctaccagatcagctatgcggtctacgtctccgactactctcgctacctgccgcacgaaacgccgacccgcaaggtgatcttctggacctacctgggcgccgccggttcggcgctctggctgatgtcgctgggcgcattcctcgcctccgcgctgccggcgccggatgccatcggcagcgtgcgcgaggtgggcaaccggctgttccccggcttcggcactttcaccgtgctgatcgccgtcccggccctggtggggatcatggcggtgaactgctatggcgccatgctcaccagcctcagcgccatcgatgccttccgcaaggtcaccccgactctcaacctgcgcgtcaccgggatcggcgtgatcgccctggtggtattcggcgtggccctgtcgattccggaaagctacctgggcagcttcaacaccttcgtcctgctgatgctgtacttcctggtgccctggaccgcggtcaacctggtggacttctacttcgtgcgcaacggtcactacgccatcagcgaaatcttcaatcccgaaggcatctacggtcattggggcagaccgggactgaccgcctacctggccggcttgctggcgatggtcccgttcatgtccctgagcttctacagcggtcccttcgccgtggcgctgggtggcgccgacgtcgccttcgtggtcggcctgctggtggccggtgcggtctatgccttcatgtgccgggccctggacctggaggcggagcgacggctcgctagcgtcagcgagcgcctgctggaagaggggggcgcctga

SEQ ID NO: 367503 - DNA, 207 bp, Pseudomonas aeruginosa
atggccttcgaccggcatgccgacaccctcacccgcgactaccgcaacacccagaacgtacggcgcttcctcgtagggctgtgcggcgccgacttccgcctcgaccgcgccttcatggcctggattggcgacggcgcggcaaaatccctgggcgaggtggcggacgaatggcggcggcgccaagcggacgtgcgcccctccgcctga

SEQ ID NO: 367504 - DNA, 597 bp, Pseudomonas aeruginosa
atggacaagtacgtatccggcgcgctgcgccgcctgttgctgctcgctatgctcggactgccgctggcggcggccgctgcggtcgaaccgcagcgactggtggaggcggcgcgggcccaggtgggcgtgaccctgggctacgacccggcctaccggcgactggactatccgggcggcgacgtaccggtgcagaccggggtctgcaccgatgtggtgatccgtgcgctgcgtggacaggggctggacctgcagaaggcggtgcatgaggacatgcgtcgccacttcgcggcctacccacagcaatgggggatgaaaggcaccgatcgcaacatcgatcaccgccgcgtaccgaacctgatgacctggttcagccgccagggcctggcactggcgccgagccgcgacgcttccgcctaccgggccggagacatagtcgcctggcgcctggacaacggcctgctgcatatcggcgtgctttccgatcgcaggctggatgacaggccgctggtgttgcacaacatcggtgccggcgtgcgggaagaagacctgctgttccgctaccaggtcatcggccactaccgcttcccgcagggctga

SEQ ID NO: 367505 - DNA, 192 bp, Pseudomonas aeruginosa
ttgcaggtaccggccaaccgcatcggctacaccgaactctcggtcggccaactgaagatcatgcaggaagtcatcaccttggcgatcttcgtcccgttcagcgtctacttcatgcagcagccgctgaaactggactacctctgggccggcctgtgcctgctcggcgcggtgtacttcattttccgcgcctga

SEQ ID NO: 367506 - DNA, 126 bp, Pseudomonas aeruginosa
atgcctgtctggctgcaaaccgccctgttgctagcctgctccaacctgttcatgaccttcgcctggtatggtcatctgaagaccctcaacagcaagccctggatcatcgcagccctgatcagctga

SEQ ID NO: 367507 - DNA, 156 bp, Pseudomonas aeruginosa
atgccgaccgagggcggaccggtcaagccgaatgagggatacctcgtacaccgcgttcgtcttttcaaacaccccggcttgctggcagagtggcagaccctctccgccccgtcgagcgagccatgcgaagccaagccctgcgtgccgatgtcctga

SEQ ID NO: 367508 - DNA, 750 bp, Pseudomonas aeruginosa
gtgtacagcaatggcggcctggcgaccggagggttgatcggcaaggcagaaggcaacggcatgctcggaaacctgaaagccagcggcagcgtcacggaccaggggggcgcggatctgggcgggctggtcggcaacaatagccagggcgccatcgagaccgccgaggcgacgggcaaggtcagcggcggcagcaacagccgtgtcggcgggctgatcggatacaaccttggcggctccgtcgcccatgcgatctcgcgcggcgaggtgagcggcggcttcaacagcctggtgggcgggctcgtcggccacaacggcggcgaactggccaacgtggacaccagcggcagggtcagcgccggtgcgagttcgtcggttggcggcctggtcggcagcaacgccggttcgatcctctcggcgcgcagcagcagcaccgtcaacggcggcgggcgcagtcgcatcggcggcctggtcggcgagaaccagatccagggacgcatcgtttcttccatgtcggaaggcaccgtcggcggcggctactacgtctccatgggcgggctggccggggtcaacctgggatcgatcgagtactccggcgtcagcggcaagatcgacttcaagccgcagtcgtactacggccagatctatggtgcgcaggtcggcgagaaccgcggggtgctgggcggcaactacgtgatcggcgaggcggcgctcctgccgcctgccggtatcgactacggcaacatctggtaa

SEQ ID NO: 367509 - DNA, 390 bp, Pseudomonas aeruginosa
gtgagcggactcgcgcagcgctccgacgacccgtggctggcggcgctgccggccgcggtgctctacggcgcctgggcggcctatgccaaccaggacggcggcctggccgggatgggcgtggccgccctgctccagggcgccgcaagtctcctggcgacgcgcttcggcctgtacctgttgcagtgcctcgtccgccgccacggccttgcgcaacgccaggcgcccctgctggtggtgctcctgctgaccgcgccgatggccgcgctgcactggctctcgggcacgccgcatccattggcgagcgtggcgccgtcgttcgtcatcggctggctctacttcgccgtctgggcgcgccgccgcccgggccgccggcaagccagcggcgcctag

SEQ ID NO: 367510 - DNA, 627 bp, Pseudomonas aeruginosa
atgatgacgccggcgacgaaccaattcgcccgccgtggcgtcccagaaaggacgcgacgaatttcacccaacggaaaatgcctggcggcaagcggccatcggtggtcgatcgtcatcggcacgcacacagcaaggagatggaatgttccgtacggcttatcgggaaataggcctgttcggcctggtcaagcgcaccgtgaacgagttcctcgaggacgacatgccgacctacgcctcggccctcgcctatcagatgctgttctcgctatttccgttcctgctggtgctgatcaccctcgtaggctacttgcacctaccggagttcttcgcctggctgcgcgagcaggcggcgttgctgctgccgcccgaggcgatggatcaggtcaacccggtgatcgaccagttgcagcagcagaaaggcggcctgctgtcgatcggtatcgcggtggcgctgtggacctcctcggcgggcatccgctcgatgatgatcgcgctcaacgccgcctacgacgtgaaggagagccgcccggtatggaagcgcttctccctgtcgatcctctacaccctcggcatcgccctgttgttgctggtggcggccggcctgattggtcaccgggccgcaggtga

SEQ ID NO: 367511 - DNA, 2145 bp, Pseudomonas aeruginosa
atggttcctcgcttcagtgcgggccagttttcagtcgttttggaggacggctccacgatcacggaaaccacactcccttcatcccaattaaatatccatgtcttcaatcaacgctttgtgcatgagaacattgattgggacaaatccgtaaaaagcatccttctcattgcgaaagagaagattgacgacttgcagaaactggagaagctaaaaggcgagcttcaatcgaaaaagaaagctcacgacgaaaagcaaagtgacatcaagaagcagcgtgaagcattggataaatttctgaccaatgctgccaagaaaatgaagctaggacttcaggcgattgatacgagcgatagctactacttgaattatgatcgccgaaagctctctaatttcattcagagtaatggcgatgccattattaagcctgactcggttcttccagatgaaaaggtcatcgaccttacgaatgccgccaagccagatcagcttccaagcatcactttcgcctcaacggccattgagccggactactttaagaaggcggcaggtcgcatcagagacttgattggaactacagcagtcaatcaagctatccagcggctgactgataatccggacattcgtgactgggttcaaacaggcttggaaattcataagaaccatgattcgcaatcctgcgagttctgcggctctccattcacccagcttcgtgccgaggcacttgccgctcacttcagcaaagagttcacggattttcaaagccggcttcagagcgccgcgacttggattgaatctcaaggtgctccagccaatcagttgcccgcagcgacggagttttataaagagctatcggctgacgcagataagctccagaaagaatacacatctgctgctgagaagatcaaccagcaaatagacggatggcggcaagctctgaaagccaaaattacagaccccgcaaagacagacattcagatttcggatgtggttgaagaggatgtcacgaatttcaatgagatcctaaagtcgatcgttgcgctcgtcggaaagcacaacaataagacttcaaacttcaaatctgagacatccaaaagcaaggtggcactggaacttcactttgctgcggctgaggtgcaagaatttgactatgctggaagtgagaagaaatgcaatgaccttgaggctgaagcaaagaatgactacaaggaaattgaaaaacttggtcaagaggtcggagcaatagaggcgctgctctcaaatgagacggttggggcgaaggagttcaatgacatcctgcatcgtttcatcggtcgctctgagctttgcctgagctttaatcaaaagaaaaaaggctatgagatcatcagaaacggagtgggtgagcatgatgggaatttgagcgaaggtgagaagactgcgattgcattcgtctacttcatcacgaagctcaaagaaaacggaaacaacatcaaggacacgattgtggttgttgatgatcccgtctcaagctttgactcaaatcacttgtttcatgcctattcgttcctgagaactcaatgcactgaagccaagcaactttttgtgctgactcataatttcacctacttcaagctagtgagagactggttcactggaacgaacaggaacaggattgccaaaggaaaagctgagaattgtttcttctatcgactggatgcgcctcctggttcaccccgccattcgctgcttgttgatgccgatgattctctgaaaaattacggttctgagtatcactacatcttcaaaaagctctatgaatacagggcgcatacgatccttaatagagatgaagcctttttgactgcgaacctcgctcgcaagctcattgaatcgttctttaccttcaaatatcccaggcggcgaagcgacatcagtcaactgatggatgttggtctgaaagactgcgccatcacaacgccggaactcaaggaaaaaatatatcgctttatcaacaaatactcgcatagcgatgtaattgaaataaccgaggaatcggcagaaaacttggctggcgaaagccatagcgtcatcggacacatctttcagtggtttgaagaagtggacaagaagcattacgacgaaatgattcaggttgtgacttcttga

SEQ ID NO: 367512 - DNA, 306 bp, Pseudomonas aeruginosa
atgcagcagaccaatatcccttcaagcaccatcgactccgctccgcaagccctcgacgcgctcaatggcctgttcacagttcgcagtgacgtcacctccggccaactgcatgacgaagcccagcttcgccaaaacgccgcagtcggcatactccacgcactctccagcgcaagtgacttgaacaccctggaaaaccatttgcttctggactgcatcatggcgctgcggctgctgtgctccgatgctgctgcgctgtattcggcagcatgcgaacgcggcaaagcagaaaaccagtccctgccttaa

SEQ ID NO: 367513 - DNA, 486 bp, Pseudomonas aeruginosa
atgaataccattaccaagaagccgccgattgattcggaaatcctgtttgcgctcaacaagcaagcacagcagtccagagttgagcttggctcactgctccgcgcgttcggcgcccccactaccttggcccaagctgctgctgtggcttggaaaaacgagctccaaattaaggaggatccagattcaggatcgcagctgtactacttaccaattcagcgggccgccgacttcatcgatctgattcttgaccagttggattcagatagcagaacagaagcagtgcaatttcgagattcctgccgagccattgaagctagcgccagcaagatttccaggctgcaacagaccaaaccccacgtctacgcggcctggctgcaatggatggattctgatcaggccaagcaaacagtgcacaagatcctcagcgggcagcaccaacgcacaccggccacctcctccaaccatgcagctctgggaggtcagtag

SEQ ID NO: 367514 - DNA, 396 bp, Pseudomonas aeruginosa
atggccacacttgaagaggtgattgccgcgctgtactcggcaggcgagccgatgagcggcagtggcatgagcgacactgaggccatggcctacgcacggcagcattttgtttatggcggctactgcttggtgcgcaactggcgctggctcgatctgacggtcactgaaagtcagcgtctgctgctggcgcagacccgacgacagccggcactgatctatgcacacaccgtcatctatgacagcgaacgtcgttgggacgtaggagatttcgtacgaacctctcttctgcaccatcacgaggagttccatttcagaacgctcaatacagcctacttgcttctaggaccaggcacgcgcatccaagtcagcgcagacgccgttgcgagcattttctga

SEQ ID NO: 367515 - DNA, 945 bp, Pseudomonas aeruginosa
atgcaccccactaccctccaaaaaaccaaaacacgcaccagcaacttttatcggactcgctgcggcgaggcagatccatcttcggcgcaggtctgcgcggctttgctcgcgtgcgcccccgagtttaggcccaatgcattcagcacgctgaagagccagatcgtggccgatcagttagctcggggtcatgtcgaggccgccgaggaaatccgacagctgatcaatcctgtcaccgcaccgggctccacactcgaccgcaaacccaagctaagcacggttaagaaagtgtcgaaagaagacaccgaacaactgttcaagcatctcagagcccacggccaccaagacgaagccgctgcgctggtcttggcctactttctcggcgtgcgcccctgtgagatgcgcacgatcctggtggtcggaaacgaagtccgaattattggtggcaagaaaagcgcgcctctgcatcgcggtgccgaccggaccctgctcatcgagatacccaaaattctgaaagcgatccgatgggccgcgaagagactggctgaaagtgagcgcaccaacaccgcgatcagagaccgcctccgccaggagtgccgaacgctatggccaaggcgcaagaagcatccgacgctgaaaagctttcgccacaatttcagtgccgcccaaaaagccgctggagttggtaccgagacagctgcctatgtcatgggacatcaatcaacagcctcacaagaggtctacggagaccgtcgcgccggtgacgcgagtcagattaatgtcaagccggtgggggatgccgatttgtccaagatacgtaaacccaaggcgcatcccagatacggcgccggtcgagtactggagcggattgaggtacccaccccagcgcgcaagagttgtgaggcagcggggcgccgaataggcgagagcgatcaaacatcatggtga

SEQ ID NO: 367516 - DNA, 315 bp, Pseudomonas aeruginosa
atgaagatcccagcgatggaacagaccgagtcaatccatgatgtcctgtgcgacgtttgtggcgaaagcacgcgcgttgaagggtatgggttgcaattcggcactcttcacgccagttggggttatggctcgacccatgatggcgaacgctatgaggtccatctgtgcgaaccctgttttttcaggacgatttctggcctcaggcgagagtgcatggtgaacttcatgttcagcgaggaggacaaggacctcagtgattttgggcgcgttgctcgcgatgactttttcaatgacggaggtacctcgacctcctga

SEQ ID NO: 367517 - DNA, 537 bp, Pseudomonas aeruginosa
atgggggggctgcctctgctaggttatgcgccatgggagcgtaccagcctggaggtagttgttttcttcgtggtggtttattccgccatccacgtgcttgttgcgctgctggttatgctggtgagccgaaagtggcgggagtatttcccggccatcatgctgggtgtgcttctgggcggctttgccggtttgcaggcgggagcagcaatgagaatgaaagcctatgaactggcgggtgatcgtgctgatgttttgatcctcgcgatagagcactacattgaggctaccggagagccacctgagcgcttggagcaactggtacctgattttgtccaggcgatcccagttaggctgccgctgcttgagattgtaacgggcgaggcggcactcaaaggtttctatggcaatccatgggctctgttgttcaaggcggggagtggtttgaactgggaccagctcgtttacctgccaaggcagaattatgagcaggtcgagtcgaaaactttgctggggcgctgggcttacatccacgagtaa

SEQ ID NO: 367518 - DNA, 912 bp, Pseudomonas aeruginosa
atgatcggcgcccgctcggtgatctatccgcgcttttcggtctccgggttctgggccgatatcgaacgtagcggcgccatcgaggccaacctgctggcctcgatgggcccgctgctggccgacgcgccggacaacgaagcgatgaagcgctgctacggccagctcgacaaggtctattcggcgccgttcctgccggaactgcaggcacgctggcgcgagcgcttcggcgtgcgctacacggtcggcggtgccggtttcggcctcaccgagtgcgccatcgtcaccatgctgcccttaggccagccggacaaacccaactgcgcggggcgtcgctgtgactcgttcgatatccgtgtggtcgatgagcatgacgtcgagctgccctatggcacgcccggcgagctgatcgtgcgcccgctcaagccccatgtgatgttcgagggctactggaaccgcccggccgacactctcaaggttatgcgcaacatgtggttccacaccggcgacatcggcaagatggacgaggatgggttcttcttcttcctcgaccgcaagaaggactacatgcgccgtggcggcgagaacatctcgggtttcgagatggaacgcagcttcctcgtccatccgcagatcgaggaggtggcggtgcatgcggtgttctcggaactgtcggaagacgaggtgaaggtgactgccgtgctgcgcgagggcagcacgctcagcgaagaggagctgtgtcgctgggccatcgagcgtgtgccgtactatgcggtgccgcgctatatcgagtttcgcgacgaactacctcgcagtccggtagggcgcattctcaagtaccgcttgcgtgatgagggggtgaccgagagcacctgggatcgagtcaaggccaatgtcacttttgacaagcgctga

SEQ ID NO: 367519 - DNA, 1302 bp, Pseudomonas aeruginosa
atggcagaaggactgcatcaccaggtcagccgagaagcccaggcacgccaggtctttcagctcgtcacgggtcatcgggccggtggtgtcctgagagccgacggtggtcatcttcggttcgcagtaggtgcccggacggacgccttcgacgccgcaggccttgccgaccatcttttgcgccagggtgaaacccttggtgctggcagcaggctgatccggcttcttgaacagctcggaagcacccaggcccagttcggcacgcgccttctcggtcaggccgcggccgatgatcagcgggatacggccaccagcgcggacttcgtcgagcagtaccggggtcttcagttcgaaggtggtgatgacgtcgtcggtgccgtgcttgcaaactttgccggcaaacggatagacgtcgatcacgtcgcccatgttgatgttcgacacatcgaactcgatcggcagggcgccggcgtcttccatggtgttatagaagatcggggcgattttggtgccgaagcagaagccgcctgcgcgcttgttcggaacgtacggaatgtcgtcaccgaagaaccacagcaccgagttggtggcggatttgcgcgaggagccagtaccgaccacgtcgccgacgtaggcaaccgggaagcccttggccttgatttcttcgatttgcttcagtgggccgatggagcccggctgatcgggggtaataccatcacggggcatcttcagcatggccagtgcgtgcagcgggatgtcggggcgcgaccaagcgtcaggagccggggagaggtcgtcggtgttggtctcgccgggcaccttgaacacggccaggctgtacttctcggcgatttccggcttgctggtgaaccactcgccgtcagcccaggactgcagtacggccttggcgttgacgttgccggacttggccttctcggctacgtcatggaaggcgtcgaacatcagcagggtgtgcttgagttgctcggcggcaacggcgcccagagcggcgtcgtccagcagttcgaccagggtggcgatgttgtagccgccctgcatggtgcccagcagctcgatggctcggaacttgccgatcagtggggagctgtcctcgcccttgacgatggccgagaggaagccagccttgacgtaggcagcctcgtcgacgccgggcggtacgcagttggtcagcaagtcgagaaggaaaggttcttcgaaggcgggcgggttcctcagcaattcgaccagaccggcggtttgctctgcggtcagggccaggggaggaagaccttccttctcgcgtga

SEQ ID NO: 367520 - DNA, 1638 bp, Pseudomonas aeruginosa
atgagccaggaagggcaactgctcgaccggaagtcgctgcgcgcggtgttaggcaagacagctgactggggcgaactggtcaaggactgcgtggctttcgccaatgcgacgggcggccacctcctgatcggtatcgaggacgaccaggatcagccgcctgcaggccagcaagtaccgatagacctgccggacacattgcgacgcaagctggccgagcgcacggtcaatgtggtggtgctacccaacatcgtgaccaccatcaatggcggccaatacatcgatctgaccgtcccgcgcgcctctgctgtcgcatcgaccaccgacggtcgttacttcctgcgcgtcgcagaccagagcaagccggttaccggcgacgaggtgatgcgtttggcaaccgagcgcagtgcgctgccctgggaaacccagaccactctgaacatcccccgcgcagagcgcgacgatgtcaagcttcaccgcctgctggacagcctgcgcgcatccgaccgtgtcaaagcgtccgtcaaggaaaaggatgacgaagaactgctcgatcactaccagcttgcacagggccagtacctgacccacctcggcatcctgtgcatcggcaagcagcagcaccgggcacaactggcaaccgcgccggttatccagttcatcaagtacgacgcgcatgagcaaaaggtcaacaaactgccctgggacgaccacacgttgaacccgatggagctgatcgaggccgtctggcaggaggtgccggatttccgggagcgttatgaactacccgatggcctgtatcgccagaacgtgcccgcattcgatgagatcgtggtgcgcgaactgctggtcaatgccctcgtacatcgcccctacacccagcgaggcgacatcttcctgaacctgtaccccgaccggcttgaagtcgtcaacccaggcttgcttcccttgggcgtaacgccgcaaaacgtcctgcacacgacagtgcgccgcaacgaacaccttgcccgcctgtttcacgatctcaagctgatggagcgggagggcagtggcttcgacaagatgttcgaggtgttgctgtcgcagggccggcctgcgccggaactgaccgaacggcatgatcgcgtgcaggtgacagtgcgccgtcgcatcatcaaacccgaagtcatcgacttcattgccaaggccgaccagacctatcagttgactcagcgcgaacgcatcgccctagggctgctggcgcaacatgatgccctgacagcccgggaactggcccagacgctggagcttccatcggtcgaatcgctgtccgcgtggctcaagcggccgctggaatggcagctggtgcgcagtgtcggccgaacccaggccacgcgctacttcattgatccggacctgttgcgcagcctggacttctccacgtccaccacgctcaagcgcatcgagccgcaccggttggcagcacttgtacttgaagatttgcagcgctatccaaggtctgcgatcagtgacatacataaacgcgttggcggggagattcatcccaagcaagtcaagcgcgcgctggaagagctgatcgggcgcggggaagtccgctttgagggtgacaaccgctggcggcggtactgggcggtggcatga

SEQ ID NO: 367521 - DNA, 1176 bp, Pseudomonas aeruginosa
atgagcaaggttgactttttggaaaagctgttagatggcgttgaggtggagtgggcggcgctagggggtgtagccaagtactctgacgtgcgaatcgactgtaatggtatcgatgaaaagaactatgtaggcgttgataaccttctccagaacagggcaggaaaaaccaactcaacttatgtccctactgagggtcgcctgattgaatatcgcccaggtgacatcttgatcggaaatattcgcccctatttgaagaagatttggctcgccaatcagtctggcggcacaaatggagatgtgcttgttgtccgtcccactcatgaatcgttgagctcaggttacttacaccaggtgctcaccgatgagagcttctttgcatataacgtgcagcatgccaaaggggcaaaaatgcctcgtggcgacaaagcaaagatactcgaatataagctccccatcccctgcccggacaaccccaagaaatcgcttgaaatccaggccgaaatcgttcgcatactggatgccttcaccgagctgaccgccgagctgaccgccgagctgaccgtccgcaaaaaacaatacaactactatcgtgatcagttgttgagttttgaagatggggatgtggagtggaagatattagggtctttaattgacataaataccgggtcaaagccacctgaaattattgaaagcgcgacaagctttgattacatcaatgctggaacatcccgatcgggatacagcgcagcaagcaattgtgccggcgatgccgtcacaactccgtcgcgaggccagggtggcatcggctacgtggggtaccaaagtaagccattctggctgggacctttgtgttacaaaatgcaatcaaaagatttgactgttctggtcaataaatacctcttttacttccttcaatcacgaagcgaaatgctgctgggcttgaaaaaggaaggcggtgtgcctgccgtcaataagtctgaccttattcaattggaaatacccgttccttcgctggaagaacagaaacggattgttgccatccttgacaagttcgacgccctgaccaactccatcaccgaaggcttgccccgcgaaatcgagttgcgccagaaacagtacgcctactaccgcgacttgctgctgaccttcccaaaaccagatggagtagagacctga

SEQ ID NO: 367522 - DNA, 1161 bp, Pseudomonas aeruginosa
atgggcaagacgctgaccgaaatcgccgagcagctgagcacgccaaaaaccgttcagaaaactgttgccgaaaaaacgaaggtcgtagacgaagtcaagcctgttccaaaggttcaactgatctatgccttcaatggtacgggcaagacgcgtctgtcacgagcgttcaagcaattgatagcgcccaaaagcgaaggtgatgacgcatcgccggacaagaaaattctctacttcagcgccttcaccgaagacctgttctattgggacaacgacttggggcgggatgctgagcccaagctgatgattcaacccaatgcgttcaccaagtgggtgctggaagagcaaggccaggaccagagcatcaccaccaccttccagcgctacaccagcgacaagttgacgccacatttcagcgcagacttttcatccgtcagcttctcgtttgagcgcggaaaccaggcaccagagccgcacatcaagatctccaagggcgaagagagcaacttcatctggagtgtgttcaatgccctgctggaacaggtgattgccgagctgaacatcccggaagccgccgacagatccaccgacgccttcaataacctgacccatgtctttgtggatgacccggtgagctcgttggacgaaaaccacctgatcgaactggcggtgaacctggcctcgttgatcaaatcgagtcaatcggacctgaaattcatcatcaccacgcacagcccgttgttctacaacgtgctgttcaatgagctcaacagcaaggcgagctacttgctcgaacgcttcgaggatggaagcttcgagctcaccgaaaagctgggggactccaacaagagtttttcgtaccacctgctcctgctgaagaccatcgagcaggccattgctgagaacaaggtcgagcgatatcacttcaccttactgcgcaatctctacgagaagaccgccagcttcttgggctacccaaggtggtcggcgctgttgcctgaagataggcagctgtacctgaaccgagtcatccaattcaccagccacagcacgctgtccaatgaagccgtcgctcagccaacgccggctgagagcgcgacggtcaagttgctgttggaccacttgaagaacaaccatgccttttggcagccgcagggtgcctga

SEQ ID NO: 367523 - DNA, 864 bp, Pseudomonas aeruginosa
atggacgacctgacctataccctgcgccagctctgcctgcgcaaccgcgacggcagccacgccacccaggccgaccggcaacggtcactggcactggccgcccgccaactgcgcgaaacaggcttccgccagatgcgggccacctcgctcaagggcaagcacgtcgaagccctgttgcagcgctggcaaaccgaaggcctgtcggcaggcacactgaagaatcgcatggcgcacctgcgctggtgggcagagaaggtcggcaaggcgggcatcctgccagcgtacaacaccaggctgggcatccctgaacgccgctatgtgaccaacgaaagcaaggccaaggaattgggcgacggactgcacaggatcattgatccacacgtccacatgagcctgcgcctgcaagcggcctttggcctgcggcgggaggagtccatcaagttccagcctcgctatgccgaccgtggcgaccacatcgccatcaaaggatcgtgggctaaaggcggacgcgagcggacggtaccgatcacgacgccgaaacagcggacggcactggacgaggcccaccgactggcaggtttgggctcgctgatcccctcgaacaaaacctacatccagcagcggcatgtgtacgacgggcaatgcaaggcagcgggcctaagcaacatgcacgggttgcggcatcgatatgcgcagatgcggtacgaggcgctgacgggatggaaggcgccagcggcgggtgggtcgctgactgcgacgctgacacacaaacaactcgcccaagataatgccgcacggcaaagaatcagccgagaacttgggcatgagcggatccagattacagcggtgtatcttggacgatag

SEQ ID NO: 367524 - DNA, 1170 bp, Pseudomonas aeruginosa
atgtcacaccaaacctcggacatcctcaccccgaaagccctgttgctcgatgagcggctgacgccgctggagcgcaacgcctggctgactttccgtgcgctggccggcagcgacggcaccgtggtcctcagctacgacgcgctgcgcgggtacctgcccagcgcaccgggcagcaagcgggcggcccttgagaccgtgtccagggccgtgctgtgcctgcggctgtccacgtggattgcgctggtcgagtaccgccgcaacccgatgaccggcttctcgatggccagccgctacgcggtgcggaatcagcccctcgcgttcgacgacgcctgcatggaggacgaggactacctacccctgctggaacgggcgctcggccatgccagtgcgacgattcgccaactggcacagtccattctcgacgaagccatgcgtcatccggaccggttggaaaagctgcccgccacgatgcgggagcgggtcaggcacttgcagcaccgtggcgatgaccgtgatccgggcggtcctgatggtccggcttcgcccgattcccgtgtgtccgaagccagcagcgacattccgaaacccgttccggcatctccgacaacagtacgtactgtagaaaaagaagtattaaaagaagtacgtacgtaccgctcatcacccgaagtgcaggtatcggggtcagatgtgccagcccgcttccggcaactgccgcgggatcagcaacgggttctcactgcacgtctcaagggcttgcctccggagcaacgcctggcggtactggccgagtgggacgtgcgctgcgaatcaggcggcgtgcacaacgccatcgcctacctctacgggttgatcaagaaggccgtggaaggcgtgttcaagctctgggcggcgcgcaaatccgccccgcagcagacacccgtgcaggccgtcagcaacagccagcatggctcaccgcctgccccttctcgatcgtccaacagccaagctgcaaaacctgcgtcgcgtgaagtagcgcaacggcatctggatcaggtcaggcgcatgctgaagacgccatcgctgcccatcgggcagatcatcggctgcatggctgacagcggaatgctgccaacagccccagggaacacgcctgctgctgcaagtctggggccactgggcactacatga

SEQ ID NO: 367525 - DNA, 1263 bp, Pseudomonas aeruginosa
atggcaaagcttacggtggcgggtgttaacaagcttcttaaggagggcaagccgggcatgaccagcgatggtcaaagcttgtacttccggatcacgtcttctggcggtggcggttggatttttcgatatcggtcaggaggcaagctccgagacatgggcttgggctcattccctggaatcggcctgcaagatgcccgcatcaaggccgctgatgctcgaaagctgatcgcgagcggtagggaccctttacgtgagcgggagctggagcgagagggcgaacgggaagcgcagcgcgccagcgaagccaagcaagccacctttgagcggcaggtcgaggactacatcaaggcccacggtggggcctggtcggagaagtggcgtaaaggttggctatcgaagatgaagcgatacgccttccctgttatcggtcgcctaccagcaagcgagattgaaactgagcaggtggttgaagtgctcaagccgatctggaactccaaaccacgtacggctgatgagattcgggggcagattgagcaggtgctggacgctgctaaggctctcgggtggcgcaagggcgaaaatccggcccgttggcgtgggcacttggataacctgctttcaagagaggccaagaaagccgcaagaaagcgcacgcacttcccggcgatgaagtggcaggagctgcctgctctgatggctgaactccaaggggtagaaactttgtcatcgttcgctgcccagcttgcgattctgactggtgctcgtccccatatggcgaggtttgcgcggtgggatgagttcgacctcgagtcacgaacgtggtcgctttcgattgggcgcatgaaatcgcgaagggcattcgtaattccactggcagacccggttgctgagttgctgcgcaagattcctcgcattgaggacagcccatttctcttcccggggcgcggaaagagcggagtgatgcacgccaatgccgtccggaaccttctgcatgatatgaaccatgcggacatcactcgtcatgggttccgatctaccttccgtgattgggcggccgagcgtaccaactatcctcgcgaaatctgtgagatggctctggctcacgatgaacgtgaccagacagaaggagcctactcgcgcacggattttcttgagaagcgccggggcctgatggccgactgggcgagctacgcggtcagcgctccctctgataacgtcattcagggtgcgtttggtaggcaggcgcagcgtgttggagattga

SEQ ID NO: 367526 - DNA, 642 bp, Pseudomonas aeruginosa
gtgaggcgtagccatcaattacttcagtggctttcggtagatcaggcactggagagtctgtgcagcatgaccaaagagccgatctcggaagcggatttgatcagtctgtgcgaggagggcaactgtggtgccttcgtgcggatcagtgcgaccgaaggcaagtcgttagatgctctggtcgacgagtcggacgagtggaccttccaggtatttggggctggttaccagcaagtcagcagccctgccgctctgttccggagcgcaaaaggcggaccgatctctatgcaactgcttggggctgtgcgtacttcgccgcatctggagtgtcgtgaaaatgagggcgtcttctgggaggtcagtgttactccccaggagcagtcgatgtacttcaaacggtcagagattgaccttcttgcagggttgatcaatggggcggatgagcttgagccgcgtgagcaagtcagtgtggggcggctgctctcaatcttggcagacatggccgacctagatattcgtacgcccaaaaaggctgcggatgcgctccacaagtacgccgacttgaagggactcaagcctctgagtcctggcacgattaagaagtaccttggatgggctttggactcaagggcgccaggtcaatag

SEQ ID NO: 367527 - DNA, 627 bp, Pseudomonas aeruginosa
atgactggtaaacataccactccggatcaaggggctcaggcggtcattctcagagaggctggctataccttgcctgcaatcgctgagcgtttagggatcagcctcagtacagttcagcgcctactgaagaagcataaggccgtcgccggagccacgacgcaggcgctgatagagaaagccagggaagagatgctggcttcagccttttcgctggacagcgttcagcagacagctgcctcgctggtgctggatgaccttgcgatagggcaacagatcaggcggaagctttcgagcgccttggaggagcttgattcgagcaatcccatcgtcttccgggctcttgctgcgagcgctaccacgctcaaactgactcaggatgtgggccggcgtgctctccccctcgacaagctatcgatggcacaggaagtcgaagcgttgccggagctggagattcgcatcatgtcgcagctagatgttgaagagttgcgtgccgagcaacgacgcgaggaagccgaattgaatggcgacgaagcagcagtcaacgaagagctggagaacctgcgatggtttgcggagaagaaggcgcttcgatctgagggggacgacatcgtggtcatcgaaggctga

SEQ ID NO: 367528 - DNA, 234 bp, Pseudomonas aeruginosa
atggcctatgactcagagctttccgtccgtgataagaaggcggttcgtgagcacttgtcgttcattcttccgaaactgaaagagcccaattcattgatagatccggtcaagcaggcgctatcagtcatgaattcgagaaaggcgtggtatgagacgccgcttggaatcatagtgattagcgttgtaggggcgatcattgctggagggatcatcttcaaactgggatggaactga

SEQ ID NO: 367529 - DNA, 294 bp, Pseudomonas aeruginosa
atgaacgagttcaacaaccgcattgatgcccaacgcgagattctgaaccttgtgaaccgcagacattggaaagaagagctttatggcttatctagcggcgccatagaccgctggacccgtgtcaacggcattagtcagtccgacgatcttccacgagctatatatgaatcagccgacaagctatttttcttggccaacaaaagccaagaacaaatcacagacgagtatcgcctcctctcagttgaagtttacgaactaactcagcgcatagctcgtatcattgagcagccataa

SEQ ID NO: 367530 - DNA, 795 bp, Pseudomonas aeruginosa
atgggacctgaaagactatctcgcaagtctcgcggcttcgccaggggtgttcttcggcatcaccaccccgcacccgtatccgatctggtttacctcagtcattgccgccacccgcctaattggattcgccttccttacggcaatcctcgtaaaacgcttcgggcgtcgatgaagatgagtatgcacatctatgcgttcggctccatttgccggggagaaattgatcgggggtctgatgttgacctcttggcctgcgtagaaggctctgcaccacatatcgatccagaaaaatactctgtatatcggcatgaacgcctaagggccttgtggaaagaaggcaatccgtttgcatggcatctacatcttgaatcaaagctactcttctcgtcggatggagatgacttcctgaagaaccttggagaacctgcgtcctacgacgctgcagatagcgactgcactaagttcaagaagcttttcgagcgctctttcgaagagttaagccggtcctcgaacagctcgacatttcacctatcctgcatcttcttagcgattcgaaatttcgcgacctgtcattcgctctctctcggtcaacctattttctcaagaagatcgccactgatggtgaagccagctcttgagattgactctgaggcgttctcggttttgatgcgtgcgcgactgctctcaacacgcggccacggagagagcatttcggacaatgaagtaatcaacacccgtaaagctgttgctattgttccatgttggatggagacgctacggagtcagcaatcataa

SEQ ID NO: 367531 - DNA, 642 bp, Pseudomonas aeruginosa
atgacggacgaacactcatcaccagatatcgctaacgctgaggcaagggctgcagatgtgtccgccactggtgggcagcggaagccacgggaagcacttgcaaagggtaaccgagaggttattaccgacctttatgtcagcaaaaaaattgagaacgagccaaaggactatgcctttaaggtttacgtcaggctgaacgcgaagaaacaaacgttcctgaacgtttccttccagcactgtgtcttcgatgcatgctatttcaacaactgcttcttcaactcctgcgacttcaccggctgtcggttcatcggatgcaatctccatcagtccgccttctccgggtgcaagtttgactatgcaatatttgaacgctgccagattgacgatgacatccttgagcgagaggcaccacgcgaggaaaatttgaagatgcggtttgcccgatcacttcgaatgaacttccagcagatcggtgatgccaagtcagtcaacagagcaatttcactcgggctggaaacgtgtaccacaattcttcaagtggctcgacttcaaagtactcgatgcgatatggggcaacggcgagaatacgctgaagctactaaggacgataatagtaattcatctaattatcgctttttatga

SEQ ID NO: 367532 - DNA, 951 bp, Pseudomonas aeruginosa
atgcgcaccacctccctgttgcttttgcttggcagcctgatggcggttcccgccactcaggctgccgacgcttccgactggctgaatcgcctcgccgaggccgatcgccagaacagtttccaaggcaccttcgtctacgagcgcaatggcagcttctccacccatgagatctggcatcgcgtggagagcgatggcgcggttcgcgagcgcctgctccagctcgacggcgcgcgccaggaagtggtccgggtcgatgggcgcacccagtgcatcagcggcggccttgccgaccaactggccgatgcccagctgtggccggtgcgcaagttcgatccttcccaactggcttcctggtacgacctgcgcctggtcggcgaatcccgtgtcgccggccgcccggcggtggtcctcgcggtgaccccgcgcgaccagcatcgctacggcttcgagctgcacctggaccgcgagaccggcctgccgttgaaatcgctgctgctgaacgagaaggggcagttgctcgagcgcttccagttcacccagttgaataccggcgcggcacctgccgaagaccagttgcaggcgggcgccgaatgccaggtcgtcggcccggccaaggccgacggcgagaaggccgtggcctggcgctcggagtggctgccgccaggtttcaccctgacccgcagtttcatgcgtcgcagtccggtcacccccgatccggtcgcctgcctgacctatggcgatggcctggcacgattctcggtgttcatcgagccgctgcacggtgccatggttggcgacgcgcgcagccagctcggcccgaccgtggtggtttccaagcgcctgcagaccgatgacggcggccagatggtgactgtcgtcggcgaagtgccgctgggcaccgccgagcgggtggcgctgtccatccggcccgaggccgccgccaagaaatga

SEQ ID NO: 367533 - DNA, 321 bp, Pseudomonas aeruginosa
atgaaattcgacattgagtcccctgccgacctcggcgaaatcatccgcgccagccgaaaggccatgcgcatgcgccaggacgatgcggcgggcagcatcggcgtaagcgaaaactttctcggcaaggtcgagcgcggcggcgagaccgtgcaatggggaaaactcttccaggtgattcaggagctgggcctgaccgtctcggtagaggtgccggaaccgtatgcccaggacacccaagccaccctcgccaaacgccgcgagcagcaggcggcaccgtccgctacggcgcaagtgaagtcgccccaaggtgaacgcacatga

SEQ ID NO: 367534 - DNA, 1320 bp, Pseudomonas aeruginosa
atgaccccgcgcaccctgaacgtctggatcaacgacgcacttgtgggctacatccgcgagcagaatgggctgtgggcgttcggttatgctcctgcgtggctggccagtaacagtgccttcgcggtgtgcccgggcttgcccctgcaacccgaggaacacctcgacggcgcctcccaccgtccggtacagtggtatttcgacaacctcctaccggaagaggggcaacgcgccctcctcgccaaagcctcggctgccaacgtagaagatgcctttgccttgctgcaggtatacggggccgagtccgccggttcactcaccttgctaccgcccgatacccgccccgccaacggcagcgaaaaacctctgccctacgaggagctgtcccagcgtatccagcagatgccgcaggtaccgctggcctatcgctcggcaaaaaagatgtcgctggccggagcgcagcacaagatggcggtcatctaccggaacggcaccttgttcgacccggagggctccagtccctcgacgcacattctgaaacccgatcacccggaccgggcctgggcccactccgtcatcaacgaatggttcgtgatgaccctagccaaacgtgtcggtctggctgtgcccgaagtgacgcgcctgtatgtcccggaaccggtctatctggtggcgcgctttgaccgcacccacgatgccgggcactggcaacgccagcactgcctggatacctgccagttgctggggctgtcacgggagttcaagtacagcgccggcagtgtcacccgactggccgaggtggccgcactctgcgccccggcggcggtagcccgcttggccctgttcgagtggctggtgttcaacgtactggtcggcaacgaagacgcgcacctgaaaaacctcagtttcctgacctacggtgccaaagtccgcctggcaccgttctacgacctgctgtgcatgtcggtctacggcacccgcgcgttcgacaaagacacctggccacaggccgtcaccctggcctggcccatcgagggcgaagcgcatctgaaccaggtgaccccggccttgctgctggccgctgccgaggtgatgggcatcaaacccggaacagcccgcacagcgatcactcgcttggtgagtaaagtttcgacacaggcaaagcagttgttggcagaagtggcgcaggaaaacagcgtactgaccgcacagcgcccgacactgaaagcgacactggccggagagatgcgcttgctgcgcgccatcgtcagcattgtgatcgcggagatgacccgccagctcggaccgattgacgcgcgctag

SEQ ID NO: 367535 - DNA, 1377 bp, Pseudomonas aeruginosa
atgaacacgcgcgtcgccatgaatgagcacaccctcaaacggcttaaatttgacccgcaaaaaggccgtgtagaatacctcgatccccccatgccagggcacggtacttttggtgtgcgggtcaacaagacatgcaaaagtttcatcttcctgtacagctttcataaccatccgcggcgcctgacgctgggcaattaccccgatttgtcactcgccgaggcccgcgccaaggcggcgcaggccgctgaactgctcaagcaggggatcgatcccgggcagaagaagattgtcgagttggtcgagtaccgtacgagcccgacttttgaggaggccgttgaaagctatctggactgggcccgggccaacaagaagtcgtggcgtgaggatgagcgcatgctgcgcactgagtttgtaccccacctgggcagggccaaaatcggtgatgtcaggcgcaaacaggtggtggcgttgctcgatgacaaggccaagaccgccccggtgcaggccaaccgtctgctggccgtgatccgcaaaatgttcaacttctgcgtcgaacgcgagattctcgatgccacacctctggtgcagatcaagaaggtggccaaggaaacgccgcgcgaacgcagtctcaatcggcacgaactggtgtggtttctgcaccagttggccggagcctcgctgactcaaaacacgcgctttgctctgttgctgagtctgatgctggcgcagcgctcggggcgcatcgtggccatgcgctgggtcgactttgacctcgatgaccggatctgggatcgcagtggcaagttcgagaagaacaacaaccccattgccattccgctctcggacgatgtgttgaacattctgaattacctgcgtgagcggcagattcagaaagtgatggcggcagaccctgcgcgttgggctgacagcaaaacgttgcccagtcctgggcagtatgtgtttcctggacggtggcctgctaagccgcagacgcagccttcgctcaatcgcgcgatgcgccgtttctacgatgactatgtgaaggattcagatcgcgtcgaagaagagggtctgctgcgagttgccgatggctatccgcgtccaaccgtgcatgacttgcgtcgcacggcgaccacgcacatgtccaagcatggcttgggtaaggaggtgcgcagtcgcatcctcaaccacacagatttgtcggtggatgcgatctatgaccgctatgcctactttgaagaaaaggcagtggctctccaagggtggcatacctatctgaaggggttgctgcagaaggagtttggtgacgtggattgggttgagttctacgggcggcgtatggaggcccaggtgccagacgaggagggcgatgcgtga

SEQ ID NO: 367536 - DNA, 567 bp, Pseudomonas aeruginosa
atgcgtcagaaacccaccgtactcgccagcgagatcgtcgcgaagagccgactgttcgctgtcgaggagttgcaactgcgcttcagcaatggcgtcgagcgcacctacgagcgtctggtcggcaagggccagggctacggtgcggtgatggtggtggccatgttcgatgccgagcacgcggtgctggtggaggaatattgcgccggggtcgacgaataccagttgtcgctgcccaagggcctggtcgagccgggcgaggacatcctcgcggcggccaaccgcgaactcaaggaggaagcgggctacggtgcccggaaactggagcacatcaccgaactgtcgctgtcgccgggctacatgagccagcgcatccaggtggtgctggcgcgcgacctctacgaggagcgcctgccgggcgacgagccggagccgatgggcgtcgatcgcatcagcctgcgcgaactgtcgagcctggcccagcacgcccagttcagcgaaggccgcgccctggccgcgctgtacctggtgcgcgacctgctcacccagcgcggcgagtaccaggcatga

SEQ ID NO: 367537 - DNA, 1281 bp, Pseudomonas aeruginosa
atgcacgccatcctcatcgccatcggctcggccggcgacgtatttcccttcatcggcctggcccggaccctgaaactgcgcgggcaccgcgtgagcctctgcaccatcccggtgtttcgcgacgcggtggagcagcacggcatcgcgttcgtcccgctgagcgacgaactgacctaccgccggaccatgggcgatccgcgcctgtgggaccccaagacgtccttcggcgtgctctggcaagccatcgccgggatgatcgagccggtctacgagtacgtctcggcgcagcgccatgacgacatcgtggtggtcggctcgctctgggcgctgggcgcacgcatcgctcacgagaagtacgggattccctacctgtccgcgcaggtctcgccatcgaccctgttgtcggcgcacctgccgccggtacaccccaagttcaacgtgcccgagcagatgccgctggcgatgcgcaagctgctctggcgctgcatcgagcgcttcaagctggatcgcacctgcgcgccggagatcaacgcggtgcgccgcaaggtcggcctggaaacgccggtgaagcgcatcttcacccaatggatgcattcgccgcagggcgtggtctgcctgttcccggcctggttcgcgccgccccagcaggattggccgcaacccctgcacatgaccggcttcccgctgttcgacggcagtatcccggggaccccgctcgacgacgaactacaacgctttctcgatcagggcagccggccgctggtgttcacccagggctcgaccgaacacctgcagggcgacttctacgccatggccctgcgcgcgctggaacgcctcggcgcgcgtgggatcttcctcaccggcgccggccaggaaccgctgcgcggcttgccgaaccacgtgctgcagcgcgcctacgcgccactgggagccttgctgccatcgtgcgccgggctggtccatccgggcggtatcggcgccatgagcctggccttggcggcgggggtgccgcaggtgctgctgccctgtgcccacgaccagttcgacaatgccgaacggctggtccggctcggctgcgggatgcgcctgggcgtgccgttgcgcgagcaggagttgcgcggggcgctgtggcgcttgctcgaggacccggccatggcggcggcctgtcggcgtttcatggaattgtcacaaccgcacagtatcgcttgcggtaaagcggcccaggtggtcgaacgttgtcatagggagggggatgctcgatggctgaaggctgcgtcctga

SEQ ID NO: 367538 - DNA, 753 bp, Pseudomonas aeruginosa
atgaccgtctatttcatcggcgccggtcccggcgaccccgacctgatcaccgtcaaggggcagcgcctgatccgccagtgcccggtgatcctctacgccggctcgctggttccgcaagcgctgctcgaggggcaccaggccggccaggtggtgaacaccgccgagctggacctcgaacagatcgtcgagctactcgcgcaagcccatcgccgcggcctcgacgtagcccgcgtgcattccggcgatccctccctatacggcgccatcggcgagcagatccgccacctgcgcgaactcggcatcccctatgagatcgtccccggagtcaccgccaccgccgcctgtgccgccctgctcggctgcgagctgaccctgcccgaagtgtcccagacgctgatcctgacccgctacgccgcacgcacgaagatgccggaaggcgagagcctgggcgacctggcgcggcaccgggcgaccctggcgatccacctgggcgtcgctcacctggcgaagatcgtcgaggaactgctgccgcactacggcgccgactgcccggtcgcggtgatccaccgggccagttggcccgaccaggaacaggttcgcggcaccctcggcgacatcctgcccaaggtcgccgccaggaatttccgccgcaccgcgctgatcctggtcggcgaggtgctggccgccgaaggcttcgccgactcttcgctgtaccgcgccgagcatcgacatctctatcgacccggcgattga

SEQ ID NO: 367539 - DNA, 1563 bp, Pseudomonas aeruginosa
atgtttacagtggtcaacacggcgcagcagatacctcagcaggcgcgatcctgtgtatacctgctaacagactactgggacgactggttcaagttccgcacgatgttcacgctctttgtgttcgacgccagcggcactcgacacaggccgggatccgtcaaaattggccaagccggtctactccctggagcagggggggaaggaatcccgtctggcactcgtagcccggcgctccctgtggcattcggcgccctggattcagggcagtttttctcacttggccaagatgaggactactacgcaacgcttcgctcgctgccaaatggtctcggtgtcgtaattctccgcgcgctctgcgactgcgcctttgacttacaaatcttcgatcgtcaccgctttgagttagtcatgggggagtcgctgcttcggtcggttcatgaacccaatgtacgaaaccgtctgcatcgccttgctcacggaaatccgatactgacgcggtttgaattccagtacacgctgcctgccgcgctcgctgacgatggaagtgtcctgcttccaccgcctacgatgcagttcagggtgattccaggtgccgagcctccaacgaacctgcatgtccttgtggggcgaaatggtgtgggcaagacgcgatgcattcagagcatcatcaatacactcttggatcgtgacagtgataccgcccctcgaggcgtgctgcagcgtctgggaaacaaccatgatgagtggacgttctctggtctggtctcggtctctttcagtgctttcgacagcttccaactgcccgctgcggcgactcagcgcacacctgcaacgttcgtaggtctccgatctcagagagaagagaatggggaagttgtcgaggatctgaaaagcaccgcagacctggcgaacgactttgttctgagcctagatcgatgccgaaatgagccccgaaggagccgttggctcaatgctgtggcaactttatccacggatccactgtttggcgaaacaggggtcgagcaacttatcgagcacgctcacgactggagagaacgagcaacccgtttttttagactcctgagttcggggcatgcgatcgtcctacttaccactacccgccttgtcgagctcgtcgacgaacgcaccttggtggtgttggatgagcctgaagggcacttacacccaccactgctttccgcctttgtacgcacggtggccgatctccttgtcgcaaggaatggggtggcactgatttcgacgcattccccggtggtgctgcaagaggtccctcgctgctgcgtgtggatgctgaggagaacccggacgcattcagctgttgagcgcccatccatagaaacgttcggcgaaagcgcaggcgtgctgacccgcgaggtatttggcctagaggtaacacattccggctttcatcagcttgtttccgccgtcgcgaggcggcccggtatcacttatggaggcgtcgagcaccactttggagggcagttgggcgccgaggctcaggcgctggcacgaagcctcgtcacacgaaggaacgctccatga

SEQ ID NO: 367540 - DNA, 861 bp, Pseudomonas aeruginosa
atgaagcgtctcgtcccacctccattcgacgctgccggcgtggtccagacctgtgcatctggtattaccattgcggagcgctctcaggcgctgctcgaagccctgcctgtcatccagtcttctgaagccgagtaccgggagcttggaccagtcggccaactctaccgaatcgcggagaatgatgtagttaccccagccatcgatgcaaacctgatgggggtgatctacaagtcgcattttgtccgaaagggctcaccgtcgaggccgttatacgaacagatcaaaatggcacctgaattcggcatctgtccgctgtgtggtcagagggtcgtcgcaactgtagatcactatctgccccagtcgcgctatccaaggctcaatctgacgccggtaaaccttgtgccagcgtgcgcggactgcaataaacagaagctggcgggtgctcccacgagagccgaggatcaaaccctccatccatattttgacgaccttggcaacgaacgctggctaattgtcgaagtcatgccaacctcgccgccaacgattacctttgccattcgtccctcaagtaactggaccgaagtgctctctacgcgcgtgaggcatcactttcacgtgatgggtctcggagagctctacattgctcaggcagccagcgaaatggcggatatctcgtacgcgttggaagacatagggactaacgtggggcccgatggagtccgtcagcacctggatgggcagttccgatcgcggcatgctcgcgatgccaactcttggaagaccgccctatatgaagggctcagagattcagattggttttgtgccgaagggtatcgtctgattcgtaatcgtcctaactga

SEQ ID NO: 367541 - DNA, 1245 bp, Pseudomonas aeruginosa
atgagtctagagcgcttcaatcagctggtcgcgatttatagtgacatcaccttcggtgcgcagagccgcgaaggcgatcttgcaatcaaggacgatgatcagctccagagcttgaaagctctcttggccgagccacgggagtacgctctttctttgctgcctgaaaggcctgctgacaccctcaaggtcggcgaacccattcggctacgagctgacgatccccggacaggtattggcctgctcgcggatgagtttgacgacgttcttaactttccccaaggtcgcatccgagagccccgtttctatctcatccccggtgcttgggactctactggcaatgctccaccggatcaggtccagcgatatcgccacgtgttgagcctcgtcaaactactggaggagtgctcggcctatctcgacaaggagaatcaggagctcgtcttcattgatgacgggaagttcatcattccggttaggttctcctcgcaggacctaccgaagctcgacattgcaagcctgcaggcactgattgcccgctttggtaaagatacccaccgtgagcaaaaaatcacgatcctggccaaggccgtgcagaagatctgcggggctaagcccccgcagcagcgcttcgcggacttactcgacagaattcccgaggtgctaaagcagttcgacgaggggtatcggctgttcgtcgccgacttttcttacgacaaggttctcgatcaaatggaaacggccaagctcgaagagctcgccaaaatccacaagactttcgccgacgtccagaaccagattctcggaataccggtcgccacaatcatcgtagctacacagctcaaagaaaccgatgcgatcaatgccattttctgggtcaacaccgcagtcttggtcggcgtctgggtattcgtcgtgctcacttggctggtcatgcgcaatcaactacatacgctggatgcgctagccaatgagatccagcgaaagaaagtgaaaatagaaaaggaatacgcgcccatcagggatgtcgtaggcagcatcttcccacagttggaagcacgcctgcgcacccagcgctacgccttccggaccgttgatgtcgtggtgacgattggcctgatcctggcccacatcatgtacttattactgaccgatccagcccaaagcgcctttacgcaagttgccgggccagcactcagtcatttcgtcgacttttggcagacaacatggcattgcttacggcagtga

SEQ ID NO: 367542 - DNA, 1005 bp, Pseudomonas aeruginosa
atgcctcaaatcacgaactgcatcgtccacaagctgatcaaagatgcccatcagcgggaagctgacgttgatctccgccctacggagctggaagtcaatccgtctgttcagcggctgatcgaccacctcgacaagctctataccggacgagcaggcaaagggtatggccgcttcgagaacaacgaagatgactacccaatgcagcgattcattcgtgagcatgttgtggacgaaaaactggatttcgtggctctctccgaacgaatgatgcggcatctgaaggagcgagcaagcgtcgaacaactggccactggtggcttcgtgctgatcgccaagataagcaaagaaaacgtggactacttactggtcgcgatcgtgacggaggttgttggcaccgcgatcactgaaggccttgaagtcatcgacagcgtgcacctcgacatgagccagttacgcgttgccggccgcgtagacgttacggcttggcaacaaggtgcagatcgttacatcagctttctgaaagcgcgcggcgacatcgcgcactacttcaaactatttcttggttgcaacgatctagtccttgccctggaagaaagtaagaagctggtcgccgggctggagcagttcactaccgagcgggaactggagccggcgcaacgcgacgagtttctggaaaaggcgcacgactacctcaacaacctgggcaaggacgtccccgtaagcctggaagctctttccaaccacctgtggcccgatgctcctgaagagcttcaattgaagctcggaagcgaagaactggggctatctgacggcttcgtacctgatcgccgtgccattcgcggcctggtcaaattcgagggaaaatcggattactggaagctgacctttgaccgaaaggcggtacgctcgggccacctccgctataacagagagaccgacagcattgtcctcactcacattcccgatcagcttcgccaagaactgattgatgaaattgacggatga

SEQ ID NO: 367543 - DNA, 327 bp, Pseudomonas aeruginosa
atgagcatcaagactaccggcttggaactgaaggccttctggagcgacgagtctgtctggccggctgactcctatgtcgatggtgtgcatttgaaagtgaacggccaagacgatagcagcgaagatattgaggctttgaacgatgcggatcaggttgttctcgaagacggctatttttgcgatgcgaatgacgagggtgaaaacctgctgaccgttttcaagcggtggcgtaagaagcagaacacgtcctacatctcggcatcttgccccaaagaactggaagagacagtgcgcgctgcgattaaagcggctggcggcaccgcctaa

SEQ ID NO: 367544 - DNA, 333 bp, Pseudomonas aeruginosa
atggctgacgcactgagaccgctggcctgggcaactatctacagccaccctggcagagaagatatcgtcgagatcggagatgcaaacccagttcaggagcacatggccgatatcttggggttgcagcaccggagaatccctcttgtagagctccccgcaggccatgtagtggtaagcgaggatctgctgcggagcatagagcgggagtgcaggcgggaaagcgactggaattgcgaaaacgttccagcagggacgaacgcggctacgacacgcgcgaagaagatgatcgaaatcgcgaaccaactccacgccctgctgaacgagcaagagtaa

SEQ ID NO: 367545 - DNA, 822 bp, Pseudomonas aeruginosa
atgaaaacgctcacgctgatcgatggccaggaggtcgccgccatcggccagggtacctggcatatcggcgagcagcccggcgaacgcaagcgcgaggtcgcggcgctgcgcgaaggcatcgagctggggatgacgctgatcgataccgccgagatgtacgccgagggcggcgccgaggacgtggtcggcgcggctatcgcgggacgccgcgaagaggtcttcctggtcagcaaggtctacccgcacaacgccagccgcaagggcctgccggcggcctgcgagcgcagcctgcgccggctcggttgcgaaaccatcgacctctacctgctgcactggcagggccggtatccgctggaggaaaccatcgaagccttcgagcggttgcgcgaccagggcaagatcctgcgctggggcgtgtccaacttcgacctgggcgacatgtacgaactggacggcagcgcctgcgccgccaaccaggtgatgtacaacctggaggaacgcggcatcgaatacgacctgctgccctggtgccaggagcgcggcatgccggtgatggcctactgtccggtggggcagggcggcaggctgctacggcacccggcgctcggcgagatcgccgcgcgccacgacgccagcagcgcccaggtcgccctggcctggctactggagcagggggtgatcgcgatcccgaaggcggtgacgtccgctcacatccgccagaatgcggcggcggccgacctggaactgagcgccgacgacctgcgggcgctcgaccaggcgttcccgccgcctacccgcaagcgaaacctggcgatcgtctga

SEQ ID NO: 367546 - DNA, 165 bp, Pseudomonas aeruginosa
gtgaacgaggactacctgatcttctccagcacttcgttcgacccgacctacagcctgctcctcggcgacatcaccgcggcgcgggtctggcgtctcgacccggcgcagatcaacctgcccgacggtcggcagaagctcggcgccagctataccgcagcacgctga

SEQ ID NO: 367547 - DNA, 1119 bp, Pseudomonas aeruginosa
atgaccactacaagggccgcccaactaagtgttctgagcaaatacggtgtcttggcggatttttccgcgttggaagaagctcagcttgaccgggcgcttaggggcaccattccagccggaaccgcgcaagacatgacgttcgctagctggtgcgaccaactactggggcagggtacacgcttgccggttgcccgcttcgatgagtcaattgcagggcaaacccgagtcagcagtctcgctgcaggcagtgagctggccaagagtatcaagtcacgggaaagacagctgcagaccgtaatcaaagccgcacagcaagagctggctgatctaaggcaactccagagatacgaaacctcggccgagccagagtctgatttcgcaagagcccttcatcactggtaccggcagacaactgcccctttgcatcgcattctttgggagatcaaagaaattgaaggagcgctcttcgactaccaaggacagctgaacagaagctatcgccagcaaattgtcgaagtcatcctgaatgcactgagctccctagagtccttcggcattttgacagaagtagtcttgcgagatgattcgcggcgcgatcccgctgcgccactgatcatcatgtaccacagccatccccttggggatgaaacagacggggcagaatgcttcgactttgttgtagagggtctgcaagccgacgtactcgaagccgtcaacgagttcctaagccctgggcaaatgctaccgcccataagcagggatgcgcgcttcaactgcaatgtcagcgtctccgtcagccgacggaatgccttgagcgaagatgagcttttccacctgtcctgcttcctacataagctgttcgaggccatggccaggttcggcgaccaccgtccacgaggcactttgcgcgagaaggttatcctgtgcattctgttgtcgcttacagcgccatgtacaccgacccgagcacgactcccggaaatgctgtgtctgcaagactccttctatagcgagtatgggacgcatacctctgacggtaagaatacggacctgaatatctccgccgggagaatcgtggagcatctgcttcgcgtgctgcgcgctcagaatcattgctga

SEQ ID NO: 367548 - DNA, 462 bp, Pseudomonas aeruginosa
atggccctgtatccgcagggcctgccgcgggaaaccgcgttgcagctgttcacccacggcagcgcctggttctccagcgagcagggcaagaaaggacagatcaaggttggccagctcgccgacctggcggcgctgtcggcggacttcttcggcgtcgaggaagaggccatcaagtggatcgagtcggtgctcacggtggtcgacggcaaggtcgtctacgccgccgccgagttcgacaagctcggtccgccggcgccgccggtgctgccggactggtcgccggtggccaaggtacccggccactggcggcaaggcgcgccgctgaccgcccaggtccaccagtgcgtcggtgcctgcacggtacacgcccacgagcacaaccgcgcgcgccactccaacgtaccggtgagcgacttccagggcttctggggcgcattcggctgttcctgcttcgctttctga

SEQ ID NO: 367549 - DNA, 702 bp, Pseudomonas aeruginosa
atgctgagtttcgacaaggtttccacctactacggcaagatccaggcgctgcacgacgtcagcgtggaagtgaagaagggcgagatcgtcaccctgatcggcgccaacggcgccggcaagtcgaccctgctgatgacgctctgcggctcgccgcaggcagccagcggcagcatccgctacgaaggcgaggaactggtcggcctgccctcctccaccatcatgcgcaagagcatcgcggtggtcccggaaggccgccgggtcttctcccgcctgacggtggaagaaaacctggcgatgggcggcttcttcaccgacaaggacgactaccaggtgcagatggacaaggtgctggaactcttcccgcgcctgaaggaacgctacgaacagcgcgccgggaccatgtccggcggcgaacagcagatgctcgccatcggccgcgcgctgatgagcaagccaaagctgttgctgctggacgaaccttcgctcggcctggcgccgatcatcatccagcagatcttcgagatcatcgagcagctgcgtcgcgaaggcgtcaccgtgttcctcgtcgagcagaacgccaaccaggcgttgaagctcgccgatcgcgcctacgtgctggagaacggccggatcgtcatgcacgacaccggcgccgccctgctgaccaacccgaaggtgcgcgacgcctacctcggcggctga

SEQ ID NO: 367550 - DNA, 828 bp, Pseudomonas aeruginosa
gtgggctacacgatgatgtccagcccgaacctgcagggggcactggagtccctggtgcgctatctgcccctgctcggtaccggtgttcagctcggtttgtcgcgggaagagggagggcagcgcctctgggcgatcgatgatcttgaggcgatcgagaaacccagggcgttcgaagatgccggcctggctgttgtattgggtttctgccgctggctgaccggaggcagcctgccgcgcctgcgggagatcgaattcacctaccccgagccagcggatacgactgagcatcggcgcttattcgattgctccttgcgtttcggggcgcctcgcatcggtattctgttcgaccgggaggcactgtcgcatccgctgagcaccgctaacgaggctctggctctgttgcatggccgtttcgctgagcaccgcatggatcagttgcgcaaggcgtcctactcggagcgaacgagagcctggctcgtcgaacgtctcagcctcggcggctacgatatgggaaccgtggccaagggacttgaggtcagcacacgcaccctgcagcgtggactcgctcgcgaaggcgcgaattttcgcgatgtgttggacggcgcgcgccggcaactggccgattactatctgcggaacacgtcttacagcatgacgcatgtaggtgacctgctgggcttcagagaggcgagtagttttcacaaagcttgtctgcgctggttcggtatgcctcctggccgctaccggacagaactgtccgaagccggcttcgtcgcgtccggcgtccgaaatccagatgcctatttagggcgagaatgctcgccatag

SEQ ID NO: 367551 - DNA, 771 bp, Pseudomonas aeruginosa
atgctaagcctatttgccgaccaggaacgtgaagcgaaactcgacagcttgggcgatccgctggccctgctgaacaagcatgtcgacttccgcctcatggctgaggagatcgaccgctgggttcctcgcccgagtcgcgctaaaggtggcaggcctccgtacccgacagagctcatgacgcgcctgctggtcttgcagcagttgttcaacctgtccgacgaacagatggagtttcaactactcgaccgcatgagctttcagcgctttgccgggcagaagaacaccgcacgcgtgccggatcgcaatacgatctggaattttcgtgagcggctcgttcaggccaaggtcgagcatctgatttttgatgaagtgcagcgccaactgcagctcaatggcttcaacgcacgcgaagggcagatcatcgatgccagcatcgttcgcgccccgattcagcacaacacggctgaagagcaggaagtcgtgaagcagcgggcagcgcccatcgagtgggagccggccaagcgccgacaaaaggatgtcgaggcgcgctggacgaagaagcatggcaagtcgtacttcggctacaagctgtcggtcagtgtggatcgccggcacaaactgatccgcaacgtgcgggtgagcgatgccgccgaggccgacacacttcacttggtcgatgtactggatcgagggaacagtagccgtgacttctgggctgatcgtggctatcacgacaagccacgcgagcactggctcaagctcaacggatag

SEQ ID NO: 367552 - DNA, 1074 bp, Pseudomonas aeruginosa
atggctgtagaaaaacagaagctggtcaagacattcatcgccgcggccattctggccggcgcggcagccattctgtggctggaatttcgcccgagcgggctgggcgagggcttcgccagcgccaacgggcgtatcgaggccacagaggtggatgtcgccagcaagctggccggacggcttctggacatcctcgtcgacgagggggatttcgtcgaatccggacagaccctggcccgcatggacaccctagtgctcgaagcgcagttgagccaggcgcaggctggggtgcgcaaggcgcagaacgctattcgcaccgccaattcccaggtgacgctacgcatcagcgagaaggccaccgccgaagcgatagtccatcagcgtcaggccgaactgatcgccgccgagaagcgccatcagcgcacggaaacgctggtggcgcgcaacgccatggcccgccagcaactggatgacgaccgcgccgcctaccacagcgcccaggcggccctcagcgcggctcgatcccaggttttgtcagcccaggccggtatcgagtccgcgcaatcgcaggtcatcgaagccgaatcagccctggaagcggagcaggccaacgtcgagcacctgcaagccgatatagaggacagccagctcaaggcaccccgctccggccgggtgcaataccgcatcagccaacccggcgaagtgctggctgccggcggcaagatcctcaacctggtcgatctcaacgacgtctacatgaacgttttcctgcccgcccaacaggccgggcgcgtcgccctcggttcggacgtgcggctgatcctggatgccgccccacagttcgtgatccccgccaaggtcaccttcgtcgccagcgtcgcgcagttcacgccgaagactgtggaaaccgccagcgagcgtgaaaagctgatgttccgggtcaaggcgcgtatcaatccgcaactgctcaaggatcacctcgagcaagtcaagaccggcgtgcccggcatggcctacctgaagctcgacgacgccgtcgagtggcccgcagaactgcacatccggatcgaaccatga

SEQ ID NO: 367553 - DNA, 2736 bp, Pseudomonas aeruginosa
atgacggcacacacagccacggtggcacgactgcaaggcgttggcctgcattacggcgcgacgaccgcggtggatgacgtcaccctcgacatccccgccaatcgcatgatcggcctgatcggcccggatggggttggcaagtccagcctgctggcactgattgccggtgcgcggcggatgcaggacggcgcgatccaggtgcttgacggcgacatggccgagccggcccatcgccgcaaggtctgcccacgcatcgcctacatgccccaggggctgggcaagaacctctaccccacgctgaccgtgttcgaaaatctcgatttcttcggccgtctgttcggccaggatgccgaggaacgcaaggcgcggatcgctgacctgactcgcagcacggggctggcgcccttcaccgagcgcccggccggcaagctctccggcggcatgaagcaaaaactgggactgtgctgcgcattgatccacgaccccgacctgctgatcctcgacgagcccaccactggcgtcgatccgctggcacgcagccagttctgggatctgatcgaacgcatccgccagcgccgcccaggcatgagcgtgatcgtcgccaccgcctatatggacgaggcgcagaacttcgactggctggtggccatggacgacggcaaggtgctggccaccggcacaccacaggaactgctggggcgcaccggcagcgacagcctggaggaggccttcatcgccctgctgccggaagagaagcgccgcggccaccatgcactggtcatcccgccacgccaggtcgccagtgacaaggacgcgatcgccatcgaggcacgcggcctgacctgccgctttggcgatttcgtcgccgtcgaccatgtggatttccgcatcgagcgcggagagatcttcggtttcctaggctccaatggctgtggcaaatccaccactatgaagatgctcaccggcctgcaaccagccagcgagggctcttgcgcgctgttcggccagccggtcgactcccgcgacatagatacccgccgacgggtcggctacatgtcgcaggcgttctcgctgtacagcgaactgacggtgcagcagaacctcgagatgcatgctcgtctgttccatgtccctgaacggcaacgccgaggccgcgtccaggaaatgcttgaacacttcgatctgctgggcgtcgccgaacagttgccgaccgacctgcctctgggcgtgcgccagcgtctgtcgctggcggtagcggtgatacacaaaccggaaattctgattctcgacgaacccacctcgggggtcgacccgatcgcccgcgacggcttctgggcgctgctggtaaaactgtcgcgcgaagatggcgtgaccatcttcatctccacccacttcatgaacgaggcgctgcgttgcgaccggatgtcaatgatgcacgccggtcgggtgctggacagcgacacgccgcaggcactgatggaaaagcgtggtctgccgacgctggagcagacctttatcgcctacctgcaggacgccgccgaagacgcccaggccgaaccggacactccgccccccgcgccggcggccggatccggaaccaaccaccaggcacgcttcagcctgcgtcgcctgtacagctacgcccagcgcgaatccatggagctgcgccgcgacccgatccgcgccaccctggcactggtcggcacggtgttgctgatgttcatcatgggttatggcatcagcatggatgtggaagacctgagctatgcagtgcttgatcgcgaccagaccaccaccagcgcagcctataccgagaacatcgcgggctcgcgctatttcgtggaaaaggtgccattgcgcgattacgacgaactcgaccagcgcatgcgcaccggcgatatcagcctggcggtggaaatccccccgggcttcggccgtgacctcaagcgcggcgacgcgcctcagatcggcttctgggtcgatgcagccatgccgacccgcgccaacacgatcaaaggctacgtgcaggggattcaccagagctacctgcaggagctcgcccagcagaccacgggcaatatggcgagtgcaccgtacgaggtcgccctgcgttaccgctacaaccctgacgtgaagagcctaccggccatggtgccggcggtcatcccgatcctgctgatgctgatcccggcgatgctaaccgcactcggcgtggtgcgcgagaaggagctcggctcgatcaccaatttctacgtcacgccggtcactcgcgtggaattcctgctcggcaaacagctgccctacatcgccttgggcatggtcaacttcttcatgctggtggccctctcagtgctggtattcgatgtaccagtcaagggcagcatgctatcgctgaccatcggcgcgttgctctatgtgatttgcgccactggcctgggcctgttgatctcggcggccctcaacagtcagatcgccgccatcttcggaaccgccatcgccaccctggtacccgccacccagttctcggggctgacccacccggtatcggccatggaaggagccagcgccctgatcggtaacatctatccgaccagccatttcctgaccatcagccgtggcgtgttctccaaagctctcggccttcccgatctgtacagctatttcatccctctgctgctgaccatccccgtgctgaccctactcagcatcgccggcctgaagaagcaggagaagtga

SEQ ID NO: 367554 - DNA, 1116 bp, Pseudomonas aeruginosa
atgcgcaaactgggcaacatcctgcaactggggatcaaggaactgcgcagcctgtgccgcgacccagccatgctcctgctgatcgcctattccttcaccctgagcatctactcccaagccaccagtattccggaaacgcccttccacgccaccatagctgtggtcgacgaagatcgctcccaggtgaccaaccgcatcatcggcgcctttcagcaaccctacttcctcacaccacgctacatcagcatcagcgagatggacgatggcatggacaccgggctctataccttcactctgaacataccgccaaacttccaacgggatctgctcgcagggcgcaagccggtcattcaattgaacgtcgacgccacccagatcagccaagccttcagtggtgccgggcacatccagcagatcatcggcgacgaggtcggcgagttcctcaaccgttaccgaggcgtcagcagcccccccgtggaatctgtcgtgcacatggcctacaacccgaacctggtgcagtcctggttcggctccatcaacgccatcatcagccagataaccatgctgtcgatcatcctcaccggcgccgcactgatccgcgaacgtgagcatggcaccatcgaacacctgctggtgatgccggtcacggcctttgaaatcatgtctgcaaaggtctggtcgatgggcatcgtggtactgctggcgaccactctctccctgcgtttcatcatacaaggctggttggcggtgccgatcccgggctccaccctgctatttctctgcggagtcgccctgcacctgttcgccaccacctcgatgggtatcttcctcggtaccctggcccggtcaatgccgcaactcggcctgctgatcatcctcgtgctgctgccactgcaaatcctctcgggcggtatgacaccgcgcgaaagcatgccagaagcggtgcaacacatcatgctgatcgcccccaccacgcacttcgtcgaactggcccagtccatcctgttccgcggagccggcacctccgtggtttggccgcaattgctggccctggcagtgatcggtacggcgttcttcctcggcgcgctgtctcgattgcgcaaatcgctacgttag

SEQ ID NO: 367555 - DNA, 216 bp, Pseudomonas aeruginosa
atgaaaaaaaccttcctaacaagcgtattcctgactctcggcctactggccggctgctcgacgccgtcgctgatcgtgctcaacgacggccgggaaatccaaaccctagacacccctgattacgacgccaagagcggtttctacgaatttgagcaactggatggcaaacgccagcgcctgaacaaggatcaggtgcgtaccatccaggagctgtaa

SEQ ID NO: 367556 - DNA, 1911 bp, Pseudomonas aeruginosa
gtgctccgctccttcctgtacccatcacgtgcctggctgttcatcttctcggcgcttttcctctacggctgcgccggcgtcaaggtcaacgcaatcaagaacgacgactacctgacgttgcgccgtggcgacgtgctcaccaccggtagcctcagcgcatccgctcgcaccaccctgcaggtcgtgggcattgccgagaaggattgccgcaaggatctgcccgagtgccgtagtcaactcgccgacaacacaggcctcgccgacgagaatcgcttgtcggccctggccgagctgtggctgctcgaagccatgcgcagcaagggtctgcatggacaggaggcacgcgtcgacgcttatctggaaagcgcccggcacgcctatgcctatcttttctttaccccccgcaacactggccagcgtgccctggaggatcgccagacccaggtgcgcgactactacaatttcgcggtacaggaagccttgaccctgttgttcgagctgtatcgtggcaaacctccacagcgcgaaacggccgatgagcaattccacctgcgcctggcacactggaacatcagcggcaccatgcaggaagtcaggctggccgaaggccggcagcttcctcaggaactgatccccgccgcctccctctccttcgcaggtctgcgcaaccagtatcggcgcgacgggctcggcgccgaactggtcgccgtcacccgcaagcgcgtggtcaccagccagagcgaccggttgccctggagcgagacgcccttccccgccatcagtgcggtgattcgctttccgggcagcaccctcgcagaggtgctggcgacccgcacggccgatatcagcggctacgatccctatcgcaccacccacttcgaggtggcaggccagtcggttccactcgcggccaatttcacctccggatacggcctgtggctggcccgttccggcttcgcccgccagtccctgctgaccctggtcggtcgcggcgaagtgctggaagcaccgcacctctatctgctgcaaccctacgaccccgagcgccgcatcatcatcatgctgcacggcctggccagcagccccgaagcctggatcaacgtcgccaacgaagtgctcggcgacgaggcgctacgcaacaactaccagatctggcagatctactacccgaccaacctgccgatcgccttcaacaacaaggcaatccgcgaaaccatcgagcaaaccctcaggcatttcgatccacagggcaacgccgcggccagccgcgacatcgtactggtcggccacagcatgggcggtgtgctgtcgcgcctgctggtttcctcctcgcaagaccaactgtggtcgtcgctcacggcgcaatacgacatgagtggcaagaggcaggaacgggcccgcgcgaaactgggcccctacctggatttcgagccactgccccaggtcagccgggccgtcttcgccgcggcaccgcaccgtggcacacccttcgcggaaaaccgcctgtcgcgctgggccgccggcctggtcaagctgccggtctcggtactcggccgcttcagcgagctcgcccaggtactggtcgaccccaactcggcggcacccgtgacgttgacccgaggcctcaatagcatcgacaacctcagcgccaacgaccccttcgtcagggccgcggccgaattgccgatctcgccccaggtgcgttatcacagcatcatcggcaaccatacgcccgaattgttgctggcaagcaccagtgatggtgtggtgccctataccagtgcccatctggagggtgcacagtcggagaagatcatcccttcgtggcacagcgtccaggaaacgccggaagcaatcatcgaaatacgccgcatcctccaccagcacctgagcgaagaggatacgcgatga

SEQ ID NO: 367557 - DNA, 1056 bp, Pseudomonas aeruginosa
atgaaacgcccgcatctcatgctgcggctgttgacgcgcctgctcctaaccctgctcatcccgctgacgaccagttggggcgccctcgccctggattaccggctgaactggcctcctttggcggggtacgccctggtcgcactctggtgcctgctcggcgtcctcacccttgtcctgctgtggcggcggccaccactgtgggcgctgtccatccacctgctggcattcgccgtgctgctggcctggtggcacagcctgcaaccgtccaaccaacgcgcctgggccgacgacgtggcacgcatgacccaaggccgggtggtcgacgaacagctgctgctggacaacgtgcgcaacttcgactggcgcagcgatgaggactacgacatcgcctgggaaagccgttcctacgacctgcggcaactggcctcggtcgacctgctgacctcctactggggcatgccggccatcgcccatatcctggtgtccttcggcttcgaggacggccggtacctggtcttcaccgtggagacccgcaaggaaaagggcgagcgctactcggagctgggcggcttctttaaggaattcgaactcagcatcgtcgccaccgacgagcgcgacgccgtgcgggtgcgtaccaacgtgcgcgacgaggacgtctacctgtaccgcatcgacatgcccaggccggtcatgcgcgaactcctgctttcctatgtcgagcaggccaacaccctggtcgaacggccacgcttctacaacaccctgaccgccaactgcacgaccatcgtcttcgacatggtgcagagcatcatcggcggcctgcccgtcgatcaccgcctgctgctgaccggctacctgccaggctacgtgcaggatatcggcggcctgcaacagggctacagcctggacgcactacgcaatcgggggcgaatcaccggacgcgcccgccaggcggacgaggcggcggacttttccagacagatccgccaaggcgtaccgggctgggcagtggaaacaaagaccaacaacgatgaacgaccggggagagaggaatga

SEQ ID NO: 367558 - DNA, 168 bp, Pseudomonas aeruginosa
atgaacgaactcgaagtgatgatcgcgctgatagtggcaggcttcctcttgctaacgatcggtttcgccaagcgtgaccacgatttgggaatctataccatggtgctaggcatcctgctgatgttttgcaccataggctacaagctctatctggaacttgggatgtaa

SEQ ID NO: 367559 - DNA, 174 bp, Pseudomonas aeruginosa
atgcgcctgggattgagcgaggagcgtgcctgcaagtcggccttcaatggccgaggcccgtggtggaactcaggagcgccgcatatgaatcaggcgctgccgaagaagctatgggacagacttggactggtctcgatactggatacgatcaatcggcttaaccgcatggcctga

SEQ ID NO: 367560 - DNA, 3510 bp, Pseudomonas aeruginosa
atgccaacaacacctgacacgatcgcctcaagcatcatagaagctgcagccgcggggttccgcggtcgacttattgcgcgtggacaggccagagcaataatctggcgcgacggagtgctgccaccggatgccccagagttcgcaccacagcttagttatgatctgaactcctacggctattcccttctgggcctagggttgcggctccgcgagcttcaagggaatacgactcaagcgcggacggctttcgagcaggctgcaaccgcgctagaggcggtaatcgctaaaggcgaccccggggacgccgatcgcgactttcactttgtcatggccgctgcgagctaccatttggcgcacctctccgcgaggtcctattcattactgcaaatggtggtggatggtgaaaacttcaccctcacagagcgtgccctcgttctcttgatgcgcagaaacttccaaaagctgcgcgtacacgtcttcgactatcgagcctccgagcaaggcagtgatattgttattgccaataatatccagtccaacctggataggcttgaggcgacgggcgacttgcccagagatagccatgatttcctgttcgctgggctggacaccgccttaacagatgcctttatggctggtatggcgttggtcatatctgcaatcgagcgaggagagcaggcgcttctcgagcaggcccaggagcgctttgcaactgggctcgcagtttctgcggagctgaacatgatccctcagtggtgggtgtatcgtattgcaagccacttggtaaccgacctttggtctagcaccttccacgttaacattccgcttcagcccgttggcggagaagcacacagctgggcgcaactgcgcgagctattcatagccttgctacttaggcgccctcgtgctgagttcgatctttggccctcacagatcgacgcggctaagcgcgctgctgaccaaaccgatgacttggtggtttcactcccaaccagcgccggcaagacacgcatcgcagagctgtgcattcttcgatgcctggcaggcggccagcgtgtggccttcatcacacccttgcgtgcgttgtcagcccaaactgaggccagtctacagagaacgttcggccccctcggtaaatcgatctcagcactctacggcagcgtaggggccagcgggcttgacgaggactcgatccgcgaacgcaacatcgttgtagcaacgcctgagaaaatcgatttcgcactgcgtaatgaccctgacattctcgacgatataggcctgttggtgtttgatgaaggccatatgattggcttgaacgagcgcgaagtacgttatgaggcgcagatacagcgactactccgtcgtcctgatgcggctaaccggcggattgtgtgtctatcggcgatacttccagatggtgatcaactggaagactttgccaactggctacgaaaggatcaccctggtgaactgataaagaatgaatggcgaccaactcggcttcgtttcggtgaagtaatttggaacgctgcgcattctacagcacgtctgaacctacgagtgggagatgaacgtccgtgggttcagcgctatctggttgggatcattccccctcattgggttcggccaaaacgccggcggacgaaaacctttccttgtgatcagcgtgaactatgtctcgctactgcttggcgccttgttgatgatggccagaccgtgctcatcttctgtccacagcgaagtagtgtggagccctatgccgatgtagtgattgatcttcacgagcgtggagcgctccgctccttgcttcaggtcgacccagctgttctcaacacggccattacgctgggcgaggaatggttgggggctaacagcgccattctcaaatgtctgcgactaggggtggcgttacaccacggcgcgctaccaaccgcctaccgaaaggaaatagagcgcctacttcgcgatgacatcctcaaagtcaccatctcatcgccgaccctagcgcagggtttgaatctttccgcgacggctgtggttatgcactcgctataccgagctggtcaacctattgaaatttctgagttcaagaacgtcatcggacgagcaggtcgagcttacgttgatgttgaggggatggtgctgttccccatatttgacaaaacagcgatacggcggcgcgcttgggaagagcttatcagcgatctaggggcccgcaacatggagagtggtctaatccaactcgttattgcactgctgactcgcatgtggaaacgcattggtggtgacctcagtcagttagttgaatacgtcaccaataatgcagtggcgtggagtttttcggcactcgatgcagagaagcctgaggaaaccgaggttgcacgggcggagtgggagcagcacatcgctacgcttgatacagcggtacttagtttgcttggggaaaatgaaattgaagacgacgatatcgaggtagccctagacagtattttgcagtcctcactctggcagcggcgattgcttcgacgcaatgagcacgaacagcaagctttgcaggctggcctcatttcacgcgcaaagctgatttggagacaaacgaccgctacccagcgccgaggctacttcctggcgggcattggattgaccactggccagacactagatgcctgggccgatgagctcaatgccttgctggttgccacgaatgccgaaatgctacagaagaatggtgacgcagcgattgatgcgctcaccaccatcgccgagcgagtctttaccatctaccccttcaagcccgatgtattgcctgcaaactggcaagatctcctacgtaaatggctacaaggtgaagctctaaccagcaatacagctgaacaagcagctgaaaccatgcggttcattgaaagcggtctcgtttatcgcctgccatgggccatggaagcaatccgcgttagagctcaggccaatggcgatagcgtattcgacgtggcgatggatgatttcgagcttggactggcagtcgctgccgttgaaactggtacgttaaaccgctccgcatccctgcttatccaagctggcttcagttctcggctggcagcaatcaaagccgttaccgataccggtgcaacattcgatagcagccaggggcttcgacaatggcttcgctcggaggaccttatccggttcagcgcactgccgaattggcccacccctgaaacgaggcagctttgggttgagttcgtcaatagtttcgaaccccaagagcgccaaatttgggcccatcgtagctatcgaggtgaagtgacatggcagaaaactccaccacctccgggaacaccgattcagctccatgagttgaatggacagattcaggtgctgagctgtgatggtagcccgcttggactattggggcaccacatcaataggatgcataaaggattgttacgcgctgcagttggccaagatgttggcgaattgggggttagctatttggggccagaagatttgtga

SEQ ID NO: 367561 - DNA, 780 bp, Pseudomonas aeruginosa
atggtgcagttcaacgattggtgcgattgtgcggatggctcggtgggcccccattcccgtcaggtttttactgagaaagcagctaaccggcagacgggaatcgacttgacagcggctgttatccctggccattacgcctcagaggagcgtattgcacgggcacttgcacgtttgggtaaagacgccgcggctaagttgatcgaagggaaactgccgacaagcaagcagattcgctcgggcgatttgggtgaaatctatgcgacagagtggatcgactcgctgagcggcggttttcgcgcgctgatcaagcgccttcgctggaaggatcaccgcaacatggcaatgcgcggcgaagatgtcatcggtatacagcaagatcctgccactcagcgcctgcgtttcctcaaggccgaagctaagagtcgcgtcacgctttccaagcaggtgcttcaggaggctcgcgcagggctggacaaagacggagggttaccctctgcccatgcacttgccttcgtttccgaacgactcctggaggagggcaacgatgcactagctgacgcacttgatgacgcacaacttctgtatggtattcatccccaagatgttcagcatttgctgttcacattttcaggcaatgcaccggaaacacttttaaccagcatgctccaaagctatcaaggacagatcacgcaacgagctgttggtttgcatgtgaaagaacatccgagctttgtgggtgcaatctacgatcaggtgatagccaatgccaacaacacctga

SEQ ID NO: 367562 - DNA, 4212 bp, Pseudomonas aeruginosa
ttgccgtacctcagtaagcgagttatcagtaactattttcgtaccgactgccctcgccaactggcgttgatgctgtacccacataacaagcgatatgagccagagcgcaatgcgctaggaatgccaccgaaggcggtggggcgtacgggaatgaatgcgctgactgaagagggggggcgctgggagcaggcaaagcttcaggaccttgagcaaaccttcggcaacgacgctgtgcttggtatcaagacggatggcgactttcaggaccagaagctcgtcgacgtcattgcgcgcgcggtgcctggcgtgtttctcgtacgaccagctttcgaagtggggaaagcgttcaagcgcgcagcaaccatcgacgtgatgagtacgcagtatgatctggcatttgccaagctcatccccgatctaatccaggtggtcaaaccttctgatgtcggtcgtactgtcgaggcagatggtacggtgcatgagcctgatggacgcattggcctgagagtcatcgacgtcaagatgacggcagaacccagcgcctcctactttgccgaaatcacctactactcgctggcattggcgggatggctgcatgatcaacagctagctgatcgttatgcagtggttgctgaggctgctatttggcccggctcccatgaagcggcagcaatagtgaaactgcagacggaaaagcgcaagacggcgtcccaggcaacagctgaagagctgcatcaagcgctcagcattgatattgaaacattggaaatcgacgtgtttgccccgcgcctgcggtattttttcaacgtcgagcttcgagacgcgctagagggcccctggcgtaaccaagattaccatatcagtactgcgtgtagcggctgtgagtatttgggctacagctggagtccggatgtgaagccgcacgcagatcattgcatgccgcgagcatctgccgatggtcacctaagctcaatcgcctttctacccaggggggcgcggcgggccttgggggatcgcaacttgatccaagctggcgcactggctgacttggcgtcgagtgaccaggcatttgattgtcacccgaagctgcgcgcgacgagaactgttgtagccgggcgagcacaatccctagctaacagaaccagcagcattcctcctggttcgggcacctccgcggttctgccgaactggtcggatctcagcctgtatctctccgcggattttgatgtaggcagtggtcttacactcgccttcggtctggggggattctccaagatcaacgatcagatggagcgggtagacgcgcaagtgtttgtcaacgacacccgcagccctgaaagtgagcggcgggagctgctgaacttcctgacctatcttcagaaggcgttgaataatgcccagaaggcggatcctgacgcgaccgtccaaatctacctatgggatagcgtcacctatgagcacctgatcagagtaattgggcgcaacctgcaacacatcatggccgatagcaatcttaaaaagcttgcttggctatttccggcagaggagctgatcgagaatgccaagctccgatctgctaatgccccgatcaccattgtccgaaacgtcgttcaagcgctggtggccgcgccgattcctcactattattcgctgctggccttagcacgtgaattcagacctccgggtaagcctggagcagctccgttcgagtttcgcgtcccaacaatctttgaggatcccttatctgatcaggtgccgtcggagcgcgctcatgagatctggacaagaatggggcacccgcgcccctggagtcagcaagttacccagctgcggtctacggtcaccactaagctaagggcgacagcatcgatcgtcagccgactacggatggacctgaagggggcgttacgtagtcggtcaccgaagatttccgaaatcaaggctccgtctacgctgaatggagtgagcgccgatgggcagatctggtacgcatacgccagattaaacgcgcaagtcgcggcactcgagcacacgatttccatggcgaccccagtccatgagcgtgaagcacgctatttggctgcttgcttggaggtggaaatcacaggagcggcagcagatcaagcagccatcagcttggggctcacgagggggcctggtgtaaggatctaccggttggggcagaactctcgtgaggccaaatttgagccaggtgatttcctgtgtgctctctcgcccgccgcgatgaccgactttcatacgaagaggatccaagacgttataggtggagccctactgcctgatgacttcccaaaatggctaaagcctttcaactacgccacttcgctcacggcgaccaagctactggccatcgaccgagagaaactgctggtcgctgtgtattttgatccacccattgatcgtttcctgcgttctatcgaagtacatctagatctcagccgtgatgttgtgctcgacaaacaggtgaaagacttcctcaccgcgcgcctcgagacagcgttgaaagccattggtaatccaccgctggccgttcgcgccggcgcgccaacggcgcaggtcattggcaaggcggctcccaagaaggccagtcagcatgtgccggttgaagaggttctatgggggaccgcggcacttgcccaagaacgcacgggacgggacgctacccacatccgcagcgcccttgaagccattagcgtgaacttgaatgacagccagtgggctgccctgcagacggcggtagaacagcggctcacgctaatttgggggccgcctggcaccggaaaatcggaaacgctgcgcgccattctcttaggtcttctgctggatgcgcataacgcagggagacctgtacgcattctggtgacaagcaacacctacgatgccactgacaacgtggtgctgaagaccttcaaacgcattcttgagctagggtcagatatcactggtcaggtacgactggccaggctgcgttcagattcaaaggaggatgcacccgatctgcctttgggtatcaacctgttgaatgatccgcagacccctgaagttcgagagctccacgcattgcttggcgcgggcaccacgagcgtcatcgtctcagcaccgccgcagcaggttactcggttcgctggcgttcacggaaacgctgctgagccactcttcgatgtgattttgatcgacgaagcttcgcagatggatatggcaaacgcggtgctggctctggcgccccttgcaacgaaaggctcagtgattgttgtcggcgatcccaagcagttgccacccatacagcaagtggagtcgcctgtggggctcgaaacgctcgtaggttcggtatatgacttcatggccgattaccgacagatctcgcacgttagtctgctgaaaaattaccgatcaaacgaaacgatcgttgggttcagccggtttgccggctacccggcggacttgtcccccgagtttcctaacctacgcatcactaccgataagccgcttcctcaaatctgtcctgcggattggccggaaagtcttgagttcagtaaagagctagcggtgctccttgatccttctcgccccataaccgcgtttgtttatccagagggacgaagcagtcaatggaatgagttcgaggcgcaaacagtggcggccttgttggtgttgctacgccgtcatttgaaacgggatctcgagaatgattcgtgtgcgcctagcaacgagttgcatacggcaaaaagcttctgggaaaccggggtcggggtcgtcactccacaccgcgcccataaggcattggtggtatcccgattaaaatctatttttgagccgattggcgacaatgcccagctgattcgagaagcggtcaataccgttgaacgttttcaagggcagcagcgtgacgtcattattgcgagttatgcattgggtgaccctgatgcaattgctgatgaagacgaattcctactgtcactcaatcgctttaatgttatgtcttcacgccctcgagccaagctgattgtgcttgccagccaagaggtcattaatcacctgcccggtgacataaaaataatgcgcgattctcgtctgctgaaatattttgcagaaacctacatggatcgacgatctgacatgtcgattccattcaaggaaggagatacctctagcgttcgcaagggatcttatcgttttaaaagtgttaactag

SEQ ID NO: 367563 - DNA, 2082 bp, Pseudomonas aeruginosa
gtgggtgatgtgagctctcaagacgtggcgttggcttcgctccagcccgcacccaaacgcctttccataccttccattacgcttgctgaagcggatgaaattccggtcgaaacgctggtgcgcttcgcgctgcgcgacggtcgccgaccaaggccgatctacacagcccacaaatggtttgcccgccgcctgccgtcagtctttcgcagcttgctgatcggagtaacaagtccgccgggtgcagatttcgagtcactctattatggcgacgctgatctgcggggcctcaccgtgcttgatccctttgtaggcggaggaacctcagtgttcgaggcgtcacgcctcggcgcaaacgtacatggttgtgatgttgatccagtggcctgcgcagtcagccagcttgagctcgacgccgccgaaatgccggatctacagttggcgctcaaaacgctcaaggagcgagtagggcgtcagatcacggagtttcatcgttcaggtgatgagctcgcgcttcatcatttttgggttcagcatgtcacctgcacccactgtgcaacagcctttgatgcccatccaaattatttgcttgccgacgatgggcaggtgcgtcatgcgttttgcgcacattgtgatgaggtcgtcacgctgcctgcgggaaccactgagtttgactgcggctgttgcggcgggcataccgtctgtgaggccggtttgggcgctggagggcggactacctgtccaacctgcggacacagcgagtccctcatcgagcgggggcgccgcgagggggtacctacgtggcgattattcgccgttgaaactatcacgctgacagatgatcagcgactggttccgatatccaaccgggtgttccggcgcgctaacgatgaagatcgccagcgattcgacgcagcgtccgcagcgctggccagggggctagctgacggtacattaaccttgccgcaggacccgattgaggctgatggttggtcagacagccgtttggtcgcatacggctaccggcattggacagagttattcaacgatcgccagcgccttcaccttgccttattgatgagggaaattggcactcttgaggagccggtgcgtacctccatcgcaatggccttcagtgaccaccttacaaccaactgtttgatggcctcctacgcttacgggtggagaaggctgacgcccttgttctctgtgagggcgttccgtcacattcagcggccggtagaactaaatccctgggtcgagcgaacggggcggggcagttttcctaacaccgttcgcaagctcggacaggctgccgcgtatgcgcgcgcacctaaggagcccaagggagagaaggagtttgtgccggtggcccagcgggtccccaaacatcgtggaagcattcatctgggcagtgcgcaggcgcttacgtttctggctgatgcttcggtcgatgtggtgctgacggatccgccttatttcgacaacatcgcgtattcggagctggcgcagttcttcgctccttggctgagcgcactcggggtggtcaacaggctacctcgcaatcaggtgatgaccgaaagcctggtcgcgcgcaagcatcagcctcagagcgtccagcacttcatttcgggcttgggtagagcatttgctgagattgagcgggtactgcgccccaagggtattgttgcttttagctatcgtcacactgagccccctgcctggttagcgttagccgaggctatcgcgatgacaggtctgcacgttacccgggttttacctatgccaggcgaagtggggatggggctgcatggccaaggtgagcgggggctgtgggatgccatatttatattgcggcgcggccggcgcgtggcgctcccagagctgtatgtctcagcgaatgacattgaagccgccgaggttgcagtggcagcatggcgggaacgctatggagccctagcgatacctttcaacgcaattgatgcgattgcgctgaaacgggcgtttttagttggccaagcccttgctaaagggaaaaaaaacggcgtgaaaaatcgcatagctctcaaacaagcgttgcgctag

SEQ ID NO: 367564 - DNA, 717 bp, Pseudomonas aeruginosa
atggcgatttctgagttgaagctgccggccggcgtcggcctgcaggtctggggcagcgccgccgagcaggcccgcggcctggccgccgaggtcgccggccggttgcgctcggcgctggccgagcagggccaggcgctgctggtggtgtccggtgggcgcagtccggtggccttcctcgaagccttgagcgaggagccgctggactggtcgcggatcaccctcagcctggccgacgagcgctgggtgccggagtcccatgccgatagcaacgccggcctggttcgccgccacctgctccgtggcgaggcggcgaaggcgcgcttcatcggcctctaccagccggcggcgagcctggaggaagcggccgagctggccgaccaccacctgcacgagctgccgttgccgatcgacgtgctggtcctcggcatgggcgacgacggccataccgcctcgctgttcccgaacagccctggcctggacctggcgatggatccccagggcacgcgccgttgcctgccgatgtgggcgccgagcgtgccgcaccagcgcctgaccctgccgcgcgccgtgctggcggcggcgaaggtgcagctgctggcgatccagggccagtccaagctggccaccctgaacaccgcgctggcggtcgaggacgaacggcggatgccggttcgcgccttcctccgcgcgccgctgacgatccattggtacccctga

SEQ ID NO: 367565 - DNA, 336 bp, Pseudomonas aeruginosa
gtgatccgtatcgatagtatctggctcgccaccgaaccgatggacatgcgcgccggcaccgagaccgcgttggcccgtgtgattgcggtgttcggtgcggcgaagccgcactgtgcctatctcttcgcaaatcgccgcgccaaccgcatgaaagtcctggtgcatgacggcgtgggtatctggctggccgcgcggcgattgaaccaaggcaagtttcactggccaggcatccgccacggctcggaagttgaactcgacgcagagcaacttcaggcgttggtactgggggtgccctggcagcgggtcggtgcgggcggcgcgatcacagtgctgtag

SEQ ID NO: 367566 - DNA, 1674 bp, Pseudomonas aeruginosa
atgaacgcagcagcattggcgtgtgcaccttccggcacgtcgtgggaagccatcgattggattgccgtacaacgtcgtgtcagagggctgcaagcgcgtattgtgaaggctgtacaagacggcagacataacaaggtgaaagccctgcaatggctgctgactcactcgttcagcggtaaggcattggccgtgaaacgggtgtctgaaaacaaaggcaaaaataccccaggtgtggacaaggttacttggaatacgcctagggccaagatcggtgcgatagagtcgttgaagcggcgaggctactcgccgcttccgcttcggcgagttcttatcccgaagaaaaacggcaagacgagacctctcggaatacccgccatgaaatgcagggccatgcaggcactccatctgctggctttggagcccattgcggaaaccaccgccgacccaaactcgtatgggttcaggccggaacgctcgaccgcggatgcggcagcacagtgctttggtgtgctgtcacgaaaagcaaatgcggagtggattctagagggtgacattcaaggctgtttcgacaatatcagccatgattggttgatcgccaacatccccatggataaggcgatcttgcagaagtggctcaacgccggatacatccacaacggccagctgttccctagtaacgcaggaacgccgcagggaggcatcatctctccggtactgtccaacatgacgttggacgggctagaagcgatgctggcgaagaggtttcctaccgccaaatggacaggcaagaaactgcaagcagtgcggtatgcggacgacttcatcatcaccgggtactcgaaggagtggctggaaaatgaagttcgtcctgccgtggtcgagttcttggcagagcgtggtctcacgctttccaaggataagaccaaaatcacgcacatagggaacgggttcgactttctcggctggaacgtgcgcaagtacaacggcaagctcttgatcaagccttccaaggcgaatatcagcgctcaccttgccaagctacgagagttgatcaaggccaacaaaacgatacggcagaccaatctgataggtttgctcaacccggttctacggggctgggcgaactatcacagtcatgtcgtcgccaagaaggtcttcaaccaggtggacagtgcagtgtgggaaatgctctggcgatgggcggtacgtcgccaccctcgcaagacacgccgatgggtgaaggatcggtatttcaaagtacaaggggggcgtcgatgggtgttctcatgtgctgaaaaatccgccgatggtcggaagcgtcagtacacgttattggacgcctcggacacgccaattgtgcgacatatcaagatcaaggccgctgccaacccacacgaccccgcttgggatgaatacttcgagtcccgctggggcaagaggatgctcacttccgcgaaaggtcgagccaagctgtaccggatttgggtgcaacagggcggtcggtgctgcgtctgcttcaagccggtgaccaaagacacaccgtggcatagtcgccatattgtgaagctaggtcatggcggaacggacgcggcggctaatcttgagatataccacctgcgctgcccgagggatgtgcaatttgcctatgccgatgacgtacaaccgggtgcctag

SEQ ID NO: 367567 - DNA, 291 bp, Pseudomonas aeruginosa; identical to SEQ ID NO: 336196

SEQ ID NO: 367568 - DNA, 174 bp, Pseudomonas aeruginosa; identical to SEQ ID NO: 367559

SEQ ID NO: 367569 - DNA, 291 bp, Pseudomonas aeruginosa
atggcgcttgaacgctccgacgtgaaaaaaatcgcccatctcgcccgcctgggcccgagcgaggccgatcttccgcgcaccaccgagaccctgaacaacatcctcggcctgatcgaccagatgcaggcggtcgacaccagcggcgtcgaaccgctcgcccatccgctggaagccacccagcgcctgcgcccggacgcggtcaccgagaccgatcaccgcgacgcctaccagaccatcgcccccgccgtggaagaaggtctgtacctggttccgaaagtcatcgagtcataa

SEQ ID NO: 367570 - DNA, 627 bp, Pseudomonas aeruginosa
gtgtcgctgtaccgggtgatccagaaccacgtcgaggagttcgttcgccagttcaagtgggcgctctccagccggcagcttttcgagtggcagaagataacccgtcccgagaccctgaccgatatccagcgcgcggcgcgcttcttctacctgcaacaccacgctttcggcggcaaagtgactgggcagaacttcggtactgccaccaccgggccagcccccaacatcatgcgcatcgaagagaatctatcggctgcctggcagcgactggcgggcgtgtatgtggagaacctgccctggctggattgcgctgagcgctacgatcgcccgcacaccttccactacatggacccgccgtactggcagaccgagggctacggtgcggacttcccgttcgaagagtacgagcggatggccgacttcatgcgccgctgcaaggggaaggtgatggtcagcatcaatgaccatccagatatccgccgagtgttcgaaggcttccatatggagcgcctggatatccgctacagcaacaccaaccagcggcaaggctcggctgagatcactggcgagttggtgatcatgaactgggagcctgccgccctcggcggtctgtttgacgggatataa

SEQ ID NO: 367571 - DNA, 477 bp, Pseudomonas aeruginosa
atgcaattcatgagttcttgggcggccgacgacaacagaacgctgctgcatttttcgaagtccacgctggagaccttccgccagcatgtccaggccagtgattctgactgcgaagctggcgggctgctactcggttcggtccatggaactcacatgctcattgagcatgcaacggttcccacggcatgggacaaacggtttcgctacctgttcgagagaatgccattcggccacgaagccattgcactggctcgatggacggcgagccagggaaccatccgccatttgggcgaatggcacacccatccggaagacaaccccaacccgtcgggcctcgatagatcggagtggaaccgtctgtcggccaagcgtcgggataagcgaccaacgctcgctgtcattgttggccgaaatgccctgtatattgagttggtgccaggctcaggccaaggatcggtattctcccctgtggaatag

SEQ ID NO: 367572 - DNA, 306 bp, Pseudomonas aeruginosa
atgtacatgcacaacgagaagggcatcgagaacctcatcctgaaaaacacgccgcaggcggcgatggagaggttttgtgaccttctccaatggccggcagacctggcggcgaagtttccaaatcccaaggcggatgttgtcaacgcccttatggcgtacttcgcaaagaagaagggcgatttcggcatcgcagagtacgtcgcccaatgcagcgaggccgaaattccgcaatggatcagagaggcctgcatgcacctgaaggaactgagcatgttgccgcctgcgccggctgcagtagccaaatag

SEQ ID NO: 367573 - DNA, 597 bp, Pseudomonas aeruginosa
atgaccggcaggcagcagcaacaggtcgccgggctccagggtgcgcagctcgccggcgtccagcggcaggccgggccattgcagcgacaggcgcagcggtatggccaggcgttgcgccgaggggcgcggcggcaggcgtgccagcagcgtcgcgggatcgccgtcgagccagagcgccaggcgctggtcgtcgcgttccaggctcaggcgcaggcccatcgcagcgcgtggttgcgccgggctcaggccgtaccagaccaggccgggaaagacgttgccttcgcgctccagcaaggccagttgcagggccgccggcaggctggcgaaggctgcctcctgcaggttcggcgcgagccagtgggccagcgccggagcctggcagagaaagcgcaggggcaggccgtcccacgccaggctcagttcgagatcgacgtcgggggcggcctgggcgatgtccaggcgcgcttgcaaagcgttgccgacatagtggcgacggcaacgcgcgagacgtcgctggagatccagttcggcgcggctggcgagcggcaggtcgaggtccgtaccgttcattcggcttgccactcttcatgcaggtag

SEQ ID NO: 367574 - DNA, 207 bp, Pseudomonas aeruginosa
atggatacgctcaccaagctgctggaagacttgttcagggggcaagaggcacccacgttcctcatcgaagccaacgaacgtaccaaaggcgttagtcaggcctacatcgttactagcttgccagaatgcatccacatacggacacacatccatgcccagcatgtaaagttgctgccagaccacgggatttgggaaacaggcgtctaa

SEQ ID NO: 367575 - DNA, 969 bp, Pseudomonas aeruginosa
atgaaccatcgcaagacctatacccacctatcccaatccgacatcaccctccagatcgagacactcgtccgggccatcgagcagcatgacggccctgcatttcggttcaggaaaaactgtaacggatacgagcgagtagaaaggaccaagctcagtaagtacttcacgtacagcaagcagatggtcgaccaccttttcgatgaccgtttggagtacagctacagcgagcacctgcaagcgttcaggaaggcctgtgaggacatcggattggagcgtcattctgacggccctgtctgcctggataagaggggcacggcttacctggatcatcaccgcagtatgaacctactgactacacgtattcgtcagctgacccgtgagcagtggtatcagcgtggagcaagggatcgtcggggtgaggcgcgtaagctggaggtccgagtctgcgagtacgttgatgccttgagtgagctctactcacgtatcaccatcgttcgagtcgattttcattaccgttcagaggctcaagctagactgcgtgcagagcatgtattcgatgaccttggcgatctagtttacgagcacagacggaacccgatcttcgaccacctcatcggccacatttactcggtggagcaaggtgatcaccacgaaggaaggggctaccacatccatgcagcctacttcttcaatggcaacgaggtgcgtggcgacgtctacaaggccatccagctaggtgagctgtgggaagacatcacccgtggcctgggctatacgcacagctctaaccatgacaaggaacagtacggagacgagtgtggtatcggtcgcatcgagaggagtgaccggtcggctcggcgtcatgtccacaaggtcgtgaagtacctcgtcaaagatactcagcacctgcgcttgaggcctgagggggtacggtgcctgcgcataggacaactgaagcgatcccgttag

SEQ ID NO: 367576 - DNA, 555 bp, Pseudomonas aeruginosa
gtgatatacgaagatttgctttatcttgacctcgattttcttgcagataaacacgaagaggccaccggtacggcacccaagactatcgtttcaaagaacgaaggcatggatgcccaagcgggcatttctttcctgaagtcgggtcttcatagtcaagttactaaacagttcaccatttcaagtcaagctatgctgaaggtggtcaagtcgacgcttgagggctatgcaacatacgatccgaatctcgaatcaggacaaaagcccatcaatgtatgggttaacggaaggttgaccattgggcaatggggcgaagacaagaactcagaaagtgctttgaatatattctttgaggttaaaagtggcgactatcgctacacattgcttcccaaaaatgagtattttttggctagtatagaaacgttagagataatttctcctgcattgcagcggtggattcagattcccgtacgcatgctgtgcaaaatactgtacccattgcctgatattcaaacatttgtggtcacgccatatctgatttgtacaaatgatggttaa

SEQ ID NO: 367577 - DNA, 426 bp, Pseudomonas aeruginosa; identical to SEQ ID NO: 342699

SEQ ID NO: 367578 - DNA, 1149 bp, Pseudomonas aeruginosa
atgatcctctgcctgtcatgtctggtccgcgccagccttgccctcggcgacatcgtcacggccaggcggctgcagcagcaggggctcgaattgtcgcggcgcaagggcgaggcgttgttcgagtgcctgctgatgctcgaccaggcgcagatcgacgaactcgccggcgacctgccccaggcgctcagggtgctcgaccagatcgacctgctgctggcccagaacccgggttccgcgctgctcaagggcggcaagtcgatccgccacggttggctgctgatcctcaccggtcaggagcagcaggcacgcctggtgctcgaggagggactgctgctgacccaggcctgccgcagcccggtgagcctctacggtcatgccctgctggcccagctcgatggcaacgccggcgacttcgttgcggcgcagcagcgcctggccagcgcgcagcgccagatgcatgcgtggaacgtcgccgaagtcatctaccgtggcgtcctgagcatgagcactgccaggctctggctgcgcagcaaccattccggcccggcaggccagctgctgtcgcggctgcgcgagcagtacgagggcgagcgggccctcacgccgcccagctcgttccccgagctgcacgccctgctgggcttcctgcaggccgaggtgctgtgctccaggggctccttcggggatgcggggagcctgctcgatgcggttctgaagtgggccgagggaaatgctttcgacattcttgtctgccaggcccgctacgccctgggagaggtgcgccggatgaagggcgacatgctccaggcggagcgtctgctcgcctcggcggcggccatggccctgcatcaggggcagcacagcctgctcacgggcattcagtccgcagcggccgagcccagggctgaaaccgaccccgacagcgcacctgccggcatgccggcacaggaaggggagttgctcagtcagcgcgaaatggtggtactcggcctgatagccaagggttactccaacagcgagattgcctcaatcctttcgctgtccctgcacaccgtgaaaacccacgccaagcacatcaacgcgaagctgaaggtcggcaaccggacgatggcggcggctcgagccaaagcccttggcttgctgttgtga

SEQ ID NO: 367579 - DNA, 228 bp, Pseudomonas aeruginosa
atgcctatccagcccgaccaatgccaactcgtagccatttttgcggccaacgtgaggcgcaagcgccttgaactcggcttctcccaagaggagctagctgagcgcgctgatgtgcataggacctatgtggggatgctggagcgcggcgagaaaaacgttacgatctacaacatcgaacgaatagcgcaggcattagaaactgaaccgtggacgctattggtcaagtag

SEQ ID NO: 367580 - DNA, 1173 bp, Pseudomonas aeruginosa
gtgattttcgagacgttgaatgcccgcggcacccagctgttgccggccgatctgatcaagaacttcctgttccgacgcgcccagaccgagggcagcgacatcgatacgttgtatgaggagaactgggcggagttcgatagtgacttctggcgcgaagaggtcaaacagggccgagagaaccgcccacgtatcgacatattcactcgccacttcctaactctggtcatgcgccgcgatatccgcgtcgggcacatcttcaacgagtacaaaagctacgtgcagtccaccggcgactatgactcgtgctttatcgaaccggccagctcggccagtgagcatatcgccctgctcaaaacctgtgcgggacacttccgcgagttctcctcgccaacgccggggtcacggctggccaggttcctggcacgtctagaagtgatcgatacttcgacggtctacccattgctgttgctgtgcagccagcaactgcggttgcatcagcaagaggagtttgaggcgatcctgacggtaatcgagtctttcctgttccgccggatgatttgcggcctgaccaccaaaaactacaaccgcctgttcctcgacctgatccgtcatcttgagcgagaaaagcaggtcacggcgcagtcggtaagcgttttcctgctctccagtcttggagaaagcgtgcgcttcccaacagatactgagttgaagactgctttgctcgactacccattgtaccagtggtggccgcagtaccgggtgagagcagtactcaaggccttggaacgagcattggcgcatgccaagagcgaggccaccagcttgccgaagggcttaaccattgaacatattttgcccgtgacctggcaggagcattggccactccctgcggatgttcagaacgatccacagaaaaagctggagtttagccagcgccgcgatcgtcttaagcacacactcggcaacctgacattggtgactgccagcctgaatcctgcattgtccaactcctcgtggtccgtcaaaaagccggaactgttgaagtggagcaagctaaacctgagtcgcgatctgcatgatcatgcggaatgggcggaggagacgattctttctaggggtaaaacccttgctaaggctgccattggaatctggccgtatccggatcagacatag

SEQ ID NO: 367581 - DNA, 1935 bp, Pseudomonas aeruginosa
atgatttcgcaaaacatggaaagctttctgcgggggctgaacagcagctccgttaccgatgtattcatcgtggttgttggcgttgtcttggccatttccctgatccaggcctctcggggcagacactcgcagtttctggagtacgcgccaaccctgatgacctctctaggcattttgggcaccttcaccggggtggtgatcggcctactgggtttcgatacacataacatcgccgacagtattcccacgctcctcgaaggccttaaaacggcattcatcaccagtatcgtcggcatgctggcagccatgatcttcaacgccatggttgcctgggtatttgcaccacagcgggccagaggcgagctgaagcaggggggggtaagcccggacgacatccatgcagtactgctcgatcagtcgaagcaactggaaaagatcgccgtgggagtggccgaccagcagacgggtgcggtgattgatcagctcaagctgttgcgcggcgagttcaccgagttcacccgggatacacgcgtttacaacactgagttcagtcgcaaactctggcaggagatggagcgtttcgccgagatgatgtctaaggcggcgactggtcagattatcgaagcactgcgtcaggtgatcagggatttcaatcagaatctgatggagcagttcggcgagaacttcaaggcgctggatgcctctgtaaagaaattggtggactggcaggccgagcataaagagcaggtcgagcagatgacccagcaatacaagctaggcgttgctgcaatttctcagactcaggaggcagtgcatggggtctggcagcagtgcaaggaaatccccctggcgatggccgagctgaagactgtgcttgagagcaatcaacagcagattaaggatctgcatcgctatctggatgcctttgtgaggatgcgcgatgctgctgtggaggcggtaccgaccattcaggctaggatcgaagagatcggcgagcacctcgctgaaggcgccagccgcatgcaacagagcattgaaggtagtgcacagcaattccaagtcagtgccgagaacgtcgccactcagctcgatagctcggctcgttcagtgcaggaaaagctcgagtttgtgggagggcacctgctgacgagtgctgaagatatcaagggtcgcctggagcaaggtgcgaagcagtttagttcggcggtcgaaacggccagcggacagctggcctcctcgtccacagaagtgcagcaacggctcgaaggagtcgggcaaaccttgctcgatggagctcagcgcatgcaggtgggtatggaggagagcgccaagcatttcaatgactctgtgctgaatacccaggcggcgttcaccgatatcgtcaatatgctacgcggcacctcaaccgagttgggcgaaacactgaaagatacctctacggagctttccaatacctcacgtgacctgctggcacgcatgcaggcatcggtgacggagatgcagaaagatatcacagccacggccaggatcatggaagagcattcgcaacaggtgcatgagcagttccttcgcacggccagtcagttcaaggactccaatgaagccattgtgcagatcgtagctcaagcggccagccggatgcaggacgagatcaagcgcagcgccgagcaggcattaacgacttctcgcgaccacatagaaaagagcagcgccggaatggatgctcacatgcgcgagaccctggccaaggttggcaacaccatcaacaaggaaatggagagcttcgagaaggccatattcagggaagtcgagaagtccatgaatgttatgggcgactctctggtgcagatcacttcacgcttcgtcaaggactacgagcaaatggtcaagcgcatggatcaagtgatccgccgccatgagcggcaggaaggctga

SEQ ID NO: 367582 - DNA, 708 bp, Pseudomonas aeruginosa
atggagaatctcttcggcacgcaccagaaagcgcgtcgacaggatagcgagcactggatttccatgtcagacctgatggcagggctgatgatggtatttctggtgatttccgttgccttcatgcgctatgtgcagatcgagaaagacaaggttaaggaggtagccgttgcctaccagaatagccaggttgcgcttttcaatgccttggagaatgagttccgggaggagttgcccatctgggatgccgagatcgacaagagcaccctggagttccgcttcaagtcgccggatgtgcttttcgataccggtcaaatcaccttgaaaccggagtttcaatcgattcttgatgacttctttccgcgctacctgaaagtactgcagggctttcgcagcaatatcaccgaaatccgtatcgaggggcataccagccgagtctggaacggtgcgtcatcagctgaaatcgcctacttcaacaatatggaactatcccagggtcgaacccgtgcagtgctgcagtacctctatggcatgcctgtagtggaaacagacagggagtggatcaagagcgtttttgcggcagtaggcttttcctcgtcacacccagtactgaatgaacagggactggaagatgaaaaccgctctcggcgggtcagctttcgcgtgatgaccaatgccgaactgcagatcaggaagatcattcaggagtga

SEQ ID NO: 367583 - DNA, 1095 bp, Pseudomonas aeruginosa
gtgaagatcagggtggatttttccgagctgggccggctggcacggatgatcggtgatggcagcgccgagttccggctaaacaatcggatgggggcgttcgaggggttcgatattgacgaaaccctcgccggcgaaggcatcgagatcgatctggaatcgatagatactgatttcaacctgctgtcctatcacgggcggcaggtgctgctgtacatcaaggatcatcgagcagcctttgatgccgctgtcgctgatcccgagggtgggcgaaggttccatattgcccactgcaccaagcttgaggagatgcgtaatagcggtgcttttaatgaacgctatgtagccactaataacgtatcaggagcctttgagatcacggatgaacgccccggtttgggagagcgcaaggcccgagtcgagctgatggtctgccgctattgcttacagaagctgaattatcgcggggcaactaactacgatgctcggcaaaaggctttccgggatttttccctcaaagagttttttagcgactacagctcctgctttctgtacatgccaaaagcttggagcgagaacaccagccttggctacaccagtgactgggcagagatttccagagaactccgcgaaaaggctggctacacctgcagcagttgccacgtcgatctttccactcaccagcgtctctgccacgcccatcacatcaatcgagtgaagaccgataatcgcccggaaaacctgcaggtcttgtgtaaggactgccatcgtcgccagccctaccatgaaggtatcttcgtcagccattccgagatgcagatcatcactgcgctgcgtcgtaagtctggcgtgcttgatcggagtgactgggatgaggcgttcgagctggcagatccggcagtgcacggtgatctcgacctgctcaagcgcaagggctaccgcgctccggtcatcggccatgaagttcaggggccggacggagaggtggttgtagagatcgaagcggcctggcccgaactccaccaaggtatcgccatcgaaaacctgcaggtgcccggctggaaaatctggcaggtgggagatatctgtgcgggataa

SEQ ID NO: 367584 - DNA, 6324 bp, Pseudomonas aeruginosa
atgctcccttcgctagttgcccgtgagatcaaggacgggctggaaaactttctgcgcagtgcgttcccggtgaccacgccgggctttctcgacgcgcaggggttcagctttatcgaccggttcctggctatgccgggcaacctgtacaagggaccttggctggaggtgaagttgccgtttcgcccgcaggccgctggcgagacgttgccgttccgccagctgagcttgccgttcccaccataccggcatcagcagctggccttcgagcgtttgtgcggtccgctgcctaaatcgaccatcgtcgccaccggtacagggtcgggcaagaccgagtgctttatgtacccactgctcgattactgcctgagcgaacgtcgtcagggcatcaaggcaatcatcatctaccctatgaacgccctcgctaccgaccaagcaagacgcttcgccaaggaagtgagcaagctgcagccaaagctcagtgtcggtctgtttaccggcgacgatggctcacagaaccgcagcatgacgccagagcaggtgattacccatcgcgacaccctgcgcgagaacccaccggacatcctgctaaccaattacaagatgctcgactatctgctgctgcgaccgaaagaccagcgtctgtggcgctataactcgccagggctgctgcgcttcgtggtagtggacgagctgcataccttcgacggtgcccagggcactgatctggcctgccttatccgtcgcctacgcgaccgccttaatctcggcggcgaactggcctgtgtcggaacctcggcgaccatcggcgatcaatccgcagtaaaatcgttgcgtcaatatgcggagcaggtgttcgccacgcccttcgatgacgaagctatcgtcctcgaagatcgtctaacggtggatgaatatctcgagcgcttcgacaacgacgagccactgacccagtggcctgagccttggaccagcgagctgttgccgggcactctgaaacaaggggtctatctgcgtcagctggcccgtttgtggttgggcaaggagctggcgctggacgccgcggacgaacaccatcgccagcaggccaacgttgagctcgggaagttactggcccgtcacgaggccttccgtgctctgctgaggcgtgccaatcaattgtgcaatgtccagcaactggccgaagaaatccgccaatcacggcgtctatcgggcggtgaggtcggtgagcaacaggcgctgaacctgatcgatagcctgtgcgcactgatttcttccgcacgcgagtgggctgacgaagctgcaggcaagacccggccgttcctgcaggtgcgcgtacagctgtggctgcgcgagctgcgccgcatggtcgctacagtaggccctagtccgttgttggctcattccgatgacgtgcagaaccccctagatccgctgtatttgcccctcttgcactgccgagagtgccacgctaccgcctggggcgcggtacggcccaatggtgagcagcttatccaagcagagttgcagcgcttctattcggcctggttcggcaagcatccggatgcatgcctgctttacccgctgagcgtcgacgagcagccgcgtggcagtgggacagtgcgccagctgtgtaccggctgtttgcgtctgctgccggagcgtgaggcgggttgcccggagtgttcgcgcccgttgctcaagctctggctgccgtcgatgatcaagcagcgcatagtgaatggcgagccccgtccggtggtggagcctgactgcccctgctgcggcggcgagggagcgctgtcgattgtcggttatcgcgccgccagcctggccagcgtagcgatcggtgagctgtacggttcggcctacaacgatcactacaagctgattgccttctctgattctgtacaggatgccgcgcatcgggccggcttcttcggtgcccgcacctacagccaggtggtgcgccaggcgattgcccgggtggtacgcagccagggcgagggtatggcgctgtcgcggctggtcgacgaggtgccggcctggtggcggcgtcagttgggcgacgatgctgccttcgccggcaccttcatcgcgccgaacatggagtggttggaaggctaccgcgagctgcagggcaagggtgcgctggccgccggcagcgatctggccgagcaggtggcgaaacgcctgcgctgggaaacgctctgcgagttcggtctgcgttcgcgcatcggtcgcaccctggagcgcaccgccacggccactctgcagcccgagcccaccgggctgcgcgactgcgccggggagctgacccgccgtatgcgtgaggagctgggctcattgcgcgatagtctcgatgaggcgcagatgctgcagttcctgcttggtctgctgacccgcctgcgccagcacggcgccttccacgatccgctgctggaaggctatgtccgcgagcgcggcaatacctttccgttcaaccgcatcctgttcctgccgggttacgggccgcgcaatcgcccgccagcggcgctgacccttgagccggtcagcagctttttcgagactatccgcagccgctccgccggctggtatctgggctggttcaacaagtgcctggctcagggccagccgctggccaccgccgaatacgagcaggcctatcggctgctgatcgaggtgctggagcgccgcggcctgctgcagcgcatgaactgcggccaggattcggcctggatgctgcagcccgagcgttggctggtcaccgcccgggtggccgagctggcctgcagcagctgcggacatcggcagatcgtcgctggcgatcaggcggcggattggcaggggatgccctgtctgcgccatggctgcctggggcagtatggcttccgcagtatgccgcgtggcgagcagagctaccgtgcctggccgcgccggctggtgcccagcgagcacaccggcctgctcgacggcgagcagcgccatgccatcgagcagtcgttcatcaccggcgagcagccctgggacgtcaacttgctgtccgccacgccgaccctggaaatgggtatcaacatcggcgatctgtcgtcggtgctgctctgctcggtgcctccggcccaggccaactacctgcagcgcatcggccgtgccggtcgccaggacggcaacgcgctggcactgaccatcgccaacgggcattcccacgatctgtatttctacggcgagccgctggaaatgctcgccggccaggtggccacgccgggggtgttcctccaggccatggcggtgctggagcgccagctgatcgcctactgcttcgaccgttgggtggccaccggggtggacgactcggcgatccccggccagttgcgcgccgtgctggacagcatcgaggcgcagaagcgcgatggcttcccgcacaacctgctgggcttcgtcgaggcgcaggccgagtcgctgctgcaggactttctggcgctgttccccgagctgggcgacgacggccgggcgcacctgcagcgcttcatcggcggcagccagcaggagggcagtctcggctggcggatcacccagcgcttgggcgagcgtgtggccagtcgcaagagcctgctgcagcgcgccgaggtgctcaagaagcgcatcgctgcgttggagaagcagccggccgacgagcagcgcgacctagacctgcgcggcagccgcgacgagcgttcggcgctgctggcgctgatcgccagcctcaacaagcgccagaccctgaacttctttaccgacgagggcctgctgcccaactatgccttccccgaggaaggcgtgaccctcgactcggtgatcctgcgccgccgcgagcagcgcgaggcgccggctgagggcgatgagccgcgcggcaagtacgagctgctcaacctgtcgttccagcgcccggcccaggcggcgctcggcgagctggcgccggaggcgagcttctatgccgccgcgcaccagctgcagatcgagcaggtcgatctcaagctgtccaagccggaggaatggcggctgtgcaaccagtgccatcacagcgagaacctcgccgaatccggtgaccagaacagcgtctgtccgcgctgcggcagtccgcagtgggcggacatcggccagaagcgcaccctgctcaagctgcgtcaggtgtatgcccgggccgattcgcgcttcgaccgtatcggtgacgacagtgaccagcgcgagccggcgttcttcaagcgccagctgctggtagaggttgagccgggcgcctgccgggcggcctggaagctggacaacgagcagttgccgttcggcttcgagttcctgcacagcgccagtttccgcgagatcaacttcggcaccgagggcatcgacgccgatgccttcgaggtggccgggcggcgcgagtcgcgcaagggcttccgcatctgcaagcactgcggcatggtcaagcgccacaagctgcgccgcggccagttcgcccatgcactggactgcccgctggcccgcgccggcgcgcaggaaaaggacagcgactggttcgacagcctgtacctgtaccgcgagctgaagtccgaggcgatccgcatcctgctgccggtggccgatgtggcgcagtcggagaaggctcggcgctccttcgtcgctgccctgaacatgggcctcaagcgctacttcaaaggcgacgtgcaccaccttgaaatcaccgagatggccgagccagccggtgcaggcctggcgcgccagtatttggtgatctatgaccgggtgcccggcggcaccggctacctcaaggagctgatgagcgagccgggcaagctgctggagatgctgcgccaggcccatcacgcgctggccaactgcggctgcgtcgaggacgagcagcgcgacggctgctatcgctgcatcctcgcctatcgtgacagccgtaacatggcagcgatttcccgccaactggctgagtcgctgcttggacagatcctgcagaacgccgaccaacttgtcgaggtcgagggcctgggccagattgaggtcagccacctgctggaaagcccgctggaggagcgcctgctggccgccctggggcagcgtttcgagctgctgaagaagaccgtcaacggcaagccgggctactggctgaacgccgacgggcgcatgtgggagctggagccacaggtcaacttcggcccggccgagggcgtggtgctgagcacccgtgccgacttcgtgctacgcccggcccgcgacagcgagcgttcggtcgagcgcgagctggtgatctataccgacggcttcggcccgcactgcgccaatatcaccgacgatacccgcaagcgccaggcgctgctgatggctggcaagcgcgtgctagtgctgagctgggatgacctgccggaaaccggtaaggcaccgccgatcgccgccagcgatgtgctgctggcccatcggcgaccggcgtcgctggccatctacgacaagctggccgagcgcagtggctggccgcacagtggcgcgctgaacagcctgctgggcgaaggcagtttccgctggctggagcgctggctgcacgatccggatgcgacggcaggcctgctgcgccaggcggcgctggccaacctgctcggctggctggagccgaagacgctgcagccgccgctgcgcgagcagtgccaggccgagctgcaggcgctgttgccggcaccgctgcgccaggagggccgcttcgtgcagggcggcttgctggaggtgctcggtacggcgctggcgtcgctgcgcgttggctgccgcctcgcccccgaggccatggcttcgctcgagcgcctgaccggcgagggcgaggttcatctgcagctgaatgaccgccaggccgagcagaccggcgccttccagcagcagtggcgggccttctggcaggcgttcaacctgctgcaattcgccccgcgcttcagcgtgtcgacccataccggggtactccagcatggctacgacagcgccctgcacgactggccgcagcgcgggccgctgccggtcgccgagccggcctccggcgatgcctggcaggcgctggtcggtctgtcgctgctcgatgagctgaccctcgctcagctggcgcaggctgcgctgccgctgcctgaggtgggtgaggatctgctgttcggcgaccagacggtgggcaccgccgagctgtgctggaaagaggcgcaggtggcccttttcatggaggcgcccgaggagttaccgcagataccgggctggacgctgctcagcgtacaagcggcggactggatgccggcactgctggcgctgtttggcaaggaataa

SEQ ID NO: 367585 - DNA, 2196 bp, Pseudomonas aeruginosa
atgagcaatccgatcaaggtcgcactgggcgatggcttcctgcaatccttcgcagccatcccccgtagcaagcagaagaaggttatggagttcgtgaccaagttccggcagaacccgcgttcttccggaatcaactacgagaccatcaatgacgcgcaggacagcaacttccgctcggtgcgtatcgatcacgaataccgcggcatcgtcctcaagcccgagcgcggcgatgtctatgtgctgctgtgggtcgacaagcacgacgatgcctacgactgggcgcgacgcaatcgctgcagcatccatccgcagaccggcgtgctgcagctgttcgccgtcgacatgagtcctgcgccagccagcgagccgctgccggtggccccggcgcagccactgccggccaacgttgccgctgcggtcgttacagacgtggctcggccccgcgagcccctgttccagctggacgatgcgctgctgctgcgcctcggcgtgccggaggaaagcctgccgctggtgcgtgcgctgaccggcgaggacgaactggaggcgctggatggccggctgccaatcgaggccttcgaggcgctctacctcattgctgcaggtgacgatctcgagcaggtgctggctgattatgcggccgcggccgacgcgccgacggtggataccgaggactacgcaggggcgctggagcgtgctgcttcgctgcgacgtttccatgtggttgaggacgagcttgagctgatacagatgctcgaagcgccgctggagcgctggcgggtgtttctgcatccctcgcagcgccagctggttgagcgcgactggaacggcccggtgcgggtgctcggcggcgcgggtacaggcaagaccgtagtggccatgcatcgcgcccgctggctggtgtcgcgcctggactggccgcgcgatgagcgcctgctgttcaccaccttcaccagcaacctggccgtcgatatccaggaaaacctgcgcaagatttgcaccccggagcagcttgaacgcattgaggtgcgcaacctggacgcctgggtcagccagttcgtcaagcgccacggctacgcggcgaagatcgtctatcccggtggccaggatggcgactacgaacgctgctgggagcaggccacccagctgattcctgctgaacagggcctaccgcccagcttctaccgagaggagtgggagcgggtggtgctgccgcagcggatcaacacccgtcaggcctacctgaccgccagccgcaccggacgcggtgtggcgctgaaccgcaagcagcgtgccgatatctggccggtgttcgaggagatgcgtttgcaactggcgcagcgcaggctggtcaccgctgaggatgccatccacgacgccatcgatctgatcgagcgtggcgtggcgacccgccgctatcgtgccctggtggtggacgaaggccaggactttggcccggaggcgatgagcctgctgcgccacctggtaccagagcagcggaacgacctgttcatcgtcggcgacggccaccagcgcatctaccagcggcgcagcagcctgagccagtgcggcatcaacatccgcgggcgcggcaagaagctgcgcatcaactaccgcaccaccgaggaaatccgccgcttcgcggtggccttgctggaaggcgtcgaggtggacgacctcgatggcggcgtggacgggctcaaggactactgctcgctggcccacggcgaggcaccgcaggtgcatgtggcggcgaaccaggccgcggagtgcgcctggctgctcggagagatccgcagtctgggcagcgagggcatcgctctggaggacatgtgcctggtggcacgtacgaatggcctgctcaacggctacgagcgggcgctgcaggaagccggaatcgagacccgtcgcctgtcgcgccagcaggccgacgatcgcagcaagcccggcgtgcgcctggcgaccatgcaccggatcaagggcttggagttccgctgcgtatttatggtcggcatcaacgatggcatggtgcccttggcacgcgccggacagtcgactgaggatccggtagagcaacgcctgctcgatctcaacgagcgcgcgctgttccatgtggcagcgacgcgggcggtgcggcacttgctgatttcatgccatgggcggccgagtccatatctgcgcgctgcgggaagctga

SEQ ID NO: 367586 - DNA, 231 bp, Pseudomonas aeruginosa
atggcggtcgagcgattcgccgagctgcgcgccaatcgcacatccaccgacgcctccggcaaggccgccgagaatggcgccagatacagagccgagggtgatgccgacagggccagcgattacaccaagcgctgcgccggccttgccgcctgccagagcagcgctgacgccacgggcgaggccaccaaccgcgccgatggctgcgccggctttcatagcgtgatggaatga

SEQ ID NO: 367587 - DNA, 834 bp, Pseudomonas aeruginosa
gtgcacgggacgccgcttccccagttggatgctacaagtgacgcctttgctgatgccaaggctggctacgaagcgcctttcaagcaagaagactgggaggttgagttaaccggtgatggccaagatctctacggtatgactggccgtggtggttcaccggactacttcagaatctggggtgggatagatcacgtgaatgactgcccaagcaatgactacagctttaactcgctgtacttcaatgatcagcgcgacccagaggtgatttggcagctggcctatgagctggtgaacatcttcaacggtgccagcgagctgttctccttccaggcacggaagcagtctattcgtgagatctactttctcggcaaaagggtaaatcgcaggcagcaggcgcgggtgattgcactgttgggccggccacgcatgcatcagcaaaagtgggaagaacagctgggcaaggctctgcagatgtcacctcgcctggggttgctggtcctcgccaccgaaaatgaggacatctatatgatgctgaagtaccttggattcgaggcaagctggtccaactactacaagttgcttgaaacgatggaaacccatgcaaagctgagggggaaggagatccctggagcaaaggccgaaagagccagattcaccaacaacgccaacaacttctcgctcgtgggttacgacgcgcgtcacggtctgaaggcgctgagcgagcgtgagaacactgaaacggtcatgagcctgcaggaggctcacgccttcatcaccggccggtgcaagggctatctgaacacagtctacccgcagtatttcaacttcacctga

SEQ ID NO: 367588 - DNA, 1383 bp, Pseudomonas aeruginosa
atggacgacgtcgatcggattgagcgtgcaagaatcaaagcgttttacaagctgcttgtggatcggcttggcgcagatgcctgggccaagcgcaaagccgcctatgtgaagcggatccgagagaaagagtcgaatttcgacatcaagctgcctatagagtctcagcttttcatacctgcagacgatgacatcgactggtatatcctcgcgtcattcttagctcatgacttcccttatagtgactcaacctacagcagtaggcgtgtttacacctatgccatggccatcggagctgttgctcatctgcttcgcgccgtgcccaacgtagaagctgttctagacaagatgctggcgaacaacaatcagccagagaagcagctatttgagctactgaccgccgcgttctacttgaagaatggatatgaggtttctttcatccccgaaaacagcatcacttggcctgatggaagaaagaagtctccagacctgctcgtcaaaatgggcgaggcggagttctacgtcgaatgcaagcgggcggataagcagactaagtattcgcggtccgaggaggaggcctgggcaagcatctgggctcagttaagccaccacatgctcaaggccgcgccgtggagcatcattgatctaacgttccatgatcaggtcgccgatgtatcggcggacgaggtgatcaagttggtggacctggccatcaaggcaggcggagaaatggtgagagctggctcgattagcgggaaaacacgcgccatcgacatgatgaggctcatgcgccattacaaggagttctctgtcagggccaacagccctcaacatgagctgctggtgttcggcgatatagacagcaatgaaaagcgaagcatcgcgaccatcgctgctcgggttatccgacctggcacccaaaatgacattctcaacattttcgtcgaggacgttgaccattgcgtaggtgcccaatggcgctgtgaccatgagatgtctctatctctacgttccaagcactttaagagcctggtcaatgatggcgtgtcccagattccgccagatcgcccaggcattgtgcacgtctggtatgagactcgagatggagtggaaatcgaggagctacgccgggacaagaacatcgacaacatttccagctacgacgcctctgagacatcagtgcttggggtcttcgtgcatgccgtcaattactacccattcgaggacacctacgagtgggccgaaacggtacaagactttggccgtgttccggacttgggggacatcttcccatttcagagcttgatgctcgcctctggcctggcagaagcagtggagggcacgactcattgggcacaagacaaagcagcaaaagtctcgctgtga

SEQ ID NO: 367589 - DNA, 1275 bp, Pseudomonas aeruginosa
atgatccgagagcttgaagggcctgaactgcggccacgagcattcattaccagccttattcagcccggcgatgttgttctgacaaccacccctgcgccgatgagcgaagcaatccgaaaagtcactggctcagacatctcccacgccatgatctgtgtgggtaagtcgagcgtgatcgactccactggcgatggtgttcacgcacgcaacctcgatcgaatctttcttgaaccgggttgctctgggtatgtacttagaccggtaaaaccactgacgccagatcagttattcaccgtcatatccttcgccagggctgcggttggtactcggtacaccaggggcggcgcagcaaagagtgtgttggccggtctcgtgcccggccgcaggcagttctgctcacgcttggtagcgcaagcctaccgtagtgctggcatagatctggtgccggatgctgacttctgccaccccggagagctccagagaagcgaggcgcttgtggaggtgcctgatgtgcttaggagcctcaacgaagaagaagaggctttctggcgcgaagatttagacaacgttcaagctatgcgcgacgcaaccaacgttttgctccaagaagcgcgcaagctctccactgagattgagtcactcggcgacatcgatgcctatttggtggagcatgaggagggagatgcacgccttgtacaagccctgcaaacctcacggtatctggagttgtggcatgacgaattcgagaggaacgcctggcagtaccatgttgccatgatggaggggcacgatgccccggagtgccacaagcggaagtactgtgaagagctgctcgcagaccaaaagttagggcaaaaccgttttgtcctaaatcacggacgctatgtaggcttacatgcggaatatcctcgtaaatacttcgccttaaaggtgaagctatacgacctcttggccagttttcacgcccgacgcattaaggcggctactgcatggctggaacgtagagggctgcttgcccccatgcctcgcagactgcttcgcccgcactcacctgagtggtttgcttcactgcgcgaatgggacccaaaacaggctgccatgacggaagctgctactacagtggcgggggcctttgatgtgtgcagcatttgcgcagatgatccagctcgcgactatgccttagtgaggcctcctgcagctgggccagggacaattcggctctgcgacgactgttttggcatccaatctatcgacaatccattagagccgttctaa

SEQ ID NO: 367590 - DNA, 231 bp, Pseudomonas aeruginosa
ttggtcaccactcggcagcttcagccggatgacggtcagtgctttcgtttccccaagattctcgaccacatcgacatatgcggcggacggctggtcttcgaccgtaatctccagggaaagcgggttccgattggtcgggagctgccgatcatcatcttcttccaggtagccaacggtcagatactgctgctcgcccccgaagaggaaaatccggtgaccttcgagatctga

SEQ ID NO: 367591 - DNA, 621 bp, Pseudomonas aeruginosa
atggtatggactttctcaaaatcgctactggtgacgatgcggccctttaagggtgcgcccgcctcgggtggcgtggattctgctttctggattgcgcaatccacgtcattcccctggccaccgctttccagacgggggagtggtggagtggtcgccgctggtggtccagctcgctcctgcctggcggccctcgctcgcatcagcgccttgcaaaacccgttaaacccgatggtcatcccgtgctcatttttgagcgtttcccatacatcctcccgtgaggctccggctgttagtgcggcctcgatctcgccgagcatgttccgcaccagggccgaatcgctccgtggttttagtcgcgacagtggcatcgcttacccctcgttatcgacctcgggcacttttgtcccctctttgtctctgatccgtactctagccgtccctttttggtctggcaagtaccttttttgtctcttcgttgtcttcacgtcgtctctcggttgtcttcaaagcgtactcagtggcacccctgggcggcgaaagcccctcacgctgcgcgtgagggatcaggaggacgcttttttgcggcctccgaggggtgcagacgactattttttcccttaa

SEQ ID NO: 367592 - DNA, 285 bp, Pseudomonas aeruginosa
gtgagggttgtttggacgcccgaagcgcagcaagaccgtgccgatgtgtgggactacatcgcagccgacaattcgcgcgcggcggcccggatggatgagattttcagcgacgcggccgcccgcttgatccagcaccccatgctgggcaagccgggaaagattcccgggacccgcgagttgatcccgcacgaaagctatcgcctggtgtatcagatcgacggcgaaacggtgtggatactgacgctggttcatactgcccgcctgtggccgcctgtgcgcgattaa

SEQ ID NO: 367593 - DNA, 279 bp, Pseudomonas aeruginosa
atgtcaaaacaagccgttttcacgatgaagctggagcctgagttgcgcgccgagtttatggccgaagccgaggcggcccatcgcccggcgtcgcaagtgctgcgcgagctgatgcgcgagttcgttcagcgccagcgcgagtcgcgcgagtacgacgagttcctgcgccgcaaggtcgaagccggccgggcttcgatgcgcgctggattggggcggtcgaacgatgaagttgaggccgaattcgccgcacggcgtgccagtgtggcgagccaggcgtga

SEQ ID NO: 367594 - DNA, 408 bp, Pseudomonas aeruginosa
atgtcgccgcttggatttggtgtgctattcgtgatcagcttcgcgctgggcatttcctggttggcctgggagtttgatgcacgtattggccgcagacggttatcccgccagctgcctttgccgttggatgatctgaaatcgcactttggcaataaatcgtcaccaaggctgcggccagcgatagccgtgttgggttttatgctggtgttatttgcaggcatgggcgcttccatattgggcagggttgcaaccatgcagcctgaaactgctgcggcagttttctatgcatatccgcttctgcagagcttgtgggggttgctgcttggctttgggccgatcctttgcgttggcctggcagtacctgggacatatgccatcaaggtcggtctggaatcaaacggctactga

SEQ ID NO: 367595 - DNA, 705 bp, Pseudomonas aeruginosa
atggaagccaacagccgccctctactgcggatctttgaacctactgtgtgctaccagattccgctgttccagcggccctatgtctggaagcgggaagataactggcaaccgttgtgggaggatttcgaacgcctgctcggcgtggtactggctggagaaaagctgagcccgcacttccttggcgccgtggtactcgaacagctgcgcaacgataccggctctgtacagtgccgccaggtcattgatggtcagcagcgcttaactaccctgcaattgctgctgatcgccgcccgcgatctgtgtcgcggtctgggcatcgagcgctttgccgggcgcttcgagtcgctggtttcaaacagtgacacgatggttgatgacccctcggaggtgcgcaagttgctgccaaccaatgctgatcgcaaggcctatgcactggtacatggcgcgggcagcccagacgcacttctgcagcaggcgcaaaagaaggatatggaggtcagtcacgaacagggcatcgccggggcttacctgttcttctatcggcagttcaaggactggctgcgatcggatgctgcagaaaccgatgtcacgcaagaaaagcaattggatgcgctctgggccgtggttcgcaatggtctgcagctggtggtgatcgatctgggggaggtgaatcgccccgggtttcaaggaggccgattggtttaa

SEQ ID NO: 367596 - DNA, 2898 bp, Pseudomonas aeruginosa
atgacaggcatgaagaagcaactcagtgacgaatatctgcacacggttgcccatgaagagctggaggtgctcgagggcattatcgattatgccgagcgcatgattcgtgaaggtgacctttcttatcgcgacctcaagcgcaacgcctatggcaaggccctgatcatcagacgggaaataggtggcattaccacattccggctgggcatgcattcgttggtatatccgaaggcaagctccggctatgccacccctcactcaccggttggtcggctgctggccgtggctggaatggggtttgagggctgttctttagcctggggggactatgcggtggaggaggagcgacagttccgccgccatagctttgaagaactggagcagcatgctcgtaactttctggcaatgggggtcgagaatgccagtgggcaggccaaggtaatggatctgagagcctttcttggcaaagtcatagccaaagcgcagacgctgcgtccaccccaaggtaccccccggactgacaagcctaacgaggatgctgggggtcagaagctgcaagccataccaacgcgggatgaagtgaagacctcggttgagcctcccttgactcccgctacggtgccagttctgaagattgttgatgatgatgtagaaaacgaggtggtgcatctgctcgacctcgatgaccttgatgaagaaccgggcacagaagcctctgagcgcatgagtctggacgaacacttctttctgaaccgaacgctcaatcaggacaaaatcatttcccgctccccggtgggtcccatgtgggtggagggtattgccggttccggcaagacttctgctgcactcggacgcaccaagatgctctgcgactttaactcgaacgatgtctcggatcgcacgacattccgggccatcctgggtgacgacttcgattactgggagggcaaattcgccggcaagttctcccaggaagggagtgtcggtttcgtacgtacggccgagctgatccaatacctcaaagagacttgcagcaaactaggcatgcccagcttgcctgtacaggaatatcacgagttgcgttccagactgcgcaactatcgccagctggaaacctctggagacgccggcaagcgcttcaaacatagcagtgtcgaaggtcctgtcccgatcaccacgcttgcgtggctcaatgccgcacgtttggctgtagcgcaagtgatcgctgccaacttacgggaacagctagctaagctggacagccagcctgggcaacgattaacggcacatcagcgcgctttgttggcgatagccaaccaagagctttcctccagcattaatgagctcatccaacagctgatgtcacccgtttctacagagcgggttctgcatggtcttgctgccaacttgattgagacgagccaggcattggcccaacgtatcctcgggccggatacgctgagcatccatttggccggccacgttgtgtacggaaacggcaacccggaactggccaaacgcttggccgaattgccgatcgacctctttgtgtcaccggaacgggcgctgattctgtaccgagaggaaacgtccagtatggggaccgggcaacaggtgcagccgtgcttatccagtgggcgttatcagttcctgtcaccagctagtcaaccgctgtcatttgaagcggcgttgaacgcttcacgagcgggcgagggggttcgggtgttgctgccatctatcacgggtgggcagagcttcgaggtcaggttcctgtcagttagcgagctgttcatttccctggggcgtccccagtctctgctgtatctggaagatggcgctctgaaatggcttaaggttgtccgcgctgttggtagccttgcgctgccgggcgaggacaagcagccaaaattgacggtgcttaagattttccttaaagccgcattggaccatttggttaaaccactaaagggttttgcagggctttattcccgggcattacatgatcacgcaggtgccttccccagcgcacaagccgtgcagcaggtggtgcagcgtattgaggaccagcgtttgaacgatgcagacatcgatcttttgctgtgcctggcccacgatctgagtttcagcgtaacggccaaagtgcatcctagcttgcgcgagccggcttattaccagagcgtattcgtcgacgaagtccaagacttcaccgagcagcagatctatctgatgacttgccaggcagatcccaactatagcgctgttaccgtagttggggatcgttcgcagcagctgttgcgcaacgaggaaatgcacatcggcgcatgcttccccatcggcacgcgcctagagtttgtgagcctggacgagaatctacggcagaaagggcagccggagctggtcggcttcagtgcgatgttacgcaaactgttcgagcacggagctgccacggatgtagagaagctgaatgcagcgttgctgcatgatcagcagagcccgcaaggcgcatttgccctgcgcgggttttccggacgggatgaggagttcagatacctgtgcagtttgattgctgatattcctgagagccagacagttgctgttgtcctgccagaccacgaaacagcccgagcactgcatgcatattgcgaacaggaattggaaggcagcttccgcaagatgagcatgtccgagcatatcgacctgtcgaagaagtaccttgtgcacttcacatcggtgctgcatgtgaagggactggagttcgatattgtcctgctgcctatgatcgataagtacgacctcagccagccagtgttcagaaaccggctgtacgttgggtgttctcgggccaggcgacggctggtaatgagccgattgagtaagcgaataaatgccagggattga

SEQ ID NO: 367597 - DNA, 1140 bp, Pseudomonas aeruginosa
atgaatccatggatcaagggctttgccctcagcgcattggccgcctcgttgctggcatgtggcccaaagccgctcagtgaggaagaaaaggcacaggtagccgcgttgcaaacagagcagcaggccgtcgcgcagcagatcagcagcgccgaaagcgagttgcgccaatactcgggtggcctgctcaagggcctgatcgaaatgcgccttgaggtactgcgcaccaacaaggcgctgcttgaccagcgcatccatgccatcgaggcccgcgcgcctgtcactcagcatgtcatcagctacaagcccgataacgcactagtggcggagctggagcaggcgatcgccaatgccaaggaagaactcgaagtcgcgcgagccgaggcggcgcaatacagtggcggactggtacaggctctcaagcttgcggcggttgccacacaggagcaaacgctggccatgctcaagcagcgtttgctggtagcccgttatggtctggcgacagccccgcagagttcgacggcaggcattgcggcggatcctgccgaagtaaccgccagtaccgttgcggtgtccgatgcgacgctgccggccggcgatggcccattcgggctggagatgggcctgagccgcgatattgtcgagaagatggtcggcaagacgctgacgccactgcccggagagccaaatcgcttcagcgtcgataccctgccgaaaacacacaacgagttcgagcgctatgtactggagttttcctccgagcatgggctgtgctcggttatggcgatcggccgcgacatcggcacagacagcttcggcattgccgtgaagagccgattcagtgagctggaggaagggctttccagcctctacggccggccggagaagagcgactttctactgccgggcagcatctggaaggacgcgcgcgactggatgatggccattcgccaggatgaacgtatcctggcctcgtcctgggaggcctctgcatccgccccgctgaagagtgatctcaaacaagtcttcctcatcgctaaagcaagcagttccgacaagggctacttgaagctccagtatgattttaataacgaaaacttctgcgagcaggaaagcaagcagcaaaaaagctctgctctatga

SEQ ID NO: 367598 - DNA, 5031 bp, Pseudomonas aeruginosa
atgaactggatcggcatcagcaacgaaaacgagttctacagccagcactacctcgccgagatcttctccggcgacgtgcgcggcgtactggaggcctggagccagcgcgaggacgaggcccgcgagcaggcccacgcccggggcgacaaggagccggaatggcgcgcgccctgggcgcgcctcggcaacgccgcccgcgactggctgctgcgcctgagtgaggccgagcgcctgcgcgagccgcgcgaacagtcccgcctcggccgcgcgctgatcggcgagctgctgacgcgcttcgaactgccgttcgcccccgaacgtctggagctggaagacggcaacctgctgccgctgctcggcgagctgaagtccgccagcggcgagccgctgttgtggattctcgaagcccaggccctcggcggcgagctggagccggacagcgacccgctgagcctgccgctgcatcccgcgcagctggccagcctgccggggctggcgctggaggcaggcaagacccgcaacgaagccgacagccccgactggcagaagctcctctccaccgtggtcttcacccagccacgcccgccgcgctgggtgatcctcgccagcccgcgccagtggctgctgctcgaccgcgccaagttcgcccagcaccgcctgctgcgcttcgactggagcgagctgctcacccgccgcgaggccgacaccctcaaggccgtcgccgtgctgctgcaccgcgaatcgctgctcgacgccaacggccagagcctgctcgacagcctcgacgagaacgcccacaagcacgcctacggcgtctccgaagacctcaagtacgccctgcgccagtccatcgaactgcttggcaacgaagcggcgcgccaactgatcgagcaggcacaggagcagaagaagggcatcttcagtggccagaaccagctcgaccccagcgagctgtcgctggaatgcctgcgctacatgtaccgcctgctgttcctcttctacatcgaggcacgccccgagctgggctatgccccggtggattccgaggtctacctcaagggctactcgctggagcacctgcgtgagctggagctgatcccgctgaccggcgaggccgagcgcggcggccgctacctccacgactcgctggagatgctcttccgtctggtggctgatggcaccccggtcagccagcacgacgacctgctcagtaccgcacgccagacgggccgtgacaccttcgccctgcagccgctcaagtcgcacctgtttgacgcgcggcgcacccgcctgctggcccgcgtggtgttccccaaccagctgctgcagcagatcatccagctgatgtcgctgacccgccccggcaagggccgccagcgccgcggacgcatttcctatgcccagctcggcatcaaccagctcggcgcggtgtacgaggcgctgctcagctatcgcggcttcttcgcccgcgaagacctctacgaggtgaagaaggccggcgaggagcccaacgagctggaaaccggctacttcgtcaacgcccgcgccctggacgactaccgcgacgacgaacgcgtgtacgagcgtaacgagcgcggcgagcgggtgctcaaggtctacccgcagggcagcttcatctaccgcatggccgggcgcgaccgcgagaaatccgcctcctactacacccccgaggtgctgacccgcagcctggtcaagtacgccctcaaggaggtctacaaggagcagctcgaagcgctgcccgacgaccgtgcccgcgctctgcgcctgctggagctgaagatctgcgaaccggccatgggcagcgcggcgttcctcaacgaggcgatcaaccagatcgccgacaagtacctggagctgatgcagaacgccgaaggcctgcgcattccccagcaccagtacccgcaggaacgccagaaggtgaagatgtacctcgccgacaacaacgtgttcggcgtcgacctcaacccggtggcggtggagctggcggaagtctcgctgtggctcaacgccctgtcccgcgaccgcttcgtgccctggttcggcctgcagctgtactgcggcaactcgctgatcggcgcgcgccgcgagtgcttcaacgccagccagctggcgctcaaggccaaggacccggccagttggctgaacgccgcccccgaggcgctggccatgagcgcggcgcgccaaagcgggcagatctggcacttcctgctgcccgacagcggcatggccagctacgccgacaaggaggtcaaggcgctgtacccggcgccgatcaaggcgatcaacgactggcgcaaggccttcaccaagccgttcgatgcggatgagcgcgagcggctgaaacgcctcagcgcccgcgtcgaggaactctggcaggaacacgcccgccagctgcgcgagatgcgccggcgcacctccgacccctacgatatcttcggcttgcccagccaggcccgtgctcaaaccagcctcgactggaaggatcaggtgctggagcaggagctgttcgccaaaggcctgcagaacagcagcgtgttcgcccgcttgaagctggccatggactactggtgcgccctgtggttctggccgattgccgaggccgagcagttgcccgaccgcgaggaatggctgttcgacctggaaaacctgctgctcggcgacaccgtggctgccggcccggccaacgagcagttcggcctgttcgccagaacccagaacccggaggagggcaagcgcctgatcgaccggcacggcgtggtcaacctcgacctgctgttccgtgccttcccgcgcctggccctggcccagcgcatcgccgaccagcggcgcttcttccactggcaactggcgtttgccgatatcttcgccggagccgctctccctgtaggagcggattcatccgcgacccgccgcgcgcccgcagccgaaagcgtcgcgaatgaattcgctcctacagggcagcccgcggccggcggcttcgacctgatcctcggcaacccgccgtggctcaaggtggaatggaactctggcgcggtgctcggcgacttcgagccgcgtttcgtgctgggcaagttcagcgccaagcaactggccgacctgcgtgccgaaaccttccaccgcgtgcccgagctggaagcggcctggcgcgaggaatacgaggaaagcgaaggcacccaggcgttcctcaatgcggtgtgcaactacccgctgctgcgcggcgtgcagaccaatctgtacaagtgcttcctgccgcgcgcctgggccaacagctcggcgcggggtgtcagcggattcctgcatccggaaggcatctatgacgatcccaagggtggggaattccgcaaggcgctgtatccgcgcttgcgtgggcattttcagttccagaaccagcgaatcctgttcccgattggcgaccgggtgaaatacagcaccaacatctgcgggcctgtacgggagacgccgaagttcgtctcggtcgccaacctgtttatgccgaaaaccatcgacctctgctttgccaacaatggcgagggagttgtcggcggcatcaaggacgaggatggcggggattgggatgaaagtggtcatcgtgaccgcatcatcgaggtcaccgagaaggagttggtgctgtttgcccggttgtatgacgaggagggtaccgagccactggctgcccgtctgccgactctgcatgctcgtcagttgctcaacgtgctggataagttcgccgctcagccgcgccgcttgggtgacctcaagggagattactattcgactgtgatgttcgatgaaactaactcgcagcgcgatggaaccatccgccgcgatacctgcttcccgcaggatgccggcgaatgggtgctgtccggcccgcatttctatgtgagcagcccattctacaagactccgcgaactgtctgcaccgagaaaggccattacgactgtatcgacctgctgaccctgcccgacgactacctgccgcgcagcaactatgtgccggcgtgcagcccggacgaataccgtgcccgcaccccgcgtgtcagttgggtggagccgggagaggtggagccgaagcgggtgacggagtattaccgtgttgtgaaccgcgagatgattggcccttcctccgagcgtacattgattactgcccttatcccgccgggtgttggccatatcaacacttgcctagccaatgccttcaagtcatcgctagcgatgctcgatttctacgcgatgacactttctgtaccgatggactatcgcgttaaaagtacggggatggggcatgcaaatacgacactaatcagtcagttgcctctgctgaccaatgagcactacagatcagcgttgcatgcgagggcgctggtgctggtttctctcgccacccactacgccgacctctggcaatcctgctggcacgaagagttccgcaaccagcagtggtcgatcgctccgcacagcgaccaccccggcgcaagcgtgctgccgtatgacttcttcgcccgcctcacccccgagtggcagcgcgattgcgccctgcgcgccgactacgcccgccgccaggccctgctggaaatcgacgtgctggtcgcccaggccctcggcatgaccctcgacgaactgctgaccatctaccgcgtgcagttcccggtgatgcgccagtacgaagccgacacctggtacgaccagaacggccgcatcgtcttcacccccagcaagggcctggtcggcgtcggcctgccgcgcaaggcccgcaagagcgacctcgaccagggcaccttctacagcctcgaatcccccgaacgcagcgaacacgacatcgccctcggctgggaagacatccaacacctccccgccggcagcaaggtgcgcaagaccttcgaagacgacaccctcccgggcgggccatacgaaaccaccatcgaatacctcgcgcccttcttcaaaccggatcgggaagccgattaccgcagggcgtgggcattttttaacaaggagaacagggtatga

SEQ ID NO: 367599 - DNA, 2547 bp, Pseudomonas aeruginosa
ttgccctaccagctcgacccggcgcgccaggcgctggcccagccgcgccagcgcatcctgatcgccgacagcgtcggcctcggcaagaccctcgaagccggcatcctggtcagcgagctgatcgcccgcgggcgcggcaagcgcatcctggtgctggcggtcaaatccatgctcagccagttccagcaggagttctggaaccgcttcaccatccccctgacccggctcgactcccagggcctgcagcgggtgcgcaaccgcatcccgaccaaccacaacccgttccactacttcgaccgttcgatcatctccatcgataccctcaagcaggacatcgactaccggcattacctcgaacaggcctactgggacatcatcgttatcgacgaggcgcacaacgtcgccgaacgcgggaccagctcacagcgcgcacgactggcgcggctgctcgccacccgctccgacaccctgatcatgctctcggcgacgccccacgacggcaaggcggaaagcttcgccagcctgatgaacatgctcgaccccacggccatcgccaacccgtccgactacggcgccgaggacttccgcgacaagggcctggtgatccgccgcttcaagcaggacgtgcgcacccagcttagccagaacttccccgagcgcgacattgccaccgagcgggtgccggccagccgcgccgaggaccacgccttcgacctgctgatggacgccggcttccacaccctcgacggcaagggcggtggccagctgttccgcaccaccctggagaaggctctgctctccagcccggcagcctgcgccagcaccattgccaatcgcctcaagcgtctggagaagcacctcgaccagcccggcgtgcgcgaggacatcgacaccctcaacggcctgctgtcggcagtcgaggccatcgacgccgcgaagttcagcaagtaccagcggctgtgccagctgctcgccggccagggcgcgcaaagcctcggctggagcaagcaggacgacgaccgcctggtgatcttcaccgagagcatccgtaccctcgaattcctccagcagcacctgcccggcgactgcggcctcaagcctgcccaggtcggcgtgctgcgcggcgacatgccggaccgcgacctggccgccaccgtcgaggccttcaaccagaagagcagtccgctgcgcctgctgatctgctcggatgtcgcctccgaaggcatcaacctgcaccacctcagccaccggatgatccacttcgacatcccctggtcgctgatggtcttccagcagcgcaacggccgcatcgaccgctacggccagcagcgccagccgctgatccgctacctgctcagcgagagtgccaacccccgcgtgcgcggcgatgcccgggtgctggaaatcctcatcgacaaggatgcccaggccggcaagaacatcggcgacccctcggaattcatgggcgtctacagccaggccgaggaagaggcactgaccgcgagcttcatcgagcgcaacgatgccgcaggcgatgacgacgacatctccgcactgtttgcggccttcctcgacgacaccggcgagaagagcgaagacagcctggccgccttcattccttctacacagaccagcagcgacagcgccgcgctgatcgccgacagcccgcgcctctacgccagcgacctcgactacgcgagggccgcgctgcactggctgagcgaggagggcgtcagcctgcaggcggaaagcaccgacgacaccctgcgcctcaccgcgccgcgcgacctgcagcagcgcctgcgctacctgcccggcgagatccgcccggacaacgaccgcttcgtgctcaccgccgacaagcagcgcatctacgccgaactcaagcgctgccgcgacgaggacagcccctggccggccatccactacctgtggccgctgcacccggtgatggaatggctcgccgaccgcgccctcaacgccttcggccgccacaccgcgccggtgctgcgcctgcccaagcaactggctgccgacgaacactgggtgctgatccacggcggcttccccaaccgccgcggccatgtgcacatccagacctggtgcgccgtgcagatgaagggcggccaggtggtcgccagcggcgacttcgccaccctgcagcagcacctcagcctcgccgccctcagcaaccgtggcgaggagggcgacacccgtgctctgcaggccctgctgccggccgccgtgcagcacgcccgccagcagttgcaggccctgcgccgcgagcacgaggcgcagagcaacgagcgtttcaaccagcagctcaatgagctggagcgcctcaagcagcgccacctcggccagctcgaactcgacctcggcaacctgctgcagggcgtgcgcgagcgccgccgcgaggagcgcgccgcgcagatcgagcgcgtatttgacgactacctcgactggctggaaaacacccagctcaccgaggaccagccctacctgcaggtcgccgccgtgttcaccggcgcgcctgtcagcgcgtga

SEQ ID NO: 367600 - DNA, 378 bp, Pseudomonas aeruginosa
atgagcaaccaccttgcccccggcgcgcgcgtcgagatccgcgatgccgaatggcgcatcaagcgcgtggacatgacctccgacggcggctacctgctgacctgcgagggcctctccgagctggtgcgcggccgcgaggccactttcctgtccaatctggaaaccagcatccgcgtgctgcagccggaggccaccgaactgcgcgacgacacctccagcggctaccgcgccagcctgctgtatctggataccctgctgcgccgcacgccgccaccgacggccgcatccacatcggccaccgcgccgccatggaccagttgccctaccagctcgacccggcgcgccaggcgctggcccagccgcgccagcgcatcctga

SEQ ID NO: 367601 - DNA, 306 bp, Pseudomonas aeruginosa
atgatcaaagctgtacagttaattgctgacaggtattttgcgccatttgggcgtgtgtgggtgacggtagctggaggatcgcctaattcacaagttcttgagctaacactttccaagctgacgcgctggcagaagctctacgcagcaatggcaatacttggagggcttgtattagttaaccactacacttctacccatctccagtatcaggcatatggcgccgaccacgaagatccgctcatgctgacccgcttttccaggggcaacctccagatcgaaaatcaggcttatagttttagacagtga

SEQ ID NO: 367602 - DNA, 378 bp, Pseudomonas aeruginosa
atgcacaggatcctggctatcgcgctctgcatgctatggagcgtcgccgggctggccgcggatgcggcgatgccggcgcagagctgcgcaagccttggcgaggcgacggccggccccgaggacaacttccgtccgccgctggagggtgaggtgatcgacaaggggcgcgcctatttccacagcgcgccgcgtgccgactgtgtcaccggggtcttcgtgattcccggcgacttcatcactgtctacaagccgagcggcgagtggctgaacgtcatgtacgtggctcgagacggcaagaaaaccagcggctggctgctggagaagcgcgtccgcttgcgccaggcctatggcggcccggacgagccggcgcagccataa

SEQ ID NO: 367603 - DNA, 663 bp, Pseudomonas aeruginosa
atgttggccgcaagcagcggcgctacgagcatgtccttgtcgccgaaaaggctctcgggcgaaggctccgcgatggcgaagtcgtccaccacatcaactgcatccgctccgacaacaggccagaaaacctcctggtctgcacccgcgaataccaccagcaacttcatgcacgcatgcgccgtcacccctactggtccgacgtcgagcgtcgcgccaaagccaaccgacacgaatgaggaagcccatgagccaaactactctcgcaagcctgcagaccaccgcagttgcagccaaaccgaacgacgcccccatgtcgctgctgaccggcgccggcttcgaccagatccaacgcgtcgcaaaggcgctcagcgcgtctaccctggtgccggtgcagtaccgcgccttcgccgaagtgaaagagtacggcaaggtcaccggctacaccccgaacggcgccgggctgccgaactgcatcgtcgctctgaacatggcgcagcgtatgggcgccgatccgctgatggtgatgcagaacctgtacgtgatcgagggccggccgagctggtccagccagttcatcatcgcctcgatcaacagttgcggccgtttcaacccgctccgctacgacctcagccagccgggcaaagagcaggaggtttcctataa

SEQ ID NO: 367604 - DNA, 642 bp, Pseudomonas aeruginosa
atggttcacaagggtaaaagccctacccgaaagggcctgccggaaggcagaaatggcttcgttcgcgccggcgaacaagaaaaggctacgggtgaacacccaccagcaggtgccccatggttgagcctggcccagttcctcccaggcaaagcacaagaccaagatggcatattgccaacaaaatacccttccccgctaacgttgttttatcgttgttgccagccccgatctggtggaaaagcccactccatgaatcgtcatggagcttcccatgtttcaactcctttcctggatctccaggaagccgtcccccaccccacctaccaaagctgccccagggggattcctccctcctctgagcagtatggaactgctcggcacgcctcgccgccggcagctactggagaacatctggcaacgtgcctcgctatccaagcagcaattcgaggagatctatcggcggccactggccaactatgccgagctggtccagcagctccctgcttcggaaaaccatcaccatgcccatccaggcgggatgatcgatcacggcctggagatcgtggcctacgcactgaaggtacggcagacctacctgctcccgatcggagcagcgccggagtcacagtcagcccaggctga

SEQ ID NO: 367605 - DNA, 471 bp, Pseudomonas aeruginosa
atgcacaaagagaatataactgccgaaatcacagaacgagcttttgattttttctattcgttctcgcggtttgagttcagtctcaaagagaatggctacttaaaatctaataggcctggagttagggcagagccgggatgggacacttttgtacaagaccattccgacaaatactctctttcccaatcggccacagcactaatcgagcagagtccagagcaacaaatagtcctgcccggtagtgagctgggttggcgtccggttaacttagaacagcacaataacgacttagctagagtcgcccacttacttaagaccgtgcgaaacaatttatttcacggaggcaagcatggtggtgccaactgggacaacccagcgaggacaatgcatcttattcttttaagtaaagctatccttgacgagcttgctgcaataggagactttgaggctgactacaagagaatctactga

SEQ ID NO: 367606 - DNA, 330 bp, Pseudomonas aeruginosa
gtgcctctcgcgcgctgcctgctgaagcacggcgtcaccggggcgcttccgccgcttccccggcgccatgacgaagagccgaactactcggcggaattcgtggcgcgggagtacgtcgcgactgcgatagcgcatttggggctcagcgagcgcgacgcatggtccatgaccatgaccggcctgatcggcgctctgcgcgcgaaataccccccaaccgaatcgaacgctccgggcgccagagccccgaccgcggcagagcatgacgcgacgatggagtggttcgacaagatcgaggccaagcgcaaggcgcgggcgaaaggagcaccctga

SEQ ID NO: 367607 - DNA, 597 bp, Pseudomonas aeruginosa
atgcaggtacaccatcgttgtttgaacgtcggagtgtcccatcctgtctcggacatagagcaatggctctcctttaaagtctcggcttttcctcagggcaagaagggtataagtcccataggtatgacgaagcatgtgggccctaacataaaatccgcacttgcgctcatacgccttcatcacgtcgacgatggagtctttcgtgtactgccgcccctcccttgtcagcaccaaggccgtggcgcgcccgttgccggccgctttccgtacttcgcgctcatgaagcgtgtacgaccacatttcctccatcagcgaccaaggcacgtcaattgttcgagggcggccgtacttgagatgcatgtccgatggctcgagagccacgctgatcatttgcccagggcggaggcccttcttcagccgaggattaaagacgtacttgaaagggaaagtgcgcgcctcgcaggagcgaagaccagtgcgaaccatcagatggaacaagatccggtgacttggatcggcatcgagggcgaggcaaaccttagcctgatctttggtcaggaatttggtcaatcgcttacgctctcgcaccatcactga

SEQ ID NO: 367608 - DNA, 207 bp, Pseudomonas aeruginosa
atgtgggaggccgcgctttgcggcacgatggccggcttggccttcggcgtttcctgcttggtttccatggctgctcctgttctggtcgaagcgctggttgcggcggattttctgtgccagttcgtgctcccactggccttgggactgatacttctcggggcggttgatccagtagctgcggaattcgagaagctcgtcgtcgcgtag

SEQ ID NO: 367609 - DNA, 468 bp, Pseudomonas aeruginosa
atgatcaaatggcctgatggccttccctttccgctcagggaggggtacggcttcaagacggttgaaccaatggccagaaccgccctccagagcggccgggcacgctatcgacggaacttcagcggcgtgccggttgctctggaggtttcttggctgttcaccgctgagcaggcgcgtctgttcaaggggtggtaccgagacgtcctgaaagacggcgtcaagtggttcgagtgtgagctcagaacggaagaaggcattgttccgtgccacctgcacttcgaggggatctacgacggtggctatctcgtcgggcgcgaccactggcgcttcaacgcgaccgtcgtgatgcgagagcgctcgatcatcgatcctgggtgggccgagattttgcccgagtacatcctcctcgctgacatcttcgacatcgcgatgaacagggagtggcctcgacatggcgacggctcttga

SEQ ID NO: 367610 - DNA, 525 bp, Pseudomonas aeruginosa
gtgttggcgggcctgtccgcctgcggcctcgctgcgctcgcctgggcgtccttcgtgcatccgctgccgcgcctgatctacaacccgtccgacagcgtggcggtcggctggtatcgcgtcgatccgcaaggccacggcaccggctcgctgccacgtcccttgtccgtgggcagcatcgtcctgaccacgctgccgccagacgccgccgcgctggccgcgcagcgcggctacctgccggcgcgcgtgccgctgctcaagcgcgtgggcgccgtcgcgccgcaggagttgtgcagcactggccgcgtcgtccgcatcgacggcgtgccttcggccgccgtgctgcctgccgaccgctggggccggccgctgccatcctggcagcaatgccgccgcctcgaatccggcgaactgttcctcttgagtgtgaccaacccggcgtcgttcgacagccggtatttcgggccggtcagcgcatccgccgtgatcggggtcgcgcatccagtctggctggaatcccgcccatga

SEQ ID NO: 367611 - DNA, 228 bp, Pseudomonas aeruginosa
atggtccggcggtgggcaaacaacatcccgttgagccagcccgtcgtccacgcgatcgagcatgacaccgggaagagcttgctggacctggccgaggatgaagccgagcagcagctccgccggcggatgcaggcccagggcctggatggtctcagtggcgcccaggcgcgggaactgctgctggccaagatgcgccgtaaagcgccggaggtgcgccgtgatgcatga

SEQ ID NO: 367612 - DNA, 765 bp, Pseudomonas aeruginosa
atgagcaacaacccgcacttcatgaacatgaccgccgacacgctcggcaagagcttgctgcagggactgatccaggaaatccggatcatgccggactgctggcagaagcttcccgaggccaagcagcaggacatcatcgaccgcctggagcgccaggtacggaatgccgccaccatcgcggtccacaccattgccggcggcgaccgcgacacggtctacggcaagctggagtcgatgaccgcgaaggacaagatgaaggccgtattcgtggtgaatccgagcagccctcacaaggaggacctgctgttcgcggtgaacaaggattgcctgctcatcatcggcggcgccaacgagttcaccgagggcatggaccaggtcaagcctgacccggaccagaacccgctggacctgaatggcggcgaccacgacatggaagacgccggcgcctggggcggtatgcaaccagcagacgacagcgacgtcgtcgatgccgagttccaagagctgccgcaactcaccgtcgagcgcttcgccggccacaccctgggcgagatcgccatcggcgtcgccaccaagaaggacgtgttcgacgcggcctggctgcaatcgcgcttcgctctcaccaccgaggaagccgagcgcgtcattctccaactgctggaccagggcgtcatcgtgctcgagcaggaaaacgaggagtcccgcgagttgaacacttaccgcgtcgtcaagaagccgggggatatcgccctcgacctggagtga

SEQ ID NO: 367613 - DNA, 1056 bp, Pseudomonas aeruginosa
atgctcacccgttggaagaaagatccagaaatggcctttctggccgaggcatacaccgacaacctccagcagaaactcaaggatttgcacggcgcgtggatgcgttgttttgataaaaaactcgccgccaaggctcccgttttcaagaagaaaagcgacaaccgagactcaatccggttcgtcaacttcgacaagtattgccgccttgaaatagggcgggtgaagctgccaagcggtctggcatgggtcaagttccgccagtcacgcccagtcgaagggaagattaaaaacgccaccgtcagccaatcagccggacactggtatatctcatttcaggtcgagcaggagcttccagagccagctcacccgtccggctcaatggtcgggctggatgcagggattgccaagctcgcaaccctgtcagatggcacggtgtttgagcctgtcaacagcttcaaaaccaatcagaccaagctggccaggctacagcgccagttgagcaaaaaggtaaaattcagcagtaactggaagaaacaaaaagccaagatccagcgcctgcattcgcatatcgccaatacccgccgcgattaccttcataaggtcacaacgacaatcagcaaaaaccacgcgatgatcgtcattgaggacttgaaggtttccaacatgtcaaaatcagcagcgggcacgacaaatcagccggggcgcaacgtccgggcaaaatcagggctgaatcgttcgatattggatcagggctggtttgagctgcgccgccagcttgagtacaagcaggtatggcgaggtggtcaggtgttggcaatcaatccagcctacacaagccagcaatgttcgtgttgtggttatacggcgaaggccaaccgcgagacacaaagcaggtttgtctgtcatgaatgcggctatgaggtgaacgccgatgtgaatggcgctcgcaatattttagcggcgggacacgccgttttagcctgtggaggagcggtgcaatcaggccgcccgatgaagcaggaaccaggtactgcgcgagcagctatcacccagtaa

SEQ ID NO: 367614 - DNA, 144 bp, Pseudomonas aeruginosa
atgagcagttgcctgaaggccggcggcagcgccaaggcggcgacccagcaggagaagatgaagacctgcaacgccgacgccaccgccaaggcgctcaagggcgacgaacgcaaggcgttcatgagcacctgcctgaagaagtga

SEQ ID NO: 367615 - DNA, 900 bp, Pseudomonas aeruginosa
atgcggcactccgggcatgaacttcatgcgatcacgcaaagcccgatgttgattgatgcgcatatgcgcgaactctgtaactgccatatccattatcaccgaggcaacggcggtaaggttgtcaagcgctgggagttccagaaagtccagacggacgtgaataagaagtatgatttcgtggatggtgaggcgacccgtatcactatcgataagacgtatttcggttgttataagtccgtggcggatggggctgagcatcattttaagttcaaaccgcctcgggcgttgttcgttcttgttggtgcggccctggttgtcggttatctcggttatggcgtctatgagcgccgtatggcgacgcatgatcctgccgaagccgttcccgcggcttcttcgtcgagcgttgcgcctgcggcctctgtgggtgttcctgctgtcgatcaggtgcgtcatgtgactgccggtgagtatctggcgatgcgcaggcctcgggtgcctgacgtgcccagctcggctccgatctatgacgaactgacgcggccggttgcgtatccgaagccgttctgtctgtcgtcacgtgatgagttcctggtgcagaagaatcgtaagcgcatggtgatcggttatcgtgatggccggttgtacggatgccgctgtaacagccagcaaggcacgcgcctggatatctcgttcgaggcttgcatggcgtacgtcgagcaaggtgcgttcgatccggcaatccctgaccgcgtacctgcggctgtcggcgtggccgggccgggcgaggcacgagccggtacggcggcgccgatggctgcgaattcgtcgattgttgcgccggggagtgctggtacccgcgtgacggtggtgaattctggcaagcctggtctgctgtggtga

SEQ ID NO: 367616 - DNA, 642 bp, Pseudomonas aeruginosa
atggcacagaatttcttagatgaaggaaaccgtagatttattcttgttcaactcccccagtatctcgatccggaggataaggggcagaaaaatgcagccgaattctgcgaccagatcaccaagcctcgttctatcgcagaactcactaaagagcgcttacgccgcgcaggcaccaagattaaggctgaaagctctggctggcagggcgacaccggcttccgcgtcttcaagctcgacacctccaatatccgcgtctggaatcccaaaccagacgatctggaagccacactattcgaccatcaggatcatctgctcgaaggtcgcagcgaggctgatgtgctttacgaactgctgctcaagttggggctggatctgtgtgtgcccatcgaacagcgcaatatcgaaggccttcacgtccatgccattggcggcggcgtgctgctggcgtgcctggctgagaccatcacccgcgaacaggtagagccgctcgcccagggcatcatcggctggcacaaggcgttggcccctgccggtgacaccacctgcgtgttccgcgacagcgcctttgccgatgacgtggccaaaaccaatctcgcagccattctggagcaacacggcatccagaacgtgcgcagcttgtaa

SEQ ID NO: 367617 - DNA, 150 bp, Pseudomonas aeruginosa
atgatcgattgggaattcctcgttccggtggctatgggctgggcgctgcatcactggtggacggtgatgacggcgctagcggcggtaggggtgccgccgggagcggaaggcatgagcgataggccgaaggcgcggccgacgcccctgtaa

SEQ ID NO: 367618 - DNA, 900 bp, Pseudomonas aeruginosa
atgcggcattctgggcatgaggtgcatgcgattacgcaaagcccgatgttgatcgatgcgcatatgcgcgaactctgtaactgccatatccattatcaccggggtaacggtggaaagatcgttaagcggtgggagtttcagaaagttcagacggacgtgaataagaagtatgacttcgcggatggtgaatcgacccggatcaccatcgataagacgtacttcggctgttataagtccgttgcggatggggctgagcatcacttcaagttcaagccgcctcgggcgttgttcgtgcttgtcggtgcagccctggttatcggttatcttggctatggcgtctatgagcgtcgtatggcgacgcatgagcctgcccaatccgttcctgcggtttcttcgtcgagcgttgcgcctgcggcctctgcgggcgttcctgatgtcgatcaggtgcgtcacgtgactgccggtgagtatctggcgatgcgcaagcctcgggtgcctgatgtgcccagctcggcgccgatctatgacgaactgacgcggccggttgcgtatccgaagccgttctgtctgtcgtcacgtgatgagttccttgtgcagaagaatcgcaagcgcatggtgaccggttatcgtgatggccggttgtacggatgccgctgcaacagccagcaaggcacgcgcctggatatctcgttcgaggcttgcatggcgtacgtcgagcaaggtgcgttcgatccggcaatccctgaccgcgtacctgcggctgtcggcgtggccgggccgggcgaggcacgagccggtacggcggcgccgatggccgcgaactcgtcgacggttgcgccggtgagtacgggaacccgggtgacggtggtgaattctggcaagcctgggctgctgtggtga

SEQ ID NO: 367619 - DNA, 900 bp, Pseudomonas aeruginosa; identical to SEQ ID NO: 367618

SEQ ID NO: 367620 - DNA, 270 bp, Pseudomonas aeruginosa
atgcgaacaccgattacgttctatcaattctacctagaccacgaccatgtgcgtgcccaaggttgcaacatgcagaagctctacgacgccattagtgacgtctgcagcggcaagactctccatccaagatatgcggatggcccagtgcctggaggacgcggacgctgccgcctctggcttgatcctggttggtatatgctctatcgctgcgacgttcagctcggcaaggtgtacttcatccgaaccgcgctggtaggcgaggaagagtaa

SEQ ID NO: 367621 - DNA, 1152 bp, Pseudomonas aeruginosa
atgtccaaccgtgatatatcccggcgcgcctttctccagggcgggttgatcgccggcgtgggtgtcaccctggcgccgctcggcagccaggcgttcgctgccttgttcgagaaccaggtgaccgtttccgcccagcgctggatggcgggcaacggtcaggtccgtttccgtaacgacgccttgtccaaggtctgcggcaacaaggtgttcgcccgcgatatccgcgccagggacatgcccggctggccgcagcagcaaggccacgccatgttgctgaagaccgttcgcgccgaccgcatctacgaaggccacgacctttcctggctgggcgccgagttgcagccggaccgtatcgtcaccgccgccgacctggagaaggacggcatcgtcttccccgaggcgcattcgcccgatccgctcctgccgccgggcaaggtgccgatgttcatcggccatccggtggcgatcctgatctggaacgacttcgagcgtttccgccgggccaagctcaagctcaagttcaacgacaaggcgatccgctatggcgcccaggccccgctgtaccagggcgatccctacggcagctatcgcttcgtccgggtcggcggcaagacgccctacgaggacgacgagttctccagcctgaaggactccatgctgttccccaccatcctcaaccgcaaaccggtatggaccagcgagccgaagctgcacggcgacctcaccgagcaggggctgttccatgccaagcgcatggccgagcaactggaaaacccgccgcaggactggctggtcttcgacgagcgctacaagaccccatcgatcgagccggcggcactggagccggacaacggcaacggctggtacgacgcggcgagcaagaccttgcacttcgtggtcgccacccagtgcccgttcgaagtcgcctacgaaagcgtgcacatgatcaagccgtcgcgcttcgccctggagaagttcaacatccatccgggctataccgtcggctacggctccaaggacaacaacatcttcgtcttctatgccgcgctcgccgcgctgtatggcgagggtgtgccggtgcgcctggccaacgaccgctacgagcagttccagagcggcatcaagcgccacccgttcgacatccgctactaa

SEQ ID NO: 367622 - DNA, 1194 bp, Pseudomonas aeruginosa
atggcgcacagagaaaaaactgatgtctctaatattttaagttttagatgccctgatgtggattctagatattatttttatctaactattatgaatctgaggcatattgctacatcttatggagaagacaggcaggttgtagcatgtgagttgctgctaaattgtctccataagtccggggtgtcgaaatccaaagtaaaggtgctttctcctgggacggttcttctggaacccgagagcgttccctttcagagttttgaaagtaagtgtgagcttttgctgggtgctatttatggggagccaataataatggctggggttgatgcggttctgagtgttgagcttggggttgttaaagagagtgatatgtgtctgccgagtaatacacgcggctttgcgatcgttgatgcattattcacagagacgatggtttcaccatgtgtttctatgcgggattggaaagctacgtataaagaccagatgcgaagtgtatatggcttttattcgcgtccttttgggcggagctacaaatatatgcctgtagcatatatacaaatgcctgagttaatcttatttgatgagatgttgctcgatagcgggtcaaacttaggcaatgagtcgatttttagcgcgctagaactaactggtacagttgcttattcagagtatcgtttgtttgagatggtgttggatgtgctgtcgcgagattttttttcaaatatttctattaatgtaagtatggtgaatttttatagtaatgtttggtgggaaagagttgtggatgtattggggcggagcccggagctggctaggaggatatacatagagctgaccgagacttgccctttacattttaataagtttagaggtgagagaaaattgattgagtctctaaggaaaactggttgtcatttggtgttggatgattttgggagcggctactcgagttttggacaggcagaggttctagagccagaaataataaagattgataagaagtttcttcatgcagcacgatctgataagagcaagtacaatcaattaaagagtatagtttgctttagtatggaacaatgcggcttctgtgtggttgaaggtgttgaggatggaaaggatctgtgcatcgttgaaagcacaggggctaacctatttcaaggggagtttctagaaaagtactctagagccgatttgtaa

SEQ ID NO: 367623 - DNA, 2391 bp, Pseudomonas aeruginosa
atgaaatcaaaaaactttaaaaaacgaactccagcgttgaataaagttctttccatggcaactattagcattacagtcctccttgcttacagcaaatctcatgccgcctgcatggtcaatggtgcagatatgtgttcctttgccgatggccctactcctggagcagccacctcatccagttcaccaaatccaacagcaccttggaaaggtatcggcctaggctcaaatgctaaagggatgaacggctcaatttcaattggtgatgttagtactgccgtaggtcttgagtctattgccattggaatcaaatcccaaatcgctaacaatactgcaaatgccattgcgattggacgcatggcatctgctagtgacgcaaataatggtattgcaataggggcaacggctagtgttactgcggaaaacgcagtggctttaggttccggatctatagcttcggagaaaaacactgtttctataggatctgataataacgaaaggaaactggtacatcttgacgatggcgaaattagtcaatcgtcaaaagaggcagtcaatggttctcagctgttcgacaccaatcaaaatgttggccagaacaccgctagcatcgcgaaaaacgctgtcgatatcactaatctgaccaacaacatcagtgatggtaaaattggaattttgcagttatcacccgacggcagcgcgctggtgatcagcgacaaggccaagtccgccacccaggtccagttgggcggccgtaccctcgatggcgtcaaggacggcatcgtggatgcccagtcgcaacaagccgtcaatggctcccagttgttcaacaccaaccagaaggtggacaagaacactggcgacatcacgaacttgactggcgatatcaccaatatcaccgagggcaaggcaggcatcttgcagctctcccctgacggcagcgcgctggtgatcagcgacaaggccaagtccgccacccaggtccagttgggcgaccgtaccctcgatggcgtcaaggacggcatcgtggatgcccagtcgcaacaagcggtcaatggctcccagttgttcaccaccaaccagaaggtggacaagaacactgccgatatcgccaagaacactggcgacatcacgaacttgactggcgacatcaccaatatcaccaatggcaaggcggggatcttgcagctctcccctgacggcagcgcgctggtgattagcgacaaggccaagtccgccacccaggtccagttgggcgaccgtatcctcgatggcgtcaaggacggtgtcgtggatgcccagtcgcaacaagcggtcaatggctcccagttgttcaccaccaaccagaaggtggacaagaacactgccgatatcgcgaagaatactggcgacattaaccacttgagcatttccgttaataagaacgcgggcgacataacaaacttggctaataccataaataacggtaagaccggtctcttgcagatgtcagacgacggaacgaccctggtaatcagtgatagagcaaaatcggctacgcaggttaacctgggaaaccgcttaatcacaggagtagagaatggggcgctgacgcaaagctccaaggacgccgtgaacggatcgcagctttatgaaacagaccagaagatcaaacgcaatacgcacaaaattgaacaaaaccaaagagcaatacaaacaaatacaaatgaaataagaaaaataaattctgaacttatcgtgcaaggtggtaaagttgagaaaattggatcagacttatacagtctagagcagggcaagcggggcgtcttacaaatcaacaccaaatccacagttaaagctccaaaagctagtggagaaaattcacttgctgctggcgcaggctctagagcctcaaatactgacactgttgccattggcaatggttccaatgcttctgaaaaaaattcggtagccatcgggaacaactcccaaacatataaacagaacactatttcagtgggaagaaaaggtgatgaaagaacaatttccaatgtagcacgtggcacagaaaaaaccgatgcagtcaatcttagccaactcaacgaaacattcgaaagcattcaatctgagatttatagcggatatgcaaaactcaacaaatacatttcgaaagtagacaaatcaacaagagctggtatcgcaggcgttacagctattgccaacgttcctcaagtaataaattcgggccaaacctccatcgggcttggtatcggtaactacagaggggaaagtgccatcgcagttggtctatccaaatcgacagactcaggaaaccttatatttaaaggcagcttttcaatagatacacagaataaaggagcagttggtgctggtattagctacctagtagactga

SEQ ID NO: 367624 - DNA, 192 bp, Pseudomonas aeruginosa
atgctgtggatcctggggcaaggccgcagtcagttgctcctcgaggtgctcctgggcgtccagaaacagaacgcgcgacggttcggtggcagtgaccgcatgtgcctggtcagtgatgacccatacttcggcctgactgtgggacgtcaatacaagaagaaagaaaccggcctgccgccagtgagctcttaa

SEQ ID NO: 367625 - DNA, 207 bp, Pseudomonas aeruginosa
atgaacgagaacagttgcgaatgccaccgctgcatcggagagaaagagcttggcactcaaactcccttcggttggtggccactgtctaccaccaaaatgattttgtgttcgatttgtggcaacaaacgctgcccgcatgccagtgatcacgatctgtcctgtagtggcagcaatgagcgtggccagccagggagcatcttcgaatga

SEQ ID NO: 367626 - DNA, 792 bp, Pseudomonas aeruginosa
atgcgctctgagaaatccaacgtggtcggtctgcccatgcctggcacatatcgcgacacctgcgagaagcacggtgagttccacggcaaaatcaccgagatcatggggcgcgagttccgcagcggatgccctgagtgctcgaaggagcgccgtgccgccgaagcggttgccgaagccgaagccaagtctcgcgaagagcgcgatcgcctgaatcggaagcttggtagcgccatgattccagctcgcttcgttgagaagtcattcgacaactacgaggccaaaacaccccgccagcagaaggctttggtggcttgccgtgactacgccgaccggttctctgagcacttcgaggctggtcgctgcctgatgcttctgggcaagcccggaaccgggaaaacccaccttggtgcagctatcgccaacgacctcatccggcacaccaccgctaccgccgtctaccggactgtcggaagtgcgctccagtacatcaagggcagctacgaccgggatgcttcgtacaccgagtctgaggcactcatgggcctcgttagcccgaacttgttgatccttgatgaggttggggccaccaagccctcggagttcgagctggccaccctgttcgcgatcatcaacggtcgttacgaggagaagctgccgacagtagtgatctccaatctgccgccgaaggaactgccaggggcaatcggcgaacggtgcgtagaccgcctgcgcgaaggcggcggggtcgtggtcggttttgactgggaatctgcgcgggggaccaaggcgtga

SEQ ID NO: 367627 - DNA, 162 bp, Pseudomonas aeruginosa
atgaatagccgaccgaggcacgcttcccgggcaatcgtgaaaacctcgcgggtaagcgaccgcagcctgtgcaagaagaaacaccccgatttctcagatgcccttcgcaagaggggcatcgaagaagtcaacgaacaagccaaggaaaccgtggcgacataa

SEQ ID NO: 367628 - DNA, 492 bp, Pseudomonas aeruginosa
atgagtactaccatccccgattcgattaacccgagtgatcttcccgaaatcggccagcccctggccgacggaaacttctttgcccgccattggctcaatggcaaggaatacgcctacgtcgatctcggcaaaagcgccgagttcactggagaatggggcgagtatgaccaggacgtggatggcgccgccagctaccgagacggagcttcgaacacggtcgccatggctgaagctggaagcccgattgccaagcaagctctggagatcggagaaggcgtattcattccctctgttctagaactggttctcctgttctccgccaagcaagcaggcgagctgtctggtttcgcagatcgttggtattggtcgagttcgcagtactccgccaacttcgccttcaccacgggcttctacgacggcgacacgagctacggcgacaaggacaacgacttccgtgtccgccccgtccgcaagattctcatccttcagtaa

SEQ ID NO: 367629 - DNA, 309 bp, Pseudomonas aeruginosa
atgagtcatacccctggcccgtggacgatttctgacgaccacggaaagcgctggatcgaaaccctagcgaatgacgacaccatctgcgagatccatcgccgcgaccggaatgttggtcgccaccgggacgagcagttccacgcgaactccagactgatcgaatcggcgcccgaacttctggaggcgcttcaaggaatgctcgaagtgtacggaggacagtacaacgacgaatgccttccaaagtcttcgactgaactcgaattgatacagcaagccagatccgcaatcgccaaggccactggccaataa

SEQ ID NO: 367630 - DNA, 252 bp, Pseudomonas aeruginosa
atggagcaagcaatgagagaagagtttgaagcgtgggctaccaagcaccggatgccgattcatcgcgacggtgttgtcaccgactatgcagccagatgcacagatgaatgctggcaagcctggaaagccagccgcgcggctctgagggtggagttgccggagccttacgcttttcatcaggaggttcagacggtcttccgggatcgcgtgaaagaagccctccagcaagccggaatcgaggtgaagccatga

SEQ ID NO: 367631 - DNA, 375 bp, Pseudomonas aeruginosa
atgacagaccaagcagagatgcggaggctggccaaggctgctcttccagcatcagaatggttcagggccgaggacttacactgccacccaaacatagatattccggcagcaaaactcatagcagcattgccaccggaaaaaattatttccttactggataagatcgaccggctaaaagcggagaacgaggtgctgcggagagcgctacaggccgttcaagttgaggtcggcgggaatctccgcccacttacccgcgacctcgtgaacatggtcagcgggttgaagaacagcagccgcccgaatgacatctacggccactgcgacgagatcgaaaggatcatcgacgtagtcctttccataggagaagcgcaatga

SEQ ID NO: 367632 - DNA, 327 bp, Pseudomonas aeruginosa
atgaacgaccgcgaactactcgaactggcggcgcgggcggcggggattgatcctgccctggctgaaccgatcaatttcagtactggggttgaatattactggaacccgcttaccgacgacggcgacgcgctgaggctggctgtgaagcgcgggctcgtagtcaccccggaccgagaaaaccagcgaaccctggtatcgaacaaagcaggccacgaatactgcgcgatctattgggacaagctaggcgagatggcagcgacaaggctggcaatcaccgaagccgcagccgcagccgagatcggcaagtctatgggaggtggggaatga

SEQ ID NO: 367633 - DNA, 954 bp, Pseudomonas aeruginosa
atgagcgaatataattttcgtgagcacctttcagatgagtttttgattgcccagcacgatgttgtccggctgctacttagagctccatatacctataagcgttatacgatccccaagaagaatggcggggtaaggcatatcgctcagcctgcgaaagaaacaaaaataattcagcggtttatgatgggtgaatggttttctaaactgccagtccatgagtgcgcagctgcgtataaagatggcgccagcattaaagacaatgctgagcggcatagtgggtctatatatatatcaaaatttgattttgttaattttttcggatctataactgaaggggatattaagagaatactgtctcggacgtttggggggcagttgtcagaaataagcatcgctgacatggcaagaatgagttgcatccgagacagagcaactggtcaattggtgctgagcataggtgcaccatcttcacctgtactgtccaatgctgtgatgtttaattttgattcggtcgtgaatcagtggtgctcagaacgcgatataacatattcgcgttatgcggatgatctgacgttctcttccaacaagaagggaaatacgttttgtgtggaagagtttattaagggggcattgaaggaactatctgagccatcactatcgctaaattcggacaaaaccatacatgcgtcgaaaaaaaatcagcgccggatcaccggcctagttctgagcaatgatggcaaggtgactatcggacgtgatagaaaacgactaattagtgctatggttcatcgatttgcacacggtgagcttgatgataagtgtgttgcccatttacaaggcctgcttggctttgcacagggcgttgagcctttgtttatttccaggcttcgaagcaagtacacttcaaaagttattactgaccttatgaggttccgaagcaagaagctagattga

SEQ ID NO: 367634 - DNA, 1002 bp, Pseudomonas aeruginosa
atggagctcttcgctttcctggcggatgatggtgatcatctgccgcaggttctcctgcatctcgcccaaggcccgctgcaactgtccggcctcatcgtcgctgtcgacaccgatcggctcctgcaggttgccctgggcgatcacccgggccgaggcgaccagcttgcgcagaggcttgaggacggcacccagcaactggcgacaaagctgcccgaggaccaggcaggcgaccaggatgccgcccgcgagcatccaggcggaatagcgcatgctgtcttcgcgcgcccggttggtctgctcgacgtgtttctcgatcaggctgctgagcgcttcgttgcgcccttccagctccttgaaggcctggacgaactgcggcagctcggcccgtgccgccacgggatcgagcaacgccttgccgacgatgctctcggcggcgccgatgtaggcttccaggtcgggccgcaactcgaccagcgcctggtggatggcgtcgttgagaggcagcccctggttctgctcgaccaccttgcgaaaccactggctgtgctcctgcaggtcctggcggacctgctcggccgccgcgccgtcgccgggctggaccacgaacgccgcgaggacgtcggcgcgcaaggcgtcgtgcatcatgtcgccttccatgtggttgcgcagcgcattgacgctcagctcgttctccgacagtgccttgcccaaccgcaattgcccccagaagccgaccccgccgagcagcaccacagcaacgatgccgatggcgcccgaagcgaggatcctctgccgaatgttcatccctgggctcctttccgtgccgagatatcgctaaggatagtcaaccccagacaaggcgggactgcccgaacgaagagctattcgggcacggagcgggagacgccggccattctcaggaagctgccggccgctcgctctgttcggccgtcaactggaactcttcgcccgcatagtaggcccgcaccttggggtccatga

SEQ ID NO: 367635 - DNA, 957 bp, Pseudomonas aeruginosa
atggccaacgacaagcggacttcgccccccaccccccggcaaccggccaagggcggtgcggcgggcaagcgccaggggcatgcggcggagggcacgcgcaagccgcgtgcgcgcggcgaggagcggaaagagaaaccggccgacggacgttcggccacggcgctgaccgccaacgagcggcgggagatcgacgacaagcagccaccgcgcgccgctgtcctgcacgaggtgattcgcgtccagggcgaacacgagttgcagcgcacgctggcggcactctggtggtcggcggtagccgcggggctgaccatcggcctctcgttgatgggcatgggcctgttccgcgctgccttgcccgagcaggagtgggcgatcatcgtcagcagcttcggctatcccatgggcttcctggcagtgatcctcgcccgtcagcaactgttcaccgaaaacaccctgaccgccgtgttgccggtgatgaccgagccgaccctggaaaaggcctggcaactgttgcgtctctggagcgtggtgctgttcggcaatatcgtcggtacgctgctgttcgcctgggcggtgctgcatctgccgatattcaatgaagcggccgacgcggcgttccttgagatcggccgcgaggtgatgcacaacgacctggcgcaaatgttcgccaagggcatcgtttccggctggatgatcgccaccatggtctggctgatcccggcggcggagggcgcgaagatctggatcatcgcgatggtcacctacctgatggcgctgggcagcttcacccacatcgtggtgggctcggcggaggtaggctacctggcgttcgccggggaaatcggctggaccgagttcctgctgaagttcgccctgcctaccctgggcggcaacatcgtcggcggtagcctgatcttcgccctgatcagtcatgcgcagatccgtagcgaaggttga

SEQ ID NO: 367636 - DNA, 210 bp, Pseudomonas aeruginosa
gtgagcatcaatgaatatgattggtcgaatgccaagctcacacgcgcctgtgatttcctcgaagcattctgcaaatttggttgcagagcccgcctcgaatcgatgggcgaaattcttgttgtattcaaatcgctcaggatcgcgcgcgagaagcaaatcgtgcagttctctcagtcgagagagaccggtttgcagatcccgctcgcttaa

SEQ ID NO: 367637 - DNA, 243 bp, Pseudomonas aeruginosa
atggtggagggcaatctcagcgccagcaccatcaataccctgttcggcgacaagcgcaaaaaggcttttgtcgtccccgttgaagagatcgtcgccaacaaatacgacctctccatcaaccgctacaaggaagtggagtaccagcaggagcagtacgaggagccgaaggtgattctgaaacggctcaaagggctggagcaggaaattctggcggatctggatgagctggaggggatgctgtga

SEQ ID NO: 367638 - DNA, 1329 bp, Pseudomonas aeruginosa
atgatttttagtaagcaagagcttaggcagttcaagagaaatcagctagatccagatagtgtaaaagttaacaaggcttcctgtcttgcatgctctaacgtgataagtttcacgcaagtttttaccaaggagatcaaggcggtaataactctacctgcgcaagatgatgagggctatattcttggtgtatgtaataattgctcgcatcagtttagcattcatgtaaccaatcctgactatagttcgttctccggtggagcagagttggttgggtatatcctcaaggaagaagcgactgctgaggatgctctaaaactggaagctttcccgagtctgacgcaggttttaagtcgcgaacttgatatgaatcggcgttctcatatttatgaatatgctggtcgttctatctatgaatgtgaaaaatgtagcgccggattagaagaaaatgttcttgatgctttgaggggaagtttcagaactattttttctgagttttcagcttactggaactggtccttgaaaaatggccgaggtctcccaccagaatatatgtttatacgcatgcaatttaattgttcgtgtgggtctgcctgtatcgcctaccttagcaaaccgtacgtagaaagttacgattttgacgagcgagatttctcgatatgcaatatcgtaggcgctaaacctctggccatggctatttcaccaggggtctattctaagagccaaataatgcaatggcttcataagttattagcgcgttggacagttttgttcgatagaatctatattattgtgccgtttgtggggcatcaatggatgaaagaccaggagttggtagatacttggcttgagctaatccttcgagctgatcctagcaaggttagtttggttactcggaagggacagttgacttctttcaagaacgcttatcagcgatctaatggtatcgattattcattgttggaaaaattggatttggcttcgcgtttattgcgcgaagtggttccagactctaagtttcacgcaaaaatttatggtgctgtgtcgaagtccggttgcgaggttttcagcggttcagcaaatctcttaagtgggccatctaaagaggttatgcattttacatttttggatagtatgaaagacttcaatgatgcatttataaagcctctggatattaagttaaaaaaagagcgggtgaagccccaagagcgtcactctctcatttttgatagcgccaataattttaatacttttgggggcgccagcacggtacgcagcagcgagtatcgaaatcttatgctcttcgacaagcggcctcaaagagatttctga

SEQ ID NO: 367639 - DNA, 942 bp, Pseudomonas aeruginosa
atgaaaaaacaatcaaccatagccatttgggaagggtgtggcgccaccgttgcagaggcgatagaacagttccgtgaccgatggagcgcctactccacggcctcgaaacgctatccaatcgcaaggctggtagaggagctaatcgacccggccgtagcggcgtacgccaaagagattcctgcgcgctaccaagggcatatacccggagccggtacaggcgtggcgttcagtgcgatcatgaaactggtagggtttcccgccatgatccgcttgcagcgccaattgctacgcgcgtttgttttgagccacgaccaacagtcgaagaaagatcgcagctttattgcaacgcttgagacgctgattgagttggtgatggcgtgtaagcgcaaaaaaccatcatctgaagctgtaggcggcttaaacaaccagcgcttgaagggcttttgtaggttctgtggcactcaagccgagctagcatccttcgctactggagaaggtcagcgcgaccccgacgagtacctacgtctgagcaacctttactgcacaacgcatcgtccaaagacgcatgatggcagctggaatcccgcgtacaggcaagcaaaaaggtccgtagcgcagtttgacctggaactggcgagattgagcagacagtgcgctatacgagcgaaacctcaggcgaaatcaggtgacgagcttgtcgactcatatttcttccagtacatgctcagcctgacggtacaggtagccgatgaagctgagctcagaaatatcgctcgcgtcatggtcgacacaagattttctgaccgcaagaaacagatagttgtgctccagaaactcggtttcaaccaatcagagatggcgcgcaggctgcagatcgagcgccaggcagtatctaaagctctccgctcaattcctgattgctttcgacttccaacagcatga

SEQ ID NO: 367640 - DNA, 1290 bp, Pseudomonas aeruginosa
atgtatcacgatagtactaggagcggttttttctcactgctcgtcgattctcgtggtggaaagcggcagtcctctcaccgcttggctgacatgccaaaagtgcttggtgtgttggacaaaaacgttgacacttggatttcgcaggctgagttcatccggcccaatcggcgcgtcgtcaatctgttgcggctgggccttctgttcgctgacctcgatacctaccacgtgcccgcgttggctagtcgaaagcccgacgagctggccgcctccgtgctgttcctttgcgccgacgcggggttgcccgtgccctcgatactgatctacagcggccgaggtatacaagccaaatggctgcttgagggcacgatacctcgtcaagccttaccccgctggaacgcctgccaacgctaccttgtagatcgccttgcccacgtcggcgccgaccccatggccaaggacgcgagccgtgtgctgcgcaccgtggagacagtcaacagcaagagcggcgaggtctgccgcgtggttcacgtccagacgggaaccgatggccagccaatccgctacaacttcgagtatctggccgagacactgctaccggcggcccgctggactatcgagcagcagcggcaggaacaggccgagagccgcaccaagaaaaagcctttccttttggtgcccggaggcaaagccgacaacctgcgcggattctcaggtcgccagcttgcttgggatcgcctcgaagacctgcgcaagttggccgagctgcgcggcggcgtcggagaaggcagccgcatgcagcacctgttctggcggctcaacttcctgctgctgtccggggcaaccaacagcaagcagatgtaccacgaagccgccgctctggcccgcgaacttgatccgcagtggaacagccgttccaaggagctcatgactctgttcagcaaggctaaggcttttgaatcaggcgaacgtgtcagcttcgcgggtaaggactacccgccgctatatacgcccaaaaatgacacgttgataaacctgtttgggatatccacagatgagcagcggcagcttaaaaccatcatctgctctgagataacgctagagcgtgatagggcgcggcaggaggcacgtaggcgtgccgccggtgccgtcagccgcgaagccttcctgaaagcggcagagggccgccgtgctcaagcccaagcgctaagaaccagggggttgagcgttagggatatagctgcccagatgggggtgagcaagtcggccataggtcgttatctaggcagctga

SEQ ID NO: 367641 - DNA, 795 bp, Pseudomonas aeruginosa
atggatcaggaatcaggaacccccttggcttatgcctcccgaaagttaggtcaaaacgtaagacttgctatcgcgatggcaagcacatttgtcggagtgggtatttgcactgcgccttcccctgcttacgccatctattgcgcaaattgctcgacgttctatcaacagatgttcgagtatgccgaacaggtcaacaccgcactaaacacagccgagcaacttaaaacgcagatacagcagtaccagaatatggttacacaaggcactggtctatctgattcgatgttcgggagcatcgctgccgaccttaaaagtgtggtcaacatctatcaacgttcgcaggcattgggccgtcaaatagagaacatggatacacagttcaatactgcgtttccaggctttgaatcctaccttcagcaagcggcaaactcggcagaaactccgatgcgagatcgctataaagaatggtcggagcaaggccgcgacaacgcaaaaacagcactggaagcggcgaatctcaatacgagcactttccaatcagaagacgccctgcttcaccgcatggtggcccgttcgcaaagtgccgcaggacggatgcaagccattcaggtgggcaacgaaatagcttcgcagaacgtgcagcaactgcaaaagctgcgtgatctggtggccacgcaaatcaatatgcagggcaattacatggctcagcaaggagatcgaaaagccgctagcgaagcagccgagcagcaatttgaatcgcgtgaaagtaaacgcggcggtgtgaaggggtactga

SEQ ID NO: 367642 - DNA, 2340 bp, Pseudomonas aeruginosa
atgaactggcaaatttccaaaattgagatttcaagctttaaggctttcaaacaaatccatctggatttcggcgactcatcactattgacattggatggccctaacgggtttggcaaaaccagtatatttgacgcgattgaattattattaaccggcagtatcaaaagaatttgtcatttgttcaccacgttaatgatgggaaatagaacaaattacgaggacaacttgctttggaataaccgctccggcgacaaagacctagcaattaaaatagagttcactaatggctcacgcaagctaattctagcgaggcatactcccgcagcagactttgacgagaaatcaaacaatcgagcagaccagtttgctcatctcatgctttacgagttacctgagttctcgtcaaacgattatatacgagagaatcttcgtagcgaaagcttcattgaggagctattcggcaaaaactttaaagaaaatttctcttacttaaattatctagagcagggccaaaaccaactcctccacacgcgagtagacaagcgcaaagaagcattaaacaatcttttcaatattagcgacgtaaaagcagatagagataattgcaaggccatcgctttgcggcttacaaagtttattagtgatccaaagcgtgccgcagatttgtcaaggctagagtcggaagccggcttactgaagggaatgattcaggcagacttaggagcaatagaatatagaaaatcctctacagcagcgctgcaacctggctgggacaaggagaaccccttccccacatactctgcggagatccatggagaatacatcgagaccatccaacgccttcaaagactggctcaacaaaaaggagcaatacagtctagagacaaaaacgagtctattgaaaattatatcgagctgaataaggactcgatcaagtgtctggcgcaattcggcactgacctgaacaaattggatggcctggaagccaccaaaaatgagttaaatgaactgctcaaacgtggtggcattgtcaaacgcggcgctactgtcatcaacgccgatgaggccaatagccttactggatggttccaagggcgtttggaatggttccttgagcaaataattacccgcgacgcgcttcagcaaaagagcagtgccaacaccaaagttgcagccgagctgaatcgtctgaaagcagaactggtggctgagcacgctaaactctatcccgacgatcagcattgcccaatgtgcggagccgactggcaatcccatgatgcgatggtacaaaagattgaagtcaggtcaaagcagatcaatgaagcgctgagtgctgatggccagaccttgataaacctcactgggcagatggctgcggagctgactttaattgaagctcaaatccaaggccgggaagcggagctatccgtaggttacaacagcgccctacacaacgccctgctccgcgaaaaagctcgcttaccggcgattaatcaactcgccgcccggcttcaagccttaggcgtaccaattgactactcgttttctgaaaatgacgaggaggtagacactcggactcaagctttgacagcgttcatcagaagtcagaaaacagccgagacagaacctcttccgcaagattggagaaatgtgatcacatctgccttcaaagagctgcaagatttctatatcgttgagcctcaaacgttgagagacaaagagctttatatcatagctaaagcaaacgaggcgcaaaacagcaggctgaagcagtgtcttgatgagctacagatcattcagcgtgaaacaaaagcagcgcaaattgctaaagccaaggtcaacaacttaaagtccaccttagagaaaacagagcgcagttactctgaacaaacgattgctgaaattgagctgattttccacatatatagtggtcgactcattcagaactatcagcgtggcttgggtttatttattgaaagtaaagatggtaaagaactcaggttcctcacagcagaaaaatctgagtacgatgcgattttgtcgatgagttctggacaggtgtcagcactcagcctaggctttttcctctcactgaatcgagtttattcaagcgtaccgcttatcttaatcgatgatccgtcccagtcgttggatgaggtcaatatcgcttctttaactgatctacttcgctgtgagttcagcaatcgccaattggtagtttcttcgcacgaggatgatatctcctcgtatatgcgttaccgattcgccaaagctggcctgagcacccgatcattaaacatgcaacgcctagctaaagaagccttagtctccgctggctga

SEQ ID NO: 367643 - DNA, 666 bp, Pseudomonas aeruginosa
atgattactgacctcattcaccaagccctagatgcacacaacttttccaaagtacatgagaacgacactaccggcttctatgttcgagaagatggtaccgcgatcagatttgcagtcttgcacaggttagacagtttaatgaagcctggcgacctcaatgccaccattaatcagtcagcaccggtagagtttataacaaacccagcctttaaaaagaattgcgatttaatttgcattcatcaccttgacaagcttgccgagttcaaaaattacgaagagcagatttttgaaatagaagaagatcctcatttctataaaaaatacgtgctttactatagcgacacagagattgaagcgattaagggattcaactttgccaagctgaacgaattgatttcagacaaggcacagttcgacatatacaaaaacgaacccacagccgccactaaatacagcgcagccgcaaagatattcattaagctgccatttttggcgcttcacataaataaagcggaactaatcccccttcgtttgcaaattgacgaggcagtggccgaggccgacctcagcaagacctatgaaacgatacagaaacatggcctattaaatgtggaagacttgatcaaggaactgattaacgatgaactggcaaatttccaaaattga

SEQ ID NO: 367644 - DNA, 1227 bp, Pseudomonas aeruginosa
atgagcgacgaggaagcaagcaagtacccacatagcgcaatttccacttggagcggattcgtttaccaaggaaaagtagcgctttaccattgtctgaaacttatcaatcaaggcgactgtgatttccagctacagctcgacagcacagacgattttgccatttataaaaacaatgaagtaataagcgcccatcaggtaaaggcaaaaattggtgactatcgcagcaactacaaagacgctttaaaaaagtcagctttaatagaactcgacagagtcgctggaatcaaaagatatttccacatatcccaacctatcaacgatgatagcgactatatagaccccaataacgagcgagttgaattttacgcatatggtgatgtacgccactgcgaacttgacaagattgaagatctaacaaagcagataatcaaagaaatttacgcccgacaagcggtagtctacgatgatagccttgtagacgccaactactgtctagcatctgataaaattagctctcaagcgctaattattcacgcaaagatacaaaatgaaggcgacgctcagcgtatagcagcttacgaacatcgggtgcctgcggaaagcattcttaaagacataatggacgcgaatccatacgaaagaaaagactattacgcgatcgagttgaaggcgcgcctacacacgtacttggaagagaggttagctgaatcgctcccaggtatgtcggacgcggcatacgaacgagctagacgtatctacgagcttataagactctctgagggtggcgacttcaaaatactttgtcaacttatgaagccgtcagaaaaattctcacgcatacagagttcagatatacgtcgatactcagacctcctgcatacaatcagtgccgagcccatcttaaaacgactaccgcactatttagacaacgataataaattctacgcgcctacagcattatacctaccagaaccaacagacaagaaatactgtacatctgaaattatcgcagaaataaaaaacaatgatgatttaggcaggctactattcgaatttaacaatcttattgcagccagggccaacgagagtttcacaatcgatacaaagtatacaaactatctcgacacaatcacccctgacgatcagaatcgcatcgacagcaacattaccaaaagtttgtgcatcagcattttaacaaaagacgacgcagaggctcgacttaaatga

SEQ ID NO: 367645 - DNA, 645 bp, Pseudomonas aeruginosa
atgcgggagacgcgtgtcagcccccttttggctgaaatcgtgaatgttatgggtcacgaacgcaaacacgtcatcttctttgcgctcggctatcgcatcaatgaacgtctcgattatgatggcatccccaatcccattcatttgccggtgaaatggggcaaccttggcgatagcccgatccgccgcacgtaccttgatgcgatcgctgacagggacaggggacgcttccccgatcagcttttcgatcaattccaccgcctcgttcacagcctctccgccagtagcgactcgatggtcgacttcgttcagctgtctcagcgtggcatctcgaccttcttcgggagcaaattgcataattgcctccctgacacgcttgaagtgactggaaaggcttgctcgacttgtcgccatgactcggtcgcgattacgagcaaattcgtcaatgacgatctgcggcatgatcagaacgacctccccagattcagccatcgcagtcaacgcgtccagcaaaggcaggtgtctggggtctttcgtaaggtcaagccatacagatgtatcgatcaacaggttcaatctcattcgcgctcgtcccctgtcgtgcggacctttattgtggaatcccttccaaccaccctttgcagctga

SEQ ID NO: 367646 - DNA, 1113 bp, Pseudomonas aeruginosa
atgaaaagagtgcttaccgttggccttaagtacactggcacacctattgaaggcgttgagttcgataatcttggcttgtgcaggccatcagttgatcaggatcgtgccgcatttgccttgtatgagtacgacgttatcgtcataaacccaaagagctattcgcattttctgttcggagaggaaggtgagttctccgactcccctactgaacttggcgacttgaagcgcaaaaaggatgcatacgaccttgattcgttattcgatagtacggatcgggaaaatgagcttgaggcagcgatagcaggaggggccacggttatatggtgcctttccgagccaaagcgaatgaacttcttcggctaccgggagacttcatacggctatgcggcaccgacggtggcccgaatggtcaagcggagtagcctccagctcaagaaaggacgcagaataaagagtattgatccagaaagccccttcgtgcggtattttgagtccttggctgcaacaggatggagtttctgtttggcagacaatgaccaagagggctattcatcaatcgcatctacgcccgaaggctatagcttgggtgggcggtttgcgttaggaacgacaaccggctgggtcatcacgccaccttcatccgaagccgcagccaacagactcatcctagatgccgttgaattagagaaggaagatcctcgtcacgagaaataccacggcatctttctcagtcatactggcgcggataaaccattcgttcggcaattgcggaaagacttgctcgaacacggtgttcctcgggtgtgggtggatgaagctgagattgatgttggcgactcgcttacagccaagatcgaagaaggaatgaaagaaacccgatatatcggcgttgtgctgtcagcaaagtctataggtgcgccttgggtcaagaaagaacttgatatcgcgattaatcgagaaatcactagcggcgaggttgtcgtactgccgttgctgtatgagaagtgcgatcttccagcgtttttgcagggaaagctctacgcggatttcactagcactgaggaatatgctgatgggcttgccaagttgctgaggcggcttaggatcaaatag

SEQ ID NO: 367647 - DNA, 303 bp, Pseudomonas aeruginosa
gtggcggcagcgtactcgttggcaaaggcattgaagacggtcagaaaagcgcgtggcttgagccaggaagcgttctccgacgtgtcgagccgcacctacatgagtacgctggagcgcgacctgaaaagcccgaccatcagcaagctggccgagttgtgcgaggtcatggacgtgcatccgctcacgttgctgacgctggcctatgctggcggcgagcagcacaagatcgagaaattgctggcgcaggtggaacacgagctgcacttgatccaagcatcaacccagaataccgataggcaataa

SEQ ID NO: 367648 - DNA, 207 bp, Pseudomonas aeruginosa
atgttcttgatcgctctggtcgatttgatctactacgccgaccaagctaatgtcttcgagcgtaaccccaatttcttccaatatttctcgccgtactgcgtgctcaatgggctccatccactccactttaccgcctggcataccccagtgccccgcttcaggatcgcgccgccgctgaagcaacagaatcttgtcatctttaattaa

SEQ ID NO: 367649 - DNA, 636 bp, Pseudomonas aeruginosa
atgcagcgtgatcaagtgtccccgcaatccagcaagccaccggctggacgtccacgtagcgaggaagctactgctgccgccttagaaaccgccttagcaattgccttcgaggaagacctgagcaaggtcaacatcgagcatatcgctcaaaaaagcggcgtctcaaaggctgcgctgtatcggcgctggcccaatgcatgggcaatcgttatggaagccttttttaatgatctggcaccttccttggtatatgacagcgaaatcagaatcaccagtgctttcaagatggtggctaaaaacctaatcagagaaatgagtggcccgaggggagttcttttatcgaaactgtttgcagcagcgcagatggacgccagcttgcaacgtgccttcttggagaagtggatcaatccaaggcgtgatgctgcaaaggagattattgaaatagccaagcagcgcggcgaaataaggaagaacgtcaatccagaaatactaatagatacaatttacggggcgatctactaccgcatgacgattccgcacgccccagtggaagagacatattcaattgatcttgttgatatgattttttctggaattttgaccccatcgcccgcgcaacgatttgaacaggaataa

SEQ ID NO: 367650 - DNA, 915 bp, Pseudomonas aeruginosa
atggatttgcgtcatctccgctgctttcttgcagtagctgaagaacttcatttcgctcgtgccgcgcaacgtctgcacattgatcagtctccgctgtcccgcaccatcaaggagctggaagagcaactcggtgcacgcctgttcgtccgcaccacccgcaatacgcaactgacccgcgagggaaggctgttccttgagcacgttccgcgagtcttcgcggccctggaacaagctcgcgatagcgtcatgtccgccagtaacggctttcatggccggttgcgcattgccttgtccgatggcgtaacgccctcgcgcctgccggcgttactagcacaatgtcgcgaagaagaccccgaggtagaggttcggttgtgcgaggtgcccctggcccagcagatcaagggcttgcacgacgacctgtacgacgcagggttttcgatggctgaggacccgggcgacggcattgtggtcactccagcgtgggaagacgaattgatggtggcggtgcccgctcgccatcctgtgctcgccttcaagcaaatcccactggaggaagtgctgcactatccgctggtgctgggtgatccggccgtgtgcgaaggtcatgcgcgccaggttgaacgctttcttcgcaaactcgaaccggagccactgatcgcgcagcgcgtagcgaccttcgatgtgatgatgacgctggtttccgctggactggctttgggcctggccggcgcggcgcacatcgcttccagccgcgagccgggcgtcatagcacggcgcctggcgggcaccccgcccatgctcacgacctatctgctgcgtcgtgccgaagagccgtccgagatgttggcccggttcatagaacgagtggccttcattgatcccgaggatgaccacggcactgccgaggatgcctaa

SEQ ID NO: 367651 - DNA, 228 bp, Pseudomonas aeruginosa
atgaacaaagtgatgctgctgatgctagccgccgcgctgaccgcatgcggccccgctcaaccttcggaaaccgtggacttcctcgtggcccatcccgagcgcatcaaggaggttcaacggcaatgcaaggaagagcgagccaaggtcggtgaagaacgctgccgtcgtgctgccgaagcagccaacaggcgcttcttcggtgatcgaccggagcaaaaatccaagtag

SEQ ID NO: 367652 - DNA, 963 bp, Pseudomonas aeruginosa
ttggtggatgcaattgctgccgcattcaaggcggccaagcggaagtatgatcgtggccagcctgcgctagccgatgtgttgaatttggcgattgagtgccttcaaacgctggagcgcaacgctagctatcgtcgctttggcatgttctcaggattgcccccaaaggaatactgggtagctgaggcgaacacgggccgcacgattagccgcccctttaggcccgatctttttatcttccgcctcgatgacttcgctcaggtcgccaacctctttgtagaagacatgcaggcatcccgcctggacccagtccgatttgaccgagttatctacaccgcggtaacagctttctgtctctgctatgacgtttggaagcccaagagcagaaaaactccaggcactttttttgaagtgctgatggggtctgctgctgccctctacttctccgactccgtgctcacaaagcacattccgatcaccggtttgccagtggccgaaggcgctgacgtactggaggaagccgcaacggatgatgcctcggatgaggatggggtcgaggcagtacagggcaattctgtatccaccgacttggtgttaacgagccgcatcacgggtcgtggcgcagtggtaccactgaagatcactacgcgagagcgaatcgtacagcctttcgcccatcagcgaatcctagactcagctcgccccggccagttcgctagcttccttgcctgtatcagcgaggtgcaaagggacgacctcaccaattcggtgaaacaggtgtgcgtccccggcacggtggctcttttccaaaagcatctcgctgctttgcaggggctctattactgcgacataccagaccgttacgcccgccccgatgttggagcggtcatcgcggttaaaccgctgcacatgctgtttagagacattgaagcccacttgcgcattccgttttcgaccttcgtgtag

SEQ ID NO: 367653 - DNA, 1065 bp, Pseudomonas aeruginosa
atggctcttggactcagcagggctgggttcgatgtgcgcctggccttcgacgtcgttgaggcccatgttaagacccacaatcacaacctcggcggacacgccaaggttctggatgcgagcaaggtcactggtgcggaattgttgcgtgccgcaaacctccagccaggagaattggaccttttttcaggcgggccgccctgtcaaggcttctccaagcaacggcgcggcgcctccgtgttcgacgatcctcggaatcggcttgtagtccacttcgcccgcctcacgaacgagatgaggcctaaagcgttcttgttcgagaacgtggcaatcttcgggcaaaagcgcggagcgaagcacattgaggaaatggaggagatgctatcggactaccacgtgcactgctttcaagtgtgcgcggctgacttcggtctgcctcagacccgagagcgcttcatgatgatcggccttaggagggacgtgacaaacgctgcgcctgtcttagagcatgcatcgacccagtactcaatcaaagacatcatcagcgaccttccgcctccacctgatgactacagcgagcatcccacctatccgaatcaccaaaaatgcaagatcacaaagctgaatgaggagcgcttctcgcacgtccctcagggaggaggctggcaggacattccatgggacctacggttgccgtgtcacagggtaacagacgtgaagaagggtggatggcccgatgtgtacgggcgtctacgttgggacggccagagtcccactattaccgtgggcttcgacagcttcacacgtggccgattcggccacccggagcagcaccgggcgattacccccagggaggcagcccggattcaaggcttcccagatagcttccggttcttgggcactcgcatggacgttcgcacgcagatcggaaatgcagtcccaccaccactggcagaggccgcaggacgcgcgatcatgagagctcttgagcagctggaggctgatgtcaaaggcacaaaagccgtgcggcaattgcatcaaggaaagcagcctcaacttgttttttga

SEQ ID NO: 367654 - DNA, 243 bp, Pseudomonas aeruginosa
atggccacctactaccagtacacccccggccaactgaacgccgacgagctcgccaagctccacgccctgcccgacgacgcgctcctcaccgcccaggaggcggccgaggttctgcgcatcaagtacacgaccctagcctggtatcgctgcaacggcggcggacccgcgttcgttcgcgtcggccccaaggtcatccgctaccgcatgggcgacctccgtgcctacgtaacgacgggggtctga

SEQ ID NO: 367655 - DNA, 2040 bp, Pseudomonas aeruginosa
atgcaacagctcacgggatcaaatcatgtcggagcccgccgcgcgctcgaaccatcgttcgccgagatgacccgctaccgcgaggccgggttcgacctgatcccgctgcacgcatggcacaagaaggaccaacgcggccgggatcgcggcaagtcgcccatcgatccgacgtggcagcgccgcgcctactccgccgactccgtgctcgaacgcgcccgtcacagcggcctgaacgtcgggttccgcatcccggccgacgtggtcgtgctggacgtcgatccgcgcaatttccccgatggacgcgacagcctcgccgaggtaacggccgcgctgggcatcgacacctcggtcgccccgcacgtcgtgacgggcagcggggggcaccacttctacttcaggaagcccgccgacgcgcagacgctggagagcctggagcagttcccaggcatcgagttcaagacgctcggcaggcaggtggtcgcggcgggctccgtccacccgtgcggcggcgtgtaccgctgggacgacttctcgcccgacttcgcggacatgcccgacctgccggcgacggcgcttgatgccgtgcgccgccccgtccgcgaacacctgggacgcgaggcaggcgagctcacgccgcgccagcttgagggggcgctcgaatggctcgacccagaggacttccgggaccacgatggggagtggctgccgctgatgatggcctgccaccacgccaccaacggcgaagggcggcaggagttcatcgactggtccacgcaggacgcgaagtacgccgacgacgcctgggtcatcggcaatcggtgggactcgctgcacgcccgcgctccgcgcggcgagcccgtgaccgcgcggctgctgcacaagctggtccaggaggccggtgggcaagttccgaaccccgatcccgaggatgacttcgacgtgtgggacggcaccgacgagcccccgcagaagcagacccgctggcacttcctgaccatagacgagctggaggctctgccgccgccgaagtggctgatccccggtgtgctcaccgagggctgcctcgcggcgatctacggcgcccccgagtcgggcaagtcgttccttgcggtggacatgtcgatggccgtggccgggggcatggactggcacggccgcgccgtcgagcggggcgcggtcctctacatcgcggcggagggtgcgccgggcctcggcaagcgggtccgcgcctggaagatgagccggggcgctcaggggcaagccttcgacttccgcctcatgcgcgacgagctcaacctcgcggccgagaaggacggggccgtgcgcgccttcgtgaaggcggtggccgacgagctcggctcgctgaagctgatcgtcatcgacaccctgaaccagacggccgcgggcgcagacgagaactcggcgaaggacatgagccgctacatagccagcatgaagcggctgcgcgacacgaccggcgcggccgtcgtggtcgtacaccactcgggcaaggacgcgagcaagggcatgcgcggcagcacggcactgctgggcgcgatggacaccaccgtggaggtggagcgcgataaggacgggcgcgccatcaccgtgagagttcagaagcagaaggacgccgagcgcgaggggccgatgcgcttcaaccttgagaaggcggacaaatccctggtgctcaggccgaccgtgatggccgacgcggcctccgacttcgcggaagaggcagcgccgagcgacggacttcttgccctggcctgcgagttgggagcggcggccggcacgctcaaggcagccgacctcgtggacgccgcgatcaagcgcctaggcatgagcaagagcacggccaagcgggccgcagcggacaaggtgcccgaggggcgcatcgacgccgtacgggcaagctgggacggtcgccacttctggctctggtgcgagcgcgtcggcaagcacgccacggcgccgaaggtggtgcgggtcgaggcagctacatacgcccctgcgaactctcctgaactctcgttttga

SEQ ID NO: 367656 - DNA, 249 bp, Pseudomonas aeruginosa
atgacgagtgagacgctgaccgtcgaggaggcgctgctgcgcgccgagcagatcgaccgcaacctcgacgcctttgacgagacggcgccgaagacggtcaccgcgatgggcgggcgcgatgccctggcccatagctgcgagatgacctgcatcggcccgatcccgcgcctcgatgagggcgagtggcaggccatgtcggacgagtacgagggcaggcgcgagcatggcgctgtcaaccgcgggcagtaa

SEQ ID NO: 367657 - DNA, 447 bp, Pseudomonas aeruginosa
atggcgctgtcaaccgcgggcagtaacgggcaggccgtcgccatcgaggtcgatggggtgcgataccccagcgcccggcaggcagcctctgccctcgggctgcccgtctcgactgtgctgcgccgcgcccacctggaccactggcccacctaccgctggctcggcgcgacgcccggcaagcggcacgtgaggacgcccgaggactgcgaggtggcaaaggcgatcatcgagccgacaccttgggcattcgacggcggcgcgcgacgcgccaacgtcctagaccccaacttcgacccgccccgcgtcatccggcgcgtgggctgggtcaggtgcatgcgatgccagcgcttccacttcagcggcgacgtggtggcggtgaggctctgctcggtctgcggcggcgctggcggctggcccgtgggcgctgaccccgacgcggacgcctga

SEQ ID NO: 367658 - DNA, 717 bp, Pseudomonas aeruginosa
atgaacctgaaccaagtctccccgctgctcagcccgcaacagatcggcgagctcgcgtccaacctggacgccatccacacccgcgccctgaaggccatcgagcgcctgaaccaggacgtcgcggcgcgcaaggcagagattgccaaccgctggaagtccgccggcatcgacgccggagacaaggcccgcttcgcgcagagcgagaccgtggccgccgtcagccagatcaaggacaactccgccaaggagctcgacaagctgctgaaggacgcgggcgcacctcacgcccagctcgtctcgcagcgcgagttctactccagccccgccaaggtgctggcccgcgccgccctcggcgaccccaagcgcaccgagtacctgcaccagctcgcctacgccggccccgccgagctcgggcacatggcccaggtcgccgtcgccacgcagaacatccccctcgcttccgcgctgctgagcctcctggaccgcatgccgtcgaaggaccgcccggtcggacccgccgagctcgccgccgcgatgaagctggaggactacctgaaggtgcaggagtacatcaagctgggcgatgcgcgcctccaaggcatcctcatcgcgatccgctcgtggaaccagggcaagtcgaacccgctgaacaccgtgcagctcgccctgcgcgagcaggccatcgaccgcgacctgatcggtggcggcgatgcataa

SEQ ID NO: 367659 - DNA, 261 bp, Pseudomonas aeruginosa
atgcataagcagcccatctacgaggcgcgccaccccgtggcggtcgccctcggcggcctagcgcgtgcgctgcgctcgggcgctgacctcctcgacgcgctggccgagcaggccgccagcgtcggcgtgaagccgtactccgacgagttcgacgaggccgccgcgctcgccggcatgccctacagccgggcgtgggacgcctaccttgaccgcgacacctgggcggaagcggagcgccagcccctcgcccacatgacctga

SEQ ID NO: 367660 - DNA, 468 bp, Pseudomonas aeruginosa
atgaacctgcaagagatgagcaccaaggacctgctggccctgcacaaccagatcgccgacaaggctgctggacccaagacctttgcgacccgaggcaagctgctcgaacgaatcggctcgatagtcgaggccaagaacatcgacctcgcgtcgttcgggcagcgcgcagagcccgaggtgaccgagccgcatgcacagccgcaggccgacgtcaccgaagcgaccgaggccccgacagagaccgagaagaagcccagcggcaagggcatcggccgactcgcccgcgagctgttgatggaccccgcgggctatccgcacgccgtcatcgcggagatggtcaacgcgcggatcgagggcgcgcaagcatccgccaagtcggtcaggtggtacgcccacgacatgcgcaagaagggcgccgcagtgcccgagcgtcagcgcgccgagcgcggggaggacgagccttgctga

SEQ ID NO: 367661 - DNA, 381 bp, Pseudomonas aeruginosa
ttgctgaagtcgcgccccaagatcagaccccgacgcgtgagggtccgacgctcggcgggcggggacgtgttcgtcatccgcgtggccgacttccccgagggcgacaggacgggcgatgccgcgctggcttggcgtgaggcttggttccacacgtgggtgtgcctgcccgacctgctggacgagccggggccgttcgacctgacggtggaggagtgcgcagtgccggtcccgacagagatagggtgggacgacgaggcgtgcgcgactctcatgcagcccacgctcgtgaagcgagacctcaccctcggccagctcggcggcgccgtcctgcgctacctgaggaagagccgcggcccgctggccgtggatattcctctatga

SEQ ID NO: 367662 - DNA, 243 bp, Pseudomonas aeruginosa
atgacttaccgttacctgacccctcgctcggagaagggagcccttcgcgcttatgtccggagcctgatgcgcatcgagaaagggaataactactaccagttgaatcagaaaaccgtcagccttatcggcaaggtgttttcaaacatcaagtacggtggccccgaagatctgaaggaccttcaggtcacgctggaggaatgccttgccttcgtcatgaaggagaggcagaagttcaccgcctga

SEQ ID NO: 367663 - DNA, 519 bp, Pseudomonas aeruginosa
atgaacgtcaacaacaccatcgaaactgcccgcaagcacgtcgttaccctcggcaacgaactcgagttcgctaccggcatccgcgccatcgctgccgagcggctcatggccgaaagcgacatccatgaccccgaaatgctgtttcaggcctgcgaggaactgatcggcacggtcaacctgttcgagtcctacgatgatcctctcaacaccgaacccggcgaactcgtgctcggccagggactgccgttccgctcaatggaggcgtatatcgccctacggaagcagtttggtccgcagtggctcacgcaggcgaccgagctgtacgtcgagagccacgggaccatcaagctcggcaaggatcagaagagttgcgcccgcaagctgctggaccgcgcccgctgctgcttcgatctcgacagcgcgtggcacgggccgaaggtggcgtctgacggcttcgagcgctaccagcgcgccgatcggatcgccaacatgaatgcctacctctcttcggcagcatga

SEQ ID NO: 367664 - DNA, 1245 bp, Pseudomonas aeruginosa
atgaagtcgaagatcacccaggcgctcgtcgagcgcggccctacacctgagcgcggcaagtcggtacttcacgccgacaccgagatgcgcgggttctacctgatcgtcacccccacgaagcgcagcttctacgttcagtccctcgtcaacgggaagcaggtccgcacgaagctgggcgaccacccatcgatggacgccaaacaggcgcgcgacctcgcccgcaagacgctggtcgagatgcgcggcggcgctaacccgaacgaggagcgccgcaaggccaaggcgcgcggcatcaccctgcgcgacgcagtcgacctgcacctagccgccaagccgctgtcccctcggaccaaggaggactaccgctactgctgcgatcagtacctgcccgattggctcgacaaggcgctggccgagctcggcacggatcgcgcgggcgtgcgcgagcgccaccgcaggatcaccgagaagcacggggcttcgaccgcagacaccgttttccgcatcttccgcgccgtctataaccgtggtctgcgggagcatcccgaactgcccgcgaacccgaccgctaacgttgattaccacggcctgcgtcggcgcaaggtggattccaacgccgacaagctgagggcatggggcaaggcggtgctcgccctgcatcccgtgcggcgcgacctgcacctgttcatgatcctgacgggcatgcggcgcacgtcggcctgcgaggcgcgcacggcagacctcgacctcggcactaagcgcctgcacgtacccaagcccaagggcggcgcacagcgcgccttcgacctaccgctgtcagggccactcgtcgacctgctcggccatcggcagagcgagtcgccccgcctgcaccgcaagagcccttggctgttccccgccgactcgaagtcgggccacgtcgccgaggtcgcgcaatgggagctcgatggcctgacgggccacgccttgcggcacacctacgccacgttggcattgcaggcgggcgtgcccatcgcagagttgaagttcctgctgaaccacgcggcgggcaacgtgacgatgggatacctgaacccgagcctcgaccacctgcgcggctatcaagagcgggcgagcgcctacgtgctcgacgcgctcggcctgcaatggactgaaggcgaatggcccccgcgcctgaagcgggacgagccggccgataccagcgcagaggaggtgccgtcaatcaacgaattggccttggtgtag

SEQ ID NO: 367665 - DNA, 150 bp, Pseudomonas aeruginosa
gtgcgcgtggcgcgcgagctcggctgccggaccttgccgggcggcgggatggcggtctaccaggcggtcgacgcgttcgagatcttcaccggtcgcgaacccgacgccgaacgcatgttctcgcacttcgaatcactcgtcggacgctga

SEQ ID NO: 367666 - DNA, 123 bp, Pseudomonas aeruginosa; identical to SEQ ID NO: 354560

SEQ ID NO: 367667 - DNA, 864 bp, Pseudomonas aeruginosa
atggcaaagaacaagaagggtgccaaaggcgccaagcacaaggccgatgtggacggcaccggcactgcccacggctcagcgcgcgacgagacagcgacacgctcgatcggccgcgaggactacgaagcacagttgcacatgctgcagatcgaactggtgaaactgcagcggcatttcatcaaatgcaacgaccgtatcctgatcctcttggagggaagggacggcgcaggcaaggacggcagcatcaagcggctggtcgaacacctgagtcctcgggaaacacgggtcgtcgcgctaggaaagccctccgaccgggatcgcacgggctggtacttccagcgctacgtcccgcacctgccggttggcgaagagctcgtggtgttcaaccgcagttggtacaaccgtgcgggcgtggaaccggtgatgggcttctgtaccgccgaggagcacgaggaattcatgaactcagtgcccaagttcgaggagatgctggtcaactccggcatcaagctgctgaagtattacctcgacatcggcaagaaggagcagagccgccggctcggggaacgccgccgtgatcccctcaaacagtggaagtcgagcccggtggatgccgtcgcgctgaagcactgggacggctatacacgggcgcgcgacgagatgttcatgcgcacccatacggccgcagcgccctggtctgtcgtgcacggcgacaacaaacggttggcgaggctcaacctgatcagagacatcctctcccggctgcactacgccggcaagaagcacaaggtcatcgctcccgaccgggagatcgtcttcgagttttcgcaggactgcctggactcgggccgactcgctcgttga

SEQ ID NO: 367668 - DNA, 399 bp, Pseudomonas aeruginosa
atggcgtggctgaaacaggccatcgcttcccgccggctcatcatcaacgacgcgaaggcgctcgtgcataccgtgagcggcaccgcctatctcgtcagcccaggcgtgttccaacgctatgcgcaggagcatccgcaagtggacgcactggccaggcaagagcagcaacaggattggcagtgggtgcagaagcgctttgaaaagctccaactacacgtcaagcatcccaatggcctgaacatttggacgtgcgaagtcaccgggccaagaaagtcccgccgcctgcacggataccttctggaaaattcgagcctgcttttcccggaaacgcctccgggcaatccctatctatccctgttgggtgagaccaaacacggcgacgagacttcaggaaggtga

SEQ ID NO: 367669 - DNA, 561 bp, Pseudomonas aeruginosa
ttggccgccggcgcgatttccggcgtcgtgcgctcgaagtcgggccgcatcctggtcgtgaagggtgacacctacaaggacaaggtccgcaagaccgaattcaccgaagacgaagacggcaacatcaccgaggtgaggatactcacagaccgtttcatcccgatcatccgggcatgggaaatgacaccctcctcggtcaatcagggccgcgtgctgaccatcagctcgtcggctgcgaccacggaagaggctgaagagccccaacctgagccggcccccgaaccgctgctgttcagccctggccaagtcgtaatgaccgctgccgtgagccacctggtggaaaccggtcaactcaacccagcgcctttgctgaaccgccatctggcgggagattgggggacgctggaccaggaagactggaacaccaaccagagagccctgaagttcggcgataggctgctgtcgtcctacgacatcgacgccggcggcgaatccaggctctggatcatcactgaggccaatcgcagttcgaccaccctgttgctccctagcgactactga

SEQ ID NO: 367670 - DNA, 204 bp, Pseudomonas aeruginosa
atgcaaaggccgatacaccaacccggtttcggcagcaatctcccgagcggtttggctcagctcccgattgcgcagggcagccagcaggttgcgcgccagtatcactcgttggccttgcctttccgccaggccttgctcgaccaagaaatccgcacgctgctgaatggcctgccgcacctcgccagcaaacccgagttcgcctag

SEQ ID NO: 367671 - DNA, 801 bp, Pseudomonas aeruginosa
atggccagcagcaggggggcgttgccggaggatcccgcgcaggtcgggacggcgcctggcgcccggcagcggcgagtccggacggcgcaggctgcggcgacggaggaacaggcaggccagcgcggtgagcagcatcgtcaggccgaccagggcgggcaccagttgctggccgaaccgaccgagcagcaggccgcccagggtcgcggtgaggatgaaggccagcgaaccgactgcgcgtacccgcccgtagttctgcagggcggccttgtcgcgcttgagcaggtaggattcggtgagcggcagcacgctggtccagaacgcgccgtagagcacgctcagggcgatgaacaggggcaggccctcggccagctggaacagcagggcgcaggcgccggccagggccgccagcagggtcgccaggcgcaactggtcgatgcgccagtcggccacgtaggtcagcgccaccccggcgatcacctgcggccagtaggccgcggcgatcaacaggccgatctggctggcgccgaagcccaggctggccagccaggtcggccagaacggatagatcagcccctcggcggcgaagtagccggaaaagatcaggtacatgccggttcccgcgtcgccgtgccggttcgctgcggtttgcgcctcactcgaagcgcgccctggcgaaggcgttctcgcccttgcgccagaccagcagggactcgcccagcaccaccaggtcgaccatgccgtcctccagcgcgccgagggcgtcctgcggggcgcagacgatcggttcctcgtggcggttga

SEQ ID NO: 367672 - DNA, 1254 bp, Pseudomonas aeruginosa
ttgcttttcgggcttcgcgagccggccgcggggggtccccggcaagctatcgcttcccacgaagccctgcttgagcgaggacgggtcgttgagggtttccttgttccactccgcgcccaccgtcagcacctgctcgaacaacgcatgcaacggaaggttgagttcgccgctgaggcgatagttctccagcttgctggtgctgaacgaacggtcggcgccgatctgcccctcgacggaaccggccagcccctcctccagacggttgttgcgggtggagtcgtactgggcgacgaacctggaagtaccgaacgaccaggtcccgttgtgggtgatggcgtagttctcgcgatacatgcggttggtctccgcaccgtcgtcggcgagtccctgggtattggcggtgccgttgttgttctgggtatcgccggcatagatattgccctgtcggctgaagcccgcttcgaaatcgacgacctggtcgggggtcacctgccacgacagcatcccgctgagatcgcgattgcgtaccccttcgcgtccggccacggtacggctcgggttgacggtatgtccgaggttgatgtcggtatcgtccgaatcggtcttgttcgcgctgccgtacgcgcggaagctcaaggcttcggtcagcggcccgctaaggctgaagttggcgcggcgcgtggcgccatccttggagctttccggaatgttggtgaacaccgtcatggaaccacgcaaacgatcggtcgggcgcttggtgatgatgttgactaccccgcccgccgcgccggaaccgtagcgtgccgccgcgggcccacggaggacctcgatgcgctcgacctcctccggcggcacccagttgctgtcgccgcgggtgtcgcgttcgccgcgccagccgtagcgcaccgagttgcgcgagctgaccggtttgccgtcgaccaggatcagggtgttctccggccccatgccgcggatgtcgatctgccggttgttgccgcgctggccgctggaactgttgccggtgaggttgaccccgggcatggtgcggatgatctcggagagatcgttcaccggcgggcgcttcctgatgtcctcggcggtgatgatggatacccccggtgcctgcttgagctcctgttcggcggtgcccagcaccacctcgtcacccagctggaccaccgattcggcacgttcgtccagttcttccaggcgctcgtcctcggccagggcctgcccgcccagcaggctcgatga

SEQ ID NO: 367673 - DNA, 711 bp, Pseudomonas aeruginosa
atgagcatcctgaaccccactacttgcccagatagtccagccgcagtgcctaccctgaggcaagcaaaagctgacggcacactgcgaccactggacaagctgcgcctgcgctcccagctgggcctggtcgaccatgtgactgcaactgatgttcgtcgggctgcatcgcttcttctgcaccgcgtcgctgactactacacggttatccagtacacaggacctggctacgtctacggccgtgttgactcaacctggccatcagcactctacgcagaggctgagctcaactactcctcgaagacctggtctcatcgcgagatgggcccctgccacccctcctgcccaatcagccgggtgcacgacctggctggctgggtctgcctgcagaccgctttgctgctggctgtcgatgaaatgacaactgagatccctgaagcaaagcactccctcgatcaagcgcggtacctgatcgatagcatggcctcgatccaagaagtttctggggtgcgctggtcggacgcccggcgccggctgcggactactggcattcgcaagctgatcgcgcgcatgcaggcactcctccctactgttccttttgggctcggttgcgtacgcccactggtgctcagcccaaatcagctgacggccgtgaagagcttcaagggcattcgcgagtggtcgcttccagtccaagaaggtgctgcagcctag

SEQ ID NO: 367674 - DNA, 306 bp, Pseudomonas aeruginosa
atgcgcaaacctccgatgcttaccgctaccactaccaacatgtctgccgtcttcgcttgcatggacaacatggcactcgagctgctcgattccgctgagaccctccgtacctcgcccttggctaaggttgccggcggcagcgtttccttgtctgcagcccagatggagtcccgggctgaccagatccgcctgctggtcgaagacatccgcaccactggcgatctgcatggcttcgacatggcgtgtgacttggccggctggcgcccgagtcagcaagcactgcagagcctgcaggtggctcactga

SEQ ID NO: 367675 - DNA, 351 bp, Pseudomonas aeruginosa
atgaataactcgatcaatctcgttaccagcaccggccttaccactgctgctctgtttgccaccttcgaggaggagatccagggcacccattacacgtttggcgttcaccgcaacctgtcgtgttccgtacaccacaagctgtctgagttttcgaccggaatgggcattgcagaggtcaaggaccttaccgtcgacgagcgcgatgccgacagcgtcagctacgacgatcttgtgatgttcggccgccaggcgctgcagtcggtgatcagcaagcatggcatcgaggaagtcggccagatcctctcccgcaaccaagcagctcgaccggtcctgaaccgactcaatggttga

SEQ ID NO: 367676 - DNA, 333 bp, Pseudomonas aeruginosa
atgtcccaatcgcttttccccgctgcatcctcccgcactgccgacaagttcgttctacgtctccctcagggtatgcgggagcgcgtggctgatgtggcacgtgaagctcaccgcagcatgaactccgagatcatcgcgcgtctggagcagagcctgtgcgctactgcgaaagttgttccattcgaagcgatcgaaggcagcactctgagcgtgagtgaaacccaactgctggctcgattccggatgctctccagccggcagcaagaggccctcatcgacgtcctggggccggagctcgtcggtctgccttcgcctgttgctatgagcgcctag

SEQ ID NO: 367677 - DNA, 876 bp, Pseudomonas aeruginosa
ttgtctgcaccctactcgccacagctccccatcagccagttcatgttcacaccaggtgggaacatcgaggcatatctcgctgcgatcaataccctgacgttcttcaccgcggaggaggagactgaacttgctaagcaacttcaccagcaccatgaccttgaggctgcacgccagctggtaatgtcccagctgcgtctggtggccagcctcgctaagcgctacatgggatacggacttccattggctgacctcatccaggaggggaatgtcggcttgatgaaggcagtgaagcgcttcaaccccaatgtgggggtccgactgatgtcatttgccgtgcattggatcaaggccgagatccacgagtacattctgcgcaactggagaacagtgcgtgtcgcgaccactaaggcgcagcgcaagttgtttttcaatctccgtcgccagaagcgacagcaaggatggctttcccaggatgaagcgcaggtggtggcatcgaacctgggagtttctgtccgagaggtccttgagatggagggacgccttgcaggtaatgacacagcattcgatccagctacggaatcggaggatgaggaagctgctcgcgctcctgcaaactacctagaggatcaccgttacgatccggcccagcaatacgaggccgcagttacagatgaccagcggtccaacgagctctactccgccctggagaaactcgacgagcgtagccgggatatcgtgaccaagcgctggctcaataactcgaaagtgactttgcaggacctcgccgctgaacacggggtttctgctgagcgcattcgccaattggagaagtctgcactgctggcactaagggcagcgatgccgaatgcggcctag

SEQ ID NO: 367678 - DNA, 867 bp, Pseudomonas aeruginosa
atgcaaactaccccgcatctgatcgtcgccgagctgaccggcgccctgcttactgtacgcatcaacacccaggacagccgagttggcatttacgccgtcgagctgcaggacgggaatcgccgccaaacctcaatcgactggcctttcggtgtctctgatcaacccacagtcgaggttcagcttgaactggccggagcagggagagaaatctccacccaggtgatatcgggtgacctctggcgtgacctcgaatcccaggacctggaggatgagttccttgaccgtgtgcttcggggtgctgatgcgcaagtggcagctgccgatctactgggcacgaccatccagttcggcgacgcagaggcacaggtttaccgggtcaactcggaacatggttatgacgactatgacgtgattggccatcccgttgtccaccgaatcacggtcgggcacggcatcaagaaaggcgacattttcaacgtgtactgcgccgattcgcgaaaggtggggggcaatggactggaagcctggtccctagcttcgcgtctgttcttcaaacactggcggccgaatcggctgcatagcgcatgggcgcggacagggatgaattgccagagctgctttggcttgccgtcatcctttgagcctgtagcgttgatgcatcaattttctccggccaggccggctactgagagtcatcaccatgtcccgagcacgatccggaaagagcctgtttcacaggatcatgaagcgccgcccgcacctccttactgtcatgctgattgcttgtctgggagcagccctgtgggggcttcgctatgccgcgagccaagatgctgcacaaaccggtaccacatctacgatgcctga

SEQ ID NO: 367679 - DNA, 1734 bp, Pseudomonas aeruginosa
atgcctgagctggtgcaagctcaacctgacttgtggatggagcgcatcaagccttactccgagctgatggctgatgtcgagactggctctatcgaagaggtggttctcggcgcaacgcatatcttcgtgacgctgaagggtggagcgaagtacgcagtagccgatcagttcatgtttggcgccagcaacctattcaagcttgccgctgccaagccagagctgggttttgcttactccaccgcggaaacgatctctgagccaccggtaacccgtgcagaaattgcagatcaagtgcttcgcggactgatcatcctcgtgatcagcatttctgtgtggccgatgatcagcccttggctgccgcgccttgggcgccagcccaagccagtgaaggtttcattcaacgatgtggtggggtgccaggaagccaaacaggccctgctcgatatcgtcagctggcagcgagaccctgctatctacaacctgattggagccaaacctccccgtggcgttctgctcacaggtgaacctggtactggtaaaacccaactcgcgcgagctttagctcatgagtgcggaatggaattcatcgccgtaacagggggcagcttctctagcatgttcatgggtgtgggaatcatgaaggtgcaggcactgtttcgcagagctcgcagaaaagccccgtgcatcttgttcatcgatgagatcgatggcgtaggccggcgtcagactgaagcgcgtttcggtgaggccgagacaaacagaatcgtcaaccagctcctcacagagatggacggctttggcgcaagtactggggtcttggtcattgcggcgacaaaccaccccgaatccatagatccagccctgcgtcgcgaagggcgctttgaccggacgattcatgtccagctacccacaaaggccgagcgcctgcagttgctggagctctacctggacaaactgaacgctgttggggcaatggatcgcgaacgcctagccgcagcctgcatcggcttcaccccggcggccatcgcttcagtagtcaaccaggctgcgatcatcgcaatcagaagccaagcaaatgaagtcggtgaatcccacctacgggatgcgattgaggcacaccgtattggtgaacgtcctaaaggtacggcaccgatccgatctgaagagagggaaatcattgcccatcatgaggcaggccacgcggttgcagcagctctccttggaaccggcaagctggatctggtgaccattcttccgcggggtaacaccttgggcacaacactggttttgcctgttgaagacaagcgtatccagctggctagtgagttacgcaacgctgtcatggtgctgttggcagggagggcggcagagaagatcgagttcggtgaaacgtcgtcaggcgcagcacaggacctgcgggaggctaccaagatcgttggcagcatggttggcctgttcggcatgtccagcaaaggaggcctggcctccatggctggattggctgattgcggggtgcccgttgatgcacaagcggttcagcagctgatcgaagtggaactgcaagctctcagtgacaagtgcgatgagctgctggacaagcatgtggttgccctaaacgaggttgtggatctcctgctacgcgaagagacgattgacggccaggccgtactcgatctccttgtggagcactctgatgtggtcattccgctacgcgcggaggttgcatgcgcctag

SEQ ID NO: 367680 - DNA, 513 bp, Pseudomonas aeruginosa
atgcgcctagatgagtcgggatcagtgcacacgccttcggactggatgtccagttgccgaatcaggaagtggctctcgccagaccacagcgaaggcatcgtggcctgtctcgcaatggccagcggtctcgattacaccgaagcccgggcgttagtggttagggccgggctgactgtacgacggggctcaagcaaacccttctgtataaaccgaaccgagatgtgctccctgttcactatggctggcatgacctatgcgccgagggcctggagaggttggtctgcctttcacgggcttggtgtactcaaggttcgaccgcgggatgttcagaaccctcggtttttctactatgccgtcgcgtttactcatcccacatacggggtcgtgatcttcgatccctacaacccgtacccctcattccagaatgaaccgctggatatcatctacaccccgtttgattccctgattccggtcaggagctggattcaggtcggctggccggaacccagctaa

SEQ ID NO: 367681 - DNA, 600 bp, Pseudomonas aeruginosa
atgtccacctccaccgttgatgttcaaacgactcgtttcgcgcaccaggttcagagcatgcgcgcttgtgctgcgatgatccaagccttggcttgcggcagcaaaggattcacacgagctggtgtgaccttcgagaaaaatggtttgctgacccatgccatgcacagtggccaggtcgtagctgtcctgaacggaggtttctgcatgcagaaagttttggactgcatccgttcgaacattgctgatcatgctcaacaggtagcacttcatcttaagcctgagctcgatgcactcgttctgcctgcagggcatgtgcttcggctggatatgtcgcagaacctggctgacatactaaatcggggcagttgccgcctgtctgctcaggttcacgcggccgctcatgacacaccaaatcagatccacgcagacttccagttcttcctgggcgagtgtcgcctgctgttgcgcctcaaagctggtgatcgcttcgacgcaggtgaagtaatgatcaacgaggagttggtcgcagagacctactccggcctagcggaatctgctgtcgctgcggtcaaccaagcaatcgctgacctgctggcctaa

SEQ ID NO: 367682 - DNA, 459 bp, Pseudomonas aeruginosa
atgccaaagaaaaccgttctgtatccctaccaccctgtatcgggccatccgctggtggccacagtcgatttcattcccggccaggttccccggacagttgtgaaggtggatggggaaatccagctggatgaggcttctgagactgacgtcgactggaatgcagctcaagagcagaacctgaatggcgacctgttccttgccgacgaggctggcaatgtctgtctgcaatctgaagccgtttggaagacggaggaactgtgccggataagcccccagctgggcgcgaccgccaccagcatcgacacgccgaatcatctccggcagacgctccaggaactctccagtgccgcccgggaagtcttcctcgatctggacagtggtcaagaccctatggcctcagctcttcagctcaaggcgctgctagaagcgaatggtctttgggaagacttcaccgactaa

SEQ ID NO: 367683 - DNA, 681 bp, Pseudomonas aeruginosa
atgaacaacaaactccaggcgcccagccgattcatccagcgtgacatcggcctgaacgggcagacagctaaggctgtgtatgtgtttgaacgcggtccccacaaggtgcggatcacggtctgttccgactcggtggaagcgcagtgcttcgcccgtgcagaggtattcacatcagctctacagtggagcgttgtgtcttacctgcagcgctcgcagatgagtacccctgtgtctttggcgtatcgttctccagcccctgggttcgatgccttcgagcgtgactaccaagcactgcttggccaggtcgaccagatactggggatgaccaaggcggatctgccatcagagatttttgcgctcgtctttctggatgcagacgtcgacgactccattgatgatgcagtagttgggcctacctttttcgaggatgcgcgctccgcactactgaaagtgggcagctacgtagcccgggtagctgctggggatgaggctttgggggaaagtatcaggaatgcattcggttcagggccttccgagcccgaggtgctggatgaggcctggttcaaccactggtttcagcacctcaactgcgagcagcttgaaggcgtgctggatgcgttcatcggtcatcgaggccgtgaagggcgcatctgcttttaccgtgtcgaaagagcgaactag

SEQ ID NO: 367684 - DNA, 258 bp, Pseudomonas aeruginosa
atgcataacagcctgaccagtttcttagagcgcgccggcaccatcgctggcattaccggtgcgttgacgctctcgcagaacagcgactattcggcttacggctatgtactgtttctggtcagtagcgtgtgccttgcgttccatgcaagacgtattggcgcgcgctggttgttggctctgcagctgacattcctggttgccaacgtcaacggcctgtaccactggatacttgctccgctcttggtagcaacaagctaa

SEQ ID NO: 367685 - DNA, 498 bp, Pseudomonas aeruginosa
atgttcgagagtctcaaagcagcaaacaatgcgaagctgaccctgtccaagctgaaggggccatctgccccgagcagtcatcgggcctggtcctgcgacatcatgttcgaagggcagaaggtcgggagtgcatccggcgatgatctccgccaagacctgaagctcgatctcgacaacgaaatgcaggtgcgaatcatcgctgcgctcaaatccaaaggctttgctctggatctgagcaagaaaccacgtgattcgattcagccagatacgcccgccaatatcgtgcgtctggcgattgcgcagatcgccgatgagatggatctggtcaaagagctgaaggtatctgctcgcactcaaaccctggtgctcatgagaagtgacccgaccaaggtcgccgtctttaaggagccgtatagcgaagcggtgaaagagcgcctggttgcgcagtatggcgatgagctgatggaggtcgtcaacgagtccctgaaggggctgtga

SEQ ID NO: 367686 - DNA, 666 bp, Pseudomonas aeruginosa
atggcagatcttaagcaacatattgccaccctgcaggcgctactagagacggtgggttatcactccagccggctcgtatttcgagattttgttgagttgtatgctgtcgcattggcgaacgctttggtggtctgtcccgaacgagagcagcgctaccagatgatcatcaaaaagtatcgcgagcgtgaccgggccctgtttccgaagctgttcgaacagctggtgaaggtcttggagctgcatcctggcgaggattatctggggcaaacctggatgagcttggaaggtggtagttcccggctggggcagcactacacaccaggttccatcactgagttgcttgcccgtttgggcactcctgaaccttcagacttgcgccgaacgatcgatgagctcgggttcatcacagtacatgacccggcggttggtagtggagcgatcgtgatcgcacaagccaaccatttgctcagtgagggtatcaattaccagcagcacttccatgtgaccgcctgggatatcgatctgacggcggtgcacatggcctacgtccagttcacgctgctgcatatccccgctgttctggtgcatggcaacacgctgaccttggtcgagcacagccgttggccgacgttggccgacgttggcacatcacttaggtgcatttga

SEQ ID NO: 367687 - DNA, 219 bp, Pseudomonas aeruginosa
gtgattcgtcaaaccctgaacccacagatgcctcatggccaggagatcgctgattgcgactgtagccagcttgccgtgtcgcatttcgacctaaaggaaaagctgttccgctccgcgtacacggattgctacacgcgcgctgaacgtatggatatgcatgctcagctgaaggccttgagcgaccgctacagagagttgacgggccagcatctgagctga

SEQ ID NO: 367688 - DNA, 1116 bp, Pseudomonas aeruginosa
atggctctgttcgaactcctggacccttcagacactgaatacagcaacacgattgagctgtatgacgcactccccaaaggggtctggtctgggaagcagaagcgagggaaaaagtccgacggtgacgcctcgcaagaagcagctataagcgaattgccgaaagtcatcacccgtccattcaaatcccgcggcaccagctaccagatgaaggtcaagccggcgatcatcgagcgggtgaatgatgcgggcgagatcaagacactcgtaatattccccggcacccgggaagaactgatcgaggaagccctgcggaagttcgccgtccaaggccaagggttcgaatccgacaacacctcgaaggatgtcggggtcttcttcaccgtcaaccagctccgtaaagagctggccaggacgggacactcgtacagcgctcaagagatcctagaagccctggacatcatgagctcgtcgctgatcgaggtgagtcagacaggtcgcaaccggtctcgtgaaaccatccgcggcaacatgctcggctcgatgctaatcgccagccgcgagcagtatctcgagaactccggcgtcaagtgctacgcgacctttcatccgttggtcacgcaaggcattcgcacacagcagttccggatctacgactacagcgtctccatgtcgatgaagtcggatctaggccggtacatgtacaagcgactgtcacactactgggtacaggcgtccctggatcacccctacgagttcaagctcaccaccttcctctcgcagagccctagaggcctctctgaacggatgaaggacaatctgcgggccgtacgcaatgccctcaaatccctcgttgacgaggacgtgatcctccctgattgggaagagatcatgatcaagaacgctgctgacaaacgaattgtcgatgatgtcggcttccgcttgctgccctccgagagtttcatcaaattcatgatgaaggcaaaccgccgtcagagcgatatccgcggccaggccgaactgctcacggcccgagcgtccctgaagcaggggagtgttacctcggaagcggagccaggctctgctgatgaacccgataggattttcgacgaagcataa

SEQ ID NO: 367689 - DNA, 1146 bp, Pseudomonas aeruginosa
atgatcgacttccccgttgcaactaccccagagattgaccagctgttggccctggatgtggctgtagcctttggcgtcagcggaggcaaggacagtgtagccgggcttattgcgacccataactacctggagcggatcggtcacaaggggccgcggtgtgcgatccatgccgatctcggccgagtagagtgggcgaccagccagaagaaatgtgaggaagctgcggaagcattaggctgggactttgttgtcgttcgacgtggcgccggcgacatgatggacagatggttggggcgctggcagaacaatgtgaagcgctatcaggagctgtcgtgcgtccagttgattctgccctggtcaacgccgagcatgcgcttctgtacgtccgaactgaaaacgcaaatcattcgtagtgatctgaagaagcgttatcccacgcaccacatcatcaatgcaacaggaatccgtgcggaagaaagtgcaaatcgcgcaaaagcggccgtggccaaacctgacgctcaacttacccgcaaaggctaccttggattcacttggaaccccatccatgaagcccgactggatgatgtatgggcgttgattgaaagccgcgggctagagcggcacgaagcctacagcaagtacaacatgacccgtgtatcgtgctgcttctgcatcatgagctctggcagcgacctagagaactccagcaaagtgccggaacacgcctctgtttaccgagagatggtcgacctcgagatcacctcaacattcgcgtttcaaagcaacaagtggctcgcggacgtgaaccctgaacttctctgttccaacacactggaacgcctgcaggtagcaaagcgagtcgccgcggagcgaacagcactggagtcacgaattcccggtcacatgctgttctccaaaggttggcccaacagcgttccgacaatcaccgaagcgactctgctggcggacatccgagtgcaggtggcagctgccctgggtatagagattcagtgcacaaccgcgcagagtgtcattgagcggtatgaagagctgatcgagatcaagcgaagcaaaggcctcgtagacgaaggccctgagctgatcccggttcgccatgtatatcaagagcagctggcgctgctctga

SEQ ID NO: 367690 - DNA, 555 bp, Pseudomonas aeruginosa
atgtctgttggactcaagcggccaaacatcaccgacgtgaacattgcccgggcagaggcttggtgcattgctgcgcatagtgccgttggccaaacacgcaagtacacgggtgagccctactggacacatccattgagtgtggcggcgctgattcaagaggttgtgccggaggtgccagcggccgtccttattgcggcgatgctgcatgacgttgtcgacgacacgggtatttccctggagcttgtccgtgaggagttcggggatgaggttgcagatctggtcgacgcagtctccgaccatacaacgccggcggatggcacccggaaggagcgaaaagctatgaagcgggagcggttgtccagtgccagctcctgggccaagacgattgcgattgctgacgtgatcagcaacgtggagacgattgctgaacacgatcccacattcgccaaagtctacctgccggaaaagcgagagttgctgcactgcctgggtgatggtgatcagaggctctttgctatggctaagaaactggtcgatgcgtacttcgtgagctga

SEQ ID NO: 367691 - DNA, 1326 bp, Pseudomonas aeruginosa
atgtacagtatctgcatgcagcgccgcaaaatgaccttaaaactctatcccaatgccagccagttaaaacgtctggacggctgggtgcgcctacatgccgagctttacaacgccgccctgcaggagcggatcgaagcttatgccaaggccggtatatcgatcagctactacgaccagcaaaacgccctgccggccatcaaacaggaccgcccggagctggttgatctcggcagtcatgccttgcaggaaacgctgcgccggctagaccgggcctttcaggcgttctttcgccgggtcaaaacggggcagacgccgggttttcctcggtttaagtccagtgcccgattctcgggattcacctacccagacccggcaggctggaagctccagcagcagggcgagcgtggcgctagcctccgactaggcagtggcaaaggggcgatgcttattagggcgcgtggcaagcaccgtttcagcgagctcagccccaacgacctgaccctcagtcgtaaacgcaactatgccaccgggcacgatcagtggtacgccttggtgacgttgcgcgtgagcgcacaagcctgccagcgcctgcgaagttcagatgatcaggtcggcatcgacttcggcgtcagccactgggccaacttggatgacggcagccagatcgacaatccccgttggctgcgcgaggcactgccagtgctggccgacttgcagcgccagcgagcacgcaagaaacgccgatcacaccgataccgcaagctgacccaaaaaatcagccgcctgcatcaacgcatcagcgacgtccgccgcgattttctgcacaagcagacctcggccctggtacagcgcagtgcgctgatcgccaccgaagcgttgcaaccccagaacatgagccgcagcgccagaggaaccgtcggagaacctggccggcgcgtgcggcagaaggccggactgaaccgggaaattctctcggcggcgttcggaatggcgcagcagatgctccagtacaaagcggaagaagctggtactcggttgcacctggccaatacgcgccagttaaaaccctcgcagcgctgctccggctgctgggccatcgtgcccaaggccctctgcgagcggcaccaccgctgctcgtgcggctgcgaattgccgcgggaccagaacagcgccagggtcgttttgctcgacgcttggacaccgcaagacacgcctgggacgggcgtgacggcgagacctaagcctctggctgcgcaagcaggcaagcctaagtcgcagacccgtgaaaccccactacaaccgcttgcgcgggttagtggcgggtga

SEQ ID NO: 367692 - DNA, 573 bp, Pseudomonas aeruginosa
atgccttacgccctcgacaacggggcttggagcgccttcattcagggacggccgttcgatgagttggctttcgacaaggccttcagcttgctaggcgaaaacgcgaagtgggtagttttacccgactacgtggccggtggcctgcgctcgttggaattttcgctcctctggcttgaacgactgcgctcatcgccagcgccgctgctgatcgcggtgcaagacggcatgaccccggacgacgtgcgtgagtacctctccccggcagtgggaatcttcgttggaggaacaaccgagtggaagctgaagactttgcactcctggggaattctggcgcggcgccggtgctgtcatctgcatgtggggcgggtgaactctgctaaacgcattctgctgtgtgccgccgccggcggcgcccattctgtcgatggcaccagtgcctcgatgtacgctaagaccatcggtcccctgtccgaggcggtgaggcacacggagatccaaacggattttctcagtcctaatggccaggacttcgatgcaaccgactatgactgcgcctggccatccgatctgtag

SEQ ID NO: 367693 - DNA, 903 bp, Pseudomonas aeruginosa
atgcctctttctcctgcagacatcgtgaacctccggactacggcaacttccctcattgaaggccggggctggggtgtttccacttggggcggcccgccttcttcaggcaaggccttgcgatcaccagctctctgcgcaaggcgtgggcgagtgtctgtttcggtcgaagtgccggccgccagcactcccatagcggatgtgctggctcggcagcgccagtacgacaaagccaaggttcgttgcttatggctgttgtcgacgcctgatttccctgtcaccaaagaccttcccgcggcgttcattgatagacacccagctgggcacttcgttgccaggctgccaggccgtgtctcgcccggagagcgtcgaagcgcccttcgtgaagaggactggctccagacgcttacgctcagcaccttccttgaagctgctttcggcgggatgttctggtacggcacgctgcgggagggccggaaggccacagtgcgactggatggtgagttcactaagtgcgtggactgcgggtcctggacgaacctctgccgcgccgtggaagtactgtcgacctaccccgagtccagctttgccgtatacccgctagaggctgtaccaccaggcctactaccagagctggtaccggccggcctcgaggctgccaaggttggtccgatccggaagagatacatcccgggggagaagggctcacggatagccaatagctgcgttaactgccaggccgtccagccgccggtggagactggtggacaaacaagcgctctgaaccctgtcgcccagtttgatattgacgttagcaaacgacttgctgctgtaacagcactgctgccgtcagctcgatggcgagtttccatgcctgccggtagtggcacaggcctccggcgctga

SEQ ID NO: 367694 - DNA, 663 bp, Pseudomonas aeruginosa
atgaagaatctgaaactggctgcactggttgtcctgtccggcgccctgctctccggctgcgcggtgaatcccgagaccggcgagcgggaattcaaccgcacggcgatcggggccactgtcggtggcgtcgccggcggcctgctcggtgcagcggttggcggcgagaagggggccctgatcggcgttgctgctggtgctgccgccggcggtggtactggctattggatggataagcgagccgagaagctgaaggctgagctccaaggctccggcatggaggtgcagagccaagtggaccccgctactggcgtgcaggtgctcaccgtgcaggcccctgcagacatcgcctttgcctcaggttcggcagaactgcaaagcactgccttccaggggctatcggcagttgccaattccgttaagtctcagcccgggttgaagctcaaagtgacgggtcacactgactccaccgggagctcgcaactcaattcgacactgagcgccgcccgcgctcaatcggtggccatgtacctgttctcggccggcgtgcctgtcgatgtcgtgacagtgagaggtgttggcccatctcagccggttgccagcaacgataccgtcgagggccgtgctcagaatcgccgagtcgagatccagatttctcagggctag

SEQ ID NO: 367695 - DNA, 462 bp, Pseudomonas aeruginosa
atggcctgctccctcctgcgagacgttacgtccaaacggacagtcgcaatgagcccgaagctgatagacctactttatctgattcaggcttggctgcgattgaataagctccccagcgccatcacagtcaatagtggctatcgcacacctgaatacaactcttccctggaaggggctgccaagaactcaatgcacgtgagagcaatggcagcggatatcaggattccaggtgtcagtactgagaaaatcgcccagctggctaaggcgatcggcgttgggggcgtagggatctatcctgctaagaactttatccacgtggacattggcaggattaggacatggcgcgcggagtggtacatgcctgtcgaggaaagctggctagctgagttctccttcgaccaaatcgatcaggcgctcctgttcgacggggcgcctgatttgaaccgactcgtctacgtctag

SEQ ID NO: 367696 - DNA, 495 bp, Pseudomonas aeruginosa
atgcaaaaacgggtgaattaccgcgaagccattgtcgagcagctggacagcgtccgtgctcttgtcggtccacaccacgacctgatccgggaaatggagtcgaggaatggccggctacaagagctttatgctgagtacgacaagttcggccttggaatgatcgtggcgatggactcgggggagtctcattgcattgtcttgccggatgcatcgcatccaggcatgtaccgtttcacgacatttcgatcgattggctggacaggacaccagacctatggagatccggaagaggcaatctaccgggcattcgaggctggataccggaagttggtaccgcgggactatctcgatcagcttgccgccactcctgagtggcagaaaggctgtgcgaggctgcccttcatcgagaagatgaatgccggcgagatcagttacacccagatgctggaggagttcgccaagatcgaaaccagcttcactgcgcaggccgcctga

SEQ ID NO: 367697 - DNA, 738 bp, Pseudomonas aeruginosa
atggattctggaaagccgcatcatcgtgctgatcgggttgaagctgaccttcaacccaccagccacatcgaactgatctatatgcgccggcgggcgtacctgcctcgggcgaaagctcccgaagcttctggcggtctgagtgccgtcgagggcttgcccccagcccatacgcgctcatcccgctggaagaccgacgaagcctacgagatgcggcggatcaatccgctgcacaataaagcgggcgagctcattggctatcgaccgatgatccagcaaggacatggacaaggtagccagcgcttccacaagtctttcagggctgctgacttcgaaggctcaatcggtgaagcgcttaagcatgcgaaggaatggcgggataacactgaggcgaagctcggtatcacagccggaagcttgaggattcagtcggatgctcggccatggtctggtgtctcgctgatcgtctccaagggggctggttgtagggcctactggggtagcaaccgtaccgcagacaagcagacgattcgggtctacatcggtcagaagagttacaccgaggcgtaccatgacctcatcacgaagctagccgaacgcgacggaatcccgcttccggaagatcttccccttccgccacctcctcgctccgagcagtatcggcggatgcttaaggcgggcctatccgacatccccaagcctccccgggcgcggcaacgaagaccaaaaatgcggaagtga

SEQ ID NO: 367698 - DNA, 324 bp, Pseudomonas aeruginosa
atgcaaactatctttcgtgttgccctggtgctatcgctctcggccctgtctggctgcggcgagagcattactggtgcttatgaggcgttcatccaagtcggtgatgaggagccgcggatggtcggcctggccgtcatccaagagaatcgcattcttgccgatcggcagtctgtcgacgttatcgagtggaaagctgagaacgacctggtaacggcctacggtgctgaaggtgtccgtcttgcgcagttcaagattgaaagtgaaggggttctggtccagtcgctcccgcagagcaatgtcatctacaagcggatcgacatgtag

SEQ ID NO: 367699 - DNA, 1062 bp, Pseudomonas aeruginosa
atgatacgtcgaaccttcatttgccgaagaccggtgctcgctgcagcgttgctgatggcgatcgcagctcaatcatctgcagcattcagggtggtagaggcccagcccggtcaaggtgcagcgcctgagctttaccttacaggtgagatctccacggctactgtgagcgagtttcgtgctctgtcggctggggggagattgaatggggcgatcgtctacttggattccagtggaggagatcctcaagctggcctgtctctagggaccctcatccgcgaacgacgtatgaatactgctgtcggccgggccggcgcttcagcaggtcggcccgccaaaggaagctgcctcagtgcgtgtgttctggcttatgccggcggcaccttccggtttatcgaccctgcagcagtactcggtattcatcggttctaccgaaggacggcatcagcaggtgacttggcgttggcccaggtcatgtctgcagcaatcacgtcctacctcatacgcatggggatagatcctgcattgttcgaacgcatggctgcagtggacggcgacaagatgatgtttctgccccacgcggaagcactgaagctcaacctggtgaacaatggagttctacccgctgagtgggccatcgaggggaagcaagggagtgtttacttggcagggcgccaaatcacctcgaacgggactggaaaggtgactatgagttgcgcccctcgcaatcggatacgcttctcagctttgtacgatgccggcaccaacaaccggtatatctccacccataccagtcactacagccttcgagtcaacaaccagttcctccccatcagcagcatgtcaaagcccgctgcggtgtctggcgactatgtgaccgcaagctttatgccggacctgaaccttctgtggtcgctttctggagcgcagcaaattggctttggcttccatacggagaactcggacacctttttcgggttcctcatctccgcggccggccagcaggatctgatccgcagctgggttcgccactgcactgagagcagcccaggaaccggggcttga

SEQ ID NO: 367700 - DNA, 1005 bp, Pseudomonas aeruginosa
atgccgatccgccactgcatcgtccacctgatcgacaagaagcccgacggcacccccgccgtgctgcacgcccgcgactcggagctcgccgcgtcccaggccatggagaacctattggccgacctcaacgagagctataacgccaagcagggtaaggcctggggtctgttccacgaggtatccggtgcctacccgttcagcggctggctgcaggcctacctggagggcaagcaggactttaccgtcttcagccgccaggccgtcgagcagctgcagaagctgatggaagagtccaacctgtccaccggaggccacgtgttgctcgcccactaccagcagggtatgaccgattacctggctatcgccctgctgcatcacagcgaaggcgtggcggtgaccgagtcgctggacgtggcgatggctaagcatttggatcttggccagctgcacctggcggcgcgcatcaacatctctgagtggcgcaacaacgccaactccaagcagtacatctcgttcatccgcggcaagaacggcaggaaggtttcggactatttccgtgacttcatcggctgccaagaagggatcgacccaccgagcgaaacccgcaccctgctcaaggccttcagtgacttcgtagagagcgaggacctggccgaagagcaggctcgcgccaagaccgcgacactggtcgactatgccaccagccaggcaaaactgggcgagccgatcaccttggaagagctttccggcctgatcgatgaggatcgcccgcgcgccttcttcgagcacatccgcaacaaggactacggtctctccccggagattccagctgataagcggaccctcaaccagttccgtcgcttcaccggccgggccgaaggactttcgatcagtttcgaggctcacctgctgggctcgaagatcgagtacgacgaagggcgcgatatgctgatcatccgacaggtaccgacccagcttaaggatcaactgaagcggaacaagtga

SEQ ID NO: 367701 - DNA, 1116 bp, Pseudomonas aeruginosa
atgactccgatccggttttacatcgcacctctctgccttgcgatctccgcagggtgctccaactccgccccccagtaccagggcaaccctttcgacgagcctgtcgcagccccgcaagctgctgctgtgcagaaggttcagcgtacccccgtcaggccattgccgcgtgcacccctccctgaggctgcgcagatagctgagcgccctcccctagaaccaagcggggctgcggtgtcattcgccgccccggtgagtcaggccccagttgtggggcaatcatcggctgtcattgcgggttcgccctcgaacgtacaggcgccggttgtcgaggatgagatcctggttgaagctcatagggttcgagatgcgggcgacgtcagtggagagatcgatctgctctctgttgcagggagcagaggaaacgcccaagccttctatgagctggctcgaattcatctcaacggagagggggttgcgaagtcaccagaagcagcgatcgcctacttgaatcaggcaatggggatggggcatgacgagtcgaccagggtactggggtggctgtatgtcatgggaacaggcgttgctccggatattgaatacgggaagcgcctgctagcaaaggcagctgagaccagcgtcagggcacagcgcgagttcggcatggcattggccaaccagcgagtcccgcatctcgatgaaatcgaacgcggccttgagatgttgcagaaggctgcactggctggggacgctgaagcggcttcggcctacagcgcagtgtttgccaaaacagagtcgccccaggcaatagaaccagcgcgacgcccagcaacaccagcagagccactgaaagagcgggcgcttcggggtgatgtcggggcaatgtatgactacgcgctagcagtatcgctagggaaggtgcacgagcaggatgcacagttcatggcgtactgctggtattccgtagcggcctcccgcggtcacgcccaggccgcagtggaagcaagaacgctaggtggtgttcgtgtcatggctgatcgagctgagcctgggaagactgagcgctgcatcgctgacctcaatgcaaaggttgactcttacgctgccggcggccgctga

SEQ ID NO: 367702 - DNA, 396 bp, Pseudomonas aeruginosa
atggcgaattcatccccacttcgcgtgatgatcgttgacgactcccagacaattcgcaacgccggcgagaagtatctgatcgacgcaggctgtgctgttcagttggcggaagacgggttcgattgcatcgctaaggtgaaggactttgatccagagttcttcttcatcgacgtgatgatgccccggttggatggctaccaggcaacgcaactcatccgaaatcatgagcggtaccgggacaccccgatcgttttcctttcatcgaaagatggcctattcgacaaagcgaagggcgaggcggcgggggcgacggagtatctgaccaagcccttcaagcgagaggacctggtcgaggcagtacaacggctggtacctggattttcccctgcggcgtga

SEQ ID NO: 367703 - DNA, 183 bp, Pseudomonas aeruginosa
atgaaaattctgctttcgagagagccttggcgggctgagcgtcgtcccgatatccctgtggacgaagcgaatgaagaatggggctggctagagatctacataaccgatggcaagccagagttcgtcttcattcacgagcgaccaaccgaagaggagattcggcgccgtaaaagctgcccctaa

SEQ ID NO: 367704 - DNA, 447 bp, Pseudomonas aeruginosa
atgagcgaacttcttctgcgcgttatctacctggccctgggcatctacacctttgccagcgcactcatcaccaccagcagcctgatgtccaaatccggcgcgaagctttcccccgtagatgtcttcaacatgggtagcctgtgggtgaccttcgtagcgctggtgttgatcgttagctgggcttccaaggcatcagcggccagccagcgcgcccggcagttgcctgagtccttccagcggatctcctacctgtgcatggggctgttcttcttcacctgcgcattcgcctcgacgatgacgatcagcacctctgaccgtatgccgaccgacgtactctgcgtgggtgcactctggctgacgtttgtagtgttcatttctgtggtgctcttcagccagcgtcgtgttgcggtaggcgaggctgtacctgcagtagctgcaacagcttga

SEQ ID NO: 367705 - DNA, 786 bp, Pseudomonas aeruginosa
atgcctaagcagagaattcacctgactcctgccgaggcggcagctaaaggctggctttgccgaacccatcttagggcccgtcgactgatgccggcgccgaacaccctcccggcaggaactgtgtggcaagggcaaggcgcctacaaggtgtacgacccatcccactgcattccctatcagtggcagcctggcccgacccaagcgcgccgtcagtgggttgcatctcgtgccaaagagttgcttgccgatcgaacggttctgttagacacagaaaccacaggcctaggtgagaatgacgaggtgtgcgagattgccatcctcgatgccagcggtgctcctctacttgacacactggttcgcccctcacagccgatttccccagaggcttctgcaatccatgggatcacggatgccatggtagcgaatgcgccgtgttggccagaggtggcagaacggtttgcagcgatcgtcgaagagcgaactgtcgttatgtacaacgcagcattcgataaacgactcctcctgcagacacatcgtcgccatgggttgacagctccttcgctgataaccgattgcgcgatgctgctttatgctgcctggtgcggtgagtgggaccatggccgcggctcttggcggtggcggaagttagtagaggcagcagccgagtgtgctgcttctcaggaaggtgcgcaccgagccaaggctgacgcacggatgacgctggagatcctccgataccttcagcgtcgcaccaatggacggcgccctgcccgccctaagagctga

SEQ ID NO: 367706 - DNA, 687 bp, Pseudomonas aeruginosa
atgacaccagtaccccagatccgatctacaccccagttgggtttcgacttcctcggcgccgagcccgaggccatgtctgtgaatcggcccggcaacaccatctccatcgagttcgaaaccggtagcaccactgggatcaaggctgccgatgccctttctcgcatgtttgtggacgatcgagtctttcgcctgggtaagaccaactggcggatgctcctggatcacgcaatagcccgcggttacaccgagctttaccaagttgaggacggccggcaggcgcttcgaattccaggtgatcgcttcggtccgattgctcgcctccccgagctaggcccggagtacgtcaagcggacgctgatgggcaagacatttgccgtgatgcagcgtcggacagatctggttaagtccggccgccatgcttctgccggcggagccaaggtggaatgggtagttgggcccaagggcctcgaactcacggtctacgaagggcgccgcctggctggttcggtcatggtgactcttgatgagatcccggtgacctctcaatcctggcaggccgatgtccagacccagtcgacgtatttcagcaagctgattgttgacgctgcgctggcagaccatgagggctccctgggcttggccgcggctgaggctctgggtggtttcctcctggtacggggcaaatga

SEQ ID NO: 367707 - DNA, 258 bp, Pseudomonas aeruginosa
atgaggtgccccatgcgcgctgctgagcaattcatcctcgccgagctgcagattgattcgcttccagaagagttcacccaggagcaggcgcttaagcttgttacccgggcattgcaaagcagtgttgatgcacgctccgacattgacgaagtgcgcattaagtcattgcgtaatgccctgagcgccatcgagtcgaccacaacagaccaggttgcaaggttgaccgcgaagcgtgctttggtggctgacgatgactga

SEQ ID NO: 367708 - DNA, 678 bp, Pseudomonas aeruginosa
atgactgatcaagcgcttcatcaggttctggtcgcagacctgatacccgacgctgcacccgatctggagatctttggccatatgctggcgcttggactatctgcgctcggtcttcaggcgcggatggagctcatggatggctggggccgcatgagccttgtggtggatgggcatgcctgtcagtttggagttttagagccggaaaggactggactctccagcagagcgatagaccttcggttcggcttctcactttcgttcggggtccctgatggaggaagtctggagagtgagccagacgtgctgttgagcttaccggcggcgctgacagtcagtgagctgatagctctcgcccggggtaaggtgagtcccgaatcgtttgtggcaatgcagaactactcatctcgactagccctgcttgctccgatcgccaagttcccatcaagtgtcttggtggctgtaggtgtggttgggggtatcagggaagcggtcaaggtccggtacgaactttggactcaggatgacggcgtgccgcgtttccacacactggccccaaccaacaatccacatgaagccgccgaagaggcgaatgagcttgggtactggccaacggtttatcgctgcttgtctggcagattcgtctgcttcaagcagaccaatggtggggtcttcatctag

SEQ ID NO: 367709 - DNA, 543 bp, Pseudomonas aeruginosa
atgttcttcagccatctcgccggcgcgctctttatcgggctttgctatgtgctcactacccgatttggctccgctggccggtttatagggcagttcaacgccaaagacgtgggaattgctgttggcgccatggccacgatctacatcgccgctctgatcatccaaaaggctttcgatatcccgcaggagccgctgatggcttctttgtttcaggatcgaagcatgttcgaagtcatctcgattctgattaccgtgctggttttggctcccgttggggaagagctggccatgcggcactacttccttggaattttggactggcgccgcagcgtggctgtcgccgcgagtgcagttttcttgagtgctggcgcattcactctgctgcacattggccagtacgagaacgcgttgacgctctacgtgctgtttgcagtggggcttgtggccgggtatctgcgagtccgctccaatggactggccctgcccatcattgcccatggaagcgcaggcggcattgccttgatcgtaaaccagttcctctga

SEQ ID NO: 367710 - DNA, 438 bp, Pseudomonas aeruginosa
atgaaccatctctctcgtacgacctggcgtgctctcgcttcgctgaccttcggcattctgtttggatgcgccgcgattggttcgctgctggtaaccaacgccccacccttcttcgtacctcacctgctggccaccgcagtggctttagcgcccgccatgctagtcgcattcattactgctgcattctggaagccagctcgtgccggcctaccagtaatgctgttcttgggcggtttcacggtgcccgtagacatggcgtttctctgtctgaacggactgtttagcgaagagacgctccgaatgcttatagccgggctgctggtctgcgcggcggcctgggtctccgtcccagttgcgggagctcgaggccgttgtctgcccatgggcgatcgccatatggcaaatcatgcccgcattgaaccggtgatctccaaatga

SEQ ID NO: 367711 - DNA, 342 bp, Pseudomonas aeruginosa
atgacgagcccgctcgatgccgccagacagtggatagctgatgagtctccatctagagatgaaatcaagcagtcggtagacaacctctgccatctgtatgctgccccgcctgtggggatgacacacgatggcatctattcggcgatcacctttctgatggaccagctcggcgagcagatggacgcgttggtgcttcccgaacgcaagtcttcgatgggtatcgacgctgggatgctggtagaagcggaagagccaggagtacagtcccaactctcggagtgccctggcgagcggcgggctcgatttgaatgcctcaagcaggaactcaagagccccttttag

SEQ ID NO: 367712 - DNA, 237 bp, Pseudomonas aeruginosa
atgcctgtgttgccagagggcgaaagacttgtgcgcctcaccggccttccagagatcaggaaaaaagaggcctggcaggcgatcactaggaatcaccctgcgctagcccgcctgctgcaggagccggagttgaaagccatcatgcaagcattcgacgccgacctgtacgtggatgctgtcgttgtgcctaaccttccagcagagcccctgaaggggcgccgccgagagccagactaa

SEQ ID NO: 367713 - DNA, 363 bp, Pseudomonas aeruginosa
atggcctttggcacccttcaggccctggaggaaatcttcactgagctccaggtctgcaatacggtcgaagcggccaagcggctgaagcctgagtttctgccggatctgatcgtcgtaaccgatcaggtctcgccggtgcggccggctgttagcgtggcccgtgacgccgatgttggcgctactccagtgatcctgctgacaacaggcctatcagcggtaacaaacactgacccaagttgctcggttcgcattgagccgcctctgacgccgattcgtgcacgcaaggctcttgagcgcttaggcttgttcgcactcgcctcccaatctcccctgcccgtcaccgcgggcagccaactgtcgtaa

SEQ ID NO: 367714 - DNA, 627 bp, Pseudomonas aeruginosa
atgctcaagccgatcctcagctacaccgccctgtgcctcgcgattactggctgtgccgcaaagcagccggaactgcgtgactgggcctaccagtacgactcgaaggagcattcgggaaccgtgcatgtgaatgaaacgaccaacgtgcccagtgagcaatgcggggcccagtggcgtgacgaacgaacctatcagccgagcggcgttcagcagacagttggttttcgcttggaaatccagattcatgacgacgaccaggactccttcggtgacctgatcaaggttgaacttccttcgaaccagggcagcgatgtcctggtgcgcgacttccagaagaccaagacgctcatgctgggggctgacgcgaacggaatcatgaagcagggtgatctgttctttttcccgaacggctacttcgtacgagcagcccagccccagtttgttgaaaacgacgtcactttctgccttggggttgatcgtacctacctgccggatagcgagctggcatcgtctaacccacagatccgcatggaccgactgaacattcgctttgcagctcaacccggcgagcagaagacctatagctttggctcggccaaggtgaccgttcgggcggtggttctgtga

SEQ ID NO: 367715 - DNA, 219 bp, Pseudomonas aeruginosa
gtgtacccagagggcaaggcgcagttcctacgcgatgtcctgtgtgatggctacacggagtgcactgaggtggtggagtggattggagtcgatgaggtggttgagctggatcttgaagagatcgaaccgactccatctcatcggctggatcacgccagcttcagagacattcatgcctacaagctgatcatcaagaaatttgcagcagccctaacttga

SEQ ID NO: 367716 - DNA, 468 bp, Pseudomonas aeruginosa
atgcgctggatggccatgtttttcatactcacccctttggcggtccaggccgccactgaggaactgaacgtcacgattgcctctggcagcttggagccagttgtctatcgctacccgctcgaccaagaacggcgtgagattgatctgcggcaaagtggccggtaccacgtcgcgttcaaagacacagttaccaagaagagcatatgccgcgaggctcagtacaaaactggtctttcgctcaccctcaagccactgcccaaggatgctggtgaacctcagaaggtggaagttattggcctggtgaccaagttggctggagtgaaagatggtgagcgcctgtcctgcggcatcaaccaagaggtgagcctatcgcaccaggatttctctgacaccgtggtggtggaagagaaccggaccaaggcgatcgtcatcgacggtgtgtacaccgtcattctcaagatccagtag

SEQ ID NO: 367717 - DNA, 786 bp, Pseudomonas aeruginosa
atggcttggcactattcgcgtgttgatcacctggtaccgactgcagtctgcttcttttgcgagcgccccctgcgcagcgcaaaggggatcgtcatcacggatggggagaaggaggcgtacgcggggcctaactgtgcgaagaagcacctcggggccccagaggagcgtctcctggacgtagcccgcctcgccttgcttgtcgtgtccgagggtgacccaggagatacagcaccccaggcagtacctgctactcctaatccggcgccccagcgcggaagtgaacaaaccgccaaccctgcatcaacaagagcccccctccccccattggattcggtcgcgcagtacctccgtctgcgttacgagatcatgggcgcgttcaagttccacaagtcggcactgctcaccgaggcctacgactcgctcaagagcggcgacatggacgagacgctccgcaagcgtgttgccggcactatgcgcagcgcagctgagaaccgaaccgtgttcagcgagcggaacatcaagatctgcgtagccatgaatcactggcttcaggaagccgtcagggagactccgaaggagcgagccggcttcctgcaggggatgctcagtgccctgcactcccgctggttcctcactcggaagcagcttgagggaatcaatcgctggggcgaaggcttgcgcaagcgagtccacgacttccctcacctggacaccagtgttttcgatggggtggttgttcccgagttcatgcagcgcaccggcaagagcgagcagaaacccacctag

SEQ ID NO: 367718 - DNA, 1830 bp, Pseudomonas aeruginosa
gtgactgcatccacccctgaaagcgcaattgctgtcgcagtgcgacaaggcgatcaactggctggcgatcagctgctcatcatcccgttgagccagattcgccgtaacccgaacatcgacccgcgcaaaggtcgtaaccctcaagacttcgctgacctgtgcgcgagtatcgacagccagggcgtaatccagccgatcctggttcgccccattgagggggccgaggtgccctatgaggtggtcgccggcaacagccgctttgacggttcggttgaagtaggcaaggactcgatcccggcactcgtccgagtaatgagcgatgcagaagcgcgtgttgctgcggcgattgagaacatccagcgagccaacctgaccccgattgaagaagcatggcactgcgttcgcctgctggccgactctggcaatgatcacagtgaggtgtgccgcaagttgggttggagccgcaagctgctcgacagccgtgtactgctctccaagtgctgcgatgaagtggccactgccctcgttaatggccagatcaaactcggtcacgctgagctgctggcaccgctggtaccggatgaacagcgcagtatctgcaaggcaatcattgatcgtgagctgacggtcgcggctgctcgtgaccgtctgatgcagctcaccccgctgatctctaccgcccgtttcgataccagcgagtgcgccggctgcgagcacaacagtcaacgctactctgacctgttcagtgcgtctgttggcgaagcgaaatgtcagtaccgcgcctgctggaacaagaagaccgaagagttgatccaggtaaagctgatcgaggccgaggctgattacgggctagtccacaccgacctgaccctgcctgccgatggctttgtccttcttgcagcgaatggccctactggcgttggcactgcgcagatgaatgcctgtatgtcctgcccccgctacggcgcagtggtttctaccagccaaggccgtgaaggcgatgtggccggtgggtactgcttcgacaagaactgccacgccgatcacgtcaaggcttaccaactggtcgtggctgaagcgaacggtgaaaccgtggctgaagaggaagccgctggagctgtaggtacggatgcagcgaagaagccagcgccggtagcgggtaagaaaggccctgacagctctgccaagggcagggccaagccccaggagatcaaacgatcgatcaaaaaggtcgcgtttggcatgtacggacgcatggcgcagcaggctattcagtcgagtcgccaactgacgctggccatcagcattgtcagtctctatctcgacgtgcgttctgacgttccggccgaggcgctgaaggctgcaaccaaggacatcgacttccctgcagggctgagcaatttcagccgagccaactttgaagtccaactctcggcgctgccagttgaggcgttggagcagttgctctgcgacatcgccgccacttcggtgctgcgccgcgatggctccgacagctttgccaagtcgatttccggtgctcaatcccttgcgttcatccaagccgcgcagatgaacgcgactgacttcttccagatgactgaggaatacctcaaggcgctgaccaagccggcgatcattcaggactgcaaagccagtggcttcgccgcgaaattcgatgaagccaagggtgacaaggcgttcagcaagctgaccgcaggcaaggtcgatgaactcattaaagcgatcctggagttcaccgacttcagctggagcggctacctgccggaagcgctgaaagtttctgcccacaccgattctgccaccgcctga

SEQ ID NO: 367719 - DNA, 486 bp, Pseudomonas aeruginosa
atggaaacgaaccaatccatcctgcatgcggtcgccagtgctctgagcgccggccagagtgctcgtatcgatgtgtctggccttggcgacggtaaggtcaaggtcatctacaccccgcagatcggtgagacgccggaaggcgcgagccaggaagtcatcaacctgcgtgctgcaatcgcccgaccctttgtggtcaccggcactgcgagcgagatcaaggacgcctttgccgcccgtctgcaggagaaggcagcggttgtctcccgaggtctgaacgccctggacgaaattgaccgccttgcccaggcagctcgcagcacttccaagccggctgccgcagctgcaccggcccaggcgtcggtagcaacggatgacgacgaagagcgcgacgacgagagcgctgaaggtggcgctgttgcgccggcaggtaccgcagctgaggctgccccccagcagaaaccaacatccatcgctgaacagttctaa

SEQ ID NO: 367720 - DNA, 210 bp, Pseudomonas aeruginosa
atggcacagattctcgatcttgtacgtgttttccgtttcggcgcccgcgacctgcctgatccgaacccggctctgtccccggaggaggtaatgaagcactacgctggccaattcccccgcctgctgggcgcaaaggtcatcgaacccatcatcgaaggagacaaccatgtctacgagttcaagcaagcaaacttcggtgaccgtggctga

SEQ ID NO: 367721 - DNA, 1305 bp, Pseudomonas aeruginosa
atgaggaacacaggctacctcgtggacttcacccatcacggcgcgttctgcctagaggcagagcgcggtggccacctctcccctgacgacctgtccttgctgagtctgtatccgaacggctacggcctctaccagctggccgatctggcagttggaagggttggttcaggtctacgactgaacctgaaggaaatgctcactgacgatcagcggaagctgatgggcgagcacctgagtgccaagcacgtagaggtcggttatgcctcaacaatcgccttggcctgtgctgaagcagggttgcttaccgaggacgtgctggcaccggttgtcgctaccgtccgtgacagcggggaagacctccttcggcttgctcacaaagctctggatgcgctaatccccgaggagctgcggttggaaccctcgttggacgaggacgaaacgtatgaggttataggcactgcgatccacggtgagcacctgtacctggtcgcgcatgacaggttggtcttcagtctcaatttccctgagctgacatctgactttctgccgatccacatcattctggtcaagaccctcgagctgatgtcccggcaccttgttccgttcaacacaccagcgtgcgcgatgggctatggcagcctgtattgctgcgctgttgacgaggcatatcaaggtctggaagaagtggtagacatgagcaacccgatggccatcgccaactatctggagacgacgccatccgagaacatcccctgtgaaatcgagatgatcgggctgttcgatgaaggtgatggcttcacagaggatgggatcaaccatgccgtccagatgctctcggaaatgcacgaactgagaaccaactttggctactcagtaaggagtgctgacgaacctcatgaggtgcctgccctcatcctgcaggcccaggagttggtggatcatgggtcagagcatcgagcgttgcttgaggttctgatcgaggctctagagctttgccagcggaaccgagaggcgggctactactttgacgagagcaacttccagggatcagaagatgtgggcttgcggttctttgactgtatttgggttgaggtcaaagagaagtttcccaatctctcctgtgaggccctcgactacttcaactcctatgctcaggagtgtgcggagatttgtgtcggcctgccgattggtaacgcggagcttctggcacaggacaccttgagaataatggaacgaactcgacagtgccttgccctgttgaaaagaatccagtcttctcttgaggcagctccaaatgctcaataa

SEQ ID NO: 367722 - DNA, 711 bp, Pseudomonas aeruginosa
atgctcaataacgacaccgaagccaaagcccttgtcctgtacaagcacaaacagaccaaccggattgatctgacctgccacgatgtagtgagcacgaaaaccccaggcgaatttgtgcttggagccggtcgtgcattctcccttcaagaccgcgaggccctggtcgacattctgctcaacgttgaagacggtgttgagttcctcaacccgaggattctcgtgaagagccgaagctgcctggtttggtacaacccgccccagcacatcgacgtgatggtcaaagaggatggtgccaacctttcctacaaggctccgatccccggtctgctctatatcgctactggcggaaaactccgctgctacgcctataagggcaagactcgccctgatgccgacacgcccctctatcgccctcctctgggtaatgcctttggggatggttccttctgtacaggcaatgctcaaacgccaaccgaccactctgtagccagcatcgagggctgggagaacttcgtactgcgctgcaccaacacccacatgggcggtgtgagcgtgatcaacggcgtgagtgattacaaagacttctgcagcttctaccgggcgttgagcgaaaagggagccaagagcttccccagtggcaaacttgtcccggtatacgcacgcagtagtcatctgaccctggaagaagccgtgatggcaggtggtgcctaa

SEQ ID NO: 367723 - DNA, 765 bp, Pseudomonas aeruginosa
atgagtggcgcggttctgaagctgccggtagcgccggtactggaggccccagcccgctggactaccgacgaaattgaaatcgtggtgatcggcgcgggtggtaacggcagtgaagtaatcgactgtctcgccagtttccacgttgccctgcgaagcctgggccatcctgcagggttgaaggtcacggttatcgacgattcagtagtgcgtgactccaacgtagtccgtcagcggttctggccgtgcgacatcggccagtacaaagcgctcgcgttgaccaatcgatataacctgaaccttggtaccgagtggattggtctccccttccgcttcccaagccatgagacgaatggctgcatggcgtcagcagatgtcgtcattagttgcgttgatgtgaactctgcccgacgcgctatcggagactacgaaggtcgcatccagagagatgctctatggctggacatgggcaatgctcatcgcaatggtcaggctgtgctaggggccctcagtaaggccctgcgccgccgatatccaagcgtgattgaggagtaccctgaagtcgaaacgggtgcggacagcaatgtgaagtcctgctcggtagccgagtcaatcgcctcccaggactgcctagtgaaccggacggttgctactgcggcaatgaacccgctatgggagctgttgcgtactggttctaccaagaaacactggatcatggtgaatctggaaaccggcgagcaaggcagctacccgttcccggttgactag

SEQ ID NO: 367724 - DNA, 1395 bp, Pseudomonas aeruginosa
atgcccagcattcacttctacgacgcgctcaccattggcaagcacccggctgacggccagctggtgcgttacgattcactgtactgcaccactgatacggccgagctcgactccataagcatcaagctccgcgatgatgtctttgttccgcctgaccaggttgaggatggtgatgctgcactgattgacctggctgctggcgttactgagttggagtgggctcggatagcccatcgtgccttcgccacgccggactgtctgcacgttgcatacggcggcactggccgccttgaacagttcgtgcgcttcagcatgtaccgaaatcttctgccgttccccggtcacccgcagggactgcattgcctcgatctggaaacgatcatccttgccgtcaggctcctgcgccctgagtccttaccctggcagggggtggcgatgagcaacctacatcagtgcctcacttgggatgcgaagctcagcggggaaaacctggcagtccgtggaaaggaagttctcgccaggttggttgaggcggtgcccaagatggtagagcacgcaatgaagacgtcttcgttgccggcggtgcgagccgagctggggcttgatggtggggaggtctcagatctagatgctgtcagaccagcattgatgattcacagctcaattggtggtcagcgctgcgcggttgcagcctttcctgtggccgttgatgcgaactatcccgatatcctgtttgccgcagacctggaggctgacctaacggagctatgcgatccaactacggtcgacctcagtgtgttggtgcgaaccaggccggatgatcgcagcaagcccctcgtgcggatcagtcttagccgactccccttctgttctcccctcaaggcagtgcgcaatgaggatgcaaaacgcatggggatggatctgagggctgtcgatgccaacgtgagacttctgcgggaaagccgtttcctagctgcacggctgaaggaggaagccatcctggtgcttcctcctcagcccttcgatgtctatcaccggctttgggcgggtgatttctccgcggctgagcaggagcggatgaaggctctacaccaatccgagccgaagcaatggcttgaaattgcagcttcggcatctgatggcagatttttggaactctgcgagcggctcctcggacgcgaagccccatctctgcttcctgagcatctgattgagaattggaaaagccaggtgcagagccgagctgcaggtgatttggtgaaggcagaatcgctggcgagcctattgaaacggacagaagatatcgccaacagattcccgactgctgtaggcctggtgaggctccatgagcgccttgtcaggattttcggaaaaccgagagcgtccaccagatga

SEQ ID NO: 367725 - DNA, 741 bp, Pseudomonas aeruginosa
atgatcacctacgatccatacgagttcctacccttcatcgggtacgcctcgcccgagcacccgctgggggaacggtacttttccctgatgcacttcatcgagtcagagaaattccgtggagtagacgaagactatcgctcttacttgcggaaactggatgatccggtcgatttccgcttggagaccgtgggcgtcgcccaatgccgtcatcgatctgactgggatggcgtgaaggtctccttgatccaggccgggctgtggatgcagcttgttcagcgacaggaagaactccgagagcgggtactgatccccgattgctcgacgggcatccatctcatcgacgatgctgcccgggctatctacaagcgcctggtcgaggcaaacaagccagaggatgtcctgcggcgtgtagtcctaaccggagatgctgatatggggccagggaaacttaagcccatgctcgatggcattttccaaagccgtctcccagatgagatttatctgctgcaggagcaaggagttgctcgccttgccggcgagtatgcgatcagcaggtacattcctgtgcgggtgttcgctgagactgatgcacgggaggcagcagtggcagtgatggtgaaaggaacgcacgttttctcgtttggccgagagcagcagccctcaacggatttctcccggaatgtcctggcactggcggaagagcaaggaaagactgcccaccacatccatgttggtgactga

SEQ ID NO: 367726 - DNA, 486 bp, Pseudomonas aeruginosa
atggagggtttgcacgcccgcctgcttaatctactgtcaatcggcgaccttgagcgcgcagcctctttacaggctgatctactggaagggatgacaaaagaccaggccggcggactggcggcagctcaagttgcaatcagctacgtggtgaccgggcatatcgaggacgctaatgcgttcctacgcaaggcggcggccaagaatcccaaggcgggaagcgaagatgtcaggcgccttctgagcctgatggtttcagcatcgaagggtgtttacccgccgccccaagagttctttggattctccagtgacgcagtgcgcttgcaggcgtacatggagctggccatcttctatgaccggatcgggcagagcgactattcgagaagaatggccggtgacatggcccgctttgccgagaagcggtcattccgaggtgacgccggcacatcaaatactgtgttcggcaagctgctgattgagaccttctga

SEQ ID NO: 367727 - DNA, 1113 bp, Pseudomonas aeruginosa
atggccagcaccatctcaaccagctccaccgacctcggcaatctgttgaaacccctctgccgtattgctccccgtaagaatggcggtgcgcacggctacctcctgattgaagtcgtgggtgggtctcttcgcgtcacagccaataacgctaaccagcagatgatgcttagcgcgccggcgcagtcctttcagatgacaggtgaggatgcgagctactgcgtccctgccgccaagttagagcagatcgttgcggcaatgcctcgtgccgcaggtgtcaccctgacccacagcgacgggaaggtgaaggttgtctgcggacgtgcacggttcaccctgctggccttccaggcgtccgacttcccacagatgactatcgaggactcggcttcgactcgcttgagcgttgatggctctgtcgtagctggtgctttgaggcaggttgggttctgcgcagcccgcaacgaagctcgccactacctcaatggggtgctgtttgagatgtcgccagggcggcttactgtggcggcctctgacggtcttcgcctgggcgttgtagacctctgtgtcgaggccgttgaggatgcttccttcattcttcccagcagctgcatcgaggacgtagcgctgttcatcgcgtcggcggccggggagccgattgagctggctatctgcagcaacctggtgcgattcacctcgcgggcaggtgttctttactcgaccctgatcgatgggaaattcccggactatcgacgcctcgtcgatgcagcggagaaaggcgttcccctgcagatcaatcgccaggatatggccgactcgctttcccgagtggcattgctgtctcagggcggctctccgttcgtgcggcttggatgccagggggaaagcctcaccgtgcagtctgttgccggcgacgacgctgcctttgatgttctcccgtgtgattacaccggcgatccctttgaggtcggcctgcaggtcggcctcgccagtgaaatcgttagagcgctcccctccgatcaactccgttttatttacaacggtgcttctggcacgttgctgcggccaacagacttcccctcacacagtttcgtattgatgccggttcgcctatag

SEQ ID NO: 367728 - DNA, 1548 bp, Pseudomonas aeruginosa
atgactactactgcattcagcaagaagcccgacgagaagccttctgtacgcgccgccaaggtgggcttccgcctgccggaagtgcttccccccatcccgacgcttgacggccccaaaacgctgctgagcgccgaacaggagcagggccttggctatcgaatcatccaaggccagcttgacctggtgagcgccctcgcggtcgataccggcattgttgaggccatggtgaaggacatgtgggatgcccttggggaaggcgataacgctgacaaggctgttgcactggtctttcatcagggcgtctggctgcgcgcaggcatgctacctaaggccgagttcgccaacctggctcgtaagaagctcaattccattcgtagcctgatcagcgaactgcgcgcgatgtccaagcagggtctcgatgagacactgttcactgccgcggtgcgggatgagcttcgcgttcgtctggggcagatcctgccgtatgactacattctcaaccgtgcagcggaccagtttcgcgtgaagtgcaaaggcttgagcgctctctgccgtgacctggtgaagttcattgcggaagaggtgcgtctctcgaaggcacaagttgagggcatcgtctgtgggaactggacgtcgccgaagctgattcctgccttgctggcgtccggtggttacgagctgaagttctatccgccggcggaaatgaagcgactgcgtactgggatcgttgagcgtcagcaccagattctgcatgcggcaactatcggcgaggccccggcaggtcagctgctggcgtcctggtcggtcttcatgcgctttggccgtgacatcgaggcctgtgtagagacgttcgttaaggcgaacatgcgactggtcgagcgccatgtctatcagtaccgcttctcggatatcgaggttgtccgctccgcggcgaacatgggcctggtccgtgcggtatatcggttcgctccggaaatgggcttcaagttctctacgatcgcagtgacctggattcgcgtctgcatcctgcgagatctgaacgagcaggagatgatccgcctgccggaaggagctcaccagtctctgcagaagctgaaggcagcgctggctgcaaaccctaatgcctcacaggaggctctcgaggaggccactgggctgtctgctgacgatgttgagaatctgatgtacctggttggcgtcggtaaaccagtgtccctggatagcacttatcaggaggccggctccactgacgtggaaggtatgcatgagtccatttcggaccccaacgtcagcttcgaggcagaggttgtggaggagaacactagcgagttcatgggcggcattctcggtgagctgctggacgatcgcgagatgctcgtgatcactcatcgattcggtcttggcggtattgaggagaaaaccctggccgacatggcagagatgatggggctgtccaaggagcgcgtgcgtcagatccagtgccaggcgctggagaaactgcgcaacagtgaatacggcgaaagcctgctcgagctgtgggaggagtga

SEQ ID NO: 367729 - DNA, 354 bp, Pseudomonas aeruginosa
atgggatcgcaactgccaaccgcgggtaccgcgatcgaagtgcagggggtcatgggtagctttgtcggtgtggatttgcagagcgatggcggcgttgcgttcaccgtcaaagcggctcgaagcaatgtccggctgatgctggagcacctgcaggcgtcaggtcaggactgtatgcagatcagcgatgagattattcaggtgccctactctgcatgtcgctggcgatccatgccggcaggtgggctgtttgatgcggaggctcaggtcatgcttgggcaaacggaaggctgcctgcaggtaagcaagattgcgctgcagtttcaaactacgctttcgcgccgcaacaggctttga

SEQ ID NO: 367730 - DNA, 549 bp, Pseudomonas aeruginosa
atgtctaactcccaagtagctgaaaaccaagtcatcgaaattccggtcaatatgaacggtgtgctccgagttaccctgccacctcacatgagtgaagatgacttccgtgagctggcgatggagcgttttacccaaagcctaaagaacgaggtttttctgggggagtcgggcgaatcgacctattcgtttgacggcgaggtgtggggtactgaaggccaggcccaggttggcaatctgatgtttgaggttcagcacgatctggctcagaacatttcaggcgccgtcgtcgcgctcaagccccgcgcaggtgagttcggagcgaaccgctatcgtagccgggtgtgcgcgtatgtttccgagcacgaggtgtatgtcaccgcctttgatccaaaggtggggtctgagcgcgtgctgacaacggcccgcatggaaggcgatgacgtagtggtgcatgttatgaacccgactggagaggatgcacactcttctggcgagatgacgccgctggccagcattcccttcagcgggctggcgtcagcactgaattga

SEQ ID NO: 367731 - DNA, 999 bp, Pseudomonas aeruginosa
gtgccaatcacccgccgaaaatttatgaagctctctgctgcggcctgtgctgccgcggcagttggcctaggggtcaaatcccctaaagcctgggcgttcgacacctcgattgttcaactcatcagcgttgaccctgccaccttggaatactcggtctatggaccgtgctgctactggtgcgaggactacctcattgtcagtcactaccagccagtcgcgatcattgaggtgatcaaaggcggtggggattctgctatggggcagtcggttggtagtttgttgagtagtggagttgacaacaacgactacacgtccatgcaggtccggatctgggaggcgccagagtgggccattgatatggcaatggcctatcagtcgtgcaagctatgtggagtggaccaggccaggacagagaatgtcacgagcacaaacatgaccgatgtttgtggtgcggccgcgaataagctgatccagaaaggggttgagcagttcaacgagaacatgcccgactgtttccccaagctcatctatgacaccgagatggaccctacctggaacactggatgtcgtgacctcacgattgcatctggactggggctgctggagtgcaacactttcacctcgatgtttaacctcttcggccaggagcgttgcatcggcatgaaatgggggccgttgtatccccgccagatggcttcacacaatgacaatgcagcgatcgctgccggcatcgccgcctacagagctatccatgtcagtgggttcgctattggttcattcccattcaatgcggcactatcggtaggcaagctgcagcagacagccccgcatgtcaccgtagggtttcaagctggcagcatgtccctggataccgcgatgagggtcaatcccgtgtcgcttgaggagatctacgcatttgtatggtgggtacctgtaggctgctgcaagacctacgacgaagtgatgggcatgtgcgaacccaacatgtcctgcgactag

SEQ ID NO: 367732 - DNA, 303 bp, Pseudomonas aeruginosa
atgcagaacagcatccagatccacaccgcaccacttatccgcaacttcgcgacgcttctcgacgacgcatctatccaagtcactacgaagctcggcacccaaacattggttcgagccgcgttcaagtgcaccaccttcccttctgaatctgatcagcagctgagcttcctgaaagaacaggtcgatcgcgccaacccgggcgcaattgatctgctgcagggtgttgccggccgctgcctcgaagaccagctgaccgcggtgagacaactcattgccggttctgccacacgcctcaacggttaa

SEQ ID NO: 367733 - DNA, 1065 bp, Pseudomonas aeruginosa
atggacgaacagaagaaaaaagcactcgccgcagctctcggccaaatcgaaaagcagttcggtaagggtgctgtgatgtgtatgggcgatcacgatcgccaggcgatccccgctatctccactggctccctgggcctggacatcgcactcggcatcggcggcttgcccaagggccgtattgtcgagatttacggcccggaatcctccggtaaaaccacccttaccctttcggtcattgcagaagcacagaaggccggtgctacctgcgccttcgtcgatgccgagcatgcactggacccggactacgccggcaagctgggcgtaaacgtggacgaccttctggtctcccagccggacaccggcgagcaggccctggaaatcaccgacatgctggtgcgctccaatgcggttgacgtgatcatcgtcgactccgtggccgcgctggtgcccaaggccgagatcgagggcgacatgggggacatgcacgtcggcctgcaggcccgtctgatgagccaggcgctgcgcaagatcaccggcaacatcaagaacgccaactgcctggtgatcttcatcaaccaaattcgcatgaagatcggtgtgatgttcggcaacccggaaaccactaccggcggtaacgcgctgaagttctacgcctccgtgcgtctggacatccgacgtaccggttcggtgaaggaaggtgatgatgtggtgggtagcgagacccgcgtcaaggtagtgaagaacaaggtggccccgccgttccgccaggccgaattccagatcatgtacggcaaggggatctaccgcaccggtgaaatcatcgaccttggtgtgccactgggtttagttgagaaatccggtgcctggtacagctaccaaggaaacaagatcggccagggcaaggcaaatgctgcgaagtacctggaggagaatccagaggttgcccaggcaatcgagcaacagatccgcgacaagcgggccaatgtcccggcgccggcggcacaacaggatgccagtgatcaagaagagcaagaagagcaagaagagcaagaagcggtggcatag

SEQ ID NO: 367734 - DNA, 921 bp, Pseudomonas aeruginosa
atgagagttggaatcgtaagcacgaacgcagtgcagaaatcgatcgcaatcgagctgttagagccgctggttgggcagatcacgtcctatgacctctcgcatgccaaaagcggggaattggaggccacaaccgtacatttcctaatcgttgacctcggtgacccagcgcttcacacctgcgacgaagtcatggagctcgtggccaccactgacatctgccttctgcatgagaaagacctcttcaagatgagcacagaggagcggatagcctggcggaacaaaaccattgaggcgttcatcgctgcgcgcccagatctggaggcagatctttccagtaagaaggatgaagccgataacaagcatgtgcctgacatctggatcatcggatcgagcgcaggcgggccacaggcgctcaaggaaatgctcacggagttgccatccctaccgatcgccatcttcattgctcagcacatctctgaggcagcctacggccaaattctgaaccgggtacgagatgtagctccaaactggaacgtgcactcggctgctgatggcatggttgtcgagaagggggctatttacctgattccgcgggacagcaccgtagaggtaaaaggcggggcaattagactcaaaacgtctacgccgcgtgagcttcagttcaaccccaacatcgattccctgatccgatcggtctttgccacccataatcgccttggggtggtgatcctctcaggcatgggcatggacggctctgcaggtattcgcggaatcaaaggtaaggcaaagttgatcctcgcacaggaagagatctcttgcggcgcgaaaggaatgccagacgccgcacgcaaaacgggggccgtgaacctctcggcgactccggctgagttaggccgacaccttgtgaaactctacacataa

SEQ ID NO: 367735 - DNA, 5754 bp, Pseudomonas aeruginosa
atgtctaagcacgcacaaattgctcacctcacctggcttcgctctcctatccaaaagagcatcgaagcagccaagatccacctcgacgcctatcacaagaagatcctggatcttttggctcctccctctgacgcccagccaatttggttcaagaaccaagaaactgctcgggacgaagcgttggcacgtgcgatcggcgaagtcgccctgattcattcggccaccgttgtcacggagtgcaaaggcgcagtggcgctcgcccatgaggtgaagatcctcctgagcaacatccagaatggtattcaacctgctgggcgaggggaggacgcgctgctgtccgccatgaatggtctgcttgccattccaaagtacctgtcgatgatcattgatggagctccagacacagctgtgatactggctaagcagatcaatgaaattcgtgagctgaggggcgtgcagctgcttcaggaagacaacatgcttccgggaagcgtggaattcgctttcattgatcctccacacaaggacaaggactgcgcctccgatgtccggaatcgtgctttcgccaatgcgccaaagcgtttccttcctgcgttcagctcattcatgagcaagcagaacaaggacgctttagccgagatgaaatccgtactccgtgagctccaggtcgtcacctacgaccgtgaagtcgggtgcttctggtgggtaggggaatgcttgctcgacgcgctcgattgtggggcaatccgcagcgccggcaacacgatgactcagatcagaacgctgtcagttgccattcagaagggcgcgactggtggcgaagaggctgctaaggacaccttgggggccgctcgcttcaagtcacttctgggtgttctgatgatgtcgagtcgtcttcctgaagacattcaggctgccttggcctcattcaatgtgcatgcagccaccgatcagtctcagctgactgcgcttcaagctcgcctcgatcagatacagcctgactccctggacgaagtaatcggggaattgaagccgttgatccagacgtccatggtcgccttaggtcgagctatagcgagcaaaagccaggaaagcttcgacagccagttcacctccttccaatccacgatgcgccagatcactagcgtgctgttcatggtgaacgaggacaacctagccgcagtagcggcgaacatcatcgccaaagtggagcgcgtcagtagtccgtccgcgctctcggagccgagcctgcttgaagcgctcaaaaatgacgtcatgttcctcgatcagcgagtccagaacatgaatcccaacgacgtcatacgctccctcaatctgactaacgtaagccctgaagttatcgaggcggttctcggcactgctgtacaagaattggctgtcacgcgccgactgattgcgcagcatatggatagcaacactggcgctatcgatctacgcgcaggccttggccgtctgattacgacggcaaacgccctgtcgttctcgggtatgtcgaacgccgggcaggtgctccagggcgcctgtcagggttttatcaatctccttgaaggcgatgcgcttaaagcttcgactggcgcagatctcgcggcaagagcattggtcgctgtagaaacctacctgagctttatcattgcacgcctaacgccatcgcccctactcctcacacgggcagaggaggggcttgctgagttgggtatccacatcgagcacactgaggcgatagctacctcagatctcattgagttgttcgagcaggcacaaacgagcgatgagcctgaagatccgttcctcgccgaaatgctcgagctccgttcttccttagaacagctactcccagcgccgagtgtcacaaccccggtttctatggacattctgttccgtgccgcagaccggctttcgattgcagggaaactctacgggcacgaattcttctaccggctcgccaggtcgctgtcgctagctgcagctgaacttcgtgaaaacacacctaagctcgaccagcaggcgcaaaacgctcagcacgtagttaagtccggcgtcgagatgacattacgctgtatggacgactactccgcacgcgggactgttgccctctatacccgtgagatcgagagcgagctgttgaagctcgccggtattgaagaagagatatctagccaagaggccaccaccctcaagcaaacccaagagccaactccacacgagttgacgccgacagtgatcgagccagaggtgattcttgccagcgagagtcagcctcggtcttacccagacggcgttgatggcgttctcatggagattttccgtgaagagttcgctacgtcgcttcgagtactcaccagcttctgcgattccgacaactacacggtcaatcgtgatgttcggcgtgctgctcactcaatcctcggcaactcctcaaacgtcgactgtaagccgctgcagcaggtgtttggggctcttgaagagcgccttgactctctggccgcagaggacattgtcctcaccgcagaggatgtctgcaggcttcgactgatgctcgatgacacgggtgacttcatccaggacttcccatggaccaccgaatcgcccctcgtcggagaatggctagataccgtagctagtcttggtcgagagactctggatcaggccacaagcgtggctgaagagaccccggtcattccagaaattctgcatgcagaaactatgagtgccgtcgcacccagcgactcagttcaagagatcgatcctgcaccagcaatcgaacctccttctcgcgagtacaacgaggaatacggcttttacatcgatgaggccgatgatgttctccctagccttcagtccaacgtacaagcctggctcggggacatgtctaacaaggcgttggtctccactatcaagcgccaaatgcacacccttaaaggggcagctctgatggctgaagccgaatcgatcggcgccatcacccactcgatggaaagtctgttcgaaagccttgcgatccaactgattgcccctgatgacgactgtgcccaactggttagctttgctctcgactccattagcagtctcaccgccctcatgcgacgtgagttgccgtatagcaaaccgactcagctcatcgcttgcctagaacacgcagtcgataacaacaagatcgacctgtctttgctcttttctaacagcccggatcacgtggcccctgtgctcgaagtacagcaggccaaggaagaagatgaacctgaagcgctggaggccgagccagctgtactctcctctgagaatgaacctaaccaccagagtgaagcgacccaagaagaagtcgctgataccgctcaagagaacgacgatgccaagcaggctcttggcgagtcagctgccgcagatgctactggagctacccgccgtaaatcccgaagagggggccgcggtaaagggcatgccaaacggcatgagcagattcgctcagctagctccgatagcacctcacacccatcgaacgaagaatctctaccagccctaacagataccaatgccaagttggtagatgagccggaggctgggtctgcccctatcctgtccgcgcaaacgagccttgaagcaggccaccaggtggcggccgaggaaattgcagcggaagcgattgaggtccctcaaacaccggaacctttcactgctgaggagaacattccgcatgcagaaacttcagtcgcggaagaggacagcgctcgtcagcgttacgaaagagaagcggtcgatgagttcaatagccgctacagcctggacgaaatcgagtctgagcctgacctgaagccagttacgagtggactgatccgcaacatgcttacccgcgcggtcgaagcatctgcacccggggtgaaaatcgggaccctcgtcgcttctgagaagattaaggtagacctgaaactcctggagacagctgccgagcaatccagtgaactcactgctattcggcaccgccttgctggtctaaacgaagatctactgatgagcctgactgcgattcgcgagcggtttgatgcatgcagcctgcagcaaggtcagttcacgaccgccttgcgtggattgcttaactcccaaccgtccttaccaaacaatgaggacagagacctcgccgggctcgagcgcttcaacgacctttctgcactgcatgttggaatggttgcaggcttcgacgacatccgcgaggagttcgcggacgccatcactcttagtcgccaggtgcgcagtgctcttcgcgaacaaggtgatctgatcagcaacctacagcgtgacctgctggattcgcgcctggttccattcatgaccgttaagccaaggctggtcagtgcagtgaaacaagcaatggcgagcacgaagaagacggtggaactgaaccttatcggtgctgaggtgatcatggaccggatgatcctcgacaacatcaccgagcctctgacccacattcttcggaacgcagtcgaccatggcatcgagtcgaaagaacaacgcgacgctgctggcaaacccgcgacggggacaatcgctatcactgtctctcgtcgggccaaaaacgtggtcatctcggttgtcgacgatggcaaaggcatcgacgtccaggcggtccgcaggaaggcgatcgagaagaaaatcatctctgagtcagacgaattgacggacaaagagatcatgcggctgatcactgcaaacgggttctcgactgcggagaacgtcaccagcgtatccggccgtggcgtagggatggatatcgttgcagcggctgtggacagcctcggtggccagctccacatcggagcaactgcagggcaggggactacattcactatcgagctgccgttcaccataggtgcgaacaaagcgatgatggtcagctccggaagccagtggttcgcaatccaaggctattcaatcagccagatcctcatgaccagtacctctgcacttgaagcgatgcgagagtccaacggattcgccgttgtcgagtaccagggtgatgagtatgaagtggtgcatctggccgacttgatcgctatgccagactctcgtggggccccgccaaagcagcatgactcaacacttatcttatgtgcccagggcgacaccagaattgccgttgaagtagcccaggtcgactccatgccggagatccacatccggaagttggagggcatcctttctcaggtgcggggtatcgtaggagagaccgaacggcaagatggcaccgttgtgttcgtcctggatgttatcgagctggctcgcctcaaccttaagcgcacacaagacggctatcaggtacgtcagaaccgtgttcgttcgatgaagcgtgaccagaagcccgtagtcatggtgatcgatgactctcgtggattccgcacaatgctggaacgtcagttgaccggatttggatacatcgtcgtcagcgcaatcaatgggcaggatgcactagacaagcttcctctagagcggggcccagacctattcatcgttgatatcgagatgccgatcaaaaccggattcgagttcactgatgaggttcggcgcaaccctgtctacaaagacataccgatcatcatgatctcgaccaaatacgagttcgaaggccgggcgaaggcagctggcgtgaacgagttcctgaagaagcctttcaacgttcctgagcttgagaaggccattacagcagttaaggcaaatgtgcctcgtgagaccgtcgcatga

SEQ ID NO: 367736 - DNA, 789 bp, Pseudomonas aeruginosa
atgactagctttggcgtgatcgcccagcgggacacatttgcccggtggattgagattcttgatgcgagattttcaattcagattgacgccatacgctatgacgcgctgcaggccgcgcttgaacaatacgcggcgggaattggcttcagcctagaagccttacttcatgctgcggagaccaacaggctgcagtccgataactggacaatgatccttcacctggtaacaaaccacgaaaccaggttcttccgatcgccagcagcgctcgagttgatcaccgtaatatccaagtccatcaggtctccgcgcattctctctgtggggtgctcttctggtgaagagccctacagcatcgccgtcgagttgcttaaagcgggcatgtgcgcattccgtatccacggtaccgatgtctccgctgtctgcattgaaacggcccaagcaggaatttacccgcggcaccccgctgtgcctgcccgggcagcgacaagcaataaaacccacatgacctttcatgcatgggttcgtggcctggttaccttccagcaacacaacattctgcaggaccggcctattgagctcaccaagccgaacgtcgttctgactcagaacatgctgatctactaccggcctgcaactcgctacgaaatcctcgatcgcctcgcaaacctgctcgacgccggcggcttcctcatcacaggacctgctgaaaccatcagctggcccggcgccggcttgattcgccactctcattctcacctgaccgtcttccaaaggcccgctgatgtctaa

SEQ ID NO: 367737 - DNA, 1992 bp, Pseudomonas aeruginosa
atgagcacaaacaactcgctgttcaatttcgctgtacttctggctctcggaactggagcagctaccggattcaccgggtacaactacattcagggccaagtacaggacaacttcctgctcaaacagtcctatgcgcttcagagcagcatttctcaggctgtgtatctgagcgaccgcgctgcgaccgacagcgcttacgctccagagcttgaggctcttgaggctgccattgagcgccatctaaataaccttcagaacggcgacccaatcaaagggataccaccagcgccggcgggcgtactggctaatctgagttcactacgaaccgtttgggatgaactcgccccagctttctcccagatcattagccgtcgcagttcgaccgatcaatactctcggaacctggcggaagcagctaaagcaggggagggggttctaagttcggcaaaggtggcactcagccatctggatggttccggaagcgagctccaaaagcggctccaacaagctgtatcgcaaatggaaatcggcgctaagtccatctcttcgggcaatgccgtaacgctagaggcgctgcaggcttcaagcgcaatcttctcgcagtacgtcgcagatctttcagcattgggcagcttgctgcctaaaagcggcccgatggttgaggcccttatctccagctatcgcggcgctggcgcgacccaggtcatgattcagaagacgatccaaacgtcatctggcgctgctgaaaacattccgcatgcgaaaactatttgggcagcacgggaccgattcaacgcggcaacttctggtcttgtcgcaagcgtagaggcccttcctgcaacaaggccctacggtctgtacatggttttcgggctcggaaccgcaactatcttcctggccattggcgccatgttgcttatgcgctggatcacaaccactagctcagcccgcgtagagatccagggccggaaccttgaatcctccacgaggaacaagtcgaaggaaatcagcaccctcatgtctgagataggggtgatcgctgatggcaacctcaacgcgcgtctgaccgaaacgaacgaatcaactcgagaaattgccgctgagctgaatcgcatggttgagcgaatcgccaaaatcttcgacgaggtaagccacacaatctctggtcttgcggctgcaaccgagcaggcctctgtaacggagcagagtgtcgccacaaatcgggcggaacaagagaaggctattacccacgtcaaccagctgatcaaggggctcatgaccttcatcgttcagatcgaacagatgaccagttcgaccgatcagatctcggcggaaatgcaggatcgagttcgaaaaggcgagcaggccgttgggcatgttcatgaaagcgccgtgatcttgcagcaacaaactttggccatccagcacgcctacaagcacttgatcgaatcgttccaagccttggagaacattgcaggcgttgtttccgaggtagctgctaagagccaactggtttctttccaggcaaacctgatcgcagaccgactcgaagacaagggcgtggccaaaaccgttgcatcttcagcgactgcaatggaacgcctggcaagcgatacccgagaagccgtcgtgcagatcaacgtcgtgctgaagagcatggctgacgcagcccaagggactcagagagctgttgacgcagctcagcacgaaacagagcagctgcggaaccgatccactagtgcgcaagcggcattgtcggatatcagttcgatgactgggaccctttcaaacagcgttaccgaagtgatcgacggtactaagtccatgaaggctcagtccggcgaagtagggcatacgatggactcgatcatgcactacaccgcagagaatagcgctgccagtgagcagaccgcagtcgccgttcagggggtcaacacgcaagcgcaagccgtgcaaaggttgattgccgactttcggaatgagcctgcttaa

SEQ ID NO: 367738 - DNA, 381 bp, Pseudomonas aeruginosa
atgtcccacatccggtcggtttgcattgtcgacgatgccgcaggtatgcgcaggctcggtcaaagcctactgagtagcgcaaatatcactgtgttcactgcctcagatggctatcaggctctggacgtcatccgagagcaccaacctgacgcatgcatcatcgaccgcgagatggaggggatcgatggactgcagctaatccagcttcttcgacactggagcggctggggtgacaaacccatagcaatgctctccagcgctagcagcatcttcgacaagcaggcagggcttctcgctggggcaaacacatacatgaccaagcccttcactcgcgagagcattctctcggccatgcaagagttggagagcttccttgagtaa

SEQ ID NO: 367739 - DNA, 873 bp, Pseudomonas aeruginosa
gtgtatcaaacatcgctcagccaaatgacttcgctcggtatcaatgcggttccggttgagctgcgaaagatacctatagaccttctgcatcaagggatatggcagcaacggacccgcttcgatgaagacggtttacttgagcttgcggactcactgaaagctgcgggcaagaacgttgtccctatcatcgtcaagccaagagccgaaggcgggtacagcatcatcgccggagagcgccgatggcgtgctgctcagcgggttccacttcatgagttggaagctctggtcggtaactactcgcatgaacaagccatgttcattgctgcggtggagaatcttcagcgtaaggatctcaatccacttgatgaggccaggtcatatcaaaccttcatcacggagatgaagctcacgcatgatgaggtcgctaagcagatcggtaaaagccgaccgcatgtaacaagctacttgaggcttttgagcctcgatattcgagtcagagacgcaattgagaccggtcggctgacctatggccaagcccgaccgttgtgctccctcggctcgctccaggcccaaagagcgatatgtgagaaggctattcggctagggtggtctgttaagcgcatcaacgaagaagtttctaaagtgcttgataagccgaagccgattgccaggctctcggactcggatgttgatctgcggcgcctagagcgtgcggttagcgaagcaacggggctcgaatgtgtcgttaagcgctcggcacaggggcagtggcagattggattcaacgccggcaactccgattcctttcaaggtctccttgaacgcattggtgtagtgactgatgaagctgaagcagagcaactggattcatag

SEQ ID NO: 367740 - DNA, 1605 bp, Pseudomonas aeruginosa
atgcgtaaccctttcaagctgtccatactggccattgccttggcaatggccgggtgcagctcgcaaagcaaacctgtcgagcttggcacggtcgcaactcagagtcagtacgacgatcagatccaagacggtcttggtgctcagcgctataccgaggcgcagcttcttgcccagcgtcaattcaatgagtttcaaggtcagcttgatgaacttgaagaaaagcgcagagagctggatgcagcaatcaacgctagagcctatgaaaatggagcgatggaagcccccgcttcctcttctgaagctggtcgtattggtgactaccaggaagcatcaagagcatctcagcagcgcgtagcagaggctaattcgcaactggttctccagcagtcacggatcgagaatcagcgtgatcaagacctcctatctgccgagcgagaagcatctcggcgaattgctgaggccgaggatcaagagcgtaaggctcaggccgcagctgaagccgacctgagagaggaaatcgctgggcgccagagcattgatgctgccaacaggttgcaagctacccgggagtttgaagaccagagattcgctcttgctgttgcgaatgccgatgccgagcgccaggctagatcgacgctcgagcgagaaagcgcagaactgcagaggttgcagcttgaggctgcagggcgtctgtcagggcatgaggcccggatcgccgagttgcgtaggcagattgatgagatcgagcgaacgatcatccaagttcgagccagtgatggtgctttgctagctgggcaagagtcgaaagtctcagcagctcagacggaggttgatcgccttgtgtctgttggcaagcaactgcgcactactacgctcaccgcttcagtagcagctgtgccatccagcgatctagttcaaatgaaacaggccgagctggctagactcacttccgatgctgatgctcgactggcgcggcgggttgccgagattaaatcggagttggaggcacagaaggccggtattgtggcccgtgcccgcaccgacattgcttccttgagtgcagacgctgagaaggcgaaagcaacggtagtagcgccagtcgtgactgcccgtgccgtgtacacgggcaatccaaagcctgctccaattcgtcagcccgtggtaagggcagcgcctaccaaacctctacgtgatactgcggctccggtccttacggtcaatcgttttgagccgcaggtaaaggcgtctccaagcgttcctactagtgacgaacttggaggtgacgttttggccgtgggcgctggtgtgcaaccccccgccccaagtgcttccgcagccccccttgtaatcgcagccaagacgcgttctgtctacgacgttttctacgcctacaaagacgagtcaagctggacgaagtttcagaactacctcaaggcatatggaatcacggactttgaggctacgcataacaacgctgccggtgaattcctaatctactgcggccgttactacagtgaggaagaggcaggttcccgcgtttccttcctgaacagcaagaccaatacgaagcatgtgcaggtccgcgaaacccaggttccgatctag

SEQ ID NO: 367741 - DNA, 834 bp, Pseudomonas aeruginosa
atgaccaagaaaaaacgtctcaaaactccgggcaaggtcaccacattcaacgcgcagaagggtggggttgggaaaaccaccatcgcctatcactacgcatgcttcaccgcggctaatggctatcgtacggtggtgatcgacctggacgggcagggcaacctttctggtcgcttcttcccggtacctggcactcgggtgaacgggtaccgatcggtacatatgtttgacactgaggcacgggatttcctgccactggagtcgtccgtgggcgtggacgtggtctatgccctgaatcgcgacgtcgccctcttcgatattgagcaaatgccgctcggtgaagcagtcacgttcttcaacacaaagcttgaggcgcttcgcgaagaatatgacgtaatcatcatcgatactccgccctcgcacgggaacaagatcaccgctgcctgcgttgctgctgaccacctgttcgttcctgtggagttggccgcattcgctgtagagggggtagagaacgttcttgaaactcttcaggagatcagccgcttgatcgatttcgagatcaaggcaactggtgtcatctgtaacaagctccgtgcggtcaattcccatgaacacgcactagcggatctgcgtgccgccgttggcccgctcattctgaagcagtgcctggtaaaccgtggttctgttgatgacgcactccgcgacggcgttcctgtctgggataagaaaagcacaggagctcagcgcgacgcagggaaagagatgcgtagcctgatggcggaaatagctggtttgacgaatttgaaagtagatgggaaagcgggggtacgtaaatga

SEQ ID NO: 367742 - DNA, 222 bp, Pseudomonas aeruginosa
atgagacggagaactcacgctaccttctttgcctccacccttagcctcgcgaagctcctggcgtacctgttcgcgggtaagaggcggcatgtcagggtttcgagcgattgtcagcagtttttgaagacgatcgttgtccagatcaccaatctgcttaagcgaatgaaggatctcgctatcagtggttatgtcgtcatcgaggagttgggcaatatcgtctga

SEQ ID NO: 367743 - DNA, 207 bp, Pseudomonas aeruginosa
atgacaatcgacccgagcaagatggtggtgcaggtacgcgtggcgatggatcaggaagtgcttaccggcgagcttctgctccacaaggtctcgggcgacccacataagggcctggtctcggtgctcatcggcggtcgtcctgttgaaaagctggttcgtcttgagcagctggaaatcgtcacgatgatggagctggcgaacgattaa

SEQ ID NO: 367744 - DNA, 1254 bp, Pseudomonas aeruginosa
atgtcccatgaaaacgaacgtccttccctgaaggaggtcattgacggcattgtggtcaaagcaggttggctggagatcatcggccgagttgcgccacagttcaggaatgcgattagccatctcgggagcaacgtcgactgcccttttcccagccgtcacggcaaaggagggggagttgactcgttccgtttctcgacacacgagaaatacgaaggccggtcgatctgttcctgcaagcaagatgggtggcagcctgttgatcttctgatcgaggctggcgttgggagcaactgcaccgaggtatggctggagatcaaacgggccttccaaggtggcaacgagtaccacgcaaaatcaacagaagtcgtcgcgccccgcaagagagcgcgtccgacctatgaagagaatgcgtcgatctcgaaagggctgaatgcggtagtcaaggactgcattcacctgggacaccctgatgctcgcatcgggcgtgtttacttccggcgccgcggtattccgctcaatgctgctatcggtgatgtcatgttccatcctgctcttccgtactaccacacctacgtggaaggtcgtgagcgcaagaaggagctgatcggtcacttcccggcgatcgtgtcgatgttccgaaatcaggcgggcaagctgatgaaccttcatcggatttacctggatgagaacgggcggaagctcgagcacccgaaagtgaagaaaccgaagaaggtctgccagggcctggatggttggtcaaaaacctccattgctgtcgctcgcgtagaaggctgcagaacactgcacatttgcgagggcgtagagaaggcctggggtattcaccttgcaacaggggagacagtgagagcggctaacagctgcacttcgctgcctggacaagtagtgagccgtgctgagtttgacgatgtcgtgttgtggtctgacctcgatccgtacaacgaagcgcgtggccaagatggtgatgggcaacgctacatgtggaagctgtttattgagctgatccggcaagggttccgagtgtgcctgatgctgcctgatacgaatcccacgaaggaagctaaggggcctgactgggaggacttgatcgtagagaacggcgtactggaagtaccgcttgctgatcgcttcgaccgcctgtgcgactttgctcaggagggtggtgtgttcacgcctatggggcatgtgaagaagcgctcgaaagagctgctcgacgcaaccccggtggcggcgtaa

SEQ ID NO: 367745 - DNA, 945 bp, Pseudomonas aeruginosa
atgactgcacaacttaatccgacctacatcttcaatcctcggagtgacgattcggtcgtagaactatctccaacgcagatacttaaaggtttggtgtgtctgcggtcccttggctattccagggcgaaagtaaagtccaaagcgactccgattaacttggtgtttggctctgccttgcattgggttattgaggggtttgttaaaggctttatcccgaaagacgaaatggaaagacgcttcgaggagaaattccaagagctctccatggccggcttaatcagcatggccaagtcaaagactcgtgaggttaacgaggcgatcgggaagcgacttgccgggcagttccccgcattctacgagaatctcggccttcggccggtggtgatcgagggtgccttcaagctgcagattggcccaaagacgttcatcaacatggtcatcgactttgttggtgtggcggaacgagacatcatcttcaacggtgaggtttatgcgcgtaagggcgatacagtcatcctggattggaagactgccgctgcaaaagaaggcgcgttgttcgcgggggttgcattgcaactgacgctctactgggctgctgtatgccttgcctgcaagaaactggggatcaagcctccctccgcgtgcggtttcgcctccgggctaaagccgaacatcacgaaggaggagtcagagtctttgatcaatgccacgtggatgccgattcagtggacgcggcgtagcacaagcgatatcgaggatgcactcgatcttgcgcgtgcgctggctgggcgtattcgccgcggtgagtttcatcgcgtgtcgggtgccgcctacaactccccctgtgacagtcaaacactgtgcgactacgcggggctttgcctaaccgcttctactcgcggctacaaaataccggacggtctgacaattgcagatcttgtctaa

SEQ ID NO: 367746 - DNA, 513 bp, Pseudomonas aeruginosa
atgagagagtcctatcgaatggagctgtacgctcaacgtgcaattcgtcaacgcatgaaagaacagcaggaaatcccacgaggggaggggagcaatctccagaaatacctcacgcaagggatgctgatcagccaggtgttgtcatcaattccacctcttgagcgaatcgactatctgaagcgtcacagcgatcgttttgtgagctcggatggtgcagaagaaatcgcagtggtttggggcccaaatgcccaggtggtaacccatcggatacttagtgcagaaatgcgcgaagagttcggtgggcagcactacttggggtcgtgggttcgcaaactcggcccaagcgaacgcgatgcacttcgagcggagctggttaaccgcttggaggctcgtgctcagcaacgagttgaggagaagaagcagcatgtgattgtgctgactctggaacccgagccgctgccagaattcctcacgtatcaacctgaggaagaactaccaaatttccttcgttag

SEQ ID NO: 367747 - DNA, 435 bp, Pseudomonas aeruginosa
atgcaatgcaatgacttgaagactcgtggtctcattgaggtgataacccttacccaccagctggcagaaccttgggagcttggccgtctcgcggccctggtccacggggtgatgtcggataatcccttccaggccgaaaccgttccccaccatgagtgggctcgcgggttcgtctttggggctcaaatggcggcaggggaggtggaggtgattgtcctcgagggcgtagcggaaacgctgcctgtcatcgagagcgagatccttccggaacgtgccttctgggcatcggcaaagctcctgcagtgcagtcgtcagctttcggatgagcagcttgctgctcgtatcggagtcggcgtaacgctcctgcaggaagcgatgcaattccatcatctgtgcgatgtggagaacatcgagctggcccgcgtggctggctag

SEQ ID NO: 367748 - DNA, 639 bp, Pseudomonas aeruginosa
atgaatcattcaagccgttcggcctgctttgaattgctgctccaggctgctttcgcgtcgagccaaatgcgcgtcctcaatgtgattttccaagagggcgtgcactacggctctggcattgtcggtaagcggattccttactcggagaagcaacggctggatcgaagccatccctttgaccaggcctgtgacgctgcccggaacctctgtgaggttcttgcgcggtactgcaggagattcaacatcgacccgcgactctcgccactctatgaggggctggggttcaaggaagaggtggagaagattctggagagaaacagggttgttgagtgcgaagtgctcacacctgctgcgattttttatgcagcggagaaaggcaacaagctgctctacgatggctggcaaataaccgtaggaagtgcagattttgcaaccgacgcgtacggacaggatcagtggtgcgagccattgatcctctccaaggttgggagtgaaccgatcatcctttggatgcccggggaatcgaaagaccgcgcacgtgaggcctatcgtgaaatcacaggggagaaattccctggcgatgatgggcttggcaaagatccgtttcatgcctacgaaaggtactgcgggctcacctag

SEQ ID NO: 367749 - DNA, 1140 bp, Pseudomonas aeruginosa
atgaacaacgtagctaacgcagcggaaatgactgttgctgaagtccaggctaagcacatggaagccattaagtcccaaaaggtcgagatggtaccggcgcatgagctgttcggttttcagcaacctatggctggtgtcgggaaactcccggtaccggtcgacgctcatcccttgactccagtatgcgactccgactttgtgtttcctgaggggctggttcgccggttccttttgagcatgcagtcgcgggaaagcatcatgctggtcggcgataaggggacaggtaaatcgtccctcgttgcccaggttcacaaccggttgaataagccgctcctgggtatcaacggaagcagtggcgtcgatgaaactcacctcctcgggtcgaagaccattgagggtggcgatgttaagtccttcgacggggttctcagctatgcctaccggcacggtctgtccttcctgctcgatgaagtctgcaccctgagaccaggtgttcttgtcggcatcaacgacttcctccagggagattcggtggtgacgctgaagcaccacggtattaaccctgaacttgacccgaggcacctgctgtcgctcggttctgggatcaatatcgtcaagcacccaatgttccggttgttcgcgaccgacaacactgggggcaagcagagccgcgacctgcggttcgctggtaccaacgggcagaacgctgcagtacgtagccgcttcacttccttcaaggtgccgttcatggctccggacaaggaaatggcggcactcaagaaaatcgcaactactctcgccgcttcgcggaaattggaagcagtaagtgatgtagagatccgcggcatggttgagtttgccctccggttccggaaggtattcgcagccgagttggcaaccgacaacatctcgttccgcgagctgaagcgttgggtaacgaagcgcaccatctacggcggcgatcctgctgcattggatgagtccttcgttgattctctcttcaccaacctagagacgctggaccaagtacaggctatggagcaattcgaaagcacattcgggcgcaagctcgaactgccggaggagtacagcctgagcgctgacaagatctgcgatggcttcaccaagaaagttgcataa

SEQ ID NO: 367750 - DNA, 804 bp, Pseudomonas aeruginosa
atgttcttcttgagcaacccgaaaggtgcgtttctcgccggctacgtgccggcgggcgacaccactgcgatcctgtttgaaggccaatctggcggtggaaggacaaagatccacaagaagttcgaggagcgtcgtgagacgcccgaggctgcttgggatttcctctgcagtcaggtaaccgaagctcgcgctgatggctaccaggatgccagctaccaaagcagcacgctgaagccgccgggggatacgttttcggatgtgttccccctggcgcgtcgaggcatatacgcacgcgttgagtccatgacgcatgagcagttcacagccggtctcgatcggctgaatgaagttcacgcaaatgtggaagaagcaggtgtaaaggtctccgtccaggacggcggccgctgggtacgactgagcctcggttcggttgtgatcgagtacggctatgttccgaacgcgctctgggaaaccatgagcgctaaggcacaagagctgagcaccgagaagcggatgatgaatggcaacttcctgctaccagaggggaaagggctgtggcatctgcagacacaggagagcgtgctggacgtgtacatccgggccttcatggccggagctatcacggctggcgccaagatccacttcaactcggatcacccctggggattctcagaggtgacaccgtttctcaatggcgacgttactggactgagctggtatcagctcaatccagggctgctgcggaaagtccgcgctcttgagccccaacccgaaccaatcggtggttgggacttttacctttaa

SEQ ID NO: 367751 - DNA, 222 bp, Pseudomonas aeruginosa
atgaacgtattgaaatcgctggttgtacgcatcgactccgctctggactatttctggattgggctggtgctgcgcacttatcaccaggttcaggccgagcgttactgccgtaaggcagcgcgcctggcttggactggaacgctccgctccaactatgccgttgtgcgccgcgaggcccagcgtcatcaggctgaggcggaaatgctaggtggtaaggcatga

SEQ ID NO: 367752 - DNA, 1938 bp, Pseudomonas aeruginosa
atgcaaagcgcagcatctaactcgatgttgaactacagcgttcaagacattaccgatggttggatggccttcctgaaggtcctggcctccaactatgggttgaaatttgtgattggtgagcgtgtgccgccggcgacggatggcaagacgatctaccttccggccctgccgatggtactcaccgcagatgacctggacctgttcaaaggggacgggtttcatgaaatcggccacatcatctactccaacattccgttctttcaggcattcgccaagcagcatggcaacttcggtcgcttcctgctgaatgccctggacgacgtgttcatggagcggaagcaagccgcaaatgagcggcaagctgggtactacctaagacggtcagcgcaggtaatgtttgagcggaagcaattccgtgatggcagtgcatcgccggctgaagcagttggttgctactcgctgtgcttcctgagtgcacaagtctggagtgagtacgtgccgcctctcgaggtggttacggctaacttcaacaagcactttggcgagcatgcagacaccgtccgggagcacctggacgatgtgctgctatctgagtttcctagcgtgcagtcgactaaccatgccggggcccttgcgctccggatcatggcaatgctgcaagcgctggggcaggaggatgagcagaagcgcaaccaaccaagcaatacgtctcccaagagcaatgagggcgaaacgtccaatagctccaatggaggtgccaaccaacctggcgacaagcaggagcaatccgacaagtcgaaaggggagggtggtgctgggaaagagggccagcaaggctccggcgggaatgactccaagaacgcttccaaagcagacggctccggccgttcgctgaaggagattgttgacgaaatcctccaggacaagagcctgggtgatggggaggtgtttgaccgccgtgaagcagtgcagggtctttctgactccgtagcgcgaggtaagaaccctgagtacaagggccaatcagttgtgcccaagatggtagtcgacggtaaaacgcctaaacctgggaaaccggggactggcgtggccggcggtgcgggcgtaggtgaggtggtcgacggcattgccgtttgccgccctgacgctagcgaggcaaaggagatggttcagcgccttggggctcgccctcaggtactggctcatcgcctgcaggccttgctcatgcagcaggaagaggctgaagccatttctgcaccccgcgggcagctcggccaggcacacctctatcgcttcggcttaggggatgtccggatattcacccagcaagaagaattggaacgacccaccacagcggtttcgttggttctcgacctgtcgtcttcgacacaggacgcgatcgacaagaaattcgctcagggtgagaaggaccagttcatggccaccaagcaacccagcacgctgcgctcgatccttgagtctgccgtgctgctcgaaaaggtcctcgaccagatcggtacgcccagggagatcctcggatttgccccgcgcgtaggagagctgatgtcgatggttcgtagcttcggcgaggatcatcaaacagctatggcaaggcttggaggtttgcgtcgtatcgctggtgggaatcaaaccccaatcggtgaggcggtttttcatgcagggcgacgtctggtcagccaggcgaccaatcggaaagtgatgtttgtgctgaccgatggcgtaccgagcaacgtgacgaaagctgtcgagatgacccagtacttccagaaagcgggagtgcgagtggtgtacctggtaatcggctcgtcagtccaaacggactggctggtgaaggctgggataccgcatgcagtcgccgcgacaagtgcggacgtaagtccaatcttgcttcgtgaggcaaagagcctgctgggctga

SEQ ID NO: 367753 - DNA, 219 bp, Pseudomonas aeruginosa
atgggacacgtagagcaatacgagttcacggatgcgcgctttgatgcggcgtattcagcgaatacccaacaggagatccaaatgctggcggacaaggtgggctacaccggcccaatcaagtctgccattaaggcctttcctcctaagccgtcgttctctgttctccaggagcgtgcactgcgtgagcaacatgacgcagatgacgaaatcccctggtga

SEQ ID NO: 367754 - DNA, 1200 bp, Pseudomonas aeruginosa
atgactaacgtaaacgaagctgtagcgatcgtcgcccagactgctgagacgaaagtcgccgtcttcaaccacttcatcacctgtatttctgaagaccgtcaggtcgacatgaaggacatcgatgtcgtggtaggcgaactgccgaaggaaacgaagaagctcctctgcgagaagatctttccgacggaattcctgcgtaactaccacagaatccgcgaggctgcggaggacgtacttgataaggatggctccatcaagactccgcttggcggtgttaactcgattgcttcggcgatcgagaaaaagaaggagctggacgcactcaaggttcgctgggatgagcagatggctcaagacgagctgagctacgccggcatgtgctctgagcacctgctgaaacttagtgcagctgcagtagatggtggggctgatccggtgctagttgccaaactgactacgcatctgatgcagcgtcaacccacctgggatgtggtgaagaaaaacatgaagttcgcgtacacggttcacgtccttgatctcaatggcgaagactttgtaccggggctcatggaggctcaacgtgacagcgttgtggccttaagagagggggtgatgggcgcctgcatccagcatgtctgtggtgaagcgctcgcgatccttaaaaccatcactgggaaggccctcacgggtaccaacggtgagatcaagctgaacccgcgcaccatcaaacgtgcgaagcagatgactgaacgactggaacctctggcgttcatccatccgctgatcaagcctctgcacgaagcccttgtggctgagcttgcgaagctgccggtctcgggaagcatgaccgctgttgagttctccaacttcgaacagtgcttgcttgcgctgcgtgatcagaccttggtctgggatcgcttgcagaaaaagctgccgctgatcgctgttgtacctgccccgcagcaaggcgcttcggcgtctaccgctgctggtcagcagggagtggcccaggcatcggtaaatcctcaaaccaccaacgtatcgaccgcccccgcggttgttgcggctgaagtagtagcctcggctgctgcagaagtggtggatcaagaggagcaggaagaagcggtcccggccgttgaagcctgcgttgccaatgccttggaagtcggtcaaaccggcgacctcctggcgttctactaa

SEQ ID NO: 367755 - DNA, 732 bp, Pseudomonas aeruginosa
atgcaaaccgatctgtttggcgcggaaatcgctaaaccatccgttaccgagggcaaaccgcggaagatgaagccggccacaaagctggtgttcgaccgcaaagctctttggtctacctctgggtacctgccaggcgcgaaggaagtggatgaggacgatgtcgcgaaagcgactgcaacgtctgatacccgctctgataacgcaaccattgaacgactggaagcggccttagggctggctccacttgtgaagaatggacagtggatgtttgacgctatgggttttctctaccggcgcgtcggcaaacccttcactggaacgaggcagttcggaggaaaaggccaactagtcagggagctgaaccaccaactcacattgcgtaccgcaagggaagcgattgagccgttgttcactgatccatgttcttggctcgtcattaactccgtgtccgttctcaacaaacggctatggatgatggcgccagaagaggatcacaaggcctgccttgcagccttcctggaagtgatgtcgcagcacgactttatcgacaactctagaagcggagagaccatcaggtcactcaccaaacgcgaccagatgcgggagaagcgtgcagcaaagcgtaaggatctcgagcagaagaaacagcaacgagaagagcaggcggtggaggcgttgatggacgctttcgagcaagacgactgcgactttaacgacgacatcaccgagtaa

SEQ ID NO: 367756 - DNA, 615 bp, Pseudomonas aeruginosa
atgaaaattgaagttaaagcagcagtgattacacgttttgacatggccgtattggcgattgcgcgttgtgcctggaaggtgatgcaggtctttgaccctaagcctcttcagacccacttcgctgcgcgtcaggctgataaatgcgtggagatcactaagtgctttggcctgaaagacgaagatgcaaccttgaacatcgctcgcctcagcaacatgcacatcggcagcgccaccggccgtggccggacggggcttgttgggcgcaaggggcttgtgaagatctacaacgcggagaacgggaaattcctgatgatccgtgcgcaaggctgctcttcgaagccgggtgcgaaacacgtcccaaaggacggcatcgcgttgaactatgacgcgatgaaagcgcttggcattcctaaggcccaggaagaaggactgagactgtttgttggccccgccagcatcggtgaccaggagtacttccacatgtatcaagatcccgatgcttccagccgaactgctcgtgcactcagctggtatctggcaatcgggggcgtcgtttacgccggactcgactgggcatttgcctttgttgggttcgtgctgaaagcgctgctgtaa

SEQ ID NO: 367757 - DNA, 372 bp, Pseudomonas aeruginosa
atgatcagtatctcgagcagcctgacgacccagttagttgcagaccatggcttctcgtttgagggtcatttccgccgcggtgtcgaaggcatcgtagcccgccttgaagccccccagcttcacttccccgagtccatgccgcttgaatccgttcgcgatctcatcgactcgttgaacgtgagattggatggggttttcccaggcaagggttactacgctttcgacccggtggctgagatggctaaaccagggcaccacgtgctggtgctttactctgacaaggtcttctgcgactcaatcatgggcagcgtcgagaacgagacactgccggccatttttggcggcattctgcagtggagagttgatggttga

SEQ ID NO: 367758 - DNA, 900 bp, Pseudomonas aeruginosa
atgctcatcgactttccagaaacgcacaggcgatacctcacagcaaagcggcgcgattcgggaaggtgggcgtacgaccttgtgaaccctgagaatcctgcggccggcacctatctgagccaccaccaggtgttctccaatgctgcggtggggtttggcatctatctgcgcaactacgagatcgatgccgagagcgcccttgcaggaaaggtccaggcaggcctaaaactgctattcagcaggaagcagaatggccgttacaccctgcacaatgatcctgggagcatctctctcacgctcgatctcgacggcgccttagcgctttaccgctggctatgtggcgacgcaccctcactaacctatgagctggcgaggactgggaccgagttccggacgttgagcggttaccaggcagatcgtgccttcgccctggttatgcgcgccaccaggtctgcaggcgagacccgagctgcaagtagcattgatgtcggtctgggcgaggcagacattcttcacttgcagctgcattgcatcgggctgctcaagctcagctatccatccctgccggacgaaacgctaagggctcacatgcgagctcgctccggtgcccacagaggcgcctcaacggcagagagcattgcaatcacttcctctgagagcaggggaggggaggaggcatcctcaacctgtgatctcaccgagaagaggtgcgccacagcgatatacgcgatcgggatgcagaagtggccccgccgtcatttgccaaccatcgagttcctgcagagccagggaattgagcggatggatcaactgatccaggcggcaaacaatggcgacttcagcgagtgggaaagggtatttggtgctctaacccgcacgcctcagtccgatttggggtag

SEQ ID NO: 367759 - DNA, 696 bp, Pseudomonas aeruginosa
atgagcacagataacctgaccttccccctcatcacccagcacaacgcggagtactcgcgtgagatccaggctgcgaaagaagtgagccggctgctgcagctggtcaacttccctggatcggatgtttgggtggatctccgtttcgactacacgctttccgatcattcggcgtcatcggtcgacgtgcttctgattcgaggacaaccccacggaatcgtgaagctcagcctgcagggcatgttcctgatgcaggacttcaagtcgatgatcctcgaagtcatccctcatgagttagcgcacatccttcatggcatcgcagccaaggttgaggactacaccatcctcaagcctcacgacgatgtctgggtcgatttcttcgatcgactggcggacagcatggaggttgaggcctgcgcaaaagtgcgcggcctatttgatgatcgggcagtacgactggctcgaggggggatactcgtaatctgttcgtgcggtggcgacgagggagcatcagtagtcgcagacaccaccgctaatgctgcaaagctccggactggagagcttgagtgcagtaagtgccgtgacccattcgtacgcgctgacgcggcaacggctatgccggccgcggtggccgaagacttagcgtttatcgagagaatcaaatgtatcaagctacagcacaccaacctacagcggtag

SEQ ID NO: 367760 - DNA, 1245 bp, Pseudomonas aeruginosa
atggggggatctggcgcaggtaagacccacaccctgcataacatggtggcgaacgtttacgttcgcgggatgacgttccacatcatcgacatcaaaggggactttaggcacgagaacttcgttaagagcggtcttgggcatctggttaagcccgagtacttcaacgacctggtcttcaattactacaccgatggcatctcgctgaatccgctgaaggttccgaagacggttgaagggggaggggtcttccggacgatcgaaaatgccatcgagctggtcaaggtcttcaacccccagaccggccagaagcagcttgcctacctgactgagattctgaagcgggtatacagcaaggccggcattgaccacgacaacatggagacctggaccagggagtcgccgacctttgcgacagtccttgaagagatcgacctgattgttgcgatgatgaccagtggaatggatgcggtctcagccagcaagatcatgggctactttgcttacgctcgcgaccaggcattggcgaaagtcagggtgttggagaaagacggggcaatgcaggagcaggtcagccaagagttgatacaactctccgaggacttcaagggcaagctggggggtatggttgaccagctgtttacgtacggagcgattaccaagcagcacgtattcgaatcggctgactgggagcactggtcgaaggaatcgcttctcagcctgcgctctgtgatcaacgtgatggtggataccaggctgttcacgcagtcgattgcccgtccgcggaacggcatgattaaccgctatgacctgggcaaccttagccctcggcatcagcaggtcatcatgcggatcatcgcgaaccaagtcttcgccatgggtgtgatggagaccaagagcaaagacagcttcaaccccaagttcccggcccacatcctggtggcggacgaggggaaacacatcaaggaaatttccgcttctgccattagcccgttcaacaggatcgtgacggaaggtcgcggttatggtgtgggtgcgtgggcgggtgtccagagccctgaccaggtgacgaaagacatgatgaagaacagcgacacgtccttcttgctgaagactccagaagcttcggtgaaggacatcaccagcatgttcggcgccaagccagcccagctgaagttgctcgaggtgaagaagaacgcgctcttcagttcagggagcggctactccctggtggagcacttcaggtga

SEQ ID NO: 367761 - DNA, 411 bp, Pseudomonas aeruginosa
atgaccgcgactgccgcagacctgggtgatatggccatcgtcagcggtgcagccaaagccgtcgatatcggcgactacgcatatgcagagcgagctttgcagaagttcgtctatcgcgacaaaaagggacagctcaagctgatctactttggactgagcggcgataccaggaagcaagcaatcgacacagtggttcgattgctgtgggagacggggcgtgatgacacccttcgccagttcgccgatgactacctgtcaggccgggagtaccagacgacgctctgccgaatcgctgagcgtcagggtgcttttgagcaggcctaccagtgctggaacaggatgggtgaagttgagcgtgctgaacgggtgatacgcacagacgcagctatcaagatcctaggaaccccataa

SEQ ID NO: 367762 - DNA, 1572 bp, Pseudomonas aeruginosa
atgagttctgctaagtcccaaatctcccctgtatccggcggcatcgcgctgctcacgatgttcgctgtgctggtttgcagctatgcgttctacctcgagtacaccgaccgagccctggactatcaagctgacgctcttgaaccgtcatggttcatgctcaagcccagcgtcgtgatacgcctgatttcagacggtggccccgttggtacgctgactgccgtagcgatgaacatccttcattcgtgcttctttgccgcattggttttcagtgccggcacattgggatttgcaaagtttttcacccctagaaatgtgaaacaggaacccgagcagcaggagactgaccgcccgaatggcctctatccatgcgccattgatggttcggtgatgatgatttctatccccgggggaatagacccctctactggccaggcgaccccagggataattgataccgatcctttcactcagatctttcttcgtgcagataggaagccgatcgcgacaaagcgaccaccgagcacgcccatcgaaaagctcgaagtcgcactctatgagctgcttgcagcacacccgacggtgccggcaagcgttgggcaccaccatgccgacacgaacctgtacgaacactctctatcgatcgcaaatgcagtggtcgcttacttccgtgaccgagggataagcgagcctcttgctcgcgtagctggtctggcccatgacatcgataagctcctcgcctaccaagagaaagcacctggggtttgggtcaaacgtaaggacgccactcaccacaacacattcagcgcatttcttgtggctcaacagccagagttcgcgctgctagaccaggacgaaaggcacgtactcactatcgcgctgcgctactaccaccaccctgagaagctgcctgagcacacccacgagagaatcgagaaacttatcaacgccatccggcacgcggatggcaatgtgatccgctctgagaaaagcgcaggcgttgatgccgcacgagaagcatcatcgactagcgggttgctcgatgccgccatggagaagctgtttgctaccgcgaacatcaacgatatccacagctcgggaatagcatgggggtggacgaaggatgcactcgaactcgtagtgatgcccatgtcccgcctgatcgagtcgattggcacattcctacccggtgagttggctcgccagctgcaggttggcgttgagactagacgctttgatcacccctgcatcccagtcttgctcgaggccttgagtcgcaacggactgctggtcaatgagtacaaagacaaggtcagctcaacgggattgttcgacgtaaagatcagcacaaagctctggaagtcgtgcgttttgctttcgaaggagcgcttgcaagagatcgtcccaactacagtcccgaagtggggaaatacgactttcaccatccggattttgcgagcgacggcagacaagcgacaagctgaagacgaagatggcgaggagcaaaagattccgcatgcagaaaccttgacccgccagatcggcgggttttttatggggttcctaggatcttga

SEQ ID NO: 367763 - DNA, 891 bp, Pseudomonas aeruginosa
gtgaagaacgcactgtccattctggcactgatgctcggggcccaatcggctttcgcggtagcaggcgcctatagcgatgctgctctgtccagcactggccaagctatgtctccgttcgaccgctcctacgaggcaggccgtgctcagaacatcaatcagccggtggactatcagcgtaccaagccttcatctctgcagattgacctgtcctccgatcaggcggttatgtcgatcgaagaaaccgaaacggagcgcacctaccgccagactctcgaagagctcgagcgtaaccgtcaggcgctttcggctgctcgcacccagactgagcaacaactgcaggcggcaaaagcgacggcggaacaggctgctctgaaacgtcagcaggacctggctgcccgccaggctgagatcgaagaagcgcttcgcctcaacctgcaagcgcagcgtcaggccgatcaggtgaaagtggagcagattgcggatatcgccagcatcaaggcgcatagcgatcagctgctgatgcttgctgaaagcaacgccgaggtcattgagtccgcagctcataagcgcgtgattctggagcgtatcgaccccacagcagtcctcaacgaacccgtatcggttgagtacgaagctgcaactctggtcgagatcgttgaaggaatgatgcccgaaggttggcgcgttgttcccgatttccgcaagcaccctgaactgcttactcggcggtatcagttcatctctaccgaccctcgtgatctcgccttgcgcgagctgaccgggagcgtgcgggatgcccgcgtgcgcttcaagtacttctgggacctcaaagacgaacaggggaatccgaagccaatgatcctcctgtctgacagcaacgaaggcgagtaa

SEQ ID NO: 367764 - DNA, 1641 bp, Pseudomonas aeruginosa
atgaagctcaagaacatcgtccttgcagtatccctggccgctggcctgctcggttgccaaagcgctttcgaattcaccaacgagcaaaagaatgctccgttgcgcccagatgtgaaggagagaatgcaggcgctacgtggcaacacgtacgtccgcgagattcgcactgaagacgttgcgaaatcccgcccggtcttcaagagcggtcaaggtctaatccttcgcgaggtgctggctgaaaccttgcctgggtacgcgatcattccgaaaggtcaggcagacctgaatcagcctgtcgacgtaatggccagcggcatgagcgttgccgacttcattgagtatgtcgaagggaccttggatctcgacatcaagatcctcggcaatcgcatcatcgtcagcagcttcgaaacccgcgagtggaaccttgccgcctttgcctcgacccggaacgtgaacaacgttatcgcttcgacgcagacccgcggagcccaagctggggaatccgatgaaggtgcttccgataccggtaccggcacctccacaggcaacatcatcggtttcactctatctgaagatgagtggacgaagattcttgagggcgcccgcaagatcatcggcgttgaagaagaagttgctccgggtgtaggggcaaacgctgctctcgctgcagtaggtatgcaaacgggggctgcaccctttgttcctggccaagatcctggcctgaacttcgatagcggttctgcaggtggatatgccccgaatctcggcgtagctgaagcgaaaccgtacatcgaaggaatccgctcggtaggtatcgtcactgcaggcggcaagccttcgaaaatgaaggtgctggatcgttacctgaagcgcgcgatcgctgagtcgaccaaggtgatcaacgtacaggtcgaggcctacgatgttctgctgaacgacggtaagcagaagggtatcgactggaacctgctcatcgactcgacagtcaacggcaacccgctggggctcgacttcttcaatacttctccgtccagcgatgacccgttctggaacgtcaaaggcacctatcaatcggacaaggtgaccgcaacagcgctcgttcgcttccttgagaactatggacgagttgaactgaaggatcagccgaatctgacggtccgcaacggtgtgccggcccagatctatgccggtgaggaactgacctacattgtcgacgtggagcaatcccaggacgtcaatggcaatgcgactgtcaccccgaaactgggtcgtctgaaagtcggcgtaaccctaagtttgactgtgcgcgtactcgacaacgatcagctgctcgtagacgtctggcctgtgatctcgaacctgaacaaagctgacaccatcatgatcggtgactactcgttcgagactccgcgagtgaacctgaaagagttcagtacccagctggttgcctcctccgggcagtcggttcacatgggtggactcatcaccaagcgcatgaatgaggccctgcgtcagcttccctggcagaacctggtcagcaaggccgtactgaacccgcttactcaggggatcaacaactcgcttgagcgccgtgagctggttcttgtcgtgacgccgaccctggttgaaggggtgttctga

SEQ ID NO: 367765 - DNA, 933 bp, Pseudomonas aeruginosa
atggcccgccagctgcagctcaacgtaccgatcgagatcaatggcaaggacgtaatctttgcccgcgactctatcggcacgaaggtgctctcgacggtcggtgaaggtgatgtctataccatcatcgagccagctggcaccgacggccgtccgccgatttacatcgacgagaaggaactggaagggttccgggagaactatccaggactgccagtctacggactttggcaaacccttttcgccaatggaaaggttgcacttggcgagcaactgaccatcttccgtaccggcgcgaactccggtcattacctcctgatggaggccggtagcgattacggcgaccctgcgaatatccagcgatcgtcggagttcatcggtggcttcctgagtgatgtccacgacgactatgaccttgaccatgctgttcaagttgtcgtcgacctggacgagctagagcttcctgatagccctgctcaaactcgaaacgagatggcagaccgtcgtcgccatgagcaaaccaaacgctggtatgcggttggtactgtttgcttggtcattgccttcgccgcagcggcgttcaactacgccatgtattcggttcataagatgaacatggccgagtacggcgccaaaaaggtccaggtcgacgagctaagccatcggatcgaggcgttgttaaaggaacgcctggagacgatgccggacgacagtttggccatgcagcgcatcgacgatttgctgacctatgagccggagctttcaactcctgaagctgcctctaaggcgaacagctttgtagcggagcatgtgtttcaaacccgcccagggtatcgcctcgatctttcgagcaaagtctcaggggtcaccgctgagctcctcccatctatggcctaccagttgacggtttctggcgctaaggaggcccaaaattaa

SEQ ID NO: 367766 - DNA, 411 bp, Pseudomonas aeruginosa
atggttctcacccttgcgctcacgctcaaggggacggtttacctcagcgacatgcgaaaactgccttctgactatgagcagatcgacatcacgctctcggaccttcggcgagatgttgagcaggtcaacaagctggatgtcctgccgaagctcgaaagctcttggagggccgcatcggcaatcgcaaagctatccggtgtgaacttcacccatttcgaaaccgctcctgaagctgatccagaacgtagctactcaggcccgctgcgtcattggaatgcgcaactggaaggggacccgcgcaatgtgctttctgttgctcgcacgattcaagcccgggttcccacgttcctctacgactacgccatttctggtggagtcatgaagctcaatatcaccgtggtaggcacctga

SEQ ID NO: 367767 - DNA, 642 bp, Pseudomonas aeruginosa
atgaagaaccgtctgatcaagtccgccctttgcgcaatcgccattgccgtagcgctcccgactgtcgcttccccaacactgaacaacgaagacgaccaggttcgccttcgtaatcagaagctcgaagacatgcgctacaagcgtgatcaactcaagctgcaggcggagatgtccacatctctcaagcagatgatcgacgctggtcagctggtcgatgagaacggccaacccctgggcgttgagagtattcagcagcttggtattgaagtccgtgaacgcgcagctaaggccggcccagaggaaaccaacccatttgcgtcagctcagcagcagctgaacagtgggatgcccttctcattcgatcagccacctggacagtccccggccgcttcctcgctcaaagctcaacagacaaagtcaggcgccgcaaaaggctcggttgatatcccgaacaccctgaggctgattgaggtgaaagccgactccgtcgtagtgcagtcgggaggctctgagcatgtgctgcggatcggcgataaggtcaacgaccgtaccttgctccgcttcgacgcgtcccgcgcttacctgaaaggcccatcgggtactgaagtgatcagtatcgattggtcgcgttctgctcgctga

SEQ ID NO: 367768 - DNA, 1743 bp, Pseudomonas aeruginosa
atgagctctgcagttgttcatcgccagaagcgcatcctcgatgtgctagttcgatgtggtgccattacaaaggctcaagctgacagcatggcgccgtgtgagtccatcgacgccgttattcacgacatcggccggctggcaaacaacgaggctgcagttgtcgccgcggtcggtgaggctatgcggctgcaagtcttcaccggaattgacgaagggcgcgaatgcaaactgtctgatggtgatgctcagttcgtcatctacgacggtgtgatgttcacgcccaaccccctggatcagaaggtcgtcagtgcggcgaatgcctttgctcttcggcacggactcgcaagtccaaagaacattggtgtcatcggcgcccagcagctcgaggctcttcgaaatgagggtatcgatcctgaccaagcagagacagcagactctgaacaccaaaaggaagtcgccaaaaagctggttacagagctggtcaggaatgcagctgctcgtggagccacggacgtgcatctggttccaagtcagcagaccgaccaggttcaggtgcgttatcgaattgatgggcgcctccgctcagttcggcagtacaaggagtccctgcaagagtctgtcacgcgcgtgatcctcgacacttttgcaaacaagcagtacgacggtacccagccccaggatgccaacttcaatttcgaggtgtccggctccaaaacaatcgaactgcgcgtcagcactcttcctgtcagtgctaagaatgggcgttcgcagaaaatcgtcattcgcttgctgggtaatgatcagaccctggtcagtttgcctgcgcttggtatgacccctgaaaacacagaactgatgaactggttcgggtctctgccagcggggcttgttcttgttacaggccctacaggttcaggtaagacaaccaccctttcggcgacgctggatgccagttaccggaatgacccggatcgtagcttccaaacagtgcaggacccaatcgagttcaggcatgagggaatggggcacacagaggctactgagcaactcggctttgctacggttcttcgagctcttctccgccaagaccccgatgtcatcctggttggcgaaatgcgagacgacgagacagcagaactggcttacaacgccacgatgactggccacttggtcttctcgacgctgcacaccagcagcagccatcagaccatcgaccgcttaatgatgatgaatgtacctcgcgacatcatcgcgacatacacaaccgcggttgttgcgcaaaggctcgttgcgaagctttgcccgcattgcaagaaagcgcaccgccttactgacgatgcaaagcggtatgtcatttactccggaaatgctgcctttgccggtacgactgatccagtcatctacaaggccaatccagatggctgtgatcaatgcaagaccggctttggtgggatgaaggggcgaatcggtgtcgtcgagatactgcagatcactccagacatccaggacgcaatgctcctgggtacccctggccgggttctacgccgcaaaggccttgctaatggcaccttccgggatatgtgggacgacggtctgcgactcgtaaaggaaggcattacgacgctggaagagctcgaaaaaaccctcgacccctatctcacggatcgaacgcaatctgcggaaagcaccaccgccgcagctactcaacaaaccacgcaaaaccaactgttgcctcaactttaa

SEQ ID NO: 367769 - DNA, 474 bp, Pseudomonas aeruginosa
atgaaagcatcctctcgcaatatccgctcgatgaaagcatctgctgcccaagggggcttcacgatggtggagctggcgttcgtactcgtcgtcatcggtattctggcctggaccctcctgcccagcctgattggccagaaggacgatgcgaactacggcgccgccgccacccagatcgaaaaagaattcgttggtgcaatcggccgagctgtggctcgccagaacaagtgcgacgcaaccacagttaccaaggccaaactgctggatcgtggtctgcagtccaccacaccctggggtaccaactggaccgtttcctcggtcaccggcggcatcgtaactgtcaactatgtggttgaccccaacgactccaccgcggcatccgatcttgccggccgcctgactgacaacggtaacgttgcctccgcaactgctagcggcaccaccagcatcaacatcggctttcgctgcaactga

SEQ ID NO: 367770 - DNA, 1173 bp, Pseudomonas aeruginosa
atggcttactggcaaatcagctacttcgacgaatcgggatatgtgcgaaagctcccgtctctcaaggctgatagccgcgagcaggcgatccagctcagcggcctttcgaagcgtacgatcgaccaggttcgcatcgactacttcggtggcatgaaagcagccttactcgaccggaagtttccggtggtcgaccaagtggtgatgctgtcttcaatctgctcgaagatcgagtctggctggcctgccagccgggcaatcatggagtcggtgcccttcgccaagatcggtattaccaaagcgcagatggacatttgtgagaagccgaaagacttcttcaccctgctgcgcttcagcgacacggtggtgatgctggctgaaacgggcgacaagacgggcaaactctcgcagtctctggaacgagcttccaagacaatgttggacaagcttgagtctgaggctgagcatcgtaagacgctgatcaaaggcttggcctacaccgggcttggcctcgcttttatcatcctcgtcccgttcattggtgggccggcgctcacgaatttcatcgaggttcagcgcctacctatcaagcccaacactacaagccacatcatgttggggttgtctcacttttaccattcctacggtatcccgaccttggcgctcctggcggggctatacgtgactcgagacaggtactgggattctgtgaagaacagctggccgattgtgcacataaatgagcagctgaagattacccgggcgatcaacttcgtctcgaactaccagatcctgtccttcagcggatttagtaaccagcaggccttccacttccttcagtcaaggagctcgggtcggacgcagcggctctttttgcaagcgctcgaacgcacacgcgaaggcggtgctttggcaaccagcctcgatcatgaagactggcctgagttgatgaggcagaacctgcaagggtttgagcaagcctcgatgaaggatcgggagaagatcctttcgaacctgctgacagcgctgaagatccactatggccaggcctcgtcgaaggtaagccgtatggccagtgtattcgggttcgcggcgatgactgtggcaatcattttcatggctgtgggcttctatctgccgcttgttggcatgagccaaggcatccggggttactga

SEQ ID NO: 367771 - DNA, 285 bp, Pseudomonas aeruginosa
atgtcgacctggtcttccacccaggtgctacagagcaagctcacagacgactacaagctcccagacaagaacgatctgggaacaagcttgttggtgaggttcgattccgcacgctgctacgtggctgttgacctgccattcctggaggacaactacgcaggcatggaaacccaaacggtcaacggaaaaacccgggtgatcgtcaccacgtcccgcaaaggggctacaggtgctgactgggtcagcgaccagaagaagtttctgcatcttgaagacaccaggtaa

SEQ ID NO: 367772 - DNA, 1014 bp, Pseudomonas aeruginosa
gtgatcacttcacaggcgaggcaacccgctgcggtggttaatcctctcactgcaacgaacctgatgcttaccgataggattctggcgctcgaggataactacggtgtcagctcggtcatcaatccgccggcgacttgggctgatctttatcagcgtctcatcacggacagaaagggaaagcccacgaagtcggtgaacttcaccgagacctttgaaggcaaccgctatcgctgcatcttggcaaactcgatgcacgggtacggcataaccatgcggaagctgctaacgcagatccctcggattactgaggatctgaagctgccgtggaatgtcatacggcctttaatgctagagccaggcctcatactgattgcaggtcagatggggtcgggtaagtcgacgactctgcaagctgctgttgatgctcttgagccggctgttcgcggtgcgctgggaattgtggaagatcctgtagagatcattcacccggacctaactgtgattcagcggcaagtaggtgagcagacagaaagctttgccgaagcgatccgagatttcatgcggcagtaccggcaaaccatcatcgttggtgagatacgtgatccagaaacagcggaagcagctgttatcgcggcatcgagtggtcaccgtgtagtagggacaattcactccgagagcgctccggatgcgattgtacgcatgaagacactgcttgatccgaagtttgaaaggatactgccgtcagttctgtcagggatttggtggcaacacctggtgcgctttggcgaccagaagcgagcgcctgtagttgtctatgagtcgctagagtgcgatcagacagtcaaggacatgattcagtcagacaagcttgtgatgctgccggcccagatgaagcgtcaagggcggatgaacatggctgaggttgccattgaccacatccagcaccgccgggctagtaaggcggagatgaggcagtggctgtcgaataaggggcgggtcgaagcattggtgtga

SEQ ID NO: 367773 - DNA, 831 bp, Pseudomonas aeruginosa
atgacctatggcgccaccatgactccctcgagacacactgaagccgcgcaatggccaaacaatacggctgagccctgctcgctatctctggcctatcagccagtaatcgacatcgcacgcggccactcagcagctgtggcgtttgaatcgctgcttcgtatcaccataggcggcgttacccggggcccgatggggcttgttgagaaggctgaagcgaacggttcgatcgtggccatcgaccgctgggtgctcaatgaggtgattcagctggcaagggtccgaccgatgcttaacgtctggatcaacacaagccagttatctattgccgaccccgatttcttgactgatgccatccgctcactcatcgccagccgaacgcttgggcgaatctctttcgagatcaccgaaactgccaacgtagatgctgacctgcttgcgaaacgtctggatgcgctcaagatgcgcgccatcacagtgctcattgacgacattcgtgatggctatgcaaagaagagtcttctactgagcgacgcggtggccgggtgcaaactctctcgtgaaacgatgctcgaactccacacttcagagcgggcgcgaggtgaagtcgagcagttgctgaccctctgccgactacaccagaagaaggtagtcctggagggaattgaaaccgatgacgatctagcgatcgcgaaggacatggccatccctctcggccagggatacttctttgccaggcccacagccgctgactcgctgacccaattcccacagatgcatcctggcaaagtggccaggccagaagctgctaggggctatacgcagcgcggatag

SEQ ID NO: 367774 - DNA, 2697 bp, Pseudomonas aeruginosa
atgaacatcattcctgaactggccaacatgactgacggcacgctgattctgacgtctaccgagcgagtcgctcggcggctgaagcagcaagcagcgctgctgcaggcagcaggcgggcaaaaggcctggtttgccaaagggaagatccaaacgattacttcctggatcgaaagcgcttggcttgcgctcatgccggatgaacagttgctgttccctgtccaagaactcgcgatggtcaaaagcgttatcgaccagtcgggtctgctgccggccaacatgatctcctcgacgagcgccgcgcgccgtgtcggccaggcatactcgatggtcaacaagttcatgattcctcttgaccgtgagcggttcgcattccgggcggagtacgaggcctttttcgagtggaagtcccagctcgatgctgcctgcgctgccaagcaatgtgtgttccgcgctcaccttccggcattgctgttgaaggcgatccaggcaggggaggtcaaggtgccggagacgatcgcaatcgtcggcatgacaaagctcaatccggcagaggaggcagtattccgcgctcttgaggccgccggttgcacccttcgtatcgtttcacccgtaggtactgcagctgagcctaccctggtgcgtgcccacaactctgccgcggagtattccgaggtggctcagtgggtgagtaaccagctcaagccatatgtgcaaactcctctggcagctccccaactcgcgatcctggtgcccgatattcgcgcataccaagcaccgctgctggacgcactgagccttcatgcgagtcctagcgcactcatgcctgctgggcctgcaggcgagccacgtgcaccctgggacatctctagcggtgagacacttggctctcgccccgtggttcgttcggctatggacatcctatcgatcacaccgaacgaggctgatcctgaagccttcagtcgcgtgctgcgttcccaatggatagccggcgagacctctgagtcttctaaccgcgccatggttgatgtctggctccgtgacaacatgggcatgaacatgagcggtacagacttcctgcgggccatcggcgcctacaagggcgacgcggtgccggacttccgcaagcgttatgccggctacttggaagcgctcatgtctggcgaaatgaaccgttacccttccgagtgggctgatcagttcagccagtcgttggtcgctatggggtggcctgggtctcgcgaggtggatagtgcgacattccagacgctgaaggcctgggatgaagccctgatgctgttccgtacgctcgatgcccagctcggaactgtgcaatatgagcgggcctacatgtggctgcgtgagatcgtggatacccgtcaattccagccacgaatctcccacgtggctccagtttctatcctgggttatgaggacgctattggcctgcactttgacgctgtctgggtgcttggtgcggctaacacggttctcccagcccgcatggagccttcgccgttcattccggttgagctgcaggttgaagccggcattctggaggcttcaagcgagggggctttggagcacgctcaagccgttacgggggctctgctgagcatcagtgacacgatcacggtgtcttgcgctcaccataacgagaaggggtctgcgatcggagcgagtgagttattcggtcgttggcctgagccgacggatcgcccgcagtcaaagggcgaatttcttgatcgactgctgggtggtttggaccgtactgacttcgtacaggaggaggtgccggcagtctcggctgatgagctgactacgttgaaaggcggtgtgcagattttcaaggacttcgcggaggagccgttcttcgcgtttgccaggaaccgactcggggcaaccccattccctgaaccggttgttggcctcgatccgcgaattcaaggaaccatggtgcaccttgttctcgaactgttctggcgggaagtgcgaacttcgtggaacctcaaggccctaggccaggaagaactgtttgcgctagtggcaagcaaagttgccgaggcttccgaaaagctgctcaacaagctcagctggcgttacgggcagcgattgatcgtgctcgagcagcgccgactggcctctctcagcattgaatggctggagttggagaagagccgctccctggagtttgaggtgatcgccttcgaggagccattcgacatcaccatcggagaggtgagcctcaccgtgaagatggaccgtcgtgatcgggtataccttgatcccgaccgtaccgtctatcgcgagatcgtgcacgactacaagaccggcagttcgatgcggatgactagcctcaacgccaccagcctgaccgagcctcagctgccgatctacgcgactcagcctgactatgaagcaaaagggatcaagccgatctcgggcatttcgcttgcacaagtgaacttgaagtccctcggcttccatgtgcgcagcgacttcgccggcgcacttatctctggcgagaagaccagttcggatgcggtggacagcgacgagaagtgggcagcccagtgcgaggcctgggataagcaactgaacctgatgagcgagcagttcatggcgggtgtagcagtcctggcgctggccggcaaagcgttaccgatggggtatgagtatcttgcgcccctgacgcgatag

SEQ ID NO: 367775 - DNA, 381 bp, Pseudomonas aeruginosa
atgatcgtttacttcgcaattgccgctgttgccttcattctcggcacgggagtgtcgaactatgagctttggggcgggttcacctggtggcaagggctggtgtgtggcgtggtggttggtgcagcctggcacgcaaacaagcttgtcgctgcagtgcttgggttcatcggcttcctctcacttccgctgatcgcgattggtattggcgacggcggtctgcctagcgattccagatcattcttcaacggaatgtcgatcgccttgccctttggctatgccgcaggggcttggtggacctgggcggctttccggccgcagctgctgcagctggctgaagcccagaacgtgaagtggttggtgcgtattctgggcggccggtaa

SEQ ID NO: 367776 - DNA, 2019 bp, Pseudomonas aeruginosa
atgcatcacataaccaacaggggaaggcggcaacgcggcagacctctccatcgcgaaactcttgaagtcatcagtcgtacaccaatcagcttttggactgcagcaaccggagaggccgcctggtctgcctggtatgggccccgggaggcaatgtgtcagatccgcgctgagcttcttgaaactggtgttcgctttgatggtcactcgcgtagccaacagaaactgatgccgagcggccagttcctctccacgatgctcctccacaacggtcgacagcgagccctggaagaatcccttggcgctcctcgctatcacgagatccgccccgaatcgtcgcctgcagagaacatacggagcttcattggtgaggcctcatacaacagcattcagcatgatcttacgacgcttcctgctgatgccctgtacgagagagtcaaagccagtatcccccagatagccgagatgttccttttcggtggcttcagtctgcagatggctaaagtcgcattagagctacatgcggtactggaggcgtcgagcaggccctgggacagccgcgaagatctcaagctggatctggtactacatctgctcgtgatgagtatcccggttttcctcatacgcgagtgccttatagccagctactcacgaatccagtcgatctatccaatagctgggttgtttgccgagtcggatgagtttgatggggtcgaccatcgatctccgctttacgacagcgagcccgagatcgctttagcgttggctgcagatattcctgccgcctcctcaacaatcagatttcacagcgcaactgactatgcagatttctatctagaatctgctcaagcgttcttgctctctgccacgcacgccggtggctcatcacgggcgatttcgactgtttgcgaagaggggcgcatcttctggaaagacgcgattgaagtcattaccaagatggcaccacaaggctcttccttggccaggcttgagtcccatgcccagtatgagccgcccaatcacgtcgcaactgtgagccatgaaatcctcctagcagctcgtacctacaacaaggccgtgctcgatctactcacgagtgtttgtaacgaggacgatgacgataggatcgacatcaaactcagccaggttaaacagcgaattgcggagatagctgcggccccatcagctgatggctacaaagaactcggtgagcttagtcagcaagcttcagcactgactgaagagaacaacaaacttctacttcatcggcttgatcagctggatctgtttcggcgccatgctgaggagttcaagcaggcgggtggctgcgcagtcgatatcgatctcaaacagcttgatgcagataaggtggggactgaagccttagctgatacccaagctctttcacgtagcgatattgagattgagcttctggaagccaattcgagactcgaagatgaacttagggtatccaaggctgagaaccgtcgactggagagcttggttacccgtctccacgatcgcagccctgaaggagcaaatgaggagttagtcgagctcgctcgtcggcaagcgctcggccagccacttaatcctgagcagatcctgcgcttctaccaactgatcgggagcgaccgcgtcgatatcctcgatagcacctggaagagtgcgagggacagcatgaatttcaaagagcctggccgtctcttcgagatgcttgggaaactggtcttcgattacctggacggcgtacgtgctggagagcccatgggcgccttaggcatccagctatttgccgggggctttgctgcaaaggaatcgctcacggtgcaacgcgacgtgcgcatgagagcccagcgtgagttcagctatcgcggcgagagccgcttcttcgcgtacagacttcgcatcgccaacggatggggccccgtcgaagggatgcgcctctactttgatgtcctcgatgatcgcttagtcatcgcctacgtaggcgaacacctggagcaagcgagcacgaactag

SEQ ID NO: 367777 - DNA, 3360 bp, Pseudomonas aeruginosa
atgaccgcattctcgccgcttaacacccagttccacctcgatcccatctttgctggcattgcctcgctgaatccgcacgatggtgctgcccgggcgcttgctgtcgatcctcgccgctcgatggttctgctggcgccggcaggctctggtaaaaccacgacactgcaactccgtatgctggcctgcctgactgtggttgagcgtccggaggaagtgctggcgattaccttcactaacgctgcggccgcggagatcgttgagcgggtgatcggggctttgtcgttggccgcgattggaaccgcaccggtgaagccacacgaggttgtgcaagatcagctcgcacgccaagtgctggcccgtgacaagcagttgggttggaatctgctgctgaaccctggccgcctacgcatcatgaccttcgacagcttctgcgcttctctggccagcaagacgccaatcatggcgggcctgggcggcggcaagacttccgacgatccttccctggtgtatcgccaagccattctgagcactctcgctgcggtcaatgacccagatgtaccggcgcagctgctggaggcactgcaggcggtactggcgtttgcgaagaaccgtttcgaggatctggtgccgctgttcgaagtcctgctgatgaaacgtgaccagtgggcaggccgcatcctctctctggacatcgacaccatgactgaggcggttgcacggagtgtggagcgcaccgccgaggaggcgatcgccgccatctctgcgccggtaatcactgagtgcatgcgctgcttggaaacctcctctggccaccttgagggctttgagtgggccagctccatccctcagctggtgccggataacgccggcctcacctttctccgggcgtttagcagcttcatgctgacgacttcgggcggaattcgtactcgcgtggactcccgtcaaggattccctgccaagcatcctctgaccaagaacatgaacgagctgcttgggagcatcaaagagggcggcgaatcggccgtttacgctagcgccctgcagctgctggcgaccctgccggacgtctccttcccggcccgctcagcggagatggtgcgtcatctgacagtcatccttcgctacctgctcgccaacctgacgttggcttttgagtcgaccaactccctggacttcccggaggtagcacagcgcgcaattcaggcactgggcagcggtgacagcatcggtgacgctctcctcgaagaggaccggatctcccacattctggtcgatgagttccaggatacgaaccaagcccagtacgacttactgaagggtcttattgatcactgggaagaggatgacagtcgctcgatcttcatgtgcggcgatggcttccaatccatcttcctgttccgtggtgcggatctgaatctgttcacttccattgttgaggccggatcgtttggcccgaagaagatcgaggtgaaccgcctggtagtcaatttccgctcgttgcccggcgtcgttcagtggaacaacgagacctaccaagaggtgttcaagggctccgcgtacgagtttgtcccgtcggtggccatgcgtgagggagagggcggcatgtgtgtgcatgccctcgctactggccctcttggtgaagctgaagcggtggtcgacgttgcgcgcaaggctctggcagacaatccggaccagtcagtggctgtgctggtgcgtggacgctcccacctgcagcacatcctgccggcattcaaggcagcaggcatcgaggtgcgtgggcaggacatccaacctatcggcgaaacccaacctgtttcggaattgatcgcgctgattcgcgccttctggcattcagctgatcgcactgcgtggctgagcctgctgcgctcggcgttcatcggcctgagctgggccgactgcctgaccgtctcccgaggtggccgggttatccgtgacgcactgcgtttggaagcagtgcagagtgagctgagcactgaaggacagaagcgcgttcaagccctgctgcaggtgattgatagcatcgagcgctcggcacgtggtgcagaactcgcttgggctgttaagtccgcctggatcgccctgggcggcccggcgactgtcacccgtggtgagatggacgatatcgagaccatcttccgtctgctgaatcagcacaccgctaccggggctttggttaacccccaagccttcttccgtgccatcgagaaggtatatgccagcccgaaggccggtactgtcacggtaatgaccttccacggctccaaaggcttggaattcgatgtggtgctgattccaggtttgagccgaaccggtggccgtgacgacacacctctgttccattggcgccaggtcgaaggtgagttcacgatcgctcctaatctgggggatctggatgcgtcgtcacctgagagccgcctgttctcttacgtcagcaagatggttcgcaaggatcagacccaagaagtcgcacgtactgcgtacgtggccaccacccgcgcgcgtgagatctgccacctgttcgccacagttgatcggttgcctccggtcgatgaagaagaggtgcgtgccgtcaaagccccggccggctctttgctgcaatgcctgtggtcggctctggaggatgaggtcaaccaagccgagcctgcgctgccgatttctgccgatcaccagacaggagttccgagcaaagctcgccttgctccggggttcgaggtgaaactgcctgccagcgtctttgtgccggctgccgcgaatgaccagattccgaccgagaacgaactcagcgatgagctgcgtgagcaagagggcaatgatcaccgggcgaaggccatcggtatcgtctaccactggatggtcgagcaaattggtaagcagggactggcttgctggagcgtagagcgagtgaagtcgaagtcccaggccgtggcttcactgctgcgccgtgaaggcttcccggccgcagagattgccgccggtgtgagccgagtggttgacctggtgtgcaagaccattacgtgtcagtacgggcgctggctgcttcaaccgcgcgctagcgctggctatgaagtgcaggtcagctcttatcgtgatggccgctgggttcaccgcgtgctggatctgtcgttcgtggaggagggtgtgtacttcatccccgactacaagactgccgagtgccccgaaggaatgagtgtggatgccttcgtctcgaaccaggtcgcccgctatcgcctcaagatgctcgactacgctcgcagcgttaaggatgcaggtatcgacatgccgattcgccagatgctgtacttccccgctcttgggcgcctggcggaggtcgcctaa

SEQ ID NO: 367778 - DNA, 525 bp, Pseudomonas aeruginosa
atggtcgccattctctcgatcatcgctgcagccgtgatcatctaccttgtacttcagctgcgtgcccctaatgacattcacaggaagttcggcctgcagcctgggcaatgggatctaatcagctccgacctggggaagggacatccgcgcaagaagctgagcgcattcggcgtcgccggcgaaccggatgcgctcttccgcggcaacagtactgggcaaatcatcgttggggagtataagaaccggcggcatgcggggtatgtacgccgcagagagttctaccaggtgatcctatgcattggccttgcgcgcgaggctctcggtgcaagcaacgtcgtgggagtcttggttttcaaggatgcgcgtcttcaaatcgcgcatgacgaggagctattccgatcgctcctcgggatgcggggggagtgcttgggctctatgaagcagcgcaagccaatcaacgatcgcccgctgcacaggcgcatcaatgtgcgcccgggcagcaggaaaatcagcttccctaagtag

SEQ ID NO: 367779 - DNA, 225 bp, Pseudomonas aeruginosa
atgattcgccgcagctctaacctcgcggtgaccaagctggccgcctacgccgaagacccatcggcattcatcaaggcgggaggcatgccctacaacgcgaaagcagctcgcgagggcaccaaggcgcatcaacgcattggggccagccccaacaaagtccgattcatcctggtggtcgctacgatcatcgccgccctcctctactttgacgtcatcaaggtctag

SEQ ID NO: 367780 - DNA, 717 bp, Pseudomonas aeruginosa
atgtctgatggcagacggtaccagaactccatgattaaaaatccgacccttgctgtttacgaaaccccccagccgtcctggttcgacacctctccccaaaaggggccctggtctacttggctgatccatggggtgcacatgggtgcgaccgtcgaattgccggccaagaccatgatcgataccaaccgtggtgacttctacgttgtcctcaaaggaagcgttgtctcctacggagcctcgcctgaaacaccgaatcgtcgcgtctttgtcgatgtgctccggcctggagacatcatctggccaatgcggcagaagcaagtctgttttgtcttcgaaaccagagcaaaaacctacctcctgaaggtgcccaagtcgaagtacagcgactacatcgttgccaacccccacagcgaaaccgtgcttatggctggcgagctggatctcatgaccaagcactcccaggctgcacacatgcagttctcgctggacatcgatcggatcaaacgggtcattcagatcctcgttgagcatccggatgctcgcgataccaaccgaggaattgaagtgcaggccagcaaggaagagattcggacgctcgccggcgttgagcgacgttccggcagccgtgcgtttaagacactggaagaggaaggaactctctcgttcaacgggtacaagtccttcttctaccgcgccccaatgatggctcatgcatga

SEQ ID NO: 367781 - DNA, 414 bp, Pseudomonas aeruginosa
atgttcagcgaagcgaagtcggtgcgtgcctgggatctggctgatcccaagaccatgcggtcggatttctcatccgccagcttttacgtcgtcatcgacggaatgcagtacccgcctgttcgccaggctgcagagacaatcaaggcagccctcctacgcttccagggcgtacgagttaaaggccccttggcatgccctacacaacgccggcggcacttcatccttcgcgaggcgaagaatccagattcctcgaggttgtactgcccgaatgcgaaacgggtgcgcaacgtgctcctggtcatgaaccctacttcggacgcgatcgcctctctgatcgctctttcgatgcccagcaccgtcaacatccagatcgacacgcagcaagacgcgtttgatctgagaagtgatgtctga

SEQ ID NO: 367782 - DNA, 1146 bp, Pseudomonas aeruginosa
atgtacatcgagcaacgcgatcgactgactgcgaatctcagtctggggctgagtactgagacggcaaacgctatcgtggcccgcgcctatggccacgagactttcgacgccggcgccgacacgcttctatccccgatagcggggctgcagaaggtaaagtctccggcagatatccgcgccttagacgacagcgttctgcagatgatggagttcgtgcggatggctcagaatcttgtcgccccaaaacttcgaccgctgcttgggacaacccctcaaggggtcatcatcgccacgatgtggggcttccccaatttcgaagcgctgaaggcctatgctcggcgtgacaagattgatcccacttccactgaaccgagtgagatcgcccgattcaagcggcgaacgaacaccatgcctcctagccagtatctgctcgggcgggactattcaggctcaaccctgatcatccacaacaagcctgaagagacatcccagtggattgaccaagagatctgcctgaacaacctcgaggaccttcaggttggggttgttcgctgtgacgttgaaggcgacgactatctcaaccgctacagtcgtgaccatgtggtattgcgccaagatctgagcgagaaccacagctcgttcattctcggggccagggcgcaaaatccggagtccagattgtctgtatcgatcatccccaagcgcacttatacgctggaggaactggtcgcggcgcaccattcagccttgggagaaaatgcggtccgcggtagttcgctcatcgtagaccgcgtgccggtcctgctcgatgagcaatcgctagacgctggattccgcctggcaaagagcatcaacctcaacgtagttctcgtgactgatgccccagctgaggatctgtggtctcgttgcgagaccagactcatcttcagctatgaccgcacccttcccctctctggtaacagcgagatgaacagtgcgctcatctttgcatcgccgttcacgggactgaagcggcacaacctgcagctggtctatcacacgaccgccggcggcccagtctatagcactgtccagctcgttccagatgataagcccaagggggcttctgtcttgtcgaggatctttggcaggccggcgctcggctag

SEQ ID NO: 367783 - DNA, 528 bp, Pseudomonas aeruginosa
ttgatcgaacaacactccacccctcgcctcgcaagtctcactcgcgacctggaatcgctcgatgaccgctgtcgtgcgaacgccttcaacgacatcttgctgatggccaatgaaggtaatggcgacgctatgttccaagttgcccgatgcctgcagaagggcatcggcgttgaggcgaatctcgtcagcgccgatcgctggctccgaatggcctgcgttgccactcctgcttctcgcctggcgctatacacccatggcatgcagcatgttctcaagcagcgtgctgacgccgacgcccacaggggcatcgagtttatcgagcgcgctgctagccaaggatatgtaaccgcgatcctggccctcgtcgagatcgttgaaaacggtatctgcgatatcaagcctgacctctcgcgggcatatcgcctactcgccggcaccctcgacaacaacgccgacagtcagttgcacgaggcgtatatgagtttcgtagagcgtcacagccctatcacccagctactggattcctga

SEQ ID NO: 367784 - DNA, 300 bp, Pseudomonas aeruginosa
atggtctttgtcgtagacaaacggaaccgtagacatgggtttcgaggcttgtggttgaccaccatttccccggtcctgatatgtgacccgggctcgcacgtgtgggcgtacgggacggagcagaacaatttgctcgcgccgttcggggagacccaagaggatattgagttgggttttcagccgcagctcgaccgagcctttaatcaggccctcgagttcaaatggcgccttcaggtctttgggctcggcaggaccatccggggaataaacccgcaactgggtaagcaactccttttgtaa

SEQ ID NO: 367785 - DNA, 225 bp, Pseudomonas aeruginosa
atgcacggatgtcagcgcttcaataaccaggtcaagcgctgcgtcaccttctgtcgaggacacttcgatcccggcatcagggtcgacttcatcggtctctcgcatgccgatactgaaagccgcatcgacacgaatttcatcgcgcctggcgagcataccttcacgcagcgtggtgagagcctcaaccaagcggccggcggcttcgatcgcatcagtaacggttga

SEQ ID NO: 367786 - DNA, 1188 bp, Pseudomonas aeruginosa
atggagatggcagcaactgctgtcgcactggctcacgctggtgtccccacctttgctgcatgcttcaacctcacggatctgtactcgcagaattacctactcgacgcacaaggtgttgttctggagccggttgctggtgaagtccgtcgaggctcgccggcaatcaaccgattcggcattggcacggccggtgctggagtggagggtggttggggcgcaatcctcgctcagctgaaaccatgcttgccgacgttgagcaacgaggaagtgctgctggcaaatactgcgctgcgcctgcgcaacattgagggcggcctgcacaactcatggcagttcggccagcgaatcaatggagtcgcattcaaccggatcatcccgattggtctactcggcaatatggcgctggaccccgcgacgggtcatgtcctgattgaggactacaccacgaaggaactgcgcctttctggccacctctggaagtcaaagctcaacgttctccccgctaccgatgtgcgaaagctacttctgtgggcgtgtgatgtccgtttgtgtttccagatggcactgccaaaggaagatcacaagcgcaccgaagcgcgcgagttgctggagagtgcctatggtgccggcctggttgcagccggtatcgcactggcccgcagctatgaggttatgacctctgtcgaggaccaagcgaaggctgcagagatctatcgagagatcggcgatcagcatccgctcagtgcttacttcttggcccacgaagccgcagagatagggcaaaccgaggaggctgagcggctgatgcgggtatcggcatcattcggataccccttggcgcagactgacctgggtaagattctctttagcagcgagcgtggcaatgaagctttgccactgttccgtgacgccgaagctgtcggtgacaccgaagcggcgtttgtgttgggcgaactgaatgcccaggccgggcggttcatggactcgctgaagcatctccgcaaggcttggggctatggccatgctggcgctgttgagctggccatacaggtggcgcagcacatgcttgcaacgggcgacggtaagcgctcgttggtaaagcgagagctaagagaggcccaggattgcctgaagaagctcacaaggcgcgtcgaagcgcaccccctgcaggaaaaaggcaaagcgtga

SEQ ID NO: 367787 - DNA, 327 bp, Pseudomonas aeruginosa
atgtgcattttgcgcatgcagaaactcgtgtatccggagcgccttagtgaaacgcccccactctgcggcagcgggcccgctcaatcggggggataccaagacaggcagatggacgcgaatagtgaggtggacttgcccgttatcgatacgacacccttcctcaacagtggccagatcgtaggtcgaccgcagctcccaggtcgtaaggccagcgtagaaagcatcaccggaatggcttggggcattctcagcaatgctggcctgaacctcggccagggtgcggcctcgcacctcgtatggagcgatttggaagtcgacctcgggtga

SEQ ID NO: 367788 - DNA, 1110 bp, Pseudomonas aeruginosa
gtgaagcgagtattcgcagcgatcgcgctggtattgatttgcacgagccaggttgcctcggcagcatcggttcgtgttggaacgtggaaccttatgcggcttggggagagtgagccaaagtcctacgaggcgattgcagcggttgcaggaaccgttgatctcctcgcggtccaggaggtaatgaacgatcagggcctggccaagctcgaggccgcgattgaagctcgcacgagagagccctggagtgtgatcagctccagcccggccggtagcgccaggtacaaagagcgctatgcatttctgacgcgcgatagcgttgtgcgctatgaagatggggctgtcagctaccttgatcgaaagcgggtctttatccgcgagccattctcggcccgcttccgtactgcgggtggggataccctggtagtcggcaccgttcacatcctgtatgggcagagtgaactggatagggttccagaagttcgtgagcttgggcgctactggtcctggcttgaagagatctatccaggtgagcagctggtgctggtcggcgacttcaacttgccgccgaaccatccagcctttggcgagctacgacagaaagcccggccaatgattactggcggggcgaccacactgtctccgaacggaggctttgccagcctcttcgacaacgttttcgttgcccgggatactcgactcagcatcacatcagcaggggtggtgaattacccggcaatgttgaagatcaaccacaagcaggcaagggcttacgtctccgaccacgcgccgatcttcatcctgctcggtggaagccggtttgcaccgggggttcagcttataccccgaggagcatcacctcgccaaacgcaacaggcatctggaagtgcccctgcagggttcaaccaggttgcaggcatcgccaaagggttgctcgcttcaagcaccacgaaagacggcagcgcaccagtgcatgcaaaccgcaactcgggcgtctatcacctccagaactgcccctactacgagcagatttctcgccggaatctggtggtgtacgccggcgaggctgaagcacagagcgcagggtataggaaggcgggaaactgcccctga

SEQ ID NO: 367789 - DNA, 666 bp, Pseudomonas aeruginosa
atgatcaagccggtcccttacgaggtggttcagtttcacaagcacctggtcactcagttacaagcgctgggggaaacgcgatccttcaccgccggatctccaatcgcatcactgggggcggcagacgcagccatctacctggtagtcagaggagcagtgtcgattcaaatcgtcgactgcgagcaagcgcaggaactgacggctactcacgtggcaccgcatgaggtctttggttttgccgaggccgaacgttcaggtgagcagcaacggcttcgcattcatgcggaagcaaagactgactgcgttgtggttgaactgcagcgcagccagctactggttctggctgtgcaacaccccgatctcctgatcgaggtctgcaacggcctagcccggttctcgatgaaggccatggagaaggttggccgctttgctctcttcagtgcgcgaggcaggatttcgagcgctttggtcgatctatgtgctttgccggatgcagcgactcatccagacggataccaggtgaagattagcaaggttggcctggcaaaacttgcaggctgcacacgagagatggttggtcgtgtgatgaaggagctacatcaagacggactgatcacttcatttggccgtaagacaatcgttcatcacgacacccctgccctctag

SEQ ID NO: 367790 - DNA, 687 bp, Pseudomonas aeruginosa
atgaacgccgaaaccctaccgaaccaagatcaactgtcgaacagccttcccagccgtctggcaggggcagcaatggccggaacgattctgcttggtctcctgtacttcgttgcctgcattggttcgactgtggcgcttggggtgattggtgggctcacggaaggcgatgcccagcaggcgtccttccttagcttgcgcgcaggcctcggataccatggatttgtgttcggttcgttgttcgtcattttcggcgtattgaatttgctccgcggcagtgttttcggcctcgtcatggcggtgctcggcttagcaggtatcctggcaacctccgagcgcgttgccttgcaacaaggcatattggacggcgatctcaagatcggctgctacagctatgagtctctcgagtgccgctcgatgcttgaagtgccgaccctggatgcaccatccatctacaaaaatccaagcgagctccgtggggatggatatgcagactggtacgccccgatccgcgctaaggccttaagcgagagcaagacctcgcttccgaacacagtgcccggagtcgcgttcttgaagagcccactcacccttctcttctaccgcgatgagctgaaaagcaagatctcaactcaacgggcagaggttgctcaattccaagcgtccttcgacaagcagcgtgcccaatga

SEQ ID NO: 367791 - DNA, 2394 bp, Pseudomonas aeruginosa
gtgagcagccaggccgattccaccatcaccaacgagcaccttccgccttacaagcgagttctcgccactcttctgtccaacggcctggatcttctaggtgcaatccaccccagttctttacgggaagggcagaagattgtgccggcggctcccgttgcgctccggcgtgatgatgaggttccagatgtgcgggttttgctgcagtaccggccagatacagtcattgcagtgcccggtaccgaggtttcacttttctctgagcaacgactgcccaatcacgctgaagcgaagagccgcatgcgcacggattgtgggaggttcttgccgccggaccagcagccaactgctgatcagtggagggcaatcctgacatcaactgccacaaccggagtgacgggtgccgcaggtacggggaagactcagacaatcctcctgcgtgtgatctacctacacgtctaccttcaggtaccgcttgaagagatcactgtcctcaccttcagtagagaggcaaggcaagacaccgcggcggagcttcaaaccctcctttctgcttggcaactcgacgttgggctgcaggtgttacttggcgtagtgaagacgccacgggcagcggtaattgagcaggtaagggcagtgcccaacctcggcggctgcatgcccttcgaggtactcagcgattcagctcttgaagctcttgatgacggccggccgcatgaccgaagcctgaccccaaggcagctgaaggaaatgaccgcttgcctaacgctgctgtatcgctctgaaaaacgattcgcggagctggtgcagcacctcttcaaggcatccttgcagatcccacaccttgaggtcgacgctccaactgtgatccagcgagctcagatggcgtggaagttaagcgaccatgacgcagagatgtgtgatgcgctggaggaactttggaaggctgcaggtatgtggccgctagacggcatcgttccacgtaggcaggaattcaagattcgggggcgcgcatacagcagcagtggattcataccccagctaggcatgcatgtggtgctggggtttgatcgtagcgaggatcgtcatatcaagcgttcgccaacagcagcgcgtgagctttacaaggatgtggccatcaagcgcacgatgctacaggcgtacttccatgaaccgctggtgcatctcgatacataccaggaggccctctcgcttgtggcggccctcaaggatctccagagaaccccaccatccttcagctaccagcttgagggcgctgatcacccgattccattgctcgaggcattcaattcgtctgccgcaatgattgacgccctgggccttgaggtttcgaccattccagcgcgcatgaactttcgtcccggtaccgccgacagtgttttcttcgaggcactaggaatcttctggcagaccctggagcggcagcttgccgccctaccgcagccaagcttccccttcggacgattatttgacctgttcagtgataaccacccggataacctccgtcatgtgcctggctcggtgcttatgcgttgccggcacgtgatgatcgacaatggagaagaccacgccatacctgtcgcggcttggctgcgaggggtgcttgctgagatccagcgtagagatagccgcaagccgtttgatcgccgtcactgcacaagtctgtttattgccggcgacgcgaaccagtgggcacatgggagctatgggactacccagcgactactttcaaccttcgaggattcctttcccgcagacggcagctccagcctagttcagctgcacgaatgcttccgctcaaaccagatgctgattgatgcagggctcaacctggtgcggaatctgggtgtcgcttctggcagaaatgctcgggcagtagggcggttgcatggcgagcctgctccggtacagattcatgagcagaacacggctgcactccagcaactttgccaagacgcgctaagccagcgccgccaggtgctggtgctgattgatgatcaacaggatcacgagtgggttaactccgcgatcggagatctcattcgcggcgaacgagctgcaggcggccgcggtatacgtgtgcgcacattccacaaagctaaagcgcttcagtcggatgtagtcatcctcatcggtgatcctggagcaggagcctcgtcttcatacaggaaccagctgtacaagctagctggctttagcacgaggggggatgcctcgccggcggacacagttctcgagggggaagcgcttcggttggcgtatgtcgctatcacccgggcgagacatagttgccattggttccccaatcgcgttgaggcggttcggacagcgacgacactagtccccctttctgaggagctattccgcagaacctga

SEQ ID NO: 367792 - DNA, 492 bp, Pseudomonas aeruginosa
atgaaagtaaagcgagcaacggccaaagcccctggccagggtgaactgttcaacatcgagcagatcgctcagatttacaaggacaatccggacacaccgctggataaccagacgctctaccgcatggttgcgactcgtgttgggctgcctaatgaggcgcttcaggaaagggtgccgatcggccaaagtgggcaaaggcacaacttggtgcgccgccagattcgctggatacagcagtcacttaagcagatgaatgtgctctgtcgcgtcaaaggcgagcgagggatttggcgactcactgaggacgccaagcgagacctaaatgccgcgaagcctggcgtgcgtgttctggggttcagaacggatcttggagtggcgatcctgggacgcagcggggatatcttcaagaatctcgatcaagaggtaatgttgatcggccagtcccccgtatgcgatatcgaaacctcgggcatatggcaatcccccggttaa

SEQ ID NO: 367793 - DNA, 687 bp, Pseudomonas aeruginosa
atgcccggtagcccggcaaggtccacctacctggagcggcttgtaattgctcttgaggatgctggcctgtcacttatggatcggatcatctggtcgaatcccagcaaggcacctggtcccattcaatgggcatcgaagacacgccaacaactcaacgtagggtgggaacccatcttatggtttgcccgtgacccgcatagggtgaaagcagataaccggagagtactcgaacctcacagcccgagacatctgaagctaatagcttctggcggcgagccgagagaagcatcctatagcgatggggcctatcgtctgcgtcgtggaagcttcagttcccccactcccgggaaaattccgcgcaacgtacttacccgcggacatcgctgcggatatggcatcgagtacaaggcagccgcagagagcctgggactgcctgtgcacggggcagggcagccactttccgtggctgatttcttgattcgcttcctcacagaggagcgggatttagtagttgaccccttcggtggtcgactaatgacggggctcgccgctgacctgctcaacaggtactggatgtgtggcgagatgatgcttcagtacatccgcggcggcgccgagcttttccgcgatcgccccggcttctatctgaacccgcagattgaacatgcatttgctcaggtgtgttga

SEQ ID NO: 367794 - DNA, 726 bp, Pseudomonas aeruginosa
atgaagaaggtccagtccctgctgcccgttgacctcagcctgcccgaacgtcagctgatggaggacggcaccatgttcgtcaggctgccaacgctagctgatctcgatctgttctggcaggaaaacaaagggcggttcgcctttgcctgcgagggcgtcagctgcagaaagccagtcttcctgcgggaatatgagtggatcttcgggccgaccaaggcttcggtcgtgcgagctgctatgcgctgggaccgtatcggagttggcattgagttctacgaccaggcagagaaagatccagaaagccacgaggcgtttttcatccagagggaaaccaaccgccagaagcagatgctgaagggcaagtggacctcggccgacgagagcgaataccgtcgcgattgcctggtgcgtccgcgggcgagttatcgaggctggtggcagctgaagaacctaccccgcggttatgacaaggacacgtggttcaacccggctattcagcatgaggagatttgcgatcctcacatgccggctgatcaagtcgctgtgaagcttcaagaacagaccttcgacgactggaaagaatctgacgtcgaccaagtggcctatcacgacagggccagcgtggtggagaccattcggtactggcggacggagaagaaagaaggccgtgattactatggtagcgagaacgagcgggaatctcgtgtgaaggcggcaaccaactaa

SEQ ID NO: 367795 - DNA, 360 bp, Pseudomonas aeruginosa
atgagtttgatcaacgagtaccgcgagacggaagaagccatcaaggaacttcaacagcgcctggctaacctgaacaatgatgatgggctcaagaaagagctcgagttcgaaggtaagctcaaggagttgatggccgcttacggtaagaaccttcgcgacatcattgccctccttgacccccagagctacagcaagcccgcagccaaagccggtaagtcaaagcgagctgagcgcgaactgaagcgctacaagaacccacataccggtgaagtggttgaaaccaaaggcggcaaccacaagacgctgaaggaatggaaagccaagcatggcgccgatgccgtcaagagctgggttgtctaa

SEQ ID NO: 367796 - DNA, 138 bp, Pseudomonas aeruginosa
atgcaccaggtctgtgagcccgccgagccggctgatttgagcatggatatctgcagatccgacgtcctcatcggccgcatgctcattctggatgagccattcgagctgagcgacttccttttccactacggcgattag

SEQ ID NO: 367797 - DNA, 171 bp, Pseudomonas aeruginosa
atggcccaaggcatcacttacagcgaagagcagatagacctagttcttaactcgccggcttttgccgaaatgctgaagcgcgagatccgcagtcaggataagtacggtttctgcgccgatcctgagagtcccacctgcaccttcggcacccaagcgtgggactacaagtaa

SEQ ID NO: 367798 - DNA, 873 bp, Pseudomonas aeruginosa
atgacatacatatttaacagtttgcaaagtgaaaaagaaatctacgcacaagatgactttgtttcttttgctaaatcaattcttcatcttccaatattccagtccgtgactactggaaagaaaataagaaaagaaataatcattgataggttctatggtttccagaatgtggaaatgcgtttctatccattgtctgtaaatttcgactttgatgtcttctattatctgctcaaaatgaagttaaaaagtgatagattgactttcacgattaacttaaatcattttatgaaatttcataaagtgcatccaagcaacaaaaaagtttacatagagaagatacataagtcattagagaatatgcttgatttctaccttgcgtttagttatggcccaaaaacatataaatgccatttacttacacatgtagaagaaaacaaagaaaacagagaagaaataaaaattacttttagtaaattctttgagcagttttatgaatatgatgcaaatctaatctttaacatttgtttgagcgactacaagaaaataaagagcgattacgcaaaaatactttttatgttctacacaacaaaccagttcaataactcaacatttaaaatgaatgagatattgaagagattgcaggctgaaagttttggtaggcaagacgttgtaaagaaaataaacaaagcacacaaggagttgattgaccttaaatttcttaaagcagttgagacgattaaacctgaaaaagaaattgaaggctataaagtgactttcacaaaaagaagagaaggttttttgccaacagtagcagaaaaacctaaaagcaatactgatgaattatctatctgtgatgaagaattaccattttaa

SEQ ID NO: 367799 - DNA, 468 bp, Pseudomonas aeruginosa
atggccagaaaacaatgccaagtctgcggccaacccgccacggtgcgggtggaagccaatctcaatggtcgccacagcaccatgctgttgtgtgacgatcactatcgccaactggcgcgccagcaaaagcgcaccgtctcgccgctggaggctctgtttggctcgcgcagcggtttgttcgaagacttcctcggcagcgacttcttccgcatcggtgacgatgcaccgtccgtggcggctgatgccgacgaagtggtcgatgcgtctttcggcgaatccgctcccgcaacggcgggcacggcgcgccgccgcggcagtgggctggccagccgtatcagcgaacagtctgaggccctgttgcaggaagccgccaaacatgctgccgagttcggccggcccgaagtcgataccgaacacctgctgctggcgctgaccggcagcgacgtggtcaagaccatcttagggtag

SEQ ID NO: 367800 - DNA, 378 bp, Pseudomonas aeruginosa
atggcccattggttacgcaagacccacccctcaagcgagatcgcgcagacaatcgcgggcaagatcgaggacgctgacgagcgaatcgccaacctgaaggagcagattttggccgtccaggctcggcgcaaagagttggaggaagaagcgcaaaccattgcgtcagaccagctcgacgaagaagctttggcccgtgccatggcccacaacgcaggcccggttcttgccggctgcaaagccagtgcggcaatcctgcagggcgacatactacggctctttgttgaggccactcccttcctgagcgagctggcgcagcatgagatggagaaagcccagtccatccatgacaatgtgcaacgctgggaatctcacgtttaa

SEQ ID NO: 367801 - DNA, 294 bp, Pseudomonas aeruginosa
atggacttccccgaactcccgccccacgtctggcgcactgaccgccccttcatcgtcaccctggtcgatggtgaccgtctgcccgcctacccggttatcggcaaagtggaaaatgaaagcttctacttcggccaggcctgccaggaaaagatgtggctggttgccgaccgcatgatcgagagcccgctgatcacggagtgtggccacagccgcatcatcgaggcgagcaaagttgcgatgtgggagccaattctcccggctgcaccagctcagcaacctcaatctgaatcctag

SEQ ID NO: 367802 - DNA, 846 bp, Pseudomonas aeruginosa
atgcaaactgcagcacaacctcgctttcaggcctacgcggatgtcatcaaagctatcgaagccgcagcgaccaatgctgacctcgagcacctctccgaatcggtgaacaaggagtacgagcaaggacgcctggatatgaccgccaacgactggggcgactttgccgctcggctggtcatgcgcgatgacgtcattgaccagagcgccagcaagaagccggctggagtcgtcttgctagacggcaccacggttcacgccacctatgtctcaacctgggatggcggcgttgaggtcagcaccgagtgcacggtggacatcaacagcggcatcgttgaagctgaacctgcggatgttcatggcctggaggtctgcgagggggagctagttcgcctggagtgtggtgctgagttccagatggtggaggccgaaggcgagaaccggatcgaggatgtggcggccttccaggctgcggtccagggccgcgccgttcagctctccagccttgacccgatcaaagcggccatcctggtgctgcgcaaagcgcaccccgacctggccacggctgtagagcaactggcctctcggccggccggccttgtaccggagccaaacgtggttcatatcgaggaatctgccggcggcctgtacgcggtatcctgtcgcctgcacggcgacgatgatgactcggtttaccacatccactgcagcactgaaggcgtggcccaggacattgccctgcgccagctttatgccgaggcctgctgtgagcaggacccgagcagccctgactaccgcgggcactacatcatcagcagccagctcgtcgcctccccggcgcgggtctga

SEQ ID NO: 367803 - DNA, 399 bp, Pseudomonas aeruginosa
atgcacgacatccgcatccccaacgtagcgcagcccatcaaaggcgcgctgtgcaccattggccacctctaccggcctgaaatgcggggcggcgcgctgatccaggagctctggctctacgaggatgatctggagtcgcagacccgccgggtgttcaaggtgttcgctccggtcaccccgaaaggacgtgttcgccgtggcgttcccaccactctcaacatgctgaccgcaaaaggcttcgacaagcaccgctacatgtgggggaaggacggcgaagcccgcgaagacctgaccctggacggcaccgaagcaagcctcctgatcgcccaggccacgaaactgatcaaaaccaacatgaagcggtaccgggactccaccacctggtaccgccactcctga

SEQ ID NO: 367804 - DNA, 831 bp, Pseudomonas aeruginosa
atggcaagcagcaccagcaccagcacccaggttgaactcagccagtatccgacaccggcctgggccgccgcggcgatcgtccgcaagaacttcccgaacctcagcgccaacgacttcgttttggagccaacctgcgggcctggccgttttctgcaggccctgcccgaattcgttcccgcgctgggggtggagattgatccgcacctggcgcagatggcccgcgacctgaccggccggcgggtaatcactggtgacttcttcgaagtgaagattgaggagcgtccgacgctggtgctgggcaacccaccgttcgagaccaagttcatcgaccgactgctggaccgctcctacgatctgctgatcgatgaagggcgctgcgccctgatcctcccctgctttgccctgcagaccgcttccagggtctgccgctacaacgagcgctgggccctggagcaggagatgatcccccgcaacatctactcgggcctgcagtgccccttggcgtttgtgacctttaccaaggacaagcagcgcctcatggtcggcttcagcctgtaccaggagctggcctacctgcagacgctttctcgtgacgtccaagaggccatgcgccatgggcctgccagttggcgctcggttgttgaggaagccatcgatctattcggcggggtcgctgacctcaagcaaatctacgatttcgttgccgatcggcgccccactgcgaaccccaactggaaggaacaagtacgcaaggtgtgccagaagtccgcccgcaaagtgggccctggtcgatacgcgaagcccgaacagctggacatgctggccgcataa

SEQ ID NO: 367805 - DNA, 1782 bp, Pseudomonas aeruginosa
atgaacgcgctgagtttcggaagcatcgatcacagctccagacactggcacatccgctgcgagccgcacgttcgggctcgtctcaagcgcgtcttcccgaggatgcctcagcacgccgctgactgcatcagcctggctgcgacgccggagaatagccgcgaattgcagtggttcctcgatcgctaccccatggacatgtcgcccgacatccgcgcagagctggagcgccagtctgccgagcacgtggaaatggagcagaacctgcaggagctcaaggccggtaggttggagcttcccccgttcgaattggctctcccgccgagggactaccagcgctatgcggccgcccagctggatatccgcggcggcctgctgctcgctgatgaccttgggcttggcaagacggtcagcgggataggcccgatggcgatccccggccggctaccggctgtggtggtatacccggctcacatgccgaaccactggcctcagaagctcaaggaattcgctccgaacctgcgcgtacaccacatccgcacatcgaaaacctacgacctgatcaagaagccccgccagcgcatcgctgatctgtgggacacccttcctgacgtgatcctggtcagttaccacaagctgcgcggctgggctgacgtactgggtgagatcgtcgagtacgctgtcttcgaagaagcccagcagctgcgcaaccccgacagtgaaatctatagggcatgtcgtcacctcgcctcgaaggcgagatggcggctagggctgaccgcgacgccgatctacaactacggaagcgaattcttccatgtcgtggacgtgctgatacctggatgtctcgggacgtatgaagagttcctgcgcgagtggtgcattgcggccccaggtgagaaatcgaagctcaaggacgccgagcagttcggtgcgtacctgcggcgcgagggcatcatgctgcggcgcacccgcgccgaggtcggccgagagctgcctgggctatcgaagattccccacgagatcgaagcggacgccggcgtgctcaaccggatcaccggcgatgcggccgcgctcgccaggacgattctgaagaagaacgaggcctaccgcggcgagaagatgcgagcttcgggcgacctcgacgcactagtgcggcaagccacgggcgtggcgaaagcgccctacgttgccgagtttgtccgtcttttgctggagagcggcgagaaggtggtgctgtttggctggcaccgtgaggtctactcgatctggctggagaagctcaaagagtttaatccggtgatgtacaccggctccgagtctccgaagcagaagcaagccgccatggatgccttcatctccggcgacagccagctcatcatcctgagcttgcgctctggagccggcctagatgggctgcagcatgtggctagcaccgtggtgtttggcgagctggactggtcaccaggcgttcacgaacagtgcatcggccgcgtttaccgcgacggtcagtggctgccagtgatggcgtacttcctcatctccgaagagggtagcgacccaatcgtttctgacgtcctgggcgtcaagcgggagcagatcgagggcgtccgcaatccgggcgagaacctggtggagcggatcgatataggtgaaaaccagctacgcgccctggccaagatgttcctcgcaaaagtaggcgaagctgttccggacgactcaaacgtcattccgatgcacgtgccggcggcaaacagcggtgcacagggccagctgcagctctag

SEQ ID NO: 367806 - DNA, 408 bp, Pseudomonas aeruginosa
atggaagcacgcgcaatagtgtcgggagagccgtcgagccaccacatggagttgagtgcaatcgcaaagctgcttgctggctatgcatatcgttacggcagtgagactcagctgcaggatgctttgcagcgggtactcgaggctgctggttacacggtcgagcgtgagcgggtgctcgatgccaagagtcgcgttgacctgtgggtcggcggcatcgtgatcgaggtgaaggttggcgggtcattctcgtctgcacttcaccaggttgggcgctatatcagccacccggaggtgcgcggtgttgtcctggccagcacagagcgttgggcatcggacgcgctcgtagatcggcctgcatggggcggcaaggcattccagatgctgcgggttcggaggcagaccctatga

SEQ ID NO: 367807 - DNA, 753 bp, Pseudomonas aeruginosa
atgctgcgacttcctctgcttgtcggtgctggcctggcctactacctcggcaagttcaaaagcgactggctctacacctggttagggctggacagcagcactgacccttatcgcttattcgcgatcggcttcttcgcggtgagctacctggccctggcggtcatttacaaagtgctaccgctcaacgagctgttctaccgctatctccccaaggtttgggggcgctggtggtcggcccgcctactagccactactgcctgctccgagtggcttcatgccggcaacccagacttcaccacttggcaacgctggaagcgaaacgcgctttgccttggcctgttcattctcccgggcaagcttccattgtcgatcagcaaacagcccatcaccaaacagccgcagccaggagcactggaagtgaaaaacctaacccttcaaccggccctctaccgggatcaaagcatcgcgattcggctattcgaggacaatggcgagccgtacagcgttctgtcgacctatatcgagcatgctgacatccggaatgacgagatctgcatccccagctggaacttcaaaccggaagtcctggctggcctcatcgccaccggccggtttgtggatacccgccgagtggtacccactggcttcgtcgaggctccagtgtggcgcgtgacttgtcctgagctgctggcccaggttgccgagcagcgcgcgcaggccaacatcaaagcggatgccgaccagcaggactga

SEQ ID NO: 367808 - DNA, 618 bp, Pseudomonas aeruginosa
atgaccgcaagcacaaggctgcgccgccctcacttcatctggactgacgaagccctggccctccttggtactgcgcctgacagctccatcgcgcagcgcttcgacattctgcgcacttctgtttccaacaagcgagtggagctgggcatcccagcgtacgtccgtcaacagcgccccgagaaatgccatgtgtggacgagcgctgaacttgaactgctcgggaccaagccagacacaacgcttgcagctgagcttggcctaggtatctctgcagttcgccatcaacgaatctcccaggagatcccgacgtttgagaaatggagcagcgttgtggcgctgctcggggtcattccggacactgagattcatgcacgccatggcgtatcgctcagcaccctggtgcgcatgcgcaaggagcgcgacattccaagcgtggggaaatccggcaggccaaccgttccgcttcctgcagcggctcagcagctgctgggcaaggtcagtgatgttgagttggccaaacgctataacgtgccgttgaagcgtgtcagcaaggcccgtcagatggcctgtattgccgcattcgctggagacaagcagcgttgcctttccaaccagtaa

SEQ ID NO: 367809 - DNA, 129 bp, Pseudomonas aeruginosa
atgaagaacttcattctggccctggcggctttgaccatccttgccggctgcgacgcagcaagcgacaaagagccatcgcctgcgccggtagagacgcctcgcaaaaccgacgacgcacagcagttctag

SEQ ID NO: 367810 - DNA, 432 bp, Pseudomonas aeruginosa
atgcagcaactggatgaagaactgcttaccgcatggaatcgcttgaacagcgctgctcaccgtttgcgctatgcccgtgcgactgcgttaggcagcgcccttgatgaactggagcaggcccggctggctttcgccaagatcgtcagcgaccggcggccggtgccgccggttgagaaaagccccgagcacgcgaacgactacgagggtgctcccgactgggcgacctgcattcttgagggggtacccagcgacggaagctatgtatatgcgcggcacgacgcagacggctaccgcggcataccgcatgacccaatcacgggccatgcattcttcgccatcgtcggtgaagatgacgacgatgagggctgcggctggcaagtcgtctcaacccgcaacgacgaaaccaatactcagatccgaggcatttcatga

SEQ ID NO: 367811 - DNA, 219 bp, Pseudomonas aeruginosa
atggaaactcgtgccgcccgatcctctcgtcgaccactgctattcagcgtactggtgctgggaatcgcagccctggtctggtttgtcagtaatgcccaccagggtgatcgcgacgagatctcgcttatcgaattctgcaaaggcgaaagcgagctacctcgcctggcttgcatgaacgttcggcccgccgacgccactccgatgccacctcaagggtag

SEQ ID NO: 367812 - DNA, 258 bp, Pseudomonas aeruginosa
atgaacatgcacgaggttcgcgacgccggccaggccctggcctacatcaccgattgcaccctagccaccgtcacagacctggcctctcgtgcacgcccaccgaagcacgagctcaagcgccagatcggcatcgcgcagaaggccatcgactggatggacaccttcaagattgattactcctcaactcgcgcagcggacgttaaggccctcggcgggaaagttgaagtgtgggctgagcagttcaagcagaaagcgtaa

SEQ ID NO: 367813 - DNA, 306 bp, Pseudomonas aeruginosa
atggaccaggccgtaatcgactctctcgtgtcactgggctttaccctgaccaactatcagggccaagaaggcgacttctacgtcaaaaagatgaaggcctcggaggtaccctacctagtcaaacacgtcattgatgatgacttgctgtacagcggcgacgaggttacctactgcgtttgccctgacggcgaggttcagttggtgtacgccgatcagttcgagaaggccccgatgctttcgccggagggacgcgccctgctgacggatattggctacccctcctatgacctgggagagcagccatga

SEQ ID NO: 367814 - DNA, 159 bp, Pseudomonas aeruginosa
atgagccagtggcaattcatggggaaccggcctgaagggtggctggaggagctagcggcagacaaagctcgccgccggcgcaagcagcaactgcgtttcgccctcttcgccaccgccggtgtgctgataatgagtgctgcctggctagcctttacctga

SEQ ID NO: 367815 - DNA, 504 bp, Pseudomonas aeruginosa
atgaccaacaacattcacccactcgattcctcagtgcccttccaggatctctgcggcaaatcgttgtcagaagtccccggtgcggaggcagcagcagaacgtctcagtgaagttttcggcttcccgctcaactcgatccgcacccagagccaactcgctgcagccctggtgcacagtgacaaaaccctcgccaagatcacgaagatactcggccctgtagagcagcgtgatccggtgaaggccgcgggcgccagcaagtacttcgaggcctacaacacagccctggaaattctgctgaagtgttttgcagaaactattgctccgatgatcaaggacaagggcgatctggcgagcaagcaggccattcgattgttcggtgacctagcacaaggcaaaagcgacgcttcggccgagcagtggcagcatttaacccggctactcaaccacgcgaaggcacaccaagattcagccagcaccagcaccacagacgaggagaagtcatga

SEQ ID NO: 367816 - DNA, 450 bp, Pseudomonas aeruginosa
atgtccgacaagatccacatcctcagtgcaccagtgccgttccgcgatacctgcggtaagcctctctccggtattcctggctgggaggcctgcgctgatcgcctgtgcgaggcttatggcctgccggccaactcgatccgcactcaaagccagcttctggctgcgatgcacgacatcgaccgggtcatgggcaaggttgaagacctcaacaaagacccggtgaaagcggccgcagcgctgaaggcgatcgaggcgttcaatgacgccgtgggcatgctcgcccagggcgcagcaacgctactggtgaagaccactgaagggcgcgaggatctggccggtaagcaggctacccgtcttctgaatggactggctgaaggcaagagcgacgcttcgactgaggactggcagcacctcactcgattgctcgagcacgccaggtctccaaagtga

SEQ ID NO: 367817 - DNA, 309 bp, Pseudomonas aeruginosa
atggcaacggcaatgacggccaaagagaaacgctttgttgaagagctggtgcgtacccggggccaatcccttggcttcgtgcgcctgggcatggaagtatctgtgtccggtgatcgcggcaccgttgttgggctcaacagcagcgccaacctggacgtcaaattcgccaaccaacggaagcacggtaagcacgcgcacaactgccaccctacctacgagacgcagtacttcgacgagtcgggcaagctgattgccagcttcgtcgagggccagcacaagttcagccctcaacaagagctccaagcctga

SEQ ID NO: 367818 - DNA, 669 bp, Pseudomonas aeruginosa
atgaccgcgactgtcctcgatctgcaccacctcgagcgcctgctgcagagcctcgaaaagcatggctggcttccctatgaggtcatgaaggattcggcctggcaaagcagcaccagcattcccgacatgctccaggacatcgtgaagtgtgatccaccggtgatcagtatgctcaaggatggcaccaagactgccctggtgaagctggcctggggcctgggccccacccagctggtgcaggatcactcggagtcgtctggcttcgatatggcgatcgccaaggcacgggcagaagtagaacacatcgcatccgccgatctcctcgatcggctgttggcccaactggatgcagccggcgcccagaactatcaggaatcgttgttcgacgtcgtaatcggcaacgaggagctggaagctgtggtgacccttcaacggcgtgaccggccttccccgcaccagttccgcatgctggccgagggcgagcgtgatcagttccgcgccgagcttgaggccctgcagggcgttatccgggcggtgaacgatcaactgcggcgcttcggtgagcggatgcccgatggtttcgacaagcggatatttcagtgggttgaggacgctgcagcagcaagccacgctcccaccgatcggccggaatccggctccgtccactga

SEQ ID NO: 367819 - DNA, 1143 bp, Pseudomonas aeruginosa
atgaccagcagtaccgaatccatccgcagcctcctgcaggagtgccgcggctacgttgaacaggcctacaacaacgaacaggccggcagtgagcaggcgccgctggtgctggcgcagatcgatgagttcttgaatggcgaagcgatcgacctgcaccagcagccaggcgccagcgtgaagttcacctttcgccaccctgtgtcaggtgaggaagtctcggtggccatgagcctcaaagagatccaggagaacctgtccaacgagctgtacgacaagctcgctgagagcgtctgcagctgcgagccggtcggggaaaccaacgtggtggactgcaactgcggtgatcacgttgatgagttcgttctgcagccggtaccggagattgctccccgcactgagcgcctgagcaatcgctacggcatcgacggcgactacttcggaaagaacctcgcccggacgatccgtgacttcgacagcttcacgccggatgaactggcccggcacctgttccgcctgggcctggttgctgacagcaacgtgctcaaggagcacgagttctcaggatgggctgccgtcgcactggagttcctgaacagccttatgtgggatgaggtgggggtcaacaccttggcgaagctgcgcaaggggcaaggggtcaacacggacagcggtcgcctctggctggctgcccatgacttcgtcgagaacgtccccgctactgccccgctcccctaccaaactcgtgtccgcagctggatgctggagtgcttcggggtggctatcgccggcgatcgcatcgaacgcaatcaccgtttcctcgaagaggccctggagctggtgcagtcctgcggctgcacggagagtgaagcgcagcagctggtgcagtacgtgttcagccggccggttggggaggtttcccaggagctgggcggcaccatggtcactctggcggcgttggccgcggcgcacggcctcaacatgcaccgagctggtgaggctgagctagccagaatcctgcagcccgaggtcatggaccgtattcgtgagaagcagctctccaagccctcgatgtctcccctgcctggcgcgtatccaggccggactccatttcaaccgaaccagactccggagaaccgggcatga

SEQ ID NO: 367820 - DNA, 705 bp, Pseudomonas aeruginosa
atgatcagtcagtacatctccgtcgcactctccccgggccagatagcagcaggccaggacgcccgctttcaggtaagcgcacgtgtctcgctcgcaatcgctgttcttgccattgcgctgctccttacggtcgtttgcctcatcaacgttgcctgcatgaacgcaggcatgcgcccgttcatgagccactaccatgacctggtactggtgtcgcagggcgagcaaatcgcctacaccggcaaggactggctgagcatcctcggcctgatcggtaacaccctcctcctgatgcacctctgcagcaaagcggcgccgttcgttgagcgctacatgggtgaccgcaatgcggcaaagagcctgaaccagtggctggctgaaaccacctcggccagcacaatccacgtccctggtatgtcctcccgtgctggcctgcaggtcatagcgatgtcttgctccctcaacgccggccggggcgtggtagacgccgtatgcctggatgaaatgagccgcccggttttgatcaccggcttggctggcgaacaggctgccgtagaggccaaacgcacgcacgaccactacctgatccagacagcactcaactgtcactttgccaagaagcgtcatgccctcgctcgggcactcaacctgcagccagacggcatattccctcccaacgggaatcagctcagtggagttttccaatga

SEQ ID NO: 367821 - DNA, 357 bp, Pseudomonas aeruginosa
atgatcccacttaccgcttttgcctgcatcagcatcgttattggtggcttctggatcttcagccggcgaaaacagccagccccgcagcgcgactacgagccttattgggggattgtcgatcaggcccttgccggccggagccgttcaccagccgacctcgagcagcaccctgagtacaaagccccgctgtacgtcgtgcgcatgtgtgaggccctggccggggcaatcgaacaacagaccggcaaggcggtcccgctttcagaggtaatccgccttgaaagcacctgcactggagctgactaccagcgcaagctttcgatgcgttgctgtcggctcgcccagaacaacgcagcatag

SEQ ID NO: 367822 - DNA, 246 bp, Pseudomonas aeruginosa
atgaccaagcagaagctcagccctgcccaaaagaaagtcatggagtggcttagccagggttggggcgctcgcgtttcccatggaaacgccgtagagatcaacggcgatcgtgtttgcaacgtcgacaccatgactgctctggtacgccttgggcttgcagagcgcgagtcacgcccaccctactggatggccactgccgaaggcaggaaactgagcccaaactacagacccgaccaggtcgattga

SEQ ID NO: 367823 - DNA, 258 bp, Pseudomonas aeruginosa
atgaagttgtttgttctgtttggccaacgcaaatgcgactaccccggccagtacgctatggaggcgctggcctgcatggatgagaacgggcagtcggacaatcccgactacctcgaaggcgaacatgccaagtacgagcagagcggtgagttcgaccgcctgagcatcgttgagctttcagttagcgagaaggacgtgcggaacgtcctttaccccgagaacgcggcaattccagctaccgtcgtgcaggccgattga

SEQ ID NO: 367824 - DNA, 198 bp, Pseudomonas aeruginosa
atgccacgcaaaagcaagtacgggaacatgccgcaagcgccagcctacctggctaaggtcaagggtgatgccggcacctacaaggtgtggggcatcgattggctgcaccagctggtgctgatagaccgggcaggcctggagtggacgcccattgccaaagtggcattcgagccagctcccgaagctgaagaagactga

SEQ ID NO: 367825 - DNA, 216 bp, Pseudomonas aeruginosa
atggaatcgagacgttggacagttgcgcgcttccctgcaggagtgtggagcgggggcggtagcaagaacgatccggactatgcggagtgcgaggtgtacctgatcactgccgagagcctggacaaggccaagaagaaggcccaggccgttcgtggtcgactcgttaagaaagacgccgaccttccctcccaagccgcgccgtacatcgcggactga

SEQ ID NO: 367826 - DNA, 237 bp, Pseudomonas aeruginosa
ttggccagatcactgttcccgaagcttgccgatggcgagtacatcgccaagtgcaaggagaaatccgccatatccgccgcggtaaacggccactcccaggtttggcctgaggccaaggtggttgtgaaggacggcactgcacgcttctacaaaggcggcagtctggtctgggagtgcaatgccacctatgcacgcggcaacttcgaggtcactccagcaccagcaaagggaaagtga

SEQ ID NO: 367827 - DNA, 390 bp, Pseudomonas aeruginosa
atgaccgcccagaaccatcgccttgcagcccgtgggttcaccgaagccaacatcggcgcactggcgaccgatctcctgatctggcgtcagggtagcgccggcctgccggaaaccagcgcgtttcacgagctggcccgcctgtgcgccgcctacgccagcgaaggcgaccagtaccaggaggctgaacgcctggtcatgctgcgagcgctggaatgcgtttcgcaggacttcatgagcagcggcggttcggggcgaactgcagatgaggcagcgggcatgacctggtggaacgcactcactgaagatgagcgccgctactggatggcaacggccggcgataccggtgtcgtggccgatgcctgggcggcctacaagcgcaactccaactga

SEQ ID NO: 367828 - DNA, 1170 bp, Pseudomonas aeruginosa
atggcccagcaagtcgaactctatagccgcaaagacctggccgagcgtgttgccaagcaggttctgcaggtgggcgtcggatcggcgtcaggctcggggattttcctcgccgcgccccgccgccagggcaagtccacgtttgtgcgcgaggatctgcgccccgccatcgaggcggcaggtgccatcgtggtctatgccgacctttggcaggacaccagcaaagaccctggactggtgatcatcaacgccatacgcgaggcactggcgccccatgagggcgtgatcactcgcttggcgaaggccgcaggcctggataaggcagccgttgggggcctgagcttcagccttgatcgcgtcggcctcggtaaggaagtggatctcaccactgccctggtcgcgctctctgatgaaaccggccgcatgatcgtgctgatgatcgacgaggcgcagcacgccatcaccaccgaggccggcaatgccaccctcttcgccctcaaggccgcccgggacgagctcaacagctcccggcacaacggcctgcgcctggtgtgcactggctccaatcgctccaagctggccatgctgcgcaacagcaaggatcaggcgttcttcggcgcgatgatggtgaacttccctcccctggatcgaggctttaccgactggttctgccagcacgtcaacctgccggccccgctcgaccctgatgccgtcttcgcgctgttccaggaagctggttaccggcctgagctgctgaatgctgcagccgccaagatcggctttgacctgatgatggacccagccgaggtgccggagcagtttgccgccggcgtgcgagccgaggcggcagagatcaacgcccagctcctccgggcaatccacagcctgaccccgctccagtcggccgtcctgcgggtcatgtgcgcgaagggcgacaagtacgccccgttcgaggcccccacccttgagctgtacgcaaaagccatggccatggccggcgtagaagagaaagaccgcaaaaccgacgtgccgaacgtccagcaggcgctgatcgccctgcaggagaccaagaagctggtatggcgcgcatcgcgtggggtgtacgccgtcgacgaggatgtgattgtcgatatcctgcgcgaggaaggcctgctggaagggctgaacgaatag

SEQ ID NO: 367829 - DNA, 1035 bp, Pseudomonas aeruginosa
atggcgcacgctcgacagggcgtcaatgagcgtatgcggttccttcggcaggaactgctggcagacatacgccgcgaactgaacaagctggggcagcagcgcggccctggcccgggccaggctgagattgccaatacccaagtgtttggctgctaccacggcgccggcaagatcatcttcgacttccacaagagtctgacggcagccctgctggaaaccgacgtcgagagcattccactgtcggctatcccggttccggctgattcgctgtacctccacttcgggccaggatctggtttgacccttgagggtgatgcgatcgagggtgcattcgtttcctggacccgctacgccggcgaaaccccgcaccttgtcatcgacttcgtaagtgccggccagttcggcgatccctatttctggctcagcgaggctggggagccgatgacgggatgctccattgccctgacggacatgagtcagggggtgattcaggctctcgaaaccaccgcgggcgagatcatcgagcgcaacagtgcggttcttgccagggtcaaggaaaccgagcgccagctcgcggagcagtacggcgaggtcgtttcggtaccgagcccgattacccggctcggccagaacctaccgctgctgaaaaagggcctggccctggtggtcaactgcctgctctatctcggggtggcgccggaagaccaggaagagggatggtccgacaccgccgacccgcacctggttgaacaagccacgtccggactgaagcccgggactcgcaagacggccgaaagaaccctggtcaacaaggggtacatcaaggtcaagttcatcggccaccagtttgcttccagcactgagggcatggagttcgggcagtccggtcgcaccgtggccacccacttccgccgtgggcacttccgcaatcagccctacgggccggagcgctccatgcgcaaggtgatcttcattccacccgtcgtggtgaacccagggcacagcgaggcaccaggccgcatctacgaggtctag

SEQ ID NO: 367830 - DNA, 261 bp, Pseudomonas aeruginosa
atgaccaactaccagcgagttacgcctgaccggccctatgtggcgtcatggacggcgctcggcggacactctatgttcgtcggtgccattcaaagctcacatgggggaactgttctgctggccaccaacgttgcctccgacgcggccggcttcgactcccccgaaagctgcgccgccgccatgctggcgcacggatacaccgaagagagctttgcctatttggcgatcgggccgatgaagggtcagcttgcgctcttctga

SEQ ID NO: 367831 - DNA, 1119 bp, Pseudomonas aeruginosa
atgtcccagcagctcaaagcacacttcacctgcaccgaaggtggcagtgacaaagagtacgaaatccacctgatcgccgagggtgacgggtatgtcctgcacacctaccacggcgcacggggcaagagtctgaagctcaccgtgaagaccaaggagccggtgccttacgaggtcgccaagaaggcctatgacaaggcttatcgtgagcgcctggccaagcactacaaacccagcgacgccgccgccgacatgtccgcaccggcctgccgtgagttggtggccacctcgatgatgccgcagctgctcaacccgatcgaagagtgtgatgttgaccagtacctggactcacccgactggatcgcccaggaaaagcacgacggcgatcgccgcggcttcgagctggccagtggctcggtggtcagtgcgaatcgcaagggcttctctgttgcctatcctcagagtgtggtggactccatcctacagagctgcacccagtacctcccgctcacggtagacggcgagctgatcggcaccgattacgtgatcttcgacgtgcgggtgtaccagggcgtcaatgtcgagcatctgccgctgatggagcgcatcgacctactccatcacctcgacacttgcctggtgctggacgggatatccaacgtcaaggtcgtgcgaaccgcagtgaccagcgcggccaagcgcgcgctgctggcgcgaatgaaggaacagagccgggaaggcgtggtgttcaagcgtgttgacgcgccttacgtgccgggcaaaccgaactccggcggcacccagctcaagttcccgttccgcaagaacgccaccggcattgtcatctcccatcacgccaccaaggcgagtgtgggcatcggcatgctggatgaactgggtaacgtcatccccgttggcaactgcacgatcccgccgaacaagagcacgcctgcgctgggcgcgctggtggatatccaatacctgtacgcctaccagggcgggagcctgttccagccggtctacctgcgcgagcgtgacgacgtgagccgcgaggaatgcacgctggcgaggctgcacttcaaggctgaagctgcattcgcagacgaagccgacgcagcctga

SEQ ID NO: 367832 - DNA, 276 bp, Pseudomonas aeruginosa
atgagtacagagcaagctgcacagccgacctacgacgcttacgggcgtatgaactaccaccctgacttccaccccaaccagggcacgccctggacaacgacagaccagcaatacctgatcgagttttacgagaagctcgggccagagcaggtcagtctcgaactggggcgcacaattcacacggtgatgactcgagcgtgcgaactcaggaagcgtggcgatatgcccaagccggcggtgaagaagtatcaccgacggatgcgaatgacagcctga

SEQ ID NO: 367833 - DNA, 786 bp, Pseudomonas aeruginosa
atgaactcgcgcactcagttggccctgcccaccacactcaccgatctgcttgttgcccgcgagaaagcgctgaagctgtttgcggactcgcggcgcaccctggcaatggcagaggatctgctgaagcagtacgggccctatctgatgccgttctctggccagattcgagactgtgaggagacagttcggcgagagcttgatcgcaaaatgtgggagcgagcgctggatttgacagggttcaagcagctgatggacacggacgaggtcaagtcgctcgataagagcctggaaggcccgcctcccgagttcaccgagaacaacattcgagcaacgctgatcgatctgcagatccgcgctgacgaaatgttccgccgcggcgtgttcaaggtgttccgctcactgtctgatgactaccgggccaacgagtccgaacctttccgtatcggcagcaaagtggtgatggggggaatggtgcggccagcgttccggcgcggcctgtgcatcaacgatggccacaagaactacgccggcgacaagctcaacgacatcgaccgggttatcaagaccctcgacaagaaactgttccacgcccgcagtctggaaatggccatgaatggtgtgttccaggatcgtggcgtgtacgaggacgactactaccgcgccaaggcattcaagaacggcaacctgcaccttgagttcaagcggcccgacctgctggacaagctcaacgagcaaatcgcggactactacacctataacgccctggcggacggccgaaacgcctaa

SEQ ID NO: 367834 - DNA, 438 bp, Pseudomonas aeruginosa
atgaaagcccgcatcgagaagaagctcagccagaagctggtcaaactggcgccgaccattttcaagggtgcctggctggacaactcggagcccagcgagctggcctatgagcagcgcaccagcgtttccagtgtctggagtgtgggcggcggtaccgactacttcggcgacggcatggacgcttacaccgcctgggagtggtggcggatgaactgggagtggcatggcgacttcaagccgtacccggaagagcaccagcaccacggctacccggatgtatccggtttccgcgccacgaccaagaacctgctgaagctggctgttcgggctgagcagctggcgcaggccgagcaggaacgaatccgccagtcccgcctggacttcgcggcccggttcccttcgattcattccctcgctgcgaaatcggaatctgcatga

SEQ ID NO: 367835 - DNA, 324 bp, Pseudomonas aeruginosa
atggcccaacagacagtcgacttcaagcagttctcggcaaaacttcgcctggaccccagcgacctaggaggccccagccgcatggacatgatccgcgagcgccagcaggccgctgacctgatcgactcgcttggtgcccagctcgcggcgctgaaagaacgtgaacgccgttgcccaagcatgcaggaggcagagtcccgcgcgctgctgcgcggcctgcaagagtgcggcgagctgctcgggcttggcaccaatgccagcccagctgacgtcgtggaggccgtccgtaacagcgtgcagcgccaacaaggagcaacagcatga

SEQ ID NO: 367836 - DNA, 273 bp, Pseudomonas aeruginosa
atggctgtctacgtcgacgatgagcgcatgcccttcggccgcatgaagatgtgccacatgctggccgacgacccagccgagctcctggccatggccgacaagatcggcgtggcgcgcaaatggctccagcacccgggaaaaccccaagagcatttcgatatctgcctgagtaagcgagcccttgccctgaagcatggcgccatcgaggcggatcgcgaaaaagtcgttgagatcgtcaggcgaaagcgccagcagctcaacaccagccagtga

SEQ ID NO: 367837 - DNA, 441 bp, Pseudomonas aeruginosa
atggaaaacgcaaagaccctaacccagaagggattcgtgcatcgcaacgggaaaatctaccgtcgcaccaacgagagcttctcagccttccagaaggcgttcttcttcgaccgcctgctggagaaagacgctgactatttccccggcgggcagctggcacaagaagaagcccacgaggccgccagattcctcctcgcccatgaggaggaagtacttttgcccttcctggtggacatccgggcccctgccgccggcgcagaggcttccgagggctgggaaaagtttccggtaagccggccactgccccaggcagtcttcctggtgcatgaaggcgtgctcaaggttggtaccggctggcgctgccctcgcactggcggcgcgatcaaggtggataacacgctgatcgactccaaccaaaccgcctggtggaagtacgcctag

SEQ ID NO: 367838 - DNA, 702 bp, Pseudomonas aeruginosa
atgtccgcacaagtagagctgaacgaagtcgatcaacacatcaaggcaatgatgctgacctacccgaccctgttccggagtcggttctcggcattgcagcacctcttcatgtcgaacggcaccggctacgagtggaacgccgagggcaagctggcctgcgtcttcgatacccaccacagggaaacaatggattactccgacctcgaggatcgccagcgcgaggtcgatcaggagttggcatccaagcccacgggtaacatctaccgtctctatgccggccgcgcagcagcactgaagcgagagtttgccgtgcgacagctgatcgaagctgatatcgacctgtacgccaccgagcatgtcatgggggagaacacacagaacggcgtcgagtggatgaagcacttcgacccgcagtggtgcgccatgcgcactgcaccgtttggcgcgatcgacctggactgggccctggctgccgaggaaacgatggagattgcccgctccgcgatctaccgccatctggccatgtacctcgaaggcttcgaccgggataaggctgaccccaagtggctgcgcatctatgaccagctcggaagcatcctgctgaagcttgacgacaccaccggtaccaagcagcgcgtggccaagcagaacgaagtcgccatgaggatcatcgacgagatcctggccgaagagcagcagtga

SEQ ID NO: 367839 - DNA, 450 bp, Pseudomonas aeruginosa
atgcagtacaagccatacagcctccgcccgcgccagatcgacttcaatcagcgccgggccacctcctttgagcgcaaacagcagcgcgaggcgagcgccctaccgttgttcgccgaacagatccgcgaagagcagcacgactgggaggccgagaaggaaatgcgccagtccaaggacgacgcaaccctgatccgttggcgtgcacaacacgcagccctctggcgcaaggcccgtgccatgtacttcgccctgcctgagcaggatcgcgcagccagcaagcgtgactgggcaaccatctggcgcggcgcctggacgcccacgaacctcatctacctggtggagaagtacaacggtgtcggcgccgagcgcgaagcgaggatggccgaagagcgccgggaaatggaggttcgcatccgggctcggctggcgagccaacctgcactcatgtga

SEQ ID NO: 367840 - DNA, 522 bp, Pseudomonas aeruginosa
atgaccgacaagtacgcagcgctgcgggctgatctgcccaagctccttgaggaggcacgccgccagggagcggagaacccccgggccaagctaatcaccgatctgctggccgactacgacgctatctgcgctgccctgacgtccagccccatctcgtggcagtcccgattcgtttcctcaggtgacgcctgggatgcctggcaaccctgcagcaaagagcatcacgatctggtgacccgcacgccgaacgaatggcccgggtacgaaacacgggccgtctgtaccttccccgcccatctcgttcacccgagcagcaccagcaacgccggcccggccttcgacctgaagcagctgcagccggcagttacccagctgctggagttcattttttcccggtaccgcagtccggaagcggccgcaacgctgcctgatcgggtagtagcggctgttcgcgccctggaacccttcaccgaagctgacctggacaaccaatcccccaccggcgcccaggccctgcactaa

SEQ ID NO: 367841 - DNA, 984 bp, Pseudomonas aeruginosa
atgaccttcaccaactgcactctcctctcccaagagcttcgcgagcacatcctgcacatgcgccgcgagatgactcggcaggatcgcagcccgttgccggtgcgccagagcctggcccagcgcctcaccgagctgctcaaccaaatgcccacagtcaccgccgatgttggcttccgtcgcgtggaaaaggacgctgagcccggtgatatttgcacgcacgtctgcaaccgcgagcccaatgagtgggacatgagcacgtttgtcatcgagcgcctggtggcaatcggtgttcccgggcagcaccagctccctgcgggtggccagagcgccacggagtgtggcgacccggccgatgacagcattcccgtacccgatgtggcggaaaccgagctggagcagctccgcgacgccctggcgatcgccagcgaccgtgccgccatcctggagcgggagcgcgaccaagctcgtgctgagctggccgctttgaagacagcgggttgtgaaacgccggaagtggtagcaaccctggagattagcgactaccaggacaacaactcggtctatgccagtctcacgaagcacataggcatcgatgtggcctgcgctgatgatcggctcatgctggtcgcccagcatgaacgcaacctggctgcactctccagcggccaaaaccccattgcagttatctctcacccgcgcagcgatgctgatccggacgaaggccccttcatggaggcccactactggctgcgcctgcgcaagctgcccggcggtaccaagctctatacggccccgcccctctccctgaacctgattcacctcctggaggctggcaacccgctctccaatacggcgtacagcctggcactgaaacccgggcactccctcaccacgtatgactgcgagctgctcgcacagctccgcgcgaactgggacgctgccgtagcggtgtgcacccaaaccgaatcctccctggagaactga

SEQ ID NO: 367842 - DNA, 909 bp, Pseudomonas aeruginosa
atgtcctgtgagaacccccttctgctcgcaatcaccatgctccaggactacaaaggcgacctggccggccgggagtttcccaacaccgacgaggggaaccacctgcaggtgatcaacgagaacaagcgcgccagcgtcgacgccgccattgccggcctgcatcagctacgcgccggcatggccgcgccagctccggtgctggtgccggacaacctgctttctcaccgcaccagctggcagcgagcgtttcaacgcctgattgagctggaaccggccagctccgagcctgatcgcgacgaccgcggctactggaagcacgaggctcaggcgatgcaggacatgtaccgggacgtggatagcctgctcgccgacgcgcagcggcccaccgtgcagatggccatccccgacgagtgcccgcacatgatcaccttcgacgacgcggacagaagcccgcttatctttgctggtgctggcgcccgccaagcggctctgaaggcctgggcggtgaactcgatcagttggaatgctcacctcttcgtccggatcgagcgcaactgccgcgatgatcgctacccgagtgcggaagtcgccccctcccaagccgtcctcattcagaaccttgctgcggatctggagcagctgagtaaccaggggtgggttcaccctggtgagcagcaaccgactgatggcagccaaaccgtatggtgctacggcacctacgagggccagcacgctccgacctacttcgagggcatctaccggcacggccgctggtactgcttgaacaacggtgactacatcgacggcggctacggtgatgactacgaagcccaggtcattctctggaggccgttgcccacggtaccggcccagcttctccgcgacgtgagtgccagcaccagcaactaa

SEQ ID NO: 367843 - DNA, 585 bp, Pseudomonas aeruginosa
atgcgcgcagttaaggccttcatcgtagaaaccgacgatccggacgattcggtagtgaagttcgctaccaccaacgtggccgctcgccgcaaaggtgctaacgagatcggggccgacttcgggaacgtgacctgcaagcgcctgccctgggctgaccagttcgccggcaaacgcattccggaaacagccttcatcgagaacggctggcacttcgagtgttcaacctgcggtgacaaggtcggaaaggagacgccggcgccggtgttcgccctggacctggcgttctgctccgcgaagtgccatgccgacgaggtagccgatcgccaagcagcggcaaaccggaagcaggaggtcattgacgccctgttgctgaagttccccgacgtcgaagttaccttcgcgagcgaccacgatgagcgccgcactgcgagcttcaagttcccaggcgggcaagacaccgcgcaatggaagctgggcgaagacagcgtgatggtcacgaaacgcgatgtcgacgcctggaacctctggcgcgaacaagtcaaggcggccggcgccagcgcggagggtgacagcaatgtcctgtga

SEQ ID NO: 367844 - DNA, 609 bp, Pseudomonas aeruginosa
atgagcacgaacccgtttcaaggcctgccgatgcccaagtacgacggcgaagaaccgtccgagatcgagatccagcgaatccggaagcacctggaagaaggccgcttcgacgaactgagcaaagatctgcaacgctgggtctgccaccgactcatgccctccctgacccgcttcggggtgtatccgccgccggccgaggctaacgcaggcttctgcacaaccatgcagcgccccaagtcagagtgtgggtgccccgattgcggttcctctctggttgattggcccactgaggcatcgaacaaaccgacccgcctcgatctgcacctggtttggaacccggagcgggaaaacggcgtggtattcctcgacaaggccgacgcggtatacgccagcaccggccgctacccgagcaccctggccaacttccccggcatcgactcgctggctgactacttccgcgacgacttcgaagacgacaacggcgagaccgccgtcctgcccctggtatcggttaccgcggtgatcggcggggaactactggccaagcgcagccagcaggttgcggacagccaaggcaccaacgagggagacgaccatgcgcgcagttaa

SEQ ID NO: 367845 - DNA, 333 bp, Pseudomonas aeruginosa
atgagccaacacatcgtccgtttgaaatgcgagaaagccggtggccacgtccggctgcagctcggctgggacaagcccttggccgagtactacctggtggtgttcgccgaggcagatgctcagtgcgacaacgaggaaggcctcgtctactcgaacctcgacgactcgcgcagccgtgggcaagacctggagtacttcaaggcgatcgcccgcgatctgggctgtgaggtgccagaggtcatgtggcaagcagccgccgaggatcgcaaggtcaacgccgtcaacaagatcgtcttctactcccccgccggggaagtggtcgagccgtactga

SEQ ID NO: 367846 - DNA, 288 bp, Pseudomonas aeruginosa
atgaagcacatagacaccgcgttcgccggtttgactgcgcgatgctgcaatccgagcgacggctgcgcctgcggcgataccgagcgcgttctgcgcggttacgcctacggacaggccggcccgctgccagccatgagtgaggctcagcgcatcgcctgcctggacgaaatactcgcctatgaggaaggcagcgaacgtgccgactgggagggatcgactgacgcccaattggccagcggcgtgctgtcggcctggcaaggctactgccaaagccttggcatgatctaa

SEQ ID NO: 367847 - DNA, 219 bp, Pseudomonas aeruginosa
atgactcacagacgcattgaggatctgcgcgagcgcctgttcgacacgatcgacgggctgctggataaaaccaaccctctcgacatcgagcgcgccaaggctgtagcccaggtcggttcggtgatcgtggaatccgccaaggccgaagtgcgcgccctggagacgctcggcggcaaggcacagagcggcttcctccagatcggtcgagatccgcagtag

SEQ ID NO: 367848 - DNA, 540 bp, Pseudomonas aeruginosa
atgggcctgaagaagaccgatgccttcattgaggcctgcctgaagcgctgtggcgaattgcgagctgaaagcgggaagtccacccgattccagccaggccatcagtcctggaacgcgggcaagaagggcctgcaagttggtggacggagtgcggaaacgcagttcaagcctggacagatcaatggccgcgcggcgttgctggtgcagcccgtcggtgccgagcgaattggcaaggacggcatccggcaacgaaagatctgtgccgacggcccgctgcacaaacgctggaagtccgtgcactcgatcatctgggaagaagccaatggacccatccccaaggggcacatcgtcgttttccgcgccggcaccgatcgcgagcacatcgtgcttgagaacctggaactgatcacacgcgccgaatgcatgaagcgcaacaccatccacaactacccgccagaggtgaagtcagtgattcgcctggtcgggaaacttaaacgcaccatcgcggaggctgaacgccatgactcacagacgcattga

SEQ ID NO: 367849 - DNA, 414 bp, Pseudomonas aeruginosa
atgcgagtcgattacgccgggcgcaccagctgcggatgcccctacatcaaccagcctgacccagctaagcactggaagggctgccactttcggctcaatgccgaagctcaggccgagcaacaagccgctgctagccctgaagagcctgccagcgataccagctcatgcccattctgcaagggcgaagcatcgcccctggtgctgctcaactcgtccaccatcacccgcgtagatcgtcaggacagctacggctgcgatggcgttgatgtgatctcactggttcagtgcacctactgcgaagcgaaaggccctgagcatatcgacgtgatcttctccggcgagggctacgaccaggcggtagaagccgcaatagctctttggagtgtgcgggatgctcgagggctgcctgcgtga

SEQ ID NO: 367850 - DNA, 339 bp, Pseudomonas aeruginosa
atgacctccaccctcgtagacagcaccgcaatcacgcagagccaggccatccagcttggccaggccctggcagagtgtgcggttgccgccggcatcgccgctgaaggagcctcccttaccggtcccgatcttctgttgctggcgggtgacctcaaaagtcacctgcagacagctggggcagcaccagcgccctgtgtctggaagcgcgacgaggacaccggtgcctacgacacgcaatgcgggagcacctggcacctgatggatgggggctacccgagcgagcacggccagtactactgccaccactgcggcaagccgatcgacgacggcgaggcttga

SEQ ID NO: 367851 - DNA, 243 bp, Pseudomonas aeruginosa
atgacctttaccgccgccgccaaccagcctgtagtcgccctctccaccatgatcttcgccgccggcgacgaggtgaaggccaagagtcaatccctgcccttctggatgacggtggtatcggtcaacgagcgcaatggttactgccgctgcaacttcggcgctaccggcaactacgccggcaacttccaccagagcgagctgaccttccacggtggccaagagatccgagtggctgcccactga

SEQ ID NO: 367852 - DNA, 249 bp, Pseudomonas aeruginosa
atgaccccgcgcaccaagaaccaccactgcacactcgctgccgagccgatcactcttcgctgggtcacctggcccgcctcagggattggagacgagagaagccggcccagcacggatgtgtcgtgcagctccgaggaccattgccagcaccagggggccaggcaatgcccacgccgagtgctcgatctgcacctcaaccagggtctgaatcatccccgcgctgagcaatcgaacggctccagcaactaa

SEQ ID NO: 367853 - DNA, 123 bp, Pseudomonas aeruginosa
atgagcgcgacctatgaccctgcccagggatgcccgaagtgtggcggtcaatccggctacgagttcaccatgaccgaagaacacaccatgggggggctgggggcagtcgcccacatccggtga

SEQ ID NO: 367854 - DNA, 405 bp, Pseudomonas aeruginosa
atgactaccttctcccccgagttcattgccgccaagatcaagttcggcgcgctgctggagcagtacgggtggacttctgtggacgagagtaagcaagactgggctgtaggtaccgcaactaaagagtttgagaccatcgttgcccccaataccgcagtcgcctacttctccccctcccgagagtacctggccatgcttggtggcaccttcgtcagcaagggggaagatgctttcagtgccatgtggatgccggtaccgcacggcatcaccgacgctgagctggccgagctggccaagaagtacgccgaggagtcggaacgacgcattggtgaagcctggagcgtgcgcctgctgcgccagcgtcaggctgccaaggcagagaaccaggaacgcgcacccgtatga

SEQ ID NO: 367855 - DNA, 666 bp, Pseudomonas aeruginosa
atgacccaagcagccacccaagcaaacttccacgtcgagcgctgcatccgagtggtattcgaatcgagcgaagccctttacccagtggacgagcgccagaaccctgatgtgctggccgccaacctggactgcctgcacgacgcaaagctggaaatcatcgagactgatatctgcggcgatacgtacgccatgctggctggaaccgagagcaaggcatatctgatcgcccaggagtgtgaggatggcacctgcaggctctctacaggcgaatatgggggcgttcactggcgcgttatggccagtgccctgggtgacatggagaacatccagcttgcttacggcgaccatgaagatggtgtacgtacagttgcccgcgagttggaggctatgtggatgctgcgcgagcagatacgccagtacaacgacgggctgaatgcacgccagcaggccccggatggcgacgactacaacgccctacttgatctggccgttggaaacggtaccggcaaggcagatcggagccccgcgaaggccctgcgcgaactggccacagcactgggccatgccgaggagtgtggagcgctggcgcagctcgcaccccatctcgacaacgccaatagccctcaagacctggctgaggcactgagcagcgcactgccggactga

SEQ ID NO: 367856 - DNA, 216 bp, Pseudomonas aeruginosa
gtgagcaccttcgctatccagcctcatcagacccctaccaacacaaaaggcaatctgccaggccctatcactgtcagccccgcccatccctgtcttgacgatgagtggtgcgatgaggatgacgatatctggctgctgggagcgttcgaggagccgaggcaccgcattgtcagtctctctgaataccgcattgagagcctgcagcacgcgcgatga

SEQ ID NO: 367857 - DNA, 546 bp, Pseudomonas aeruginosa
atggagtgcatgcaccacctcaagccatacgtgtccacgacgcgcaaccgcagcctcggcaccttcgagcaacgcctgctccaggacgtgcagtaccacggactgtcgatcgatgcttatcaatctaggatgcaagccgaagagatgcggcttactagggaagccgaggcgtcatgggcgctgaacttctccctcattcgtcgcctggcttcaatactcgatggggctacctcctaccaccacgggacgctcacccgaaggctcagggcggaatcgaacggcgcattcaagctcattcgctccacgagcggggagatgacgctggagatcagataccagtatgagcttgggcgtgggaagggttattcaacccctttccagctggtcaactactgcctagccctggcagatgagctggagaaggcatccccaaccttcaccgactacctggatgctagcgatagagctagccgacgactcgagcgagcggggtgtgaggcagccaactccaatcacactccccggcgagatttcgatttctcctga

SEQ ID NO: 367858 - DNA, 1548 bp, Pseudomonas aeruginosa
atgaacccgattacaaccaacctggtgctccagcgctcttggcgtgcgctggtgctggccagacctaccgagcaagggctcagttcattccgtgatgcagtgttcaaggccctcgccgggtaccgcatggccgatagcagcgagttctatgacgccctgaccagccttgccagactgactggtgtggccactctcacccacgaaaacatcagcggcattggagatcagatggacttactacaggcagcggctcgcagggcagatgattcgtccgatagcagtcgaaacccagctgcgatcttcattccaggttttgggaaacgagctgagtttttcgccgaggccatatcctcatcgggattccaggttctcaggctggagccaggtgcgagcgagtcgcttgaaccctcactgagggatcgaatcccagcgtcagggacgatcctggttggagacggggttcttgacgatgcgggggcggcggaagcgctatctctgcttgcggcaaggcatgagtctgacctgctggtggtgatcgctgtggacaacgtcttgagcttcgagcggcgggtgcgagcgacagcgttcggggcggtacgaatcctcggtctggaaacggagccaaaagcgctccgctccctgattcggagccgtactcgggattcggagttgaatggattccgtgtgctgctccttgatgactcgcgcaccgacgcctacgttgcccagaagtacatgcgcgacgaaggtttgctggtcgaacacgttcaatcccccagtgaagtccttgaagccattgagcgcttcaggccggatgtggtggtcaccgatttccacatgccgggggtcaatggtgaccaggtggcgagtgtgatccgccaggaccaggaagcgaccatgccgatcgtctttctttcgtcagagcgaaatgctgaaacccagcttctggcgctgtcaaagggtggtgatgcgtttgttcagaagccactaaagcgtggagccttcataaccgcactgaaggccttaatctcgcgctccaaggcggctgagacgcggatgcgccgcgaccccctgactgggcttttgaaccatgggcaattcctcacctcggcatcgaggctctgtgcatcacaatccgaaacgtccgcttctttggtcatgctggatatcgaccatttcaagagcgtcaacgacaccttcggacatccagtaggcgatcgcgtcattgtcggcctggccgagatcctggcagagaatctgcgttcgacggacgttgtcggaagaatgggcggggaggagttcgctgtcgtaatggtcggggccggtgtagtcgaggcaaaggcggtgatcgaccgtctgcgagaggcctttgcagccctacagttcgatggaaacgaggcgggggagggggaggtctggttcacctgcacgtttagcgctggcgtagccccgctcagtggtgttgttgcagattgtctgagggacgcggacgaaggcctgtatctagccaagaaccgcggacgcaaccaggtcgtaatcaaggaatag

SEQ ID NO: 367859 - DNA, 1203 bp, Pseudomonas aeruginosa
atgagcagttggcaaaaccttaaagacgccgggcgactactgcccggctgggtcacaccattcttcctgtcggctgctgtcgttgggctctatgttcttgcccgctatagcagtgccgacaagcctcacgacctgattgcatttggctccctggtaacgatcgtctgctcaatggttgtgggctttgccctcttgatccaggccatctataccgcgaaggccggaactgtcctcaccgcaatcggtgatggcttccagcgcgggctcacttacgtgtgggtaaccgccgcaatcagcctgtttgcctatgtaggctcagcgccagtctggaggctgatgactgaaaacctctactacaccctgacaacagttgtagtgctcgccctgctcgcagccgggtattgggcttctggtgttcgccagaagcctgaaggcgaatcccaaggcacggcaggcgccacaagcacggccctggccctgccagctggcttcatgcctaccgtagagcagcgtcctgccttccagatcactatggcggatgaaacccgtctcatgatccaccaggccgcgcgcatcatcgcctaccacggtagtgattgcctgattgcagattccttcagtgcatccctagacctcaatgctcgcacggcaaagattttcaccgagatgaatctgctttcgacgcctgcgatgctgtactggcgcatgcacatgctgctgatcggcagcgccgcggagcacattatccgcaacaccaactccgaagctgcaatggacgatatgcagaacttcgaagaggtcgcggtcagatatctactcctcgagggcaaaggcaacctcatgcggccggtcagcgaagccgagggtatgctgagagctaaccgcgtccaaatgctccaccgaagcgtcatgggtcgttgtgttgaggcagtgcagcgcaacaaggcggtcatcctcgacctcataaagctgatgcgcgctcgcccctggctggcccatgccgatatcaagcaccttatggcccgggttgatctgcctgaagatttccctcgcgccgaattcgactcaaacgagcaaatggaacaagcactggcgcagatcggccacgagcggccgtctgccctggttgagttcccggaggaagctcagcaggacgataccgttccggatagcaacgtcgtagaaggcaaattcagggcataa

SEQ ID NO: 367860 - DNA, 306 bp, Pseudomonas aeruginosa
ttggctgaatccgaatccagcgacaaaagcccaatcgcaagctcgctaaagatagtgctcatagtcctgctgctcatttacgtcgtaaaggtgtacctgcgggctccggagtaccgctacatcgaagtgtgctacctgccccacaagttggttcagctggtttgggtcgacatttggggagccttcgtaacgtccgacaacgcgagttacctggaacatgcacgcgactcgcagaagtttttcttcagctgcaccaactacacagccaagttcaattggctgaaatcctttgccgcacctcgatag

SEQ ID NO: 367861 - DNA, 1404 bp, Pseudomonas aeruginosa
atgaccgcgaatgtccggataggcgatttcatcagagatgaggtctatccgaagatcaatgctgtcgaagaagggctgcttgaccatctcaatccgagtcaccgcaaaggcaacggctcctatgagttgaactgcccacaatgtggtcagcgccgcgcttactattacgaggggcacagcgtcgttcagtgcaatcgtaaagagaattgccttgagtcgccgacgaccctatgggacgtcctcgctaagcagcagaagacaaacgccgaaatcatcaagctgctgtgcgccgctgccggcgtcaaaccaccagagcgggaacctcggcctggtcactcagcaccaggcgcatcatccgcagcatctgccaatgcagctcccacgattagcccaggaaaggccatcgttaaggtcacccagcagctggccctgtctaacaagaaaatcctggatgaattccagagcgcccgtggctacacggacgaagacatggcagccatgcgccttggtgtgttcaccaccgccaaggaagttctaaccctcctcgaagccctcggtattcccaaggaaacagctcgtgagaagggttacatcgggtacgacgacagcaaacccgatttcttatggaacgtgatggatggccgagtcgtaggctactggcctcacgaagacggtgacgtgcgcctctggggccggattccggttggtaacagcaccgacaaggtgaagaagtaccgtttcgcaaacagcctcatcaaagatatcccctatctcttcaaccggcggcatggtcggttcccaatctgtgtcgaaggaacgctcgacgcctgggctttgcagctactggatcattgggggactgcaataggccaggcccacatcaatgacgcgcaagcagcctacctcgccagcaaaggggtaactgaggctgcacatatggtggacggcgacggcgccggatatggaggtgcgcttcagtccatccgggcctgtgaggctgtaggcataacgctgagcatcattgtcttgggtgcaggtatggatgatgccgatgcaatgcgcagggccggccgcgggaaacagctttcagagctgatcgcttcgcgcatcaacgccggcgagtatcttgctcggcattgccaggcggcactgatgcagtcccccccgaacatccgcgccatcgcacaagcccgggcaatcgcgcaattcctgactccggtttcggcgcgctgctgggaggactggtcgcgcagcctaggcgttttcatagacgaagagcaggaggctttacgaatcctgggtggcctcattattggcggcatgccagtaggtgaatgcctagatcttgtgaagcggatgacaggctattccataagcatccacaaggaggagaccgttggctga

SEQ ID NO: 367862 - DNA, 738 bp, Pseudomonas aeruginosa
atgagcctcatgagcaagcggaatgactggctggccgctttgtcgtgccagcagtttctaaagctcgatccatgggcttttgtttgccacgaagaatctcgtccccagtggatcgcagaggtacggaagaaaatccgtagccggctgtccgatgacgaaattctgtcggttctgtactcagacctttacgacaccaccaagtcggccatccgcaactatgcggatcagccggcttctggtcgtggtacagccctgatcgggtacgcgcttaagtacatccgtctccacgggttagcgaagatctttgatgagatccccgctgctcagcgtgcgaatgttgtcaccatcgacaccgtaggcgccgccccgcgggcccatgggcttgagcatgaatacaccctcgcagtgacggactacaccgacggattgtcggtactaccgcaattcctcgctgacggagttgtgctcggcgatgaagggcttcaggcccaacatcagaacatcgagcgtctccgccggttcctctcgacacgtgagtatcagctactccgactttctgtcctggagcagcactcctcgatagacatcagcgaaatgctcgacctgtcggcgaaacaggtctggaaaatccgccgcacactacgcgataagctcggcgagattgcccttgaccagggagcatgcccacagcttgtggccagcctcaacccgcgtttggcaggggcggcagctaaatga

SEQ ID NO: 367863 - DNA, 1023 bp, Pseudomonas aeruginosa
atgcgggcaaacgtcaggaacaaagagctcctcgaaagcttcacaagaaagcttgaattggcgagagcggcgcgcggatctgttcttgatgaactggtcgccaggatgacgtttattgagagcgagctatcagagcttggggctcggatgcaggagcgcatcgatcactcaacccgcacagttccgaaatcgacctggtttgttcaatgggcatggcgggcgcatcgcaacccaaggaaggtaatgcccattgaaatctacctggtcacggaacaacgtggtggtgatagcgtcaagcagagccggttatcactccgcattcgcggcgagcgagtggctcgccttgagccatatctcggcccaagagccgccaaattgttctcgaaggatctcgataggtttcttgtgctggccaacacggtcgtggcctggatcaacgcattggcccctcaggaggctcatctcttgaacgaagccccttggtcctacggccttggcaaatggattggcttggtcggggggatttgtgagaaggctgccctcacacttgcgggaacggttgagcagttcctcgccctcgatgccgaattagatgaccttgttttcgagttcaatgctgctctgcagccggtaagattccactccattatctgcaggcgagactgccccacactggatcggctcgcaccagctgagcctcggtttagggtagtagtttcgttgaaccgaaaaaccggcaggcggagcagccgtgacgttcagctgtacaaggctgacctggctgttgagcgtctagccgcggggctgagtagatcgttaggaagagagccgtcagtagaagagatcgctgaggctcgagcagcacaacgcagtcgatcgcctaacccatggctcactgcagagctgattcagcattgctggctggggaagcactcgtctgggctgctcagtaggcagaaaaaaatggtagcggtcatggagaagtggcgccctctaagggacacgatccagtcgctgctgtag

SEQ ID NO: 367864 - DNA, 1068 bp, Pseudomonas aeruginosa
atgtcggaatcgattgagcagttgctcgccattgaccttggtaacggctacaccagttacatgtctggtaccggggagaaaactgggggatatgcctcgctcgtcactgagtccagatccagtcaaggcctgggtaacggcttcagccgggaagcattcaagacgaagagcggttcctactatgttggcgatgattgccgcgaggacggggccgtaacacggagtaccgactcctccttctattcctcagatacgattcgcgtgctgatgcttcgggctcttaaagagttcgggcacaagcagccaatcattgtgactggcctgccgacagagttctttcatacccaccgtgatgaattcgccaaggacatcaagcgctgggccctggaagaaggctatcagccagccaaggtacaggtccttcctcaatttgttggcccctggttcgacccggaactaaaggacatctcaggaaagccgtttgacccttcctcggtaatgaagggtaagtggggcatcatcgacatcgggcatgggactgtcgacgccgggcaattcatgaacggcaacgtctctactcaccaagatcaccgctatggtgagtcatccggggtgtcgaacattcataagcagctgtttacatctctgcgtgacccagaggcactgaacaagtccttgccggcgaagtaccgccttccaaacggattctccatggagcggcagactactgagtacacgatggacatctggcttcgccagggatacatcccatggcgtggggaacagcttccgattgatcagatcagtttgccggcacgccagagctatgccgatgatgtcattccccgcgtcgtagacaagctgtggggcacaaccgacttcctcagtggaatgatcttcgccggcggcggtgcaaccgtattggggcacgagctgctgaagaagcacgtgaagtgcccaatcttcgccgcggacgatccctcgaactctatcgtgcgtggtctgcggcgctactacatcactcagaatttcaaagagcacgccgttctgagggtcgaccgtggctaa

SEQ ID NO: 367865 - DNA, 273 bp, Pseudomonas aeruginosa
atgatcccaagcaggttcgtacaggcagctgaggtcttcctcgatcacctcgaggctctccctgagggcgcgtacgttttcaactttgatccatcgacgggcgaactggctcaggccgagcagtaccccactctgccgcccgtgctggtgtccatcgcaactgttgagagtgtctctcgatgcctcagtgcattcgagcactgggttggaagcgtcaggatcggagccctacgctgtagcgaagggctcctgtccgacttctggattgcctag

SEQ ID NO: 367866 - DNA, 567 bp, Pseudomonas aeruginosa
atgattgccgaattggtctttgtgcatgacagcaagacccggccgtcgtacctgctggactgctttggcaacctggtgcggtgtagtgcggatggcaaccccaacgcactactgccctactctgttgatctggtctcgactgcatcggaattgctgaaccccaaaccatggacgattactgttgagtcgttagtatctcgcatcagatttgtggcagaagcctccagcgaaattctctctgcctaccccggcgtggagattccgaaaacgaactacccgttcgttcccagggtacagcgcgaagaggatgaggagacgatcacgcaagcgctagaccttttacccaccctaagcgagcaggatgcgcagggactgcttgcgatgcttcgtgaagttggcgtgtatcgaatcccggaaaccgaacgctttaatgcggcgattcatgaaccagccggcggcggcctaactgccccacctctcgaggaagtttctgcaggctggatatccaactccaaggtctttcgcaaatccattgttcgctcagcaaagcttgagcagccccgatag

SEQ ID NO: 367867 - DNA, 477 bp, Pseudomonas aeruginosa
atgttctactcctggtcgagtggtgggtgcggctttgctttcaatgagtgcatcaacaactacttcgtttctcctgtgtcgcgtttctctggcggtgaaaatgttgcgttcaaggactggatcgcacccttctttcgcttcaacgacagcaagatgggacagtggcacaaggagttgttcaccaagaaaggcggcgatggaggcgaaacctccgagttctatgattggtggcccaccatggtcttcttggtcaacgacgatggggaggttgtgcgcgcctggttgccgcaaactggcaacaccgcaagcgccggccgagtcattgcgggtttgctcgaggagttcgaggtagacgatcccatcgtcaacaaggagcgactgctctctcagccgaccacccacgcttactatggtgagtactacatcgagaaaggggttaagcgcttggtgaaatcgctgaacaggatctccgagtaa

SEQ ID NO: 367868 - DNA, 2052 bp, Pseudomonas aeruginosa
atggcagctacagatccaaccgtagatgtttcaacggatatagcttcctacgattttctaaaacttgttaaccagcattttggtgagttggctggccactacatcaatatgtttcagtcgtaccatgcagcgttcgctgtaactgcgctaaacatagtgctgatgggaggagctgcttgggttcttgtcctgatgattaaagcacctgccgacaaaatgcgcaccgctggtggagctctggccgttcttacactcagtgccatccttttagcggacgacgtattcaccattccaggcgcatacaatgatgttcagcttgcaaatggtgccggctggtctgttcagatcgtagggaacatataccagctattcaaagaagggctggactcagttaaagatgaagatgcttttcaaattgcgttcgacaacgcgtaccacataaccgacgaggaaaccctcaagcgatttgttgatagccctgtagccgacatgtacaaagattacataaatctttgtcagcctgcgtttgaatcaatagctgggaaaaatccgcaagctcgttcagccggtaggtttgtcggattctatggttcggccggcattgggcaagcggaagttcagtgggataacgcaaacagcttgatcgaccaggtgaccggcaaagaccctgacatgaacgaactagtcaactccactgcctggtttaacagagatggtggggacaagattcgtgaaggtgttgagtctggcgtagcgctccttaaagcaattcctgaggagcagaacccattcgacgggaaaacagtacccttcactggatacaaaatccccacaaaagagtattgggtccaagagctttttcaaaaggacatcggcaccagtgaaatctactacgactcttctgatgtggaaggaatgaattaccgtaattccgcctacagcgaagaggcagattcagattcatacatggacccggcagctgcatatccaaaaaactgctacgaactttaccgaatgctcgatcagggtcagcgggcatggcaagctgctattgaagaaaatactcgtgtcggccaggcgacggcacttggccgtgatggtcgagatgcaacaatgatgatgtacacggatattgaaaaccaaatccgcgcacaaggccgtactgccgacacaccgctacaaactcttgccggctatggcgcagttaatttgctcgaccatgatggcggaatgaggcttggcgaaatgctcaaggatgcgagctatacgacatttgccgacatcggatcgacattcagggagtggatgctcaagtacatgatccctatgtccatcaacggttgcgcaatgcttgttggtttactagtagtcatgtttccgcttgtttgtgtaatggcggtttttatcagccctaagattcttgtgtcttatgtaaagctaatggcattcgccttcattgtaccttttacgaatgacgcctgcttgtcgatggcagcaacactactttctgtcaatggtgagctaatcgagggttataacgcagggaattttgcaaagaacaacaccctacttatatcggcaggtacagctcagtatgttgtattcattgccatctgtgccattgaagtaatctttgccaagatgttgatctgggatgacgtgaagggtatgagcaacttcaacccaggcgggggtgctctgggcctagcggcgaccggcgccgctgtggttggcaccgtaatgaagctggcatcctttggtagaggagcatttgcagcacgtgcaagtgctggtggcggagcaccctctgggagtggcggcccttcaggagccgctaccaaaatggctcagcaacaggcaatctctggcggggctaggattgtcagcggcgggcgctcgcagtcttcatcgcaaccgccccccctcgctagccgcatgagcagcggcaaagatgctggtgaggctccattgaagactccggaccctggttttttgaaaaacccagtgccaacttcagtaaccaaaagcccactttcgcggccatctgaatag

SEQ ID NO: 367869 - DNA, 1374 bp, Pseudomonas aeruginosa
atgatgatcactaaaaatggatttcttcgctggcctctgctgattgcagcaatgttcagtgccctgcccgcgatggcagacacatcatcggatgacaccccgtggactcgccgaatggcagacgcaacggatctgtttggcgtaaaactcgacggcaaagcagttacgtccaccggcaccgggttcaacccaaaaggattcgacactttcgcccctttccaagacaaccaacagaacatggttcaggcctatggggccactgaagtaggtgttgggtgcaatggtcttaatctgggaacagtgctggacgggcaaatagctcagtacggggcaatggttgaacagttcatcagcgacgctcccgcgcttgcgatcatgtacttggcatatagccaacctaccgtcaaggcggtaatcgacgaactcaacgtggttgggcaatttggccttgatctctcaaacatgacttgtagcggagtacgccaactcgcagacaaatcctacgaggagaagaaacaagttctcgccgaggctgattgcacaaccgaggctggatacaaaagctcggagtgcatggccggggaaggcctgactggctccctgataaaaggcgcccaggaaatgaaggccaaagcaacctctcgcgccggcgctctgatgggtacagtgtcaaacgctacaggcggtcttgtcggtgtaaaaggttcttccaatgggaccggcggtactggcggtcaggacggtgcggccggtaacgggaatgctctgacgcctactaagcactgctctggtgtatccaccgaaggcacaactgctctgctcctagctgcatcggagatgagttgtgacgacatcaaggactatggcggtcttctgccctcttacagcacggaagaaggtgctaccaccgttactcctagaaccgagaccattgaagttgttgccaagaaaatgacgaaagagtacgtagacctctacaaggatgtctaccgctctagtgcaaagaacttccaagatagtgacgcctataagcaattggttaaccgtgcagacatcgtcatcactgacaatgaatttaaattcatgcgcacgcttgcatcatctaaccctgctgtctttgaaaatactcagaggaatctggcctcgctggcaactttgaaagaactcgaaactctagtggccaaactagaactcggcgttctaaccggactgtctaaccaggcggagtcagagctaatcagcaatgatgtaattaaacgctaccatctttcggctgaggctcttcgcaaagagcttgagatcatgaaggcccgaatcaacgccgaccgtgagcgcaatgatcttttgcaggcgacctataggagcgtccgctaa

SEQ ID NO: 367870 - DNA, 885 bp, Pseudomonas aeruginosa
atgaacaatacgctgaagatggcacttgctttcattacaggcgggctcgtttttaacgccccgtccgtactttcaaccgtgtcggacccaaatgatttgcttgccaccgcggtcgccactgcacttgtaaaagtcgatcggtacaaagaagaacaacaaaacgcagagctagataaacttccaaacattctggactgccagaatatgaagtggctccaaaactgttcaacgctgaaccgtaatgccaagaagaaccccactgccccgatgcgcttcaccaacaaggatggcattgaatttaactttgttcctgggacccccagcgcagtgatccgccttcagctcgaacagagcccagaagcagctaaagccctgcttgcctactacgacacaacttggggtgagtaccataagtcggcagagctatacaaaatggccaaatggcaggccggcgagctccagaatatgaaagggctggactatgcacaaagcaaaaatacagctattaaggacattaacactaacgcactaagcgtctcagtatttgtggagtcgacttgttcagtttgcgaacgtcaactcgacatactttcccaagttcaaaggcgctacccgaagctacagatcaaggtgttccagcttgatcaggataaagaggcgtttcgacgaaacatcaccgagcgtggacttaaagggcgcgtggtgaaaccagaggagcgtcagtacctggctcagaaccaagggattgttgcctggccagttacttgggtagacaacatggtcgcgtcacgtcgccaaaaactaaccgggtataagaccctgctccagcttgaagaccgcctccaggcaatgacctatatccagacagcaaaggcagggcaataa

SEQ ID NO: 367871 - DNA, 804 bp, Pseudomonas aeruginosa
atgcgcgcatttcactggctgctagtcgctagcctactggtagcgaccccgatcgccacagccgcaaacgggcagacaacgcaggatcaacgcgttggtgaaggcctcatgctgatgctcaagggcgataagcccaatgcgtggaaagtactcttcccagaagcaaaagcgggaaacgtcatcgccatgtaccacctgggcatgatgatggccaaatcgcccgaatatccagatcacctcgaaaggtcgaagcagttcttttccgaagcggccaggcgtggccaccggggaagcgaggcgatgctggcgcaagtcgaaaggatgctctcacaggccgggaagcccccaagcattgcaggtaccagcggtaccccgctcccacaagagttggaggcggcaaagcacgcctatgccgaagcgaaagccaaaatcggacgtttcgttggtgacctcccgacttcgccaccacaggtcactataaaagcgttcatcaccgagaacgctccgtcgatgaagagcctcatcgccgcggcacaacaagttcaagcccgatttggcgacaaagtcgacttccaattttatgtggttatcgaccaatccagttgggacccacgaaaggtcttcacgccggaactttccagcatgccaataactggattccgacctgatatgaacggtcaggaagcatctaggtatggcgtacgaaatatgccagcgattgttttcattcctgagaatggcaaccctcgcattctagctagcgctcaagatgttattacccaaatttcctcggtcttaaggtag

SEQ ID NO: 367872 - DNA, 351 bp, Pseudomonas aeruginosa
atgtcgggtttgaagcagcggacggatgaccgtaaggaggtcgaccgcggagagatacgtgtccgcaagctgagaatgaaaaacacagatctcggaatcgcacagatcaattaccggtggcatgacgcaggaaccgcgtcggtgcagcgctggctcgatcctgcctacaacctcgattacgccgcctcatacctcgcaaagctcaagcgcgaacatggcacagatctgattgccgttcgcttctaccacgacaaaaggtcggaatttcaaaaagcctacatggccgacttcatgcctaaatacgagcaggagaagcgcaatgcgcgcatttcactggctgctagtcgctag

SEQ ID NO: 367873 - DNA, 660 bp, Pseudomonas aeruginosa
atgggtgcccgtcgatttaacatccacgaaactgtgagcgctgccgatcaggcagtgctcacacgcttagcggccgaggtgtcccgggattacttccggactgaatgcccaatcgacgtcctttggggcattccaagcgcaagcgaagcttccgagccaaaagcggatctcggctcccttagcccatcccagctccaagacttggaactcgccataaaggcatttcatgccggcgacttcactgcggcccgagacaagctcaagccctttgtcgacgtccgccacgtagaagcttcgaagctctacgtgaaaaccctccaaaagctgcgaaccccagactgggatcaggttgccaagcagatcaatcgcgtaagcactgacactctgtatgtggccgccggtagtacagagatgcgcgatggaaagtcagtggtcctgatccatcagaatctcagcgcctctcttggacaaagcgcgccgaaatctgtgctccgctacgtcctccaccatgagtttcttcacatctacctgggcacaagcgccgaagatccgcaccccgagctgttccgtcgattcgacaagtgctttccggggagagcgaaggcgattgcgtggctgcaatctcacaactactcgaccatcgaagacacgccgcgatga

SEQ ID NO: 367874 - DNA, 1317 bp, Pseudomonas aeruginosa
atgagcaccgaagatcagaacatccaagatggcgggaaaaagagcagttcgccgatcggcgatttcctgaagaaagtgcaggaaggtgcccgggggatgaccgctggcaaacctcctcgtgatgaaaaaacagaccctcccctaagcgaagcttctgctggagtcccgcctgaagctaccgccgagcaaggccagcaccagccaacacacgacaacgatgaaccgttgctaatcgacgctcaagcggaagtaccagaacctaaaagcaaagcgaagccaggcctctcgcgtaagcatgggttgattctcgtcggcgtgctggtggtagtaggcatgatttacaaaccgacaccgaaaagcccaccccaatcagaacctgctgttgagtcaccggctcaagcgcagcctgaagctgggctcgctattccgtcttccgaagatctgaccatacctgctggcgaggaaggcagccggctgggcaatggtgctgcgaaaatcaatcccattggcgccaccatggaagagctggacttagtaggccctctgagcgtcccgaaagaggaaaaaagtcagttgccatctccgcctgctgaagaaagcccgttcggcttccctggacagcctacgagcgaatcgcctgcgggctctccggcagtgccgccgacgcaacaatgggcctctgcaggctcgccatttggcgaactcgcgggcgcccctgctggtgcaaacactgaccaacctggcgcagcaggaagcccccttctctctgcgccgccggaagcgcaattaggccattcaggtggcaatgttgtggcgggaaaagatgacaccattttggctggcgaggccaaaaagaatccggatagtgagcagcagccgaatctgcaagcggataccgctgtagagatgtccgagttgaaagcaaagctggcgctgcaggatcaaaagatcctcgatctgcagaaagcactcgatgcgaaagggaaggcaccgggtcaacagccgaaagccgcctcccactcaacatcctccgcagctaaaccgcattcctatgccgctacccaggcgaaacccaaggtagggccaaggccgaagatctgcgtgaaagccgttgctccaccagcaagaaactgcagtacctgcgtcgctcatgccttcgttgtggacactaaccgcgaagacactatggtcggccaaggggactatatcgctgggttccgcgtggcaatcacaggagaccgtatcgacctgcagaactcggctggagaagtcgttcataagttctggagtcaaccgaatgggtgcccgtcgatttaa

SEQ ID NO: 367875 - DNA, 378 bp, Pseudomonas aeruginosa
atggccacgccgtttaacgctttcttcatagctgcagttctggctactgcagccggctgctcggccaaatatgagcctcgggaaaccatcctggacgagcagaacgcgcgcccatccaaagagatctacgccccaaagaccgaactggagcgaattgcttaccaggaaggcgtacagcaggtgctcgtggacatgaaagggaaaatgcgtgcccggaatcgtttcacctgggatgcgccccatatggaatgcggtgtgcggatacctgccagggtagtgaatggaatgctccaaccctctcacgaggagtgcgtacagattgcacccggccgctggacagaagaagcccccactttcctccccgaactaggacagtaa

SEQ ID NO: 367876 - DNA, 2889 bp, Pseudomonas aeruginosa
atgggtaagcaagaagacctccacctgtacgattcagagctcgccggcctggctcgccgcaactaccagggtggcatgccgatccagctcctggccgatgcgtttgtgtacgaacctgccgggcgctacttccataccaaggatggacgcttcgccaagatctggtcggtgagtgccgcagatatctcgctcttcgaggccagcgatctgttcggggtcggcaacaacttcaaggatgtcctgaacaagtacccagctggcagcaccggccagttcattcgacacacgcatcgcgatatccgcccgatcctggataagtacgaatccatcattcatccggaagcaggcgagttcgcaactgagattgcacgctccatcatcagtcgccagcaacgcgcagctgtaagccctcgcggcttcttcggcggcaccaaccagagcatgttggaccgcatgcgtgcggaagaaattgcagccatgggtggcgaagcggctcccggcgaagaagacacctacgctccaggcagaattgctgttgagcgagagatccgcgaaggtcggttcccgttcgtcactgactgctacctgatttttcactggacaccgtcatacctcttcggtcgcttcatcgactcagctgccaaaactgcactggcttctgtaggcctggttgatccaaaccaactggtgcacgaaacagcgtcccgccatgcaaagcagttcggtgcaatctgccatgacatcgagcagaccctctctgcccatagcttcaatccaagcgtgatcacaggccaaggttacatcgacctccactaccagctgctgaatcctgtccgttgcttcgacatcccgccaccacgctacagggcggacattccgatcatggaagctctgcagaatcccgactctgtgccgaaccgcgccagtctcatggacgctgccagctttgcatgggttgaatccgaacctgagggcatgacgattcatgaccgcggtgtgccctactacatccgccctgtttccgttctaggaaagcctggccgcagcttcccgggcatgcttcaacaacgtcttacgggtatcgagtgtgaaaacctgatcacactgaactggtcagtaccagggccagcagtagtgaacacccgtctcgctctgcgcggccggatgatcgcgagcaaggagtcgatgcgcattggtgacgcggatactcgtgcacaacagcgtcgcgacttagacatggttaagtcgaagatcacatcggagaacgtctctagtaaggagcagttctttgatctttcgcttcatgtgaacctgatgggcttcgacaaagaaaccattgacgaccaggcccaacagctagagaccctgctgtggaacgtagggcacaaagaagtgctccgcggcgatgccgttgtccgcaacagccttccacttaacttccgcgcaacaagcatgcggctactgaagcgcagcttcccccacctgactgaaagcgttgctcacatggcccccctgtacgttgagtaccaaggcgtgggtgacgctgcaatcatgatgaacaacaggtctggccaaccaatcttcctcgacctctggggggagcaggtgaacactgcccactcgttggtctgcgggggcacaggtactggtaagtcgtttaccttcaacaatctcctgatcgcgttgcgggtgaagtacaaaccgaaggtctggatcatcgacaagggcgactcctacgagagtctctgtctggttttggcaggcaactatgttcgcctcgctactgagccattccaggagcccacctcgaagcggatgatccatccaatctgcgtcaatccgttcgcgctgctgcgcaatgacaagggcgagatcgaacctctgtcccttgatgacaagctcttcattgctcgcatgctgatcatgatgatggaggccggtgacgggactaacagcgcaacctctacccttccgaaactaacggtctcgcttctctacgatgctctgaccacgttctacgacaactggctggaaacccggccagacgatgagcctcgcttcagcgacttcatcccggtccttcaagccaccgacatgaccgagctgaaaggacaggtcttggtcgaccatttgcgtctgtactacggtcatggtcctttcgcagcactctttgatggctatctgcaggttgactgggataacgacttcaccgtgctggaaacgcagcgcatggcaaagtcgccagccctgggggtagtcacgctcgcgctgtttcgccagatcgacctgtactgcaaattcaagctgtctcgcgacaggaagaagatcattgctgtcgacgaggcctggtccactttgtcggaccccaatgcagcaagcgctctctccagtttctatcgtgagcttcgccgctatggcgccggttgcctgctgataagccaaaccgtcaaagacttcgccaatctgatcagcgcagaggccagcggcggtggggactcagaggacggcatcctcgagaacacctcgcactacttcttcctggcctgcagcgagtcggactacaagattgccaaggaagtcctcagcttccaaccagttgaagtggatctctggcgctcgcttgcatccctgcccccgatgtactcggaagtgttctatcggatgcgaacaaagcagggccggtattacagcggcgtcttccgcctgttctcgacgcccatgacattgtggatcgccagctctcacccggacgactaccgcatgcgtgaactaaagaccacagagatcgtcgagcgcgatcgcattgacgagtcgaccgcgagacagcaagcggttctcgaactatccaaaacccatccttacggagcccgttatggccacgccgtttaa

SEQ ID NO: 367877 - DNA, 477 bp, Pseudomonas aeruginosa
ttgggcaaactgatcttctgcctcgcgtgcgtactggctacacctgccttcgctgaaggcatctcccagtatcacaaggacgtcattcgcgagcattacgaaaagcagatcctcggttctggcaaggacattacccaacgccagtccgacgtgaatctctatcgacgcatctttgaaaagccaaacgtgcttgatgagcgccctctcccgccgccggcagaaatcccctggcctcagatcttcaaaggccaggtcctgactttgggtgagatcgtgaagctggcgtccgcggccagtggttacgacccggtcttcgacccggccgtagatcagagccagccaatcaagctgaacagcgaggccaactccctgcgagacatcgccgagtacctcacccgagtcagcaacgctcgcatcaccctctatccggagtcgcgcaacgtagtagcgaccaagaaggtatcccacgatgggtaa

SEQ ID NO: 367878 - DNA, 324 bp, Pseudomonas aeruginosa
atgaacaagctgatcatcgccaccgccctgctgggcatgcttagcggctgcgctacggacgatgagccgttccgcaacaagccgaacatgaatcagatctatgaagcggtgaacccgggcagcgcccaggacactgtaaggctgttgcgtgaagggctgcgcgcacgtcctgagctcggctcgagcgagccctattacccaatccgaaacccggatgtcgtggcccctgtgtgggtcgtgccctatgccgatcccaagacaggggttaagcatggcggccgctgggactacatcatcgtggaggaagcagattgggcaaactga

SEQ ID NO: 367879 - DNA, 1533 bp, Pseudomonas aeruginosa
atgagcactggcgccgaaggtggagtaaagaaagggccaggcgcaaaactggtctggatcatggctggtatcggcctgggtctcgttctgctcagcaaattgtttggtagcagtgacgagccgcggaccagcgtcgagaaagcgccgacgccaattgaggttggctcggggaaaatcaacgatatcggcgggcaggataaagacgctgccttagtccagttctccaaaaaactggaagctatgaccgctcgcatggaccgggacaacaagaaccgggacgaagagcgtaagaaagaagaaagcgaacgtcgcaagctgcagcagcagaacgaggctagcacccgcgcactagccgacgcgattgcgaaactgcagaccgacctggttgataagacataccgtggaattgcggatgcagacaccaccgccccacagctgccagccacgccaaacctgataccgccaaccgacggactgaacttcgacggtgatttcaacctcgggccggcgaccctcccctccccaggtcaacccacccctagcagcccatacggccccaactacacggttctgcgcccacagatgcagcagaacacgttccagggcaaaagtggcggcggcgctggcagtcaagcggaaagcgatcttttcaatgagatggcagccccggacgtcaacgccttcgatagggccgcgacccgcacaagcaataacactcaagccaccctcgatgaaatgaatggcagacctcggtctgctccgcagcaggaaccgcaggctaagccggctgttcaggcaattaacggacagggcaacgctgaagagtatgagatcgaggcattctcgttcgttgaggtcacaactcttcacggacaggcttgcccaatcggcgcgaattcacctacctcgagtggtgatgaccaggcccaggcgaaacccattgttttgcctgctcgtgggatctggcacgggcccaatggagttgagcgcgacctcggcactattcacctcatgggtctttgctctggccgccgcacatcctcttctaacaccggccgagccctgattcgtgtcgagcagatgagctactgggatgctgaaggtggttcccagatggttcctgcggtcggttacatcgtagatacgcgcgataacgaggcagacgtctacggcaagctagacaaagcctccggccgcacgctggctctgcaatctgcagcagctgctgctgctgcatacgcctcaaccctaagcgcagcagagttcaccaactccagctctgtccagaacggtacatcgaccgtaacaagccagctaactggcagcgaggctcaagccgccttggccaccggcatcggcgccgcgttcaaagacatcgctgaccggtttaaagccgaagccaacgcaatcatggacacgatccaggtcgagccgggcatcaagctccagttcatcaccgaacaacccatccgcgtgaagaaggccatggagcctctggatatcgacgcgaagatgtacgacatcctgatttaa

SEQ ID NO: 367880 - DNA, 795 bp, Pseudomonas aeruginosa
gtgaaattgaaattcctggctgcaatggttgctgcagtctgcgcttcatccgtttttgcaaatgaggaatgcaaccgttccccacgcaccgttatttatcaaaactcgcctgttgacgtgtacatctcgaacgacacgcagcgtgcagaagttattttcccagaggaatatctcgaaggtatctaccaagaggttccggatgggatggagttcttcccgactcctgtccctaataaactcgcctttagaagtaatgacccgctttacgttggtttagtcactgttgacggcccgtcgaagcagtcatatctggttaacctcattactcgaccaggctgtgcggacagccaggtcacaatcactacccaaggccccgtcgatcgttcgagccttgcgcgtgacgggaaaggtcgagtcaaaggcctgatgaactacctgttcagtggcgatactcctaacgggtaccgccgcaacgacttcaagaatttgagccgtgatcagcgggttgtgttccgccagggatctgtcgagttcatcctccagtctcaggcgacaggccctacctacgtaggtaccacctatgaggtggtcaaccacgggcgcacatcgttcaagttggccatcgatcagatcgactactcgaacgctgccgttcgcaaatcgcttggtgtcgcccgccaggccgcaatgctcccaacatccagagttcttggtccatctccggaattcgtctctgagatctacggtgatgctcaccgtgggctgctgttcatcgtttcggagaaggctaaatga

SEQ ID NO: 367881 - DNA, 639 bp, Pseudomonas aeruginosa
atgaatgagcaatacggaccgccattgaagttcttcaatgttatgggtaagggcgagttgcgctccggcaagttgatgatcgcatgcatcgcaatcggcgtaattatgggcactgccatcgttgccctcgtcaaacagaacagtaagcttcacgacgcaaaccttcagctgcagcaagagcgaatcatgtacggattcccgaatgctgaaggcgtgtttgtgagtgaacggcaaattcccgagcgacacatagccggctttgtcaccgaattcctaaacaacttctataacttcgcgcctgaatccgcagtcacgaacggcaatgaagcgctgcgcatgatgtctcctcgcatgcgtgccgcggaggaagaaggcctaaaggccagtgcgaaacagtccgttgaccaacagatcacacaagtcttggtacgaacttcgccgtatacgttcgaggtagacaataaggccggaggctatgttgtttcattcaaggcagcgcgctatcgcgcaactctgaacactgtgttcgaccgcaagcgttacgacatcaaattacttattaaggcaattaagccttcaaagcactttgaatgggcagtagtagcggacaacatggactatcaggagatcatgcagtga

SEQ ID NO: 367882 - DNA, 390 bp, Pseudomonas aeruginosa
atgcacttcagagtcacaagcgaagacgagcgagatactttcgcatacgccacttcccccctgaacttcggtggcctcgataaagaggacctgttcttctggatggttccaatggcgatcacccacaacgtaacaggagacagtcttttgtcttttggtgtgggttgtttttgcttgtggctctacaaacgcctgacctggggattgccgcaaggccatctactgctgcggctcaacttactcgctgggagttgggagcaaagcgaactcgccaatcaagttcctccgctcaaagcactattccgctggctgaatcggaaggtttccaacgcttggattgatatcggcctgcttccggccccaacctactgcaaccgttacgagccataa

SEQ ID NO: 367883 - DNA, 372 bp, Pseudomonas aeruginosa
atgaccgtccaaggattcagtaccaacattcgacgggaggacgtacagcggttcatggtcggcattctcttgctggctatggtcgctgtgctgctcgcctaccctgacatcgctaatgccgcctgggatggcaagttcggccccagcgacgacctcaagaagaacaccaacgacagccttgaaggctggttccaggcgttcgcaggttgggggctgtggctctcgatcggagcacttgcgctttcgatcatcttcttcggcggcaagctgtggtggattccggtctgcttctgcatcgtttgcctcttcggtgcccccttcgtcaccaccattggtcaatgggccggctttgccgtagccgcttcgaagtag

SEQ ID NO: 367884 - DNA, 351 bp, Pseudomonas aeruginosa
atgaaaacccaattcttggcactctgcttgtcgatggctgccgcaatagcggcggcaccggcgtgcgcggacgatccgtacgtcatcgatcagcgcgacccgcgctatcagatcgcgcttgagcatctctccagtgcagctcaagccctgagcctcgcacaggccgagctgaaaaaggcagaggccagtcacccccttcctggtctggatctggttcggatgctgagccagatcaagcccgtggaagaaaccatcaacgtgattctcgtgcccgagcgcaaacgccagcggtaccaagaactcacgcccgatggccagtttttcttcaccccaacccgaatcggagaatga

SEQ ID NO: 367885 - DNA, 339 bp, Pseudomonas aeruginosa
ttgagttggcttgaaagcatcaatcaatgggattacaccgccgacccgatcatcgagtggtttgagaacaccgtaggctttcacctcgcagtttggggatggccagcgtacgtcgtcatcggattcctgatcattgcagcagggctgcgcttcccagcgacacgaggcatgacctccctgttcgttaacagcatcgtccgcatgatccagaacaccattcaactcgtcgtctcgctgctgctggtccagttcaccggctttgttgcgaaactcctcctcgcacagttccatcgttcacgccgttggcttgccgagatgttggataaagctaagggctaa

SEQ ID NO: 367886 - DNA, 1803 bp, Pseudomonas aeruginosa
atggcgactcaatcagcacgacttaaagcccgtgaggcgcagctcgcagacctgcagcgccgacggaatatcgccctcagcctgcccttcataggagcagcaattccgttcgttccgatcccagtcgccttggctgtggcagcagcctgcgcctactggtctctgatgctggatcgtgaagaaggcgaaagcgaaaagcccctcgtctgggatcgcaactacacacaagcagatctcgaggattgcgactttcagcgcagcaccttcctgggcaaaacgctgccctggactcagtggcgcgagaaactgacggaggtcaccaataagaaaggcatcgtctcagctgacgatgctcgccagagcctcctggaagcctaccctgggatgatgcccttcctactctccgacgaccagatgacgcgccatgtagcgcttctggcggcgaccgggaccggcaaaaccgagctaatactggcgatcatccagcagcaaatcaaaaagaatgctggcttaattttggtcgaggccaaatccgattcggacttcgccggcgccatctacggcatgatgaaagcagccgaccgactggatcagttcaagctgatcaacttcgagttcccgcgtcagtcgcacacctacaatcccgtcttctccggtggtgttcgcgcaacactgtccaccacgatgaagatgcaggccaactcgaaggaagagttctggactgacgtcaaccggtactcgctcacggccgcgatcttgtgcatgaagctccagcctggggagcctgcattccacctcaaagacctcatcgcgatgctatcgagcttcacactgctgaggcagtacgtggagaacatccgagagacagactcccaggatcatgctgacggcaaggagttcctctactcctacctgcgctactggtacaacgaagaaaaagagacgtgggataccacgaagtacaagaacttcctgcagggagcgatctccaagctgtccgcatttgcccactcggaatacgggcagatagtgaacacctacagccccgacgtcgacctcaaggaatcgatcctcaacggtgatgtggttgttctctcgatgtcctcactcgcggacaccgacggtgtggccctcttcggcaagctctttatctctgacctggcccgtgcggtaggtgagatccagcttgagaagaaaaagccgctgatgatctgcccggccatcttcgacgaatacccgtcattcatggacgccagccaggtcattctcttccagctcgcccgaagcgcgaatgtgccgatcatcatcgcgtttcaaggcatcgggtttctgcagcggatcgatccggccttcgtcgaaatggtgcttggtaactgctggacgcatgtttactgcgatgtcaaagatgcagcgacacgggaatttgcctgcaagctggcaggtacgtgcatcaccaattatgcgcaggaaaccgaaggcaccagtatcggcagcagccacagcacagagcaatccggcgtcatcgccaatgagagcgccggcaccagtagctcgaagggctctaaggcaacgcgcgaagaccttatccagcctgaagacttccagaccctggatcagggtgacggcatcattatcgcaaagtccggaacctaccgcgttcgcatgccgatggtccgcaacaccttccccaacgtgcacttcagtcagatgcaactggtaagacgaccaaggcgcggccgcgaaggcataggcgcctggaagaagttctcagacgagaaccgtgccctgatcaaccgggcataa

SEQ ID NO: 367887 - DNA, 2211 bp, Pseudomonas aeruginosa
atgaccgctgaacgcatccccgcagctgcagatggactggagcgagagcacgcgactctagtcagcattgactaccaggatcggaatgggccttggtcgatctgcgccttccgccgcgaggacggctccgtattcaaatccaccgggaacttcggcaaggtgatcctctacgaggacttcatcctctacggcaagtggtcgcccaacgtagtcggcggagatttcgatacttcatccttcaattccatgccgccccgcgccttggggaacctggcccggtacctgaatagcttgtcgaatgtatcgctggccagcaccaacctggttgtccagcatttcggcgagaacctcatcgacattctggatcgatcgccgcagcgcctcgttgaagccggcatccgagaggaagaagcagcaaccctgggcaaggtctgggaaagcgaacgatcccagcagctggcgctagcacagatcgacctcgagggtattccgccccagaagctcgccacactccagcgccgattaggctacatgaccgatctgaacctggtgctccggcaagacccgtatttgctatacgtgcacttcgacgacatgagctttcagaccgcccagagcctggctcgccgattcagggttgccaacgatacgctctccgccgtcaaaggcgctgtaatcgccatcctaaggcgcgaggcttggctcggtcacagcttcatcgagggcaagccgctgatggaagcggtagagaagctgctccatctaagccggcaaacccttgcgcccctgatcaaagatgcggtcacccagctttcgacgacaaaggtcactcacacacaccagaaatgcctgcagctgcaccacgtctatgagatcgagaagtctctggtagagaaggccattcggtggacgaagctaaatgccgacgacctagacgatctggtgccatctgcagcaatggccgcaaagctcctcaagcctctcgatctgcctctggcagcaagcaagaccctctccgccggactctgctcattgatggcggaaagacttgggcttgttcagtgcgagacgctagccgaccagctgacgatcgcccgcgggattgacctgttcctcaatggattcggtaccgatgtgctttatgccgccccaagccttgagatggttgccgagctccgtaccacactcggcgaggatgctcccattgtcgtgttctcggagttggtcgggcttgatcccgtgacgggagttcctcttcagcaccagcgaagccccattgaagccgatgtggtcgtgtttgtggccactgatgccctcggcgtcgaagagatgcacttcttgcttgaggcgatgcccaacaacggccgactgttcatgcttggcgtcccaaaggatctgccttcgcaaaccattggccagccgttcgatgagatggcgagggttccagagatccgcgcattcatggccagtttctggctacctgcccgctccgagccgagactgttcgcgaacaaaatctggtctggggccatccgccccgatgacaactttgatccggcgaagccaatcagctggatcaatgcgtcccgcgaggatctgcctgaggcagtttgcctgctgatgcgtcaactgggcgaagcctgcaacgtcgatcctctcctcgagatcaaacctgtggtaccgaagcagcaggctgacgttccaggtggcgacgtcacaagttggcttagtgcagccatcgcccaggagttcgtgggggaagcgtctcccgtcgagttccacggtaagcaactgttcaaagggatgccggtgattatccgccagcccctctcgctcgcgattcccgcattctcactgctcacccccgccgagcttacctgtgagcgcatggtggctaagcccttaggccaacctgccgttgagttaggtctgaaggactacctcactccgtttcatggcggcgttctgattcctaagttcatccgcggccgggtcttcgaagtcgtaattctggtagtgctcaaagagcacctcccgagcatcaacgccgaacttttggcgacgctcctcaacagctcccgacgcactgtcgttctggtcggtgatatcgaccagatcggcgacacattcccactccgcgaaccatcccgagttcgctcgatgctcccgttctggacagccccgcatggcgactcaatcagcacgacttaa

SEQ ID NO: 367888 - DNA, 492 bp, Pseudomonas aeruginosa
atggactacatctacaccgacgaagctaaatcgctgcttagcgaagagtaccccgcggcctacccgaagctagcccggggcaccttgcgcaagttcctgcatgatggatcgagcaacgtctttgcctgccgtccacacgagcgcagtgctgcagcaacgctctacaccagcggtgtcgacgcggcaatgaagaagctgcaggcaatgctggtgccttacgaagacctcagcctagatgggctttttgacggcaggtcgcccgtgctagcccaccccgagggaatgatctactgggataccctgcgccgtgcggtcaatctggtcgtcctctacgacatcctggtagctctcacctaccgctacccagacctgcagaaaacatcgccggcggaaattcgccgcaatggcatggttgtggccatgcgcccgctgttccgcgtgatgaaggccacgagaatcctcaactccggcagggcgtttgatcgagaatga

SEQ ID NO: 367889 - DNA, 273 bp, Pseudomonas aeruginosa
gtgaacaaatcggagcttattgaggccatcgccgcatccgctgacatcccgaaggcaactgccggtcgcgcactcgacgcggtgatcgaatcggtaaccaaaactctggcggcgggcgactcggtcacgctagttgggttcggtaccttcgccgttaaagagcgtgcggcgcgtactggtcgcaacccgcagacaggcaaggcgatcaacatcgcggcggcaaagatccccggcttcaaagctggaaaggcgctcaaagacgccctgctctaa

SEQ ID NO: 367890 - DNA, 1263 bp, Pseudomonas aeruginosa
atgttcgccctagtcgacgggaagaatttctatgtcagtgtcgagtgtctgtttcggccgtctctgatcggtaagcccgttgtcgtcttgagcggaaacgatggttgcgtcgtcagccgcagtgatgaggccaagctgctgggtatcaaaatgggacagccattctttcaactacgtgagcacgtcaatcgccacggtcttgtgatgtgcagctccaacttctctttgtatgcggacatgtcgcagcgtgtagcgacgatcctccggggtacggccacccgggctgtgcagtattctatcgacgagtcattcctgtgctgggccggtgtggattcagacctcgacgcctacggtcgcagggttcgagcccgtgtactcaaggaaacgggtcttcaggtgggggtgggtatcggcccgaccaaaacgctggcaaaggcagccagcttcgcgtcgaagaagtggccgaagacaggtggtgttgtggatctgagcgaccctgccaggcaacgacgcttgcttagcctgcccgaaatgacagtagacgaggtgtgggggattgggcctcgcaacagtgagcgcctcaaggaaatggggacttcactcgcgattcaactggccgactatgaccacaagacgctcagacggatgtttagcgtcaacgtcgaacgcacggcgcgcgagctctgcggggagcgctgctttgatctggacgaagggccagagccgaagcagatgatcgcttgcactcggtcgttcggagagagggttcatgagcttccccctctggctgaagcggtggccagctatgctggccgagccgcagagaaacttagggcccaacgacagttttgccaggtggtgcaggtgtacattcgcaccggtgcattcaccactggcgccgaacactacagccgcacggcaacggtaccactgccctaccccagctctgacacacgcgacatcattgctgctgcccaagccggactgcgggcgatctacatcccggggccagcctacgcgaaggctggcgtgatcctgatggagttcgtcggcgccggcgagcacactgccgatctttttgcgcctgcccctagacctaacagcgaacggttgatggctgtcgttgacgcgatcaatcgccgggaaggccgcaacactatccgaaccgctcgcacagttggagagaagacctggtccatgaagcgcgatcgattgagccagaggtttaccacctcttggtcagagctgctgacagttagctga

SEQ ID NO: 367891 - DNA, 789 bp, Pseudomonas aeruginosa
atgacctcatttctggagcttgggcgcatcgtgccgtctggcatttgcgtaccactctatagcacccacatcagcgcgggctttccgagcccggccgatgattatgccgaagcatcgctttcgctcgatgagctcgctaacgttcgggcccctcatacctacatccttctggtgaccgatgagagcatggccggcaaagggattgcctgcggcgacctcctgatcgtcgaccgtgcaatgaccgcgcaaaccggcgacgttgtggtcaccgaggcaatggattcagccatccggaccctagccttcgacaaggctggtcgacccatgttgctgtcatccaacccgcattatccgccgatcgttttcggtgaagcagaagagctgctgatctatggagttgtgaccttcagcctccaccggctcagaccaacaagccggcccgcagagcctgccgatctacccaggtctcttgacgcgctcgtgaacattcgagcgccaagcacgtacttggttcgaaccgcgggcgacagcatggtggacgccggcatctatccaggagacgtgttggtgatctgccgcgcctgcgaggcccagccaggtgatgtcgtcatcgcctgcgtgcaaggcgagttcaccgtgaaaactctcgccctggagcacgacaggcgccccctgctgctgccggctaacccgcgatacccaacacttcggtttgctgccggcgacgagcttaggctattcggagtcgcaacgttcagcctccacaaacactgtgcgcgggtgaagtga

SEQ ID NO: 367892 - DNA, 645 bp, Pseudomonas aeruginosa
atgtgcagtcgatatgaagcgccggcgccggccgaactggtagccgcgttcggtactgagctggttgaaccggtgcaggcagaactatggcccgggtatgtggggcctttcatccgccgcctgcaggaaggcgatagtgaggagggtcagccaggcctggaggcgaaggcaggcgtattcggactacttccgttctgggccaaggatcagaaattggcccggcgaacctacaatgctcgctcggagactgtggctgaaaagccctcgtttcgagccgcatggagggaagggcgtcactgcctcattccggcatcagcgatttacgagccagactggcgaagcggcaaagcggtcccgactcgtatcagccgcgtagatggtgagccaatggggattgccgggctgtgggagcgctgggtagggcccagtggcgaggttgtgcattcctacacgatgctgacgatcaacgcagatgaccatccgctgatgcgcaactatcacaagcccacggatgaaaagaggatggtggtaatcctgccgcggggattgtatcgagactggctggcggcgccggcggcgaacagcttcgagttcatgcggcagtatccggcagatcgcctgcaggtagtcgagcgaccacgctga

SEQ ID NO: 367893 - DNA, 876 bp, Pseudomonas aeruginosa
atgctgcatcgtgtgtactggagaagatctgaaatttcagagcaggaagcagacctactcaacaaggcctgcttcattccgaccttgggcaacaaacgagtgtcacctcaggaattctgcagcaagaaactattcgccatgtacgacggcgtatcagagaccgttgcagagaaagctaccaagaatgggggcgtgtccatcctccttgagtccgcgctttctcatatcggagcggatgtagacgacgacaatgctattgctctcataggtcgtatttactccttatgcgaacaacggcggcaatataaaggccgcgtggaatacatctacttcgacgagctgcttgatatgtattcgggcagctacacagtggtcaaggataaagacctgagccccgtccagctcgctgcgctacaggcgcttcgcagcatcagcgcacggctacgtgctcttgtgaaggacaaatctggagagcgcgagcgcaggatgttcgcgggcaagtctgaccaagcagaggcgtggacaaacggtctcgacttcattgcattcgatgtcgacaccttagcgcaggcatatctgactgttgactctggcgggatcgagagacttgttcatgtcgcagtccatgagtattgccaccaggccgaaagctccattgacacgcacgagcattcactggagttctacaagctttaccatgatgcaacgagcagtcatgcgttcaccgagatagttaggatctgctaccgcaaattcctcgctttgtctgcgaaagcgacagtgccactctccagcaaggaagcctcgcacttcgcctacatcaagggactggaggtcaaagtggcgacccgaaaacctgttcccgccggccgataa

SEQ ID NO: 367894 - DNA, 258 bp, Pseudomonas aeruginosa
gtggtctacgacgatacggtcaaggacttgctgctcaatcagagctgcaaccgcctaagcgacgtcttcgtcaacttggtggccacgcccatcgacagcccacagatcgcagacttcgcggacaaccagcttgtactgcagtgcatgtttgagcgggcccggcagaagcaccagtttccggacgattccaagaccaagcttttccgagtcgagggtgcttcaggctggagcgagatggtcctccgtgctgatcactag

SEQ ID NO: 367895 - DNA, 441 bp, Pseudomonas aeruginosa
atgctgctaaaagtcctgttctccacttcactgatatctggccttgcctacacactgctggtcggtcttcatgacggggtgttttatgacggtgaccgtctgcgagcaatgatgatcgcggccggctccggcgcacctgttaatgcatatctgatggccctggtcggtggacttgtaggcggtgtgctaacgatgcgcaatcagccgaagctcgccatagcggccgttgcagcttttggggcgcccttcttccttggtatctgcgtgctcctgacaggcccactgctaaacagccccagcctactcggcgtgcaagccgccatctccctctgtgtggtttcaacggtttccttcctggccgcgtttgcccttttctacgtcaacctgttctctggactgttcaagctccttcccggcgtgctggctggtttccgtcgctga

SEQ ID NO: 367896 - DNA, 477 bp, Pseudomonas aeruginosa
atgaaccagacggaactagcacaagcactcagagttgcaacccctcaggcactggaggccctgcaggaaagcccgggacttatgcaccccgcgctcgttggtcaggaagaggatctcagcaaactgatcgaaagcaagcgcaccgaaattgaacttgagcagaagctgcgtgacatcaaggaaagcaacgcaggcctgaccttcaatgaacagatacaggaatccgaagaagcacgtgacgaggcaaacgaggtaaagaaacaagccgagaaagacgtgcgccaattcgacccggccggtcatgacgaggaagaggccgaattcatcatcaacgatatttaccgtaccgctgaggaagaagccgaagacatcatgctcgcttcgccggcggccgaaggcatcaccgaatgcatgattgaggaagaggccgaaaggcaggaggacattatccgcaagctgacctctcccaagaagtaa

SEQ ID NO: 367897 - DNA, 636 bp, Pseudomonas aeruginosa
atgcaacaagctcctaccttcgctgacgtacagaacgtcaagcaccacgcaaaagtcctcaagcagtcccacccggacctctcgtacaccaagcgccttgatcgtgcagccgccgagctgctcggtgtgcgcaactaccacgaactgaatcgcaggttccaggcagtgatcgaccagcatctggattcacctggtggtacgcacgccgtcacgcattgtctgttctgcgacttccgcttcgccgctgatatcaaggaagaccagaaggaacatcgccagatccatgaacggttcctggaagtggaggaacggactggataccggccgcgcacctacgtgcagcgggagaaactgaagcaggaaggtcatacgatcgcccattccgcaggcaccctggaggaacggattgaaggcgtccttatggtggtgcagggctggttcgagcgctcgtaccatggagtgatcgctgacggtaactgggagaagcatccgccgttcgattcttacgtggcgatgctggcgcccaccattgagcagcttttccctgaactggcaccatcgattgccgatcgctacggcagggcgccaggggtaattgcccggggccagacgaactggccaacgccaatccgttga

SEQ ID NO: 367898 - DNA, 1161 bp, Pseudomonas aeruginosa
atgacccaagatccttttgtaatgagtgccgtcgatcgagcgcagacgtgggtgagtgtctgctcctcctcgtgccggttgccagctgaagaatcagctgccgtcctggcctcactctgcggcttcggttcttgggacgtaatgatctatgccatcaacaacctgccccgctccccctatgatgacgaggttcccccacaacaacttcaggctcgactccagcgatatgtcaatatcctcatacacgaattcgacattgttccgcctgttgcgttaataatcctccaacaactgtccccttcccggcgcggcccgtttaccgaattcgatctcggtgaattcttggatgatgacgatgacgatgatggcgaagaggttgatattgataccttcgcgcgtaatgagatggccgtcgcgttagcgttaggcgctgaatgcataacccataaagttgaagttgcggcttctctaactttgtcggttaattggcaaggttggcttagtgccttggagtacttaggctgggacgcacaagaattagactacgaggacgtgccaatcggcgatccttcattgttgatacaggatcactcgtcttcatggccgtggatacctgcttatctaactagtaacattcacattcccgatttcagtggcgaaatatgcggtcatccaacacatcgccttgttcaatttgcatgcctgggcaacttcatgagtgaatgggccccacagggcgccaccaagttcatgattttagctagttggccgaaattgatcactgtaaggagcaagacgtattgccatattggcacagcttatgatctaacagatggcagttggactgatttgctggtgaataggaagtgccgcgatttctcaagcatgcaccgtatgaacaagaaggttacctctatccgaaaaggtgccacttcgctatcagagccagatatgtctttctgcaagcagttggcgttgcgcctagggggttatgaccctgaatgcgatgagccggaaggctgggagttcttcggaattcctgtagatgactggctactggttgccgctctccctgaaggaaacgcagaggagtttctgcaaagctttcggcgaccggatctgaacgagtacctcgatcctgagttctcgacccgccggtaa

SEQ ID NO: 367899 - DNA, 327 bp, Pseudomonas aeruginosa
atggatgtgcctcaagcactggcagcagatctattcacccagcttaaggcggcagtggaccaggctgtagagaaagaaaatttttcggtggccaccgctgcggcagagagcgccggcatgcagggcggccgaaaagaccccagcatcttggccttgggcttcacctatgagtattcagacgacaccggtgcaaccgtaacgctggtcgtgaagtcttgggataccagctctccattccagattaaaccggacaggaacaagatgactatcgagctggtcaagaacggtcagaagatcgacacctacaccaactggtacgaggattga

SEQ ID NO: 367900 - DNA, 1449 bp, Pseudomonas aeruginosa
gtgtcaaacttcaagcttgattattcgtctttcgttcgtttcgccgatgatgttaatgagcgcggcactcatttttggtacagccagaatccggttggtgtttcttctagcctaatagcccgcattaagttcggtgcaaaaattctggcgaccgcgtgcaacattcaacggtcccgagctcttgagtgtttcgccagcgcactcctatttcagaactggcactcactgagtgctcatctcaacagtgcagccgacttcaaaaaaggtgcggcgcttgatcactgggttgaacccctgaaatacaccctagtgctcctgattgcgagcgacactgaggtcgcattgcaggccaatcagatcactgcatttgaggatctagcgacaagactttcgcaggaggctaattgtcctgtagagattgtactcaactcggtatgcgccggcttctgtggtgctgattcctgggcggcagtcacgaaccgaaaaacgctcaacgcaagtacccctctgtaccagtttgagatcgaccccttagtacctggcactggacgtttcaccgagagcagggcttgcgcccagctagtaactgaactcgatgacttataccaaggagacaggacaccagaggagttgcaagtagcagaaaagtggatggagtcagccttggtcagccaacccgacttcctagaatgcggactctgcttagcccagatttactatgaccaaggcaatctccagcgtgcttacgaaacctgccaagcattcatcaaaaaggctgagagcctaattccgaagggctaccgtgggaagattgagtggagttggctcaccaaccgcgtctatcaccgcttgctgtggcttcaaatgacgatttctcatgatgcggaatggatgcgaaagtgcctagctattgcccgtaagcaactacgtcttaaccccaatgacaacctaggtgttcggcatatctacccgttgatgttgctagaggtgggtgagttcgagaaagcggctaaggcagcacgtttgcgaggcgagagccgtggcgacattgctctaatgcaggcattctgccgctttgcgctcggcgagcgtccagggtttgttaaatgcctagctgccgccctctttagccttccgatcctgcgccgtttcctgatggatgacgacagcgagatgcctgatggtgacgatggctatcgtggtgtcatccccgacctggaaacctttgtacgctatgcatggccggcctacatttcggtgcccggactccaggcagcttgcatagattttcttgcagacccgtttgtcagcgacgccgtagatcagtcgggagcttactggaagggcttctggcgcaaggggcctaacgccgtgggaactccgcaaggatggcatgcactgaatgataggcttgaagcttctatccaggcacgattggcgccaacgtaa

SEQ ID NO: 367901 - DNA, 507 bp, Pseudomonas aeruginosa
atgaccaatcagcctcccaaggaacggccatacattccgcagtacgacaggtcgacgaacgaacaagatcggttcctcgattactgtcagcgaaacaagtgcctggtgacggtgattctggagtcaggcctcgcgctgcagggaagggtggtcgaccacgacaggaaggcgcttatgctcgggcctctgcgctcgaacaaggacgtgcgcttcattgcaaagtcgtacatctgcctggtacgtgctgaagaagtgctgccgctgttcctcgagtacaagggtaaaggcacgcacctgacccggaagcggggcaaacgggaagcggcacaggccgcaaagggattgtccccgggggcccagcaggagaaagtggtgcgcaaggttagagcgccgcggccgccagtacccgaaacgccatcgcccactccgacctcggggcccaaggctaaacccgaggtgaagatcacgaccaaacgccggcgtcgaactgaaagcggcgagccctag

SEQ ID NO: 367902 - DNA, 1170 bp, Pseudomonas aeruginosa
atgcagctcaggcaacggctcctctacatgcttccagtcctgtttctgtcgtcggcgccgaccagctcttgggctttcaagatcaacccctgcctgcgcgttctggttcatgacggatatgtactggatcagaaccagatccgagctagcaacctctgtgcatatgcccccggctcgtacaggtcagagtctgtacatgagcatctgactaacttctcgatcgacgagtatcgcggtaccgggcctaggaagctcttcaactacatgggggaaaagtcctggacgagacccccatacaccgctgagcacagtacctctgcgatcatcttcggcagttggtggaacgatgatcccctcatgtatagctggggctcaggcaaagacttcagagatggcctgttcaagctcaagcgacagttcggtgagccagtcagaacctacgcgggtggcgttgatggctgcatggtgccggcgatcgatcacctcggctggaattcgcatttcggtaagctgcagcacttgcacttcatgaccaatctggagaaacctgccgccggcgccgaccaggtccggctgcaggccgagcagttgaagcacactgtcgacgagtcgttgctctggattgagttcgcctacatggtggccatcggaaagctgaagccaactgatcctctgaccgcacaaatcgaaagcagcctgaatctcccttccgttgctacgaactactgtctgtcagatccgagtaacgcgaagatccgcaccttgtttgcccgggcgggccttccgatcgagctacgcaacgcccgcacgcatgacgttgcgctgggcagcatcttccacatcctgcaggactccttttcgcctgggcatacctgccgggtcgactcaaaggttaatggcgtgcacatggctgtgctgaccgaggtctataactacaacgcccaggatcatgtgtggcacggtgagcaggacagttatccggggtggatgatcacctatgccaagagcggtgagcatgtctacgcgaatgacccgattgctgtgggcgcctggctgctgaaagcggtcgatcaagagacaccgtggtcccaggttcgagagcaccttctccagacggtcttctatctgccgaaggtcaggccggccggccgctgcattggagcgctttga

SEQ ID NO: 367903 - DNA, 633 bp, Pseudomonas aeruginosa
atgtgcagttcacttgtcgtgagcccggagctcgcagcaaaagcaaagcaggctgaagaactagccttgcaggacttctaccgcaagatcgagcccctttgtgggcgctatacgatgaaagaggccgcccgcattgttggcatcagtgctggccgtttgcgggaaatatccgtcgaccaaggcttccatttcctggctgcgagcgagcgagaagactccgatcgccggcgtatccgcaaggactttgcagaagcacgtcaaacacgaacagtccgtcaggtggagaaggcagcgccagtggttcaacctggccagcttcgagtttcgcccgggcaggagctcgagggccggaaaaggctttggcagcgccagaacgcattctacgagaaggtttgcactctggccgaggtactgacacttaaggaaaccgccgagcgtgttggtgtgtcagttcgatttttgaagaatttcgcctatgactgggatgtagaattcagggacgagccccgtacctactcagtcggaaaagcagagcgtgagctcacctttgctaccctcgcagatacctggagtgacacattccgcggtattgaaaagccctcctcttccgaaggcattcatgccaaccactga

SEQ ID NO: 367904 - DNA, 639 bp, Pseudomonas aeruginosa
atggatagccacggtagtggcgatacacgcagttgctggtggatggccagcaggtttaggaagtcatggatgtctatcagtagccacgaaaccgctctagcctcacttcttcaacgccgaggcgagcttctagacaagctctctagtaccgaactccggccaccagccgaaacgatgagctacggtattcacaacccctttcacgtggcactggcagtctgcgaatgttgcggtcggacaccaccagggcctcaggcctcgagtgcgacgaaaaatcgcacctggtgggttgtgaactgcctctgcggagcgaggagtggggatgggcagcgcgaaccctggatggcatcacttatgtggaacgcaaagaatctgaggagccagcgctaccaggatcttccgctcttcgacctggctgccctcgatcaagcagctgcaagagcaagaatacgtgcggttcgtgagagcctcacactccggctaaagctgtgctcgctcgatagctcgatcgccgcggttgatcgcgcacacccaagacctggacagcagtaccggctatgccttgacgcctacttgaagtgggcaatgctggccagccggctgatcaagatcgcgtcgagtcaccgacagcctgagtag

SEQ ID NO: 367905 - DNA, 252 bp, Pseudomonas aeruginosa
atgtctaactggcagaaaccggaatcggctaagaaggggatgtcggtagacatcgtgatcaagatggcgcgtgacggcacggtcaacgaagccacggtggtgaagtccagcggtgataaagctttcgacacctcagccactgacgccattctgggcgtgaagtcgctgccggagatgtcgcaggtgtccgacaagatctacgaggagctttacaaggaacgccgtgtgagcttcgcgcctctggctggttga

SEQ ID NO: 367906 - DNA, 693 bp, Pseudomonas aeruginosa
atgaagatttatgtggatgcccgcgagggctactcgcgcgtcacggaagcgctcacagagctcggcgccaccgtcgagctagcacatctcgaagtcggtgactacgtcctcgcacacgatacggttgtgctacgtcgatcagccagtgagtttgttgagggcgtagtccatgaacgaatctacaaccaagcgagcaaggccaggctcgaattcggccgcgttgtcattctgatctcagatggcgacgtctacacaactgggcataaggtcatgccggagatactggatagcgcccttagtcgcctgaccatcttgcttggatgcagcattttccatacacgctcaccgtaccgcgctgcagcccagatattccgcatggcaaaacatgcacaggaggggaaaccggcagagttgacgttccggaaggggggaaaggtgtcccctggaatggggcaggctctctactcactggaaggcttccctgctgttagccccagcaccagtcggaagctactccagcactttggctcagttcacgctgtagtcaacgcgcaaccagagcagcttcaagaagtccatgggattggcccatccaaagccgaacgcctgtatcaagcgctgaggtggcagctcctgcctggtgaaactgtcggcgactgtgtttcgctctttgccgaaccgccctctcagtga

SEQ ID NO: 367907 - DNA, 732 bp, Pseudomonas aeruginosa
atgaacaccgcaaccatgagcgtggattcaacagacagagcgacggtcaacatcaagcgtactaccgtgaccgctttcctggtcatgatcatcatcgtgctggcagcacttacgaccatcgcgctgtatgcctctcacctggcgctcaatgctgccaaggacgtcgacagcaaatggcagagccaagaagcacggctactcgacattgaggcgaaggcagtgctggcggcgagcacgtccggaaacacgaaggctcagcagggcagcatccaacaggagctgctggcgctgcgcaaagaggttcaagtggtcagcggtgcggtagcgcaggccaactcctacaaggcggctcgtgaatccctcgatgctgagcaagcggctaaagaagcacgaattgccgagcagcaggccacgttgatgcagcaaaacgaagaactagagcggaagggggtggctaattttgaccgcgtcgtcactgagcggttgatgaggctctgggagccccctgtcgagctggcgaaaggtgaggttgcccagttgcagattagcttcgcgcaggatggaattatcactaacgcgaccctagtgaagacgagtggcaatgaggccatcgacaactctgtgctgaaggctgcttctgacctccatcagatccccgagatggtcaccgttcacccgggtatctaccagaagtacctgcagcagcgagtgatcagccttcgagttgaatag

SEQ ID NO: 367908 - DNA, 549 bp, Pseudomonas aeruginosa
atggctagtcaaaccatggtcaaggaaatgcaagaggcccagtcgaatcttgcggatacctgcctagaacagatcgccgatatcaatgtggcccttcgtacccagccagaaggaacagaaaaggactccctgagggagaaacgccggcagctgatcgaggaatttcggcagttccaggaagaccggatcgtcattatcggcgcgaagaatgcccaagacctcgaaacgatcaacgcggtcagcaaggacgtccaggaattcattcgacacaccaaaaaggtggcgaagaccatcaaggttgttacggccctcatcgtgttcattggtgcctgcatggcaaagaacccgaagactatcgcggatgctgctgcagccctctacaaggcaatcaatgagaagatcgatgccgaagcgaagaagggagccaatgcggctgtggtgatgaacccgatcaagcctccggtacatatcggcgccttgatcgccataccgaagaagccaggcgccgcgggcaaaaagaagcccgtgtcgaaaagaacgaaagcttag

SEQ ID NO: 367909 - DNA, 969 bp, Pseudomonas aeruginosa
atgaaaagcatcaggctgttcttcgtactgctgttcgcaacggttatcaccgggtgtgggtataacgtcaaagtcatcaatagttttaaagacagttcgactagtttttctaaaagctatggagacctagttgctaaaactgatgagtactgcagagagggcatgcgttatcactactatgccgacgataaatacaccggtgaagatggtgtaaatgcgcacctcggccgctgcgataagtacagcgagggcctcaaaagcgtactcataagtaagacaattgttagcggttactcggaagcgctagctctcaccgtcgggatagaccctgcctacctagacagcgatctctccaagatgggcgaagtggtgaaaaagctccaggggcgggacggaacggctcttttcactgaggcggaagtgaacctcacgacgctgctcgcgcagaaccttgcacagatttacgtcagccacgaggtcaaggagaagacgctcagcatcatccgtgagaacaaaacgcttatcgcccgccacattacgctcatgacgcaattcgctgatgaattttatgggaaggagaacaagttccttgatggagggtaccaggccgtggagtcggagttggtatttgctgctgtaacccatagcccttccaccatggttgcagtttgcaagcctgtccctggcaagaaggaagcctgtaagggcgaaaaaatacctttggcgtatttagtgccccatcgcttactgctgcatgacatcgtagaaaagcgaaaaggtctgaagtcaggtgagggagcaattaaagagttgaagactgccggctcagctcttctggttgctaatgaagaactggcagagaagtttgaggatttggacaaagacgcgactctccacagtgttgaggagtttgccactaaggcgaaggccctcgctgacgcagtcgaaaaagtaaaaggagaagactga

SEQ ID NO: 367910 - DNA, 843 bp, Pseudomonas aeruginosa
atggataagatcataaaggcggtagccctgctcgggttactcctactcatcggtggctgcacggggattcaaacgaccaagccgggtgtcgttggaatcgacaggacgcagtacatgttcgaccccctgccctcacgggagctgaatggctcctatgcgagggcataccgcactgcgatacgaaacgcagaagcacaggggaagctcgtgaccgagactccagctgggcacagagtcatgaggattgcaggcgacctggttgaacaggtaccagcgtttcggcccggtgctgagcgctggggatggttcgtgaatctcatcgatgttgatatggtgaacgccaactgcggcccaggtgggaagatcatcgtgtacacgggtctacttaaccgcctgaagctcaccgatgacgagttggctatcgtcttggcgcatgagattgcgcacggtattcgagagcatacccgggagcagatatcgagcaaggccggcttcgagattgcgggaacgctcggtgcggccgctcttggtgcgggcgcaatgggcaaatcggtgatcagcaaggggctggacgccggctttggcctgtcgttctctcgcagggacgagagtgaagcggacctcatcggtttggagctgtctgccagagctgggtatgacccaagagcagcaatcacgctctggagcaaaatggcggccgaagggaaaggcaatggtttgcctcagttcctcagttcccacccttcagatgaagcgcggagtgagcgactccaagaggccttaccgaaagtgatgccgctgtacgaagcggcgcggctgtctgcattgcagagtcagatttag

SEQ ID NO: 367911 - DNA, 513 bp, Pseudomonas aeruginosa
atgcttccacgcttcagctcgatctccatcttcagcttctcaccggttaaaggcgtgcgtagggctgtcactactccccagtccgtgctcgatgtgatggatctgagggggccggaataccgtgaacaggttgaagtgctgacgagaatgacgcgacagccagatgcgcagctgcggctgaagttcgggctgatggcaattgaccaggccccaagcccggatatggccggcatggttccgctcgagatgatgattctccaaagcgcgcgagagtcggcaacctggactcaaattaaaccggcgccggcggcgaacttcgttctcctcgactggccgtctacagatgcgaatctctacgagaccaggctattcgtggtcggctctgatgcggccatgtccattgagtccctaccctatttttacgaggcccgccgcgaggaggccgcacaagtcggccgcattgtcatgccagcaatctcagacgccgcctggggaactcaacggcctgcttga

SEQ ID NO: 367912 - DNA, 1167 bp, Pseudomonas aeruginosa
atggcgcaacaacagcaccttcccgtgaactacctggagcgcgctatttcggccctgggcgcgatcggcatcaacttcaaccgcaaggctgatcctgctcctgtactcagcctgctggaaaagctgcgtcattacgacgaaaccaaggtcactcagatcgcgatggccatgcagcaaagctctggcttccatcagaccgtgcgtgaacagctcggcgggttggatgtaagtcgccaccaccaagcgatcaccgactcattcagctcgattggcgaagacgccaaaaagatggccggctatgtcgctgacggccaactcgactggaaagagaagttggccatcggattcatgaaactgcgtcgggggtccattccggagcgctttgacacgatccgggtcaactacctccaggctacaaagacggtcggcaaggagatcgagcgggagcaggtcatcagagccgcctaccaggactatgatctggccatggggcaggtcaaagttgcagcagaggaactgctgcagatcgcaacgcaacagctgaacacccgtcgcgaagatctggatatgtccaacaaagccctggaagccgcccagtccgcaggcgaaagcggcgtggcgatcgcccagctggaactcgctgcccaggaagcacttcgcgcctaccaggtagaagacaagtcctaccagatctgcaaggacatctcggaagagctcaaggtcggacagagcacctctcgggtcatcatggctcacctcgagcaagttgccacggcaaaggatcgcctgcatgcacgcatgatctccttctttgccggccaggagagcgttctgactgcgctctccgtagcgttcaccgccggcaacggcctcgctgctgcaaccaaggtgctggaggcccagaaggccggtaccgaggctgccatcgaatccctggcaacaacgtctcaggttgccgtgcgagaggccatctctgcaggttatggcccaagtatcagtgctcaccccgtgaaactgctcggcgaagccgttgttcagctgcagagcgacatggtgggcctgatccaagccgcacgcgagtccgccacaagcaccgccaatgagatcgaatcggcaaccatagccaacgaacgcgcatttgccgccatcgtggccaaggcgggctaa

SEQ ID NO: 367913 - DNA, 1413 bp, Pseudomonas aeruginosa
atggcgatcgtcgatgatcttcgacatcgccagctcctggtaaacgagcagctggacttacctcggcgccgggaggaagtcgcgcggaagataagcgattactaccagcagaccggtattgttgctagcgacgagatcattgagcggggcgtacggcaattcttcgctacgcgcctaatctacgagcagccggctccactgggtttgggtggtcgactagcgctgcatttcctttctcatcgcaggacgtacgccaaacgctgtgccatcggcgtgcttgccattggcctcggttgggcactgaccgctgcgacctctgggctttacacccaatacgaggtcagctcggtaaagaacaccgtccgggaagcggctatcgggattcaggatcttcaagcagaagcagaacggcagcgcgtcgttctcgcatcagcagaacccgatagctcggtgtcgaagattgctgcagtcactcgcctatcagaaggtatcgctgcgaatcttgtgactgctgatcgcctgctccaggagttgaacgggcagatggtagttcctgggaacatcaaccgcggaaactacgagcaggtcgagagcttgctcgaagctcgcagcggcacattctacgacgcgaagaatgcgcttcagcgcaaccgagagtcgatcgaaacgctttccacgatcaccaatctcgctaatgcgctgcaccagaccaccagcgcccctagcttcatctcaggcgcatctcgctaccctgacctccggcctctcgcaaaggctgcagagatggcgctagagacggctgaccaagatgatgggcgctcggccaaggcagctgttgagcgactggagtactccattggccagttgctgcctcgtgatgtgctcactgagaaggtcgcatcgcttcgagcaatctacgctgccatcgggttgccagcctctgacgccgccttgatcaacgcacgcctggatttggccgaacagtcgatcggtcggcaggacctcgctaccgcggaggttgatctagaggccttagcatcgactgttgcctttgcccagcagcgcctttctatagacgtcgttagtcgctctagcgagcgatcaggcgtagagcgcacttaccgtgaacgcggagtggctggtcgtgcctggtttgccatcgttgaggccaccgatgcatccgggaacgtgatcaaggtgcccattctcgacgtggagacggacaagaaggcggtggttagcaccttcggcgtccgaatatcagaggctgagtaccttcgactgaaggaagacaagcagcaagatgggcatatcgacaaccgtcacatgggcataaagccggccaagtccctgacgatcgactggacaccgcgcacactcagtgcccggcccgacacccttatgagttggtga

SEQ ID NO: 367914 - DNA, 789 bp, Pseudomonas aeruginosa
atgactccatcgacaattagcaacgctttgcagcgcaacagtcgtgagcaggaagcggctgtacgtgctgcagagaaagctctttcttccgcccgtgagctgggcattgcactggagcagcgtgtactcaactgccttggtgagatcgcttccgttcagctggagaacccgacgcagtgcaccagcgaagtgcgcagcgagatgaaccagcgccgcgatgccgagaaccaactgcgggccgaactttcgaacaccgagatctccatcagcaacctgaacgagatggagcgcgcactcaacgctgagctggagaccttggtcggccaggtcaaccaggcgctggccggcgacgaaacctacctgcagctggtcgaccgcaagatggaggccgccgaagcagcgcgtcgtcacgaacagtctcgtgttgagattaagtccgagtgcgctgggaagatggatgcctaccagcagcctgtgttcgtctatctgcgcgctgccaagttcggtaccgaggaatacggcagccgtttcctcgtccgcgccctagagcgctggcttgccgccaagtccaattaccttgagaacgcaagcaactactcgatgctgagcgcaatgctggctggtgttgatgagcgctctcgggagcttaaggctgaatttgaggaagctgatgcagcgctgagacggcgtgtggactctgcgatggcagccgctggcgtgcctgggcagcaaggggagcccgcagaattcggaaaaaatcgtacgctaaggttttccgggcaaccgtag

SEQ ID NO: 367915 - DNA, 798 bp, Pseudomonas aeruginosa
gtggtctatgtcgggctcgatgcgctgtcggatgccgaagtggcggccgctgtcggcaactcgatgttctccgatctcgtctccgtcgccggccacatctacaagttcggcatcgacgatggtctgccgggcgcgtcggccggcatgaaggtgccaatcaacgtgcacgcggatgagttcaacgaactgatgggcgacgagttcatcccgatggtcaacaagggcggcggcgccggggtgcaggtcacggcctatacgcagaccatgagcgacattgaggcccgcatcggcagtcgcgccaaggccggccaggtcatcgggaacttcaacaacctgttcatgctgcgcgtgcgcgaaaccatcacggccgagctgctgacacgccaacttccccaggtggaggtctacaccacctccctggtcagcggcgccaccgacagttccgatccttccggcaacaccgctttcacctccaacacccaggatcgcgtcaccagtaccagcgtgccgctgatcgagccggcgcacgtcgtcggcctgcccaaggggcagtgcttcgcgctgatcgagggcggccacctgtggaaggtacgcatgcccttgccggcgcccgaccccgacgaggccatgccgaaggatctgcaggagctggccggctacatgcggcagcactacgtcgaggccggcgactggtgggacggcaagggcattcccggcctgcaggatcaggcgctgcccgacgatctgctggcggacttcaagcagatggcgagcgtggatgaaggggccgcggcatga

SEQ ID NO: 367916 - DNA, 951 bp, Pseudomonas aeruginosa
atgcgggtcgccggccagcaggggcttgccgctggcggtgcggctgccggcgacgacccaggcgttgctgccctcgaactgcggcaggccggcgtcctccagggcctgctggctgagacgggcgagggcgccgaggtccttccagtcgccggcgcccagtgcgccggagggcgtcagcacgccctgcggatgccagtcgagatcgaagatgcgcaggtagtcgctgcccagttcgtcgcggatgtaggtcagcaccggctcggtgcggaaggcggcggcgaagctgtaggccatgtagccggcgatgctcagggtatcttcgggggtgaagggacgcctgggtatgcccagcagatcgaattcgagcggcgtcgggttgttttcctggaactggttgaccccgtccaggtaggcctccagcactttccagggctgcgactgcttgtcctggcgggcgctgtattcggcggcgtggtcgcggatgcgcagggtgcggaacagacggtcggtatccaccagcttgggtccgagcacttcggccagctcgccgcgcgccaggcgccgcagcatttccatctggaacaggcggtcctgggcgtgcacgtagccgagggcgcggtagaggtcggtctggttctgcgcgtacaggtgcggaaccccgcgctcgtcgtagcgcacgtcgaccggcgcctgcaggtgggccacggcgagcgagccgttgcggagcggctgcttggcatggaggtaccaggcgccgccggcagccgcggcggcgaccgccacggcgatcacggtcagggtgcgtttcatcgatcctttctccttgttgtagtgccgagcattctgcggatgccgccggcccgcggcattgaccgaatgctcggaccctggaagtctttggtcaatcgcgaggagccgccatgcaggacgacccgtctaccagccccctga

SEQ ID NO: 367917 - DNA, 204 bp, Pseudomonas aeruginosa; identical to SEQ ID NO: 336505

SEQ ID NO: 367918 - DNA, 1170 bp, Pseudomonas aeruginosa
atgcaagtcgacctgaccctgcgtgaagggctgatcaagtatcaacagtcaatatcgattctgaagaagggatacgtccaagagtcatatcggatcaagcaactgcttcgctggcctgacgcagatctgcagatgcgcgagatcggtagtcccaacattgcgaaataccgtgatgaacggctggcacaggtgaaccctaagactgggaagcccatttccccgtcaactgttcggctggagatgtccctgctcagctcgctgttcgatatcgggtgcatcgagtggggcgcttgtgataacaacccagtcaaaaatgtccggaaaccgccacctagccccggccgtgaccgtaggatttccccgcgggaagaacggctgatcctccgttactgcaaaaatcacgcgactaccgatctgtactcgattttcgtactggcccttgagacagcaatgcgccagggcgagctgctcaagcttgagtgggagcatataaacctgcgggttggcatcgctcacttacccgacactaagaacggtacaaagcgcgatgtaccgctgagcatcaaggctcgttctgcgcttctccgaatgggagtgaagcagcgcgggagagtcttcagctacacatccaacgggctgaagtcagcctggaggatcatgatgcatcgcctgggtatcgatgacctacatttccatgatacccgacatgaagcagcctccagactgagcgagctcggacgcctggacatcatggagattgcagccatcaccggccacaagtcccttgcgatgctcaagcgctacacccacctgaaagccgcgaagctagtcaaaaagcttgaggggaacggaaacagggggcgccagattgtcttggggcagctgatcccctacccagcgattaccgagcccgcggtggaaggcggattccaggttcggatactggacttcgatgatatgaggggacaaggggcatcacaggagttggctctacagagcgcacaggatttgttactgagacacctggttacggcgcttcgtgatcggacgccggtaccgccaccaaaccagtatctagatgatgtggatgacaacctagtcttcatgctcgatcctcttggcccatcagaaatgggggtcggacccctcacacaaaattttggaacatga

SEQ ID NO: 367919 - DNA, 279 bp, Pseudomonas aeruginosa
atgagtgcaagcgagagtctggcgcagtcaacctacaaccctaacttgcagtacgtcttgtttgaggctgaggagccagaaggctgccttctaagcaacgtcctgtatgcctggcctaggggcgcgtacgagcctgacttcagtgtcgagctgggacgcttcaatggcgaggtgcttgtgatcggcgggcgccgcatgggccgtaggactggcctgctggtcgagatgttcgatggccgccgtctggcattagcagagcgcgatcttcacgcagactaa

SEQ ID NO: 367920 - DNA, 582 bp, Pseudomonas aeruginosa
atgtccttctcgaccaccacgaagctgttcaccaaggccggctgcatctccagtcacatcgcccgtttcgcagccgaagtgaagcagatcgactactgctgcatcgacattgacgagaatggcaagctcgcaagcagcgtcggcgtgcaacgtgtgccggcactgtgtgaccgctacgtgacggtcagtgacctcgacatcgtgctggagtatctggaggagcagaatcccgcaatcccgcttctgcccgcgaacgtcgctgaccgggcaatctacagaagcgtggttcgctcgctgcaccgggacgttttcccactacttgatctagccgtgacgggtgatgctgcggcggttcagaaactccgccagcaattgcacgatttcaacgcaacactggaaggccgcacctacttcgccggcgatgttatctcgctgatcgacatcacgctggccccttggctctacagtgcaatgagcaaggggctgtccatcaagcagcttccacacctcagcgcgtacgctgaccgcatgattcgaatgccagcgtttgctgcgacggtgccgaccagggttgctgcttaa

SEQ ID NO: 367921 - DNA, 315 bp, Pseudomonas aeruginosa
atggaaatccattccctcccggtgatcagcactcagcatctcactccggaagtcgcatcgctactctccaagcttgggaaccacaacgactggtgcccctgtgcagcctggccaagtggctactttctctgcctcgatgacctcgaggcacgagagaacgaaccgccgcaatgccttgttgatctccgtgactggctcaagtcgaagaacctcaccgacgtcgactcgacaggcagccgcagcacctcgtgctggcttcgcctagacagcgacggcgaggtacaaccggatctgccggtctatgagtgggaatag

SEQ ID NO: 367922 - DNA, 495 bp, Pseudomonas aeruginosa
atgcagagctacacagtgattcccaacgaggaagctatcgatcggatggtgcgcttcatgggcatgcagttcatcaacttcgacgggaacatctacagcacctttcgctcgctctcgggaaatgcctatgacggtgggctttgggagttccgtgagtacccgaacggtgccgtcgtcatggtttaccccagccaggaaatggtgacgtgcacctgtcatgggctgatgaaggacgtcgagatgactctcgaagcgctttccctggtagccaatgccttcgtgttgcgcggcatccagaatgcggccgtcttacatggcgatgatgcggatgcggagcgtctccatgacctgtaccacggcgtgcgtgatgctgtctctgggctcatgaatttcgtcatcacagatcaagggatcagcgaacctaccgagcaggacctgcttaagcctcgcagccctcatcccgaaagccagaagttctacgacatgctggattga

SEQ ID NO: 367923 - DNA, 1290 bp, Pseudomonas aeruginosa
atgcaatacgctgtcgagatcggtaccaatagactactgaaagccgacggaacggaggtcggcaccgcagacaccgatcggcctaccctgcatctactacccgagttgctcatgccagctggctgccctgtcgacctgtccgaagtgcgcctagaggtgttttgtgaccctgagctggagatgaagctgctgccccagtcgggtatcaaagtccgccgtccctacccgaatccgcgctacctgattggcgggtctgaagagtcgcggaacggctggtgcgttgatgccacagacctacccagggagcttcctatcgagttccgctggactatcactggagcgacggcggtagcctgtgccggcacaccgctctgggttgtacgccatgtactggccattaccctggaagacggttcgcaccgtacctacaccatgtccgtctctgactggccgcgaggtggcgcgccggcggcgccgatctatcgatcagccatcgcgatgcccagggcatctcacttcacggagaaatacaaacatcgagagatctggctcgtcgaggaagtcgaccatacgtcgttttgcgatggatcaggattgctcatcagggaggggctcacgatcccgccgatccccttcgagcaggcgaccagcatcaacgcgcaccaagatctccagctacacgagatggatcgtcagtccacattcgagactggcaatgccgagcattacgcgctcgctcaggttcagatcccgcctgaggtgttgataaaagctgtttgcatggcccagaccctgccattcgacatccaggagatgaatgacggacttgatcacactgggtacctggagaaccatcccgcgatgcaggtgctgcgagactggtgggagacgaaccgaccgcagtgtgacaacccgcttcccttcggttttgtgatgccctacgttcgagtcgccgaaggcggtgaatacctctgcggctatcgagaggttccggatgcaagcctcgaagtgatgcagggcctggaagagaccagcgcaagttgcggcgacgcgatcatcttgcagttcatggcatcccagcggctgcacaagtacgacgaacacgactgcctaaccattcagttcgccaatggccaggaggcctcgacggtgggtgtttctcggcaggatgttatctccggccgctatgacgaagcctggtacagcctacaagcccttgcgatgctgccgagcaacttccccgaggcatacgctgcgctcgaacagaaagcaacgctcactgccgcctga

SEQ ID NO: 367924 - DNA, 1374 bp, Pseudomonas aeruginosa
gtggcgatcgacccactcagaagcctgcagattcggcgcaaggtcgccagcctttggagagtaaaggccatggcctctacttcccccctgacaatcctctcgcccttcatcactggggagctctgcgccagcctggtggaaggcaacgccaacgccaggatttacacccgcttcgacgtaccgctctttgcctcgggcggatcgagcttggatcagctcgaagcactgctcagatccggccatcagctcttcaagatcgatgacctccacgcgaaggtggtgatggacgagagcagttttgtcacgatcggcagccagaacctgacaaagcgagggaagctccataacaaggagctcactgcctcattcaccagttcacaggtgagggacctggtgaaggcccgtattgccccgtggctcgagaatgccgagccgattactgctgagatgatcggctggatgcgcgccaacgtgaaagacgcagcggccttgcacaaggcgtttcgtgaagcatgtagtacggtagaagcacgctattcagcacagttccatcgccaggatgatgaacgcgaccggactgaggaaactgaacctgccgctgtcacagtcgagcgcgagcgccggctgctcgaaatcagagagcagattggcgcccgaatggcgccgctgaagaagagctttccggcacaaccctgccgggtggtacagcctcgccggaagaatcacagtccctatctgtcagtggggaacggcagcttcacaagctggcagatcgataacaaggtgattgagcttgaccagggcaaacgctacctctgcgcgcttgagtcaggcgatatcggctgggtgcgagttgcttcgggtcggatcaccaagatatcccggggaatcactaccgcggttgggctcctgcccatcgatcgcaccttggctctggagttatctggggaaatggctgatttgcgccgcctgccacctggcgccaatctggcagccaaggtctggcgaggggaaaccaggatctgcaccgtccccgttatgttcgatctcaaggattgcgacatcctcgatccaatccttccgaatgcacgtgaactacgccttggcccaggagagaaatctaccgcggaggtccttgcctggctgtcttcgcacaaggaggaaactcgcaagatcgtgctcagcgaaatattgggcccgttcgactaccgggagcgactgcttggagagaacgccgacagcttcttcgggccgcccaggacctactgctttgcatcattggcggaagttgagcgcaagccggtgctactgatgtcatacccactcgcgcacaaacgaaagcgccggcggcacacaccgtcgagaacggtctga

SEQ ID NO: 367925 - DNA, 693 bp, Pseudomonas aeruginosa
atgctttatctgatcctctgcctggcaatgatggccctggctacctttagccagttctcatacataacccaggctgctcagctcgcaaatgaacccgcaaccaaatggcggcttcccttggagccgctgctgctcggcgtcatttgcttgctgttcatggctccggtactaagcatgttgttggagatcgatgcccccactgctttcgacatacccactggccgcacctccgtctacctgctggggctgggtgcagtggtatgcaccggttacgcaagctactgctggcaacgagctgcttccgctggaggcagtgtgttctggccgacaggcaaagtagtcgtgttgtcgtgtgcggcggtggttggcttggtctcggcattccagcatctctcgttcttctcaaacgacaaggctggctgggccgacgtgagagtcctcaaggagattggtgacatccaggacatgcaggcctgtgtttcccccattgccttggtgcagttcgaagacgcagcgccctttgggtaccgctgcccagagagcgtgatgttcaactcgttcaccagcgagccattcattccctggcctgattacttggatggggaaagcgaggccctcggcaacgccatcatccagatccagagcgattcgcgtcgtgagagcgcctcggtcttaaacgactcatctcaatag

SEQ ID NO: 367926 - DNA, 696 bp, Pseudomonas aeruginosa
atgctcaaccgactgaaaacccaggcccatttggccatcatccccatcgcaaccagcctgctcgtgtgcttcacatgggggatcagtagctctattgccatggtactgatggccatcctgacatcggccggcttctactatgtgcgcttcaagcatctggaccgcctgcaggccaaagcgagcgcagcggagtccagcactctggaagtttgggccagcactggaaagatcggcaccatctcggaggctgagtattctgcgctggagctgggcatgggcaacgacgctccgctgttcttccggcaagcagccaacgtgatcggcgtgctctggcgtctctcctacagcctggtgctggctctgccagctgcgatgttctggcttgttcttgtcttcggcattatggagccggaagctatcgcacaagcagcccgcagtctcacaaccatgaccgcagccgatgtgagcaacctgatggacgtggttatcacccttttcctgacgatgccgctcatggtcttcggcatctctgctgtgattggatggccacttggctcgttcggcttcatcaacttctattcgcaggaacgcaacagtttgctgctgaaacactgtggcgcttcggccgttgttgacgcccatatccgcgtgccagctgaagcggccgtcacgactacaaagggtgtcgagggctga

SEQ ID NO: 367927 - DNA, 501 bp, Pseudomonas aeruginosa
atgcggaaatccgagatccagaaaggcaagtttttcaccgacaacaagaacggactgcgcgaggtcctggacgttggcccgcagtacaagcgctatgacagcgttgaagatgatgattgcctgctctaccgagtgcactgtgctcggattgccgccgacgttggcagcgagaacccgtccactcgtgtgagtttcgccgcttgggccaaggaagaagtacctgaagatgaggttcaagccttcatccagcaccagcgggccatgcagatcgcctccaagctctccgagacgcagcgtctcttcctcgagacttttgaccgcgacctggacgaagggtcgtccattgagtgcactcgtgaagaattccgcgcagccaaggcctgccgagagaaaggtctgatcaatgatatgccggacaagctcaccagcgagtgccggcacttcgatgtgaaactctcccagctgggtatcagtgtcatcgaagcagttcacacccgctga

SEQ ID NO: 367928 - DNA, 276 bp, Pseudomonas aeruginosa
atgactcgatccaccctacccttcaccatgagcagcttcgccgatctccccccgcttggccgaagtctgaagatccgctccgcggttcattccgtggcagcgcagctcgcccgcgatgctggttacagcaccgagccttacttgacatttcctgagcgagcccctggcgtcagtgagcgactgtcggccgcagcgaacagcgacccagcgattaccgaaatggtcacggtgcataacagcctgtgctgtagcaccacccgccccaatctggcctga

SEQ ID NO: 367929 - DNA, 618 bp, Pseudomonas aeruginosa
atgagcaatctaaccgtttctcagctagaaaacctggcacagcgggctgagtcggcgcttgcggccggtgaacaggtcacggccgatccattggagctgctggcgctgatcagcagctccggtgaaggcaagacctccggcgccggccaggcgcctaacaaaccgatcacacagtcccaggaggtcactgacaaggatctggttgccctcttgggtaagtgcgtggaagccgcaggcctcgggtatctgctgggcgagatttaccccgaagagatggaggtctacggcgagcgtctcttcgagttctgcaaggaagccaagaagaagcatctgtggcccgcggtgcgttcattggctcggctgggcgacatgagtcccgatgcttacttccgggtcgacctcgatccagataacgacgtgtgcctcagcatctggaatggcagaaacagtgcgagcgttgatttcaactgtcctggcgccggcggtggccaatcacgcttcacaagagaggctctcatcaacttgatggtggcgattgaaagagacaacgctgaacgtccgtcacgggactggatgaaattgaacaatcagcccgtccatgtgaagccctgcaactga

SEQ ID NO: 367930 - DNA, 1122 bp, Pseudomonas aeruginosa
atggaccgaggccgcggcgttcccgaaggtcagggcagctatgacgggctgctcgcccgtggcggccagtggaacggtgccattcgagaagtaacgcacgtcctcgatcagccgctgcgctggacaaaggggcggatgatctttgtgaacagcatgtcggatctgttccacgagaacgccagcatcgagacgctggatcgcatcttcgcggtgatgctcgcctgcgcgacgcatggcgaccgcaaccacatattccaagtgctgaccaagcgcccacatcggatgctccagtacctgcagagccgcagtgaggccgagcatctggaagcatggtcgaaggccggcgacgcattcatcaaggttaaggggagcggtgagaccttcagccagcatgtgttcaacctggcatcacgcgagcgatcggctgaaggagccccaccgagcgatggcgcactcatcccctggggcttcaccaagaacatcttcccgctgcccaacgtctggctaggcgtttcggtagagaaccaggcctgcgcggatgagcgggttcctctgctgatgcagactcctgcggcgattcgctggataagcgctgagcctctcctaggcgcggtggatcttactgcctggctggaaatcggctcgttggagtccgagctggggctttcgaatcctgggatcgactgggttgtggttggtggcgagtcgggtcaaaaggcgcggccaatgcatccgtcctgggcgcgtggcatccgcgatcagtgctctgctgctggcgtcccatttctcttcaagcaatggggggaatggttcacaaatgccttcacgatgagcgatggcaaggccgtgttccgcgagttcagcagctaccagagctgggttaacaaggctaacacctgggtcaacgggggaatttgcctcgatcgacacggggttgaactgcgcaacggagctgacatggcccgggcacgtgattctggcgtgttcccggtgacggtcatgcacaaggtcggtaagcggaacgctggccgcgagctcgacggaaagctctacgacgaataccccccaaaccatctatctgcagcagccagtcagggtgccgccgcggagagctgcgcatga

SEQ ID NO: 367931 - DNA, 885 bp, Pseudomonas aeruginosa
atgacccagagcaaccctgcacaccccgccccaagcacgcaatctgccaccagcggcatcgcactgaatgggcaccagctgcgagaggccctgaccttcctggcgcctgataacaccacagaccagctggacggcgacttggtgatcgaactgcaccccgccggccctgattaccccattgcggggctctatgcataccacgccgaatgccctgaagaaggtgccattctgctggatgggattccggaaggctgggccgcctgctcgcccgaaatgctcgcggcgggagtctgctgcgccactgccccgcgtatcgctggtgcacctggctctggcgtctcgcactatcacccactcccgcacgcagcctatgagcctaccgatgcacagctctttgcatttggctgcgaatacggtttccccatggccatgcagactattcatccggtggaaggtccggttttctggacttacgactcgctgaaggatgacaactacccaaccgcccgcgaagccatgatggctgagttcaagaagaaccaggcaccagcaacgcaggccgctccccaacaggagactgtcacctcccgcccagctgtagcggccaatccggaaagcgaagacctcctctacatcgcacgccagaccggtctgcgaggattcatccatggcgtcaacgccacggacacccgcgagatgcttactcgcttcgttgctgagctccctgtcaccaaggacgcgcagcgcctggaacacttcttcgccacggcacagcaaatcacggcagatgaaaccacgagtcctgcggcagcaatttcccggctgaaggaagcgatcagcatggccacggcccagcgcaacgaacgtgcgcaggagggctgctaa

SEQ ID NO: 367932 - DNA, 366 bp, Pseudomonas aeruginosa
atgtcgaacactacgccctcctccacccctatccccgttggtgcatccgcgaacctgatcgaactcggggtcaagcctggctggtttgtccgcaaaggcacctgctccatttggcaggagatccaggatgtgtgggaggactggctcacctgcgctgcacgtgacccgaaacagatcaccgacagcggcagagtgggtaacttcttctcggcgatcgatgaagtctgcgaagtgccgccgccacatagctcctggatcaccctggagcgccgcaagtccttctacgacaagttctaccccgagctcgacaagatcatccctggggcatacgtcccgccgcacgctatcccacctagttcctcctga

SEQ ID NO: 367933 - DNA, 714 bp, Pseudomonas aeruginosa
atgttcacgatcacccattaccgcaatcggccaccacaagatctcattcagcaagtcctgagcctggccgcgcaaaatacgccggaaatgcatatggttcagcctgaaccgagcaaccttatttacccactggtcgagttgaccatggtgatggagatccacctgtacatggatctgatggggccatcggacgtccgtcacgccggcctgatcctcgcaacggccaaggcagaaccagggcaagttctcggctttctgcagtacgccagcgccacgaacatggaatccgcctgcgccatcacataccttgccgtcgactccaatcaccgcaagcaagggattgcccgagccatgatggaagagttgatgaagcggcacccacacgcggcgctcacttgcccagtgccaacagttccggtctatgagtcccttggcttcgaagtactcgactcgaaggacacacaagtagtcatgacctcaggtggttaccgagatcaagcggtttgcacgctcactgatgccagtcagttcctcagacacccatcggttcttaagctccaaaacgaactcatcaaggagcacggggagagtcgactctttgaagcagagaaagaaatgactactcgactgctggagctgcaggccgaggcggaaaaatacgccgccgctcggcttgcgggcgttactcacaacgacgctgtttctggtgcgtaa

SEQ ID NO: 367934 - DNA, 285 bp, Pseudomonas aeruginosa
atgagcagcgccactcttgaacaccgctacgacgaaactatcaccgcgatggttgcccaaggcctctgtgagccaggcgagcttccctcgttggaggagctgatccagacgataaaagagacagtcgctgatgaacctctgcactttggcgacttcgagcagttcttcacctggtgggatgtgactaccgcatacgatcagatggacgccgaaagcagtgctgaacaccacaagccagccctcgctgtcgcctatgaggcactggccctggaaggattcttctga

SEQ ID NO: 367935 - DNA, 240 bp, Pseudomonas aeruginosa
atgagtaagccatacccaagcccgcaagaactggaagtactctattcggttcgtgatgccgcagtattggcgctggcaactaagggccacatcgaggcccctgacctggtagcgctggatcgcctggggcgctgcaaggtcgccaatgagcattggggcatttgtgacggtactgctcgccacgcgctgctcaacgacccacaccactttgtccgcagctgtgcgagcctcgccgcctga

SEQ ID NO: 367936 - DNA, 366 bp, Pseudomonas aeruginosa
atgagcaaccatctattcaacatcctgcagcaggccggcgtttcggttcagtatgggcaccagcgactgctagccaagctcagtattggccccgtcgtggtttcagacgctggccgttcggcctaccagatctccattgtccgcgggcttgctgtcatcgaggcagtcagcggccaggctccggcggacatcatggtcaggcttgagccctcggctgtcgtcgctggtcggccggaagctcagcagccgccttctgtgttgaagttccctaccgcctccccgaacgctgtggctcgagaaatgagccgagaagagttcgacaaactgctttggatcaaccccagcgagttgaagcccgcaccatga

SEQ ID NO: 367937 - DNA, 471 bp, Pseudomonas aeruginosa
gtgagcagcaattccgacaatctgacccacaagatcgagctcaacggagagttcctcatcaagggcgacgagtcctcgatcatggttctctggaagaacctgaccggcgagaactttaagcagccgcgcccctggaacaaggactacacgcatgaagcctatctgcgtatggtcgagcatgagtggaaagcggatctggccgccggcgggatcattaccctgcaccggcttgagggcgacgtcgccatcgccattcacacgctcggtacctccggcatggccatgatccatgcggccggaaccgctccagaactggccgcagaggggtataaaatgctccgcactaccgtgggcaccgatgccagcgttctggccgagcatgccacccaggacgtacgcctcatgcgcggctggactatcttcggcgagcagggcaagttcgaattcgccgttatggccaaggttcagtaa

SEQ ID NO: 367938 - DNA, 138 bp, Pseudomonas aeruginosa
atgctgctttccgaggtgaagacccggcgagctttcatcctgagttgtgcactgtgcgagaaacccgcgagcaggattgaccactactggccattccacagcgaacaaaatcgctgcctggcctgcgcgaaactttag

SEQ ID NO: 367939 - DNA, 168 bp, Pseudomonas aeruginosa
atggcaaccactgcggaacagaaagaagcgctcgaggatcttgatcacctcgcccaggacatcggcatgctcgcctctggcgactgggtgccggacgacgacagttgcgcggcgtcgctggaaagcatcgagcgggtgcgcaagttcgtcgcgaaccttcgtctttga

SEQ ID NO: 367940 - DNA, 309 bp, Pseudomonas aeruginosa
atgccgcaccaccaaccagtcattagccaagacgagccggtcaccttggcgcgctgcccagcgtgccgtggctcggcgctctacagcattgcgcgctacctaggcgaaagcgatcggaatgaactgcagcgccttgaaacagccggctacctgatcgaagaaacaaggttgaggctcgtcaccgacgtggacgaatgccgctgccggccggaagaggttgcgcggtaccgcaaagctcagcagcagaccgcacgcacgcccaaagttagcacccgtccgatcctctcgcttaagagcccacgcggctga

SEQ ID NO: 367941 - DNA, 492 bp, Pseudomonas aeruginosa
atgaagaaacagatcctcgctgcggcattgatgatgctcggcggcaacgccttggccacaagcgataccacctacaaggtgaccgtccaggtcacacagggggatgtaatcctcgctccctataccactctcgttcgagatggcgaggagtttcgctatgccgaaaccaaagagatcgacatcaccaaggaggtactcaccacggcagatggcaagtcgaaggagactcttcagccgttgaaggtcggcttcgatttccgcgcgaccccgcgccagcagatgaacggcgatatcctcctcgacttcaactacgaggatgtgcgcctggagcagatgcgcgagatccccgttggggatgtgaacatgaaactgcccgacgtgcgtgccatcaccgcgggttcgcagatcgcggtcgaagaaaatgccccgaatgtgctcgtcgatggcgcaagcaaagatgctcgagtcatcttcaccatcgaaaagcagtaa

SEQ ID NO: 367942 - DNA, 438 bp, Pseudomonas aeruginosa
atgaaaattgaccgtgccgcgcttgagcaggctgcaaacgcatgtcgcaatgggctcatgagactaactggaagcgccggatcgatgctccatggctttcctcgtggggcctgtgggccagcgtcagagatccttgggcgcctcctgcaggaggagctgggatacgaaggcgtctacgtgtgcggtgattcgcaccctcagctgggcgacgagcaatcgcacgcctggttcgaggtgggtgagttcctggtggacatcacgcatgatcagttcgacggtaccggcctgcagggttgggtttttgaccggggaagcgaatggcatgccctgttcagcgaccgagatccccggcccggcgcctgtatgcctgaaaactggccttgctatccccatgatggctatagcgccgccctggcagagtacaacaagggtcgttag

SEQ ID NO: 367943 - DNA, 804 bp, Pseudomonas aeruginosa
atggccgagatagacgcattcgagcggcgcaagctcgagaaactactgcggatgggcgagggttacgtcctggacttctccgatcgcacttttgccgagttctttatccattaccggatcgacattgacgcggaacagttccggactgggggagtgtcgaaggctaagcggatgcgggtcttctgggcgatttcgcctaaccatgtggtcggtaaggtgctagaagggttgattgcctatggcgtcgaaaatgattgcctgggcgatagcaacccgcagttgatagacgacggccgcaaagtcgcacaacgccttctctcggggcagccagttgcagacttggatgccctgacggctattgctgatgagcgcgacttcgaggtggtggccgaacacgtgcgcgaagccatcgacaagaaccagcccgagggcggcctcgatcgcctgcataccttcgtcaacaagttcgtccggatcatctgcgagccgcatgggatcacggtaagccgggataagcccttgcacagtgtattcggcgaatacgtgaaggccttgcgcgagtgtggccacctggagtccgtcatgaccgaccggatactcagatcctcaatctcggtgctcgaggctttcaatgacgtcaggaacaacaagagcctggcccacgataatcccatcctgaactacgacgaggcgcttctggtgtttaaccacgtcgcgtcgtctatccggttcattaagtcgcttgaggccaggatcaaagccgagagtctgcgtcgggctgcaatcgacggctcgcctttctag

SEQ ID NO: 367944 - DNA, 1050 bp, Pseudomonas aeruginosa
atgggtgcaaccgttaccactggcaaactggccgccgcgttccgcgacgcatgcgacgttccgttctacctgctgttcgaggagacctacgagaagaacgtgattccccacacgcctcgctggagctgctacgcgatggggcgaatccaggatgtcgtggcagcggctttccgcgctggcgcggcctgcgagggtggctctctccagggttctggtgggcgtatcatctcgccgacgggctatatcggcggctggctgaaggaactggcaaatccggttgaattcagagacatgtcgatcactctggaggtgagcgacagcttctatgcgaccgtaccgagcgagaagctcgagcctgctgtggcagcgctggtcggcattggtcgaagtgaggtcgccgatgccctgcgtgcgggggagtccattgaactatcactgcatgctgaagctgacctctttgccgcactgggcagggttgtctcgccgtggcgcttaatcggctctggcagaaccccactgcatcgcactcgacgccaggacctcggctacgaccctgcaaagaccaaggcattcgatctgccctcccccaaggtattcaaaatcagcgaccgcgacgattcgttgctgatgctgggggacgataactgctggcgctgcgagggatggcaatactcggtcatttccgagtacgtcagggcttatggggaagttgagttgcgcgaacctggcacctaccgttcgcgtatcaaggcctttcgcaacgcgctagcttcggcaccggtgctaccgggtcagctggcccgcatcatcatagatacctctgttgagctacctggctaccagaagagcagcatcgagcgagcggccgcagcttttcagaacacccgtagcgaaggggagatccggctcgagatcgaactgccgatgaacgataagcagctctggctggcagctcagctgcccaaggaatgcaccagctgggagttcaatgcttcggtacccacgctgaagccggcaccggttgagcagatgagccttctggcgggctga

SEQ ID NO: 367945 - DNA, 432 bp, Pseudomonas aeruginosa
atgagcaatgatgacggtgagacgctcgatctagaaagtcgacgatcagtaatcgcctatgccttgtactgcctgagcatctctctgctagtgcagttgataggctccctggtcacctggccgtatgacctgtacctgatctacgcctacctgccgctaacgacagcattgctcatgcccttgctggcatacagtgtgcgtttgagcaggcctgctgaccttgccaggattgctatagcagtcctgagccagactgttttcatcagctcgatcgccaccactacttcagcaaccgactcgatagcaggcggtggcgacgcgaagctcatcatcagtgttgcactgacgattgccctgtcagcctggctcagtgcctatgtggtgaggcgggggtactggccgcacttcagaatgagccgcccgcggaactag

SEQ ID NO: 367946 - DNA, 1107 bp, Pseudomonas aeruginosa
atgcaaacccagcagcagtcgtttcaagccaccgcccccctcgtcgccggcgacccaacagccgtttctttctgccccacccttctcgacaccagctttagcctgcacaaggcacctgaagtcacgtcccatgcactactgacgggcgtaaccagtgcaaaccgcgctgcagtggtggtcaagctgctagaactcatcgaacgcgataatccaaagctggtgtgggtgaccgacgatggcagccttgcgggaatcgccgcggcctctggcatgccctatctcaacctggaccctgctggcgcaggcttctgcctaaaccccttctggctcccactggaccgccgcgcaggggtgcggtatcgcccgagcccagacgagacgctcagcatggccatggtggtagcgctgatgctcgatgaggtgggctaccagcctgagcctgagcacgtgagcgcactggtgccgcttctgttcaaggccgtgaaccgctcctactcggtgaatcacgctggcaccccgggcaaagaagtcaccttcaccgacttcgttaccaacctcaattcgatccaggtcagcggcctcgagggtgaggcgatcggcaagctcctcgcgccattccatggggaaggacagtacgcagggcttttcgatggtgaattctgcttgccaggtactgatgaggtagcaatcttcggtacccagctcctgaccgggactccagcctttgcgccggcgctgagtgcgctgcagctgcacagttgcaaacgcatcatgtacgagcttccgcgactggagacgaaagccatggtgatcaaccatgattggtcagtgcatcggtcgcgctacttcggccagatgcttgaggctctgtatcgtgagtaccgccggtacaacgcgagttacatcctgcttaccgaccatctcaagtcgctgcggtcggcgatcgacagctgggatttgaagttcacggaagacagcatcatggaaaacctctgccaccacctggacgtcgtggcgcggaacggtcagacagtgctgagctatagcgcgatggatgactcaccagctgccaaggaagcaggattagtgtctgcaggctcgctgtga

SEQ ID NO: 367947 - DNA, 963 bp, Pseudomonas aeruginosa
atggcaaagcacttccgcctgaggccaggcgcactccaaccaggcgtgtactaccagggcctcgactttcgccaccacgttgtctgccaggaggcctcgccgacctgcagcgacccgatcatcgccccctgtgtgggtgacgccctcgcctatggccccctgttcgcatacctcttccgtcgcttcggcaaccccaatgcgggctgggatgactacaaggagctggccaagtacatcctgactaccccgcacccggaaatgctgctgcaggttgtcccgtactcaggtgactggacgtgcatcacctttactttcttggtcacagaggaggctgcttacgcgatccgcgaatacgaccgacgcgatcaggaagcgtggaagaccagagcttacgactgggtggagaagcaaggcttaccagattggatggatgagtggatcaagctctacgctcaggagctgcgccaagtattcgacactgctgccaccgctgaagccgactggcgtgaggcgatcaagttgtgtctcccgctggggaatgagggtgatcccggctatgagttaagccggaaggcctgggccttccgtgaggcaatgtttcagggctacagcgaggtggaaccgcggcccgacaacgtgaagcgcagcgcgcagccggaagagtgggccgatggcgacccgctgaagccctttgccgaggcggcaatcaccgcactcaaggatcttctgcggcctgtccgtgtgcgtgatgcggctatcaacgtgctaggtctggtcgaatgccctcgaggagtcgtgaaggaggctcatgtttcgggctaccccgcgggagatcttggcaacgcagcaccagcagagttcgccgagctgcatcgactcattctccagctcgggaaaggaaatgctcgtaagggcatcgccagggccaaggagctgctgcacgactcaaccatggcgcgctag

SEQ ID NO: 367948 - DNA, 507 bp, Pseudomonas aeruginosa
atgggcgagatccttagggcgataaggctgaagaagaatctgacgcttcaggagctgacgcgagacctacagatcgacaacagttcactctctcgcgttgagcgtggccagcaaggtctaccccaagacacgctggctgggctccttgagtactacggactctctctgcccaagttgcttatccaggccgccggtttgactgaagacgaccttgctaaagcccgatcgaaaaccaaggtgaggcacgaggaaatacttgtcgtctcagatcagacgctacctgaacctgaggatggctggcttgcacacaaccaggtgctgtacagccggcaatatgcctctcaacagatgcttctctgcaggacgtcgtttgagaatcccgagttcgaattgatctatatgggccgaactctcgccggcttgtcatctctgcacgcagccaaattctcagctgccaactttgcccggcgcgtgctgcgcgaagaaagccagaagatcgtcgggtag

SEQ ID NO: 367949 - DNA, 699 bp, Pseudomonas aeruginosa
atgaacgtatcgcactaccgccgcactccacctatccacgtctactcgcaggttgccgagatgaccgcggcctatgtgagtgacctttgtcttgtcccggtaccgcccagcaatcacctctggccgctctacagctttgccctcagggcagagctggagatctacatggatcggatggggactgctagcccggcccatactggcctgatcgtagctgatgaccatacccgcccgggcaaggtcgccggcttcatcctgcacatgccggtggtgggtgctcctgacgcatcgggcctggcctacatcgccgtggatgccgcctaccggcgccggggggtggctcggcagatgatcgagcagcttcttagcgaatacccccacgtcgagttgagttgcccggtcgacaaggtggccatctacgagcggcttggtttcaaggtcattggcgtgcgcgacaaccaagtgcgcctgaacacccgcgactacaccgccgatggccgcatcggcaccatcgacgtctcgccgatattcaactccccagaggcaatactgatccggcatcagcagctgcagaagtacggacgcaaagcgatggaagatgctgccaaggccatccagcgcctttacgaccagggcgttttcaaagctgagcagctggctggacagcgcgctgcgcaggcggaaacgtcccgtgtctga

SEQ ID NO: 367950 - DNA, 336 bp, Pseudomonas aeruginosa
atgcaacccaccccgcacctactcacagccgaagaatttgccgctatcgcagtggctcatcccctgaccaaccatggccgccgctggcaggtttgctacggcccagctgggtaccacgcattctccgacgagcttaccgccgaggaggcgattgcggacgtgcatgaggcgctggtgaacaacgctgttgcgcggcacatcttctgttcggatgggatatttgacgctaccccccaacttccacctgacaatgttctggcccaatacccgcgagtcattgatcgctttcctgagctgggtgcccggccaggcctccagggcacgctcagcttctga

SEQ ID NO: 367951 - DNA, 231 bp, Pseudomonas aeruginosa
atgaccatatccaatctgatcttccaggcgaacgacactgtcgtcagcagcggaacaccgttctggatgactgtccgctccgtcaaccagtcgaccggccgctgcagctgctacttcggcgccagcaacaactacgccggcagcttcagccagaacgagctggagttctacggcggtaccgagctgatcggatcggcaagttccgcggcgctgctcgagcagcgcgcttaa

SEQ ID NO: 367952 - DNA, 651 bp, Pseudomonas aeruginosa
atgacccgcaacaccaacaatcccaacggcttggaactgaaccaggcgatcaaccgctactccagccatgaacccgagcgcatcgcctacgagcgtatgcagcaagcaggcttcaaagtcgctgctgttctgatggacatgccgctaggcaccatggcggatatcggccggggagaaaccctgtttgtagctccctgggaagggaaaatggacgtttttacctcgcccgactgggaggacaactgccggtgccaggacgtcaatttctttcacctcaacaactacgagggcctcagcgcagtcgacctcgacctgcaccgtcttcagttggaatcctggctgcggaatccagtcttcaagcaatgcttgccggcggacaatgccttcaaggttgtcgccgaactcgaagagtggtggcaggtagagaagcagaagcgttctgagaccgtaacgccggcactcaatcgctatgagcacgacaacgcaaagcgcctcattgagggatacatggtcccatcccgcgcccacccccaggagtcgcggcagcagcaattcgagcgggccaagagtgagctgattgcacagcttgagcgccagctcgaacaggtgaaaagcttcagctacggcgatatgcagaagaaggtcagctaa

SEQ ID NO: 367953 - DNA, 786 bp, Pseudomonas aeruginosa
atgaccgaagctgctaaaccccgccgtctacccgcttctatgctgttgccgctgatatctggggcatttggcctagtctattgggcgggtggatttcccgactcgggaatcgtactgcttgcttgctccatcctgccggtgtgcggcctgtacatgtggctgctgagtctgcacgaacgctccgagatggagcaggcctataacagcattgatgtctacaggcatggtatccggctcacggcaaaaagcgctcagcagatccacagtcagcgcttcgtcgacaggggtgtggcactctacgaaacgttgttcagagccgagagcggcgcatggttcctcacccagattgagcgcgcattaccccgagggggttgcagagttgcagacgttcggttgctcagccccaagcaagcccgcaagttcttagagtccactccggccatctacgagacctggtttggaaacgactctcctgatcagccccaagatgaggaatcgaatccgcgcatggtttcctccctgtaccccggcagcaccatccggactttcgaggatggcaatgaacattggaaatgctacgcctaccctctcaagctgatcaccatccaagcgcagggcaccagcgagtccactcgggaatcgttgatcaagcaccttgaggaagctctggcacaagtaaaagctggcggttcgagtggcgtggaatacgatgatgacgttggctaccggttcgaggccgtggaaaacatggagctgaccatcttccccggaacatcgcacaagtag

SEQ ID NO: 367954 - DNA, 219 bp, Pseudomonas aeruginosa
atgaccaagctcacagaatcccagaagctggctcttcagtacctgcaaaacaagagcccggcctacgtctctccgaccgaggtgggccgtgaagtaggcaaacagctaggcaaggcaggtcggcatagcgcattcggaacgcctctgtgcatgaagctggtcaatgccgggctggcggtccggaatgaagctgggcactacgcagcggccaccaagtag

SEQ ID NO: 367955 - DNA, 174 bp, Pseudomonas aeruginosa
atggcgaacgtaacgattcaggatatccagggcatggcgcgtgaaggctcgtttgaggactcggacgcagtcttgcgctggtttgagcagctgtctgcagagggcaagcgtatggtcgccctggctatggacgtctcctacgaccgcggctatgaagacggacaagacgactag

SEQ ID NO: 367956 - DNA, 1074 bp, Pseudomonas aeruginosa
atgcgcggtgtagccgcactgctggttgtctggatgcacacctcagaagaattcgtgaagcgggcaaccgcctctttccaggacgatctgttcaacatcgcatcgctgctggactttggccggctcggcgtcgtcctgttcttcgccatcagcgggttcgtgatcccggccagcttgaacggtgatcgtggtaccgcctgcaggcagttcgtgattaagcgcttctttcggctgttcccgctgtactggctgtcgatccccattgggctatgggcctgctgggcgatctgggggaaggaggcgagcttggcgacaatcctgtggaacctgaccatggttcaggaagccgccggctatcgatcgatcatcgggctctactggacgctccaaaccgagctggtcttctatggattgtgcgtgcttcttttcctcactggcctgctgagatccgcgtttgccctagcgggcctggttctgctcttcagtgcaatccatctcctgccgtggtgcctagggatgctaggcatcacgctgccagtaactgttagcccaagcctggccttcctgagcctgcacctgggagtcatgtgctggggtgcgcttttccgcatgtggtacgacgataggaagcttcacgtcttggcgaaggctgcggtagtgggctatgtgggctgctgggctctgctggcctgctacgcgctccgctatcactacctggtgggcgagaactacccattgatgcgctttgtcatgccctacttccttggagtcttcctgtttgccctgctggcaagcgtcgtgcggattcgtatggccttcctggtctggctggggacaatcagctattcgctctatctgctccatcccatagcaatgaacctcctcctctggtttatagacacaggagcttggtgggcccagaagtggagccttggcgcatacatgctctgcacggtaggcctgtcgatagtgctgtccgccgcgacttaccggctggtagagaagccaacgatgcggatcggggcagcgttggcgacacgccgggccgctggtgcactgcccaaggcggcgtag

SEQ ID NO: 367957 - DNA, 738 bp, Pseudomonas aeruginosa
atgaaaaacgaccaggcgcgacgcctgactggcgtagtgcgcagcttcatgcccgagaagggcttcggcttcatccaggggaatgaccagcgcgactacttcgtacatgtctccagtgttgagggcggcatgcttgtcgacggccagtctgtcgagtttgatggccagccaagtcctaagggttaccgggcgctcaaggttgtgccgggggatctcccccctccgcctggctacgcctacgagtcaccaaagcgtcttatctggacccaagacagtgaggcccgagggtttgaaaccattttcgtgctgggcacagcgtgggctgaatcgaacaacccgaacgaggcccgtgagatgctcaagaagcactgcctcgataacggcggcaacgcggtgctcaacgtcaatcttcacaagtacagtcagaacgaaggctgctcaaactaccggttcacggtccatcgctactcaggaacgatcgccagtgtgcagaaggttgtaaccacaacggatcaagactggatcgccagatcggccgcttggcatcaggaagtcgaggcgattcttgaagccaacaaggctactggcaagggcggtgatcagggcacaactcgcttggtcgaaccaggggccctttctcacggactcaagctgacgctcagttggacgctggtgctgctgagaattctcgggctaagccttgtgcacctcgcccgtttcatggggcggcttcgctaa

SEQ ID NO: 367958 - DNA, 345 bp, Pseudomonas aeruginosa
atggtctttcctggggccctgattggggtgagcttcgttctaagcgcgatcagcatcgttcgctttggcaagccctaccaagacgccatcggtaccggcttgttctttttcgggctgattgttctgtccgttgcggccactgtcctgctggcctggctgttggcgccggtgtggggctggtattacctgcgcaagatcgagtcggactacggcccgaatacccgtgcccgggtttgggaatggttcggcacagctaatgagcaggacgtgggatcacttaaaatcccgcagatcgccgaggaatgtggcgagagcatccgccggcattcagaaacaccaacttag

SEQ ID NO: 367959 - DNA, 189 bp, Pseudomonas aeruginosa
atggcccaaagccttgatcagtttgttgcagaggttcaagccgacattgaaggcttcgcagctgagtaccgtaagcaacatgaggcgaatcccgagcactatcccctggtgcttggcgatgacaatgctggcctgtggatcgagttctttgtggactacatgacccgcggcaatggtgctgcagagtga

SEQ ID NO: 367960 - DNA, 384 bp, Pseudomonas aeruginosa
atggacgctgaaatcgataccagccattccaccatcgagcgccgccaattcgacaaggtgttgtcgactgtctgtgccggcgtttcagcacgccaggtgggcaccggcggctggcgcctagtcggcccgcttgccccgctcactccgacctcgatcggtcgcttccggactgagcgaaaggccctggagcaacaggtggtgcatgggcttgtccggcttctcggctgggaactgcagggcgaagaacattttcaggcaacccgccgtatccaacggcagctcaacgccatcaaggcagatcttcctaccgccgaacagctgctgattcagcagttggagctggaaggttacagagttgccagtgcaacggacgctccagcgtga

SEQ ID NO: 367961 - DNA, 432 bp, Pseudomonas aeruginosa
atgaatgcccgtgaactgaaggacgccctggtggggaacccgctcgcaatcgagcttggttcaggggtagtcgagctggaagcctacgcagagccaaagatgcgtgcgcatttggttgctgttgagctccagcgtgacgatatcgctgtcttgacggtcgattacagcgaattcgacggttacaaccaggcgtttgaacaggctaactattacgaccgcgacggcaaccctaccctcactgctcgtgaggcgggtcagtaccccgagcgtgaagacctgtacgtcatggcgagcgaggatctcgaacctaagatgctgacgttgatcccgagcagctccctggctctgatcgcagagttcaaaagcagcggtagcggaagctatgtgagatggcttgaagatcagctttgtgcggcgcgaaccgctaactaa

SEQ ID NO: 367962 - DNA, 183 bp, Pseudomonas aeruginosa
atgactgaagcccaatggaaaactgaagaatcccgcctgaaaggtgctgtaactcgcgccaaaaccaaggtgacgaaagtggtgatgctcgccgaaaagattgaggcgaaagctgcccaaaaagcggctgaagcggcgcttcgtgagcacaggttgaacttcttcgagctggtggcccggtag

SEQ ID NO: 367963 - DNA, 291 bp, Pseudomonas aeruginosa
atggagcagatgacccttgatggtgagcctagcgtgcagcagctgaaccttcgatgcttccaggtcgacgaccatgactattacgcggccaccgatgaggcggcagcgcgccagctgcattgtgacctgaatgatctcgatgcaacggacattgactactgccgtgaagtggtaggcgatctactcgataagccctggcaggacgaggacaatcctggtgttgtggccggcaccctccgccagtggcttgccgaagccacagcgcccggctggctgtccggtaccgagtag

SEQ ID NO: 367964 - DNA, 498 bp, Pseudomonas aeruginosa
atgccccagaatgtattcgaactggacaagcaaccactgacaaccgagcagctcgagcacgtggaaattgccagtcagcgggatgttggcgagtggctttcctaccccgccattccaatcgtgccctgggtaacgttctgttatctgccgattgatgatgtgatgaataaagcgctggtatcgctcctcatctccttcgccgtccttatcccggtggtttgccggagcatcgagcgtgcgtctcgccgagatgatctggttgaggccaccgatgaggatctggtccttcttgcggattgcatcagtgaagccaaagagcatcgttcgccggcggtagatggctacctaaccgcggttcgagatatggggcgcgagctgagactgggtgagcttctcatgctgagagatgccactacggactacgttgagaaaaccaagcatgaggcggccttatcaggcgcccgtgcagttctctatggcataaaagaggaatcgtga

SEQ ID NO: 367965 - DNA, 216 bp, Pseudomonas aeruginosa
atggctgcaacaccgtttgtccccagcaagatccgctggtacccgattgacgttcacggtctgcctccaaaggaactgcgtaccactgaacagggcctggatcgaatcttcctggtaaagaccgatgaaggactcaaagcctcgcggatgtttgacgacggctcgggtttctctgatctgggtgacggttccgcaactgactgggcgtttgattga

SEQ ID NO: 367966 - DNA, 204 bp, Pseudomonas aeruginosa
atgcccctcactatcgaagaccagcataaatctcagccatcaccgcgctggacttttgcctgtacccgctgcgagtggactggcaacaatccagattcaagcggccttggccattacgcagactgccccgactgtggcaattcctgcaccaccgacgaaccgagcttcgaaccggccgccggccagctcgacggcatccagtga

SEQ ID NO: 367967 - DNA, 735 bp, Pseudomonas aeruginosa
atgagcaatccgctgatgagcggcagcgcccacgagaaggattctgcctggaaacaggcagagggctacgagaaagaagaacgcccaatgcgttcggtgcgcaagatcgtcgttaagggctctgtggacgtagtcttctttcggacacccaatgctcacctggtcgttgccggtgagaaccaggacgctatccgcagtgtccagacacgcttcgatggggacaaattagtcatcgagcagcaaggcgtctccatcaacgtttccggtggcagcatcaacgtttccgggtcaggcaacgtcgtaatcacaggtagtggcggccgattcagcataagcgggagaggcaatagcatcagcgtcggctccctacgcgctatggtcggcatcgctctacctgaagcacccagtatccgcatcaaaggcagcagcgacgccaccctatatgacctacggcagcctgcgttgaatctcggaatccaaggctctggcgacatcgaggccttcggccaggtcgaacatctcgatgtgcaggttgacggatcgggtgatgttgacgtcagcgagctggttactgtatccgcggaactgtcgatatcgggatctggggacatcgacgcacatgtcactcggtcagtaaaagcccgagtcgcaggctccggggacatcgtagtgcgtggcaatccgccgatccgagaccattcggtcgcaggctcagggcatatcaagttcaagtaa

SEQ ID NO: 367968 - DNA, 363 bp, Pseudomonas aeruginosa
atggctaccaaaaccaccggggcagagctgaaggccttctacaacgacgatgcctactggcagaagtccgccgcaaacagcagcgacgacatttggcatgatgaggtggtacttgaggtgaacggcgtcgagcagccagacgacttctcgatcaatgaagacctcaaggatgaagaccaggtgaagatcgtgtacggccaggtgctgtccaaccgcgacgatttcgctgatcgcagctttgagtcgttcttcaaggcctggcgcaagcagcagaacaccatctacctggctgtagctgtgccgaaggataaagttgaagctgtgcgggcggcgatccttgctgctggcggcagcatcaagtaa

SEQ ID NO: 367969 - DNA, 693 bp, Pseudomonas aeruginosa
atgcctttcaccacggactaccaggccaaagcattgacccgccttgctgagatcggcgtccagatcctgcccaccggacagttcgccttcaccgacgtcgagaccgcctcccatagctacgtccaccactcgacggtgcctgcggcccttgctgcctacgcagcggtcaacaccacgttcgcggccgggcgtttccccgggctgacgctgatcgacatcctgcacaaagtgccctgcatggatgccgaggagttcaccgcgctggcgctggcctgcggcgccgaagccccaacctttgcaagctccgcacagcgcctgcaggttttcgggcagacgctgatatcgatcctggatacctaccagctccacggatgcttcgagcgggtaaaaccctacgggagcgagggactgcactactccgtgcgccccatcggctttgattggggtggagactgggaagttgtagatgagcgcatgaaggccatgcgcaagtgctaccggtcgatgacacccctgcagcaggtcatgacattgactgtcctgcacctctaccgaccggagaaggaccgccacttcctggtgggcggctgccccacgaagatcctcgcggccgacgccatgcgaatcctgcagtcggacggccaggctgcggctgactggggccggctggtctcgcactacgcgggctggtag

SEQ ID NO: 367970 - DNA, 402 bp, Pseudomonas aeruginosa
atgatcgaatctcccttcgcgaagtaccgttcgatcctggtggacggcgactattcggctgcgggcttcctacagtccttcgccatgtcgatgtacgccggcgccgccttcccgctggatgccagtggtctacggaacctggatgacgcgcacatggtggccttccaggagatggcagcctggttccgccggcacggggagagtgatcccgactttgttgatgcctgtaaggccatcaaggcgaatcgggcagcctacgcgcgccgcatcaaatcgcacctggatgatctgctggccagcgatcccgacagctatgaaggcggccgcggcgaacacgcatcgtccgtgcgcttctatcagcgagagcatgagaccaacatcgctcgccggtggatcgactga

SEQ ID NO: 367971 - DNA, 576 bp, Pseudomonas aeruginosa
atgattcggccatggatacagcgcgcaaaagacgcctcaagcagcctgcataacggggaaggcatctctgacgcctataccgccctgctgactgtcatgtggagggaagactggactggcgcctgccacgactcctccgcggtgctctacatgcttctaagcgagttggggttctcccctgccctagtaactggcgaggtcaaagcagcggccggcatctttgaccattcctgggttgaggtggatgggaagatctacgatgtcgcagttgggttcccgggtgaggacggccactacgtcgggccgtctgtgtttgcatccctgaacctggacaccggcaagccaaccgaactgaccttcggggtaaggtcccctggcgggattgacgatatcggccgcttcgtcgcgggtgcgaccctgaatgagtactccgagatccaacatcctcacgtctcgatctgggcccttaccccagttattgggcgtctgtgcggactttctctctccagcgaggacctgcgctggaaatacggctcggtgacacgcgagttgcgtgggcaggatgcgccgcaatga

SEQ ID NO: 367972 - DNA, 774 bp, Pseudomonas aeruginosa
atgggtgagctcaacctctcgcgtggcgaacacgacgcgatcaacgcaattaacacagacgagctagaccgactgctagaggaatgcctgcaggacggccggtcgagcaggctgcaccagctgggcctgtcccgctgtggcccgtatgtttctgctcagctgcgcgagtttgagagggccctgggtgacttcgccctggcaaaatccgccaagaaggtctccgagactgaggatcgtgcccggagagcggctagcaatctggagcaagccgtcctgcagatgaagcatcgctccgagaccgagcaaaaagaagacctgctcttccacgtcgacgacaacgtcctccccccgagttacctgacagagcaactggccgtagacgtgagctaccggtggcgccgatcggctgaatctgcatgggccttcggctatctgaccgtcacccatgacgccaagcagaagcccgacttctcgcagctcgctgcaaaacggaaaccgagcgccgctaagcgagaggacgatcgccagaccaagctgttccgggagtgggagcacctggtgaggctcgtgcttcactcgctaaggagtacttccgcaatggaggtgacggcgcctctatccccaggacattcaaggccaaggtggacccccacacccaatacctcaacaactacagtgccagtttttgggaagtccagccgggcgctggcaaggaaggacaatgattcggccatggatacagcgcgcaaaagacgcctcaagcagcctgcataa

SEQ ID NO: 367973 - DNA, 1068 bp, Pseudomonas aeruginosa
atgggtggtaatgctctgtcctcatctggcgcaacacgttgttcgcgtgatgtggccatgcaggttcttgaagacttccaaacccgcttcgctcggatcaccgcccaccttggcagtgcagctcgcgttgtgccgatcgcagcgtatcgccagaagcctgatttcggtgacctagatgttctggtggacagtcgggtcttccagtccatgccgccccagtccgtagttgaggcattgagcgatgcctatggggctgcgttgccgtgggtgaagaacggaccagtcctcagcgtggggttgccgctgccgggtgacggcaaatgtctgcaactcgacttgatcagcacacctgcagccgagttcgatttcagtctgggctacttcagctggaatgacatgggcaacctggtggggcgggttgcccacaagatgggactgaagttcgggcatgacggcctgtggttgccaatgcgtgacggtaccaacctgcacgatgagttgctggttacccgtgatttttgctgcgccctgtctttccttggcttcgacgctgatcgctggaaacagggtttcgatagtcttgaggacatttaccaattcgtagccagcggcaagcgttttaaccccgagctgtatccccttgagcatcgcaatcacacggctcgcgtgcgagacaaaaagcgcccggtctacatgggcttcctgcgctggatcgaggagcagccttcgctgcatcgctactcctgggtgcaggacaagtctgcctacctgccggatgtgcttgccgcgttccctgcgcttcagtctgattacgaccgcagcctggctaagctggctcaggccaaggcgatcagagcctgtttcaacggcgaaattgttgcgcaaatcaccgggctgactggtaagtcgctgggagagttcatggcccatttcaagcgtgagaaggctgaaagcatggccaacttgccgctgctgtcctcagagcggctacgtgagttgatcagcgtggagttcaagcagtacgcaaacctcaacccgcaaccgtcagccacttgcgagagcaactaa

SEQ ID NO: 367974 - DNA, 360 bp, Pseudomonas aeruginosa
atgtatgaggcacctactgaggcagtgttgagaggggcatcgccaccgtatccggtcaccattgagctggtgtccggactccaggcccatggaatcaaggtggtcgcagtagaacaccaccatacctcctcgagtgatcctgagcctgaccttgtatggctcagtcgcgatgagtcggactcccattgtgagggtgagtacctgtccgtaacaccggttggctcgggccggcaagaattcgaaattgagttgcgcagcgctaatcgttttggcggtcacccgacggtatggagcgagtggctttcgcccggcgacgccctggtgctcgatgcaattctgagcacctacttcactgactaa

SEQ ID NO: 367975 - DNA, 339 bp, Pseudomonas aeruginosa
atggggctgcgcgcctcgctactcgtaaggcgcggacgcaaggatcatcacgcaacgagcatcacgccctgctttatcgtcagcaacccggggtatggcaagggtcacaccacctttgtgacaacgacagtgggtgtcgacgccgccttcacagccgcggtagagcacttctgccgcatccatgcactgagctcagaggaaaaggcgacaatcctatcgctgcagcctagccgggatgtcttctacgacaaactgcgctttggcctgttgcaacgtggaatcccaatctccgagcaagaagtgaagaccaaactgactggaatgagcgtcgcgagctag

SEQ ID NO: 367976 - DNA, 258 bp, Pseudomonas aeruginosa
atgccactttcccttaccagcgttgtttgccctggctgtgccgaaaaactgcccaagcgcaatcgcggttgcacgcactgcggctacgaagatcccgaacgcgggaagatcctaccgatcggcgagctcgctaagctgaccagcttccccgagaaaggcggtgcccgcttcaacgacgtcagcccgaagttcatcgcggccgtcattgaggcgagccagaacgattcggcccggcttcaccaagagatcatgggctaa

SEQ ID NO: 367977 - DNA, 237 bp, Pseudomonas aeruginosa
atgccggcacagaacgtgaccctgctactccaggtagtagagcggtttaccctcgctgcccttgcccctatcgaagaggtgacgatggatcgccgcgagcacgagcctgacttcatgctcgaggaccgcgccaagcgtgtctacctcgctgaagtcgagacgaagatcaaacacatgccggtcatgcgcaagaagcttgccggccgcgactggtgcattgactgcactctcgtttaa

SEQ ID NO: 367978 - DNA, 612 bp, Pseudomonas aeruginosa
atgacccctactcccctgcaacaagcgatcgaacgcgccaaagcaaccggcgacaaggaaatgctggcgctgctccagcgtgtcgaccaggactattaccctggctctgccgagatcaaccagctggtgggcaacctgcataactctggctgggccgccgctgacaagcagatcggcatcatcgaggccgagctgctcgaaacccgtgacgatggcgtcaacgctcgtaacgtgtacgaactgcgcgacggcataggcgatctgctgttcaccgtgctcggcatggcccatcgcaccggtatcagcgcttccagcgactacaagcatgtggttgccagtcagtacagcaagttcgaccccaccgaggaagatgcgctaaagacccaagccaagtacgaggccctgggcatggtcacccgctacgagcggcgccagatccccggctccgaccagtgggtctatgtcaccttctccgcgaaggatcagatcgatggtgagggccggaagtgtggcgaaggcaagtggctgaagtcctatcgcttcgcgaatccagtcttcgaggcactgccatcggcagtagctgccaagctgcccgaaccggaacccgcttga

SEQ ID NO: 367979 - DNA, 144 bp, Pseudomonas aeruginosa
atgctcagttgggacagcgaagactccaaagaccaggccgaccaagaagaagacttcctgctcagccccaaagaccaaggcgaagcgccgaaggcctgcccgatcaacccagacgacctcgaaggctgcctagcctgccagtaa

SEQ ID NO: 367980 - DNA, 1251 bp, Pseudomonas aeruginosa
atgaccctttcctgggacgatatggacggttcggacgagatcgaacccagcaccagcactgctatggcagcagtagccacccacggcagcaccagcatcgaagcagacgcctctgcagcagctgctagctctcgcgaaatcaacgccgatgacaccgacgccgtggcccgggccaaagccgccctgaacgacttggatatccaagaaggcctggacgacctggaaggcaccagcgcccgcgtgcacgtcggggacaagcagatgatcaacgcccgggccgacctcaaccagctggtgcccttcaagtacgactgggcctggcaaaagtacctggacggctgtgctaaccactggatgccgcaggaagtgaacatgactgcggacatcgccacttggaagagcccggatgggctgtccgaagacgagcgccgcatcgtcaagcgctccctgggctttttctctacggctgacagcctggtggccaacaacctggtgctggccgtgtaccgcctgatcaccaaccccgagtgccgccagtacatcctgcgccaggccttcgaggaagcgatccatacccacgcctaccagtactgcatcgagtccctgggcatggatgagggtgagatcttcaacatgtaccacgaggtgccgacggtcgctaagaaggccagctggggcctgaagtacacccgctcgatctccgacccgcagttccagaccggcaccccggaaaccgatcgcctgttcctgaagaacctgatcgcctactactgcgtgctcgagggcatcttcttctattgcggcttcacccagatcctctcgctcggccggcgcaacaagatgaccggcgtggccgagcagttccagtacatcctgcgcgacgagtcgatgcacctgaacttcggcatcgacatgatcaaccagatcaagatcgagaacccgcatctgtgggacgcgcagatgaaggacgaggcgacccagatgatcctgcagggcgcccagctggaaatggagtacgcccgggacaccatgccccgcggcgtgctgggcatgaacgcggtgatgatggaggactacttgaagttcatcgccaaccgccggctggtgcagatcggcctgaaggaagagtacccgggcaccaacaacccgttcccgtggatgagcgagatcatggacctcaagaaggaaaagaatttcttcgaagtacgtgtgatcgactaccaggttggcggcgcgctggcctgggactga

SEQ ID NO: 367981 - DNA, 267 bp, Pseudomonas aeruginosa
atggcctcgcgtagccagagaatgccggttattggtagctgcccagatcaatgctcgggcgggaaaccagatcgtcaaatgaacatgacccccggcatcctggaacagatcgatggggacgccagggccgagctccaggccagcggacgggggaagcgctgcacctattgcggcttggtttacctgtcggccagctcaggggcgattcgtctgggcttttacaacagcggggtgctgggcgatggctggaagccgcttcggcattga

SEQ ID NO: 367982 - DNA, 1035 bp, Pseudomonas aeruginosa
atgaccaacgcagaacgaaacatcgaatccctcattgcggtcgccaaacgcctgcatgcatcaccccacactggctccgagcgagcctgcattgttcgcctagaggatggtacggagcgtctggctgtcaccaagctggtgaataccaagcagcacggcacagagcataatggcgccagcttctacagggtgtccttcaagttcgcaggtgacagcgaggcggactacagccaggagctggatgtagtgtggtgcatcgtagaccacaaggacgccaacattgttttcggccccactgagggcatccgggttagccagaagggaatcggcattggctcgtaccttcttgcacaggtaatccgactggtccagcaggctgagctacgcggaaactaccaggtgcactcggtacagctgccattgccagcacaaggggcggtcgcagacgacgacgtcaaagcgaacaacgcgcgcatcgaagcattcctgacacgcgcaggcttctacgtttcgccggccggcggcgccgtaacagttggggttcgccgccagaaggatctgaaaacctggtggaaccaagagaaggtcaaatttctggggttccctcagttcgtagagttggccagccgttggcaggcagagaaggacctggccgaggaaagacttcgactctctcagcaggcaaacaaagccctgattcgacaagtagcgactctgaacaacatcattcaagaggctaccttggagcggacgcagatcgatgatcagcacctgcgtactgtggatcagttgacccaaagaatctccaacctggagcaggaagctcagctatgcgctgaacaagctatagagccagctgccgaccaggcacccgccgcgcccgtagccagtgccccaatgatgcgagccggctccaagaacgtaacgatcggactcacccctgctttgatgcgactactgtgggcgggactgggtgttgctggtgctggactactgatctctgccgcgacgatgatactgcccagcgtgcgataa

SEQ ID NO: 367983 - DNA, 216 bp, Pseudomonas aeruginosa
atgagcatcgataacgccgagttagagggctttgagctggcttatagcgtccaaatcgacagcagccagctgcttgaactgatggtcgacgaaattgatacgggggactgcttttggcagctcgcgaattccagcgggcagatcctagaccgctccgaacgatacagtgaccaggcgcgctgcctgcgtgacggtttgaacaaagcgttgaagtag

SEQ ID NO: 367984 - DNA, 189 bp, Pseudomonas aeruginosa
atgagcaactgcatgaagcaggaactccagcagcagctgacggaagctcagcaggaactgagtaactgggagcaccaggggcttacccgaaatgatggtagccctgcacaggaccgccggtttgaagagcgtggtgaacgccttcgagatcgtgttgaggagcttactcgccagttggaggcgcaatga

SEQ ID NO: 367985 - DNA, 411 bp, Pseudomonas aeruginosa
gtgcaaatctcctacgcattacactccgccgtgtttcagagctgggaatcctccgaccgctcgactttgatcgtcatgcagatggcgacgtcgcttcagatccagcacctggccccccgttacactggcgaagaggccacgatcatcgacctgtcccccgcagaagctgctgacgttgccgatcgcatcctgctggtgctgggtggtaagcaagtagagaatgcctcgctcaccgatggcggatcgaagcccggactcgttatcgcgtacacgaacgacggcgagcccttccgcgaaggtgtttcgctggcgatcgacaccgggaactggcagaaagacttcagcttttcgatgagtcgaagcactgcgcgagagctggcggccgtcctacaacgtgcccgagttagttga

SEQ ID NO: 367986 - DNA, 945 bp, Pseudomonas aeruginosa
atgaaagcgcgcaccttgagcagctcccttaacgcggaactggacagagcaaaattcctagcactgccagacatcgcggctttcacagcttggctggctgcagaacccccttccctgccagtgcacctcaagctgcgcaggagtcagtttgtcccccaggcgatcgatgtccgtctgactggaattgagcaggtacgtgaccattaccagtggaaaggcacctggccggttgtccagctccagctctcaaccctgagagccgacctgcaggccgcggttcaggctggtgatgatgaggctgcctacctcgccagcgttgcaatcctcgactggggcaacgtacccaaatcgacaagcttcctcgagacgctccggtttgatcgtaagctggtgtcttatctgactacccgggccaggctgctgtcgccagttggcacccagcagctcactgagcttacgaagaccgtcttctacaagttcaactccgggctgaccaaggtgcatgccctgctcgatggccacggctcccccatctacgacgggcgcgttggggcagcgatcgcgatgctgtatcacctctaccggcaatcagacctcgccgccggcccggccgaccaccaggttttcgcctggggccctggtatggaggtgcagcaagctaccgtgctccgccagatccgcaacccccggttgcttggctacgccggcactccgcaactgcttgggcaccagagtccgcacctatgggcaaggcgtcagctgatcctgagctggatcatccgtgaggtactgcagaagagccggctgttcgagggtgataaaactgatctggccggccggtgccatgcatttgaggcgggcatgttcatgcttggctacgacctgagggcgctggtgcccggcggctgggcagtgcctaacccggtgagaaagggcaaagtctag

SEQ ID NO: 367987 - DNA, 735 bp, Pseudomonas aeruginosa
atgcatttccggatcgcgcttgccctctttgttcttggtcgaactcggcgcattgatcagcgtggcatcgacgatggtgccttggcgcagcgacaggccacggtcacccaggtagccattgatcacggccaggatgccagcagccagttcgtgtttctccagcaggcgacggaagttgaggatggtggtctcgtcagggatacgctccaggctcagtcccgcaaactggcgcaagatggtggtctcgtacagcgcctcctccatcgctggatcgctataaccgaaccagttttgcatcagatgaacccgcagcatcgccatcaacgggtacgccggacggccgccttcacccttggggtaatgcggctcgatcaaggcaatcaaccccttccacggcaccacccgatccatctcgatcagaaacaactctttgcgggtctgtttgcgcttgccggcgtactcggcgtcggcgaaggtcatctgcttcatcggaaaactcggtgggtggcgttcggctattttgccaaaatcagaaagtctttttcagagtttcccaagatctctttgaacatgctgatcagcgctgcatctgcgcatggtgaccgtcacggtaacgacgcccatattgaaacgctggagtctcttgtgattgccgcctgggctgttatgaccgacgaacaaaaggcggccatgctgaaatccgatgtctgtagcgagctgctgcaggggaactaa

SEQ ID NO: 367988 - DNA, 894 bp, Pseudomonas aeruginosa
atgcacagcgagatccgccatgcggtgcagatccaggagcaactggggctggacgtgctggtgcacggcgaggccgagcgcaacgacatggtcgagtacttcgccgagcaactggacggctacgtcttcacccgcttcggctgggtgcagagctacggctcgcgctgcgtgaagccggcggtgatctatggcgacctgagccgtccgcgggccatgaccgtggagtggatcaggtacgcccagagccttaccgacaaggtgatgaagggcatgctgaccggcccggtgaccatgctgatgtggtccttcccgcgcgaggacgtgtctcgcgaggtgcaggcgcgccagttggccctggcgatccgcgacgaagtagtcgacctggaggccgccggcatcaggatcgtgcagatcgacgaggcggctttccgcgaaggcctgccgctgcgccgcaacgcctggccgcactatctggagtgggccaccgaggccttccgcctgtgcgcctccggagtccgcgacgaaacccagatccatacgcatatgtgctacagcgagttcaacgatgtgatcgagtccatcgccgccatggacgccgacgtgatcaccatcgagacttcgcgttcggacatggagctgctggaggccttcgagcagttcgactacccgaacgagatcggtccgggcgtctacgacatccattcgccgcgcgtgccgagccgggaagagatcgtcgcgttgctgcgcaaggcggcccggcggatacccgccgagcggctctgggtcaacccggactgcggcctgaagacccgcgcctggccggaaaccgaggcagcgctggtgaacatggtcgccgccgcccgcgaactgcgtggcgacctcgcccgcggttga

SEQ ID NO: 367989 - DNA, 159 bp, Pseudomonas aeruginosa
atggtaaaaatccacctaccgctttacgcgccggccaagccgaatgccccgccccctccatctcaccgaaccctgaagacgaccatgcccgagcacgccccgatcctccccgtcatcgccgccgaggtggccgccctcgccccggtttccgcgccctga

SEQ ID NO: 367990 - DNA, 639 bp, Pseudomonas aeruginosa
gtggcgcttcgtcaacatcattgctcgtgccctggtggaactgggacagcgcccggactacatgctgatccagcggcacgtcatcaacatcgacgcgctgtttatcgagtacgcccagcactacttcgccaagaccgagcccaaggcctgggaggtgatcgtccagatcgaggccaagctcaacgagaagaacatcccgcgcaacatgatcgggcgagagaagcgcgtggttgcgctggagcagtatctctcccaggcgcgcaactacgacccggtgctcgacggactgcgctcggcagttcggtacgacaagacctacttcgacaagatcgtcgcgtcattgctgccgttgttggaaaagctaaccagcggcaagatcgcgcagctcctggcaccgaactattccgacctggccgacccgcgcccgatcttcgattggatgcaagtcatcaggaagcgcgccatcgtctatgtgggactggacgcgctgtccgacgccgaggttgccgcagcggtcggcaactccatgttctccgacctggtttcggtcgcgggccatatctacaagcacggaatcgacgatggcctgccagacgcctcggctggcgcgcgcgtaccgatcaacgtccatgcggatga

SEQ ID NO: 367991 - DNA, 393 bp, Pseudomonas aeruginosa
atgaaccagctactgccgcaggaagtcgtcgatcagatcgttcgggaagaacggcatttcagcgctgcgccccaagccttttttgaggcctggaagcgtggtgtcgaaatcgccggcccgcaatggtttggcgatggcgcccgtgaaggtctgaaccaggccaagagcaagtgggatctgcgtcccgacatgctgcggctcaacgacgccctcggcgtcctgagcagcggggaacgcatgttcctgtccgcgatggtcagcttctacaacgcgcgcgagggcggcgccatgctcaagcgctgccacttcaacgggttgtcggacttcgacggcctcgatctgccacgtcgccaggtgatcgccgacctgctgctgaactacagcggttggtga

SEQ ID NO: 367992 - DNA, 192 bp, Pseudomonas aeruginosa; identical to SEQ ID NO: 356066

SEQ ID NO: 367993 - DNA, 1608 bp, Pseudomonas aeruginosa
atgaacccgcaaccttgcacccttcgcggtgcgccccaggccgcgccactgctgtacggcagcgtgtgcagcggcatcgaggccgtgagcctcgcatggcaacccctcggcctcaaagccgcgtggttcgccgagatcgagccgttcccgagcgccgtgctcgcccaccgttacccccatgtgcccaacctgggcgacatgaccgcgatcgcccgtcaggtgcgcgccggcaccgtgccggcgcccgacatcctggtcggcggcacgccgtgccagtcgttcagcgttgccggcgcgcgccaggggttgaacgacccgcgcggcgccttgacccttgcctatgtggagcttgcaaatgccatcgaccaaacccgccaccaagaccgccgcccgccggcaacgctcgtctgggaaaacgtccccggcgtcctcaacgaccgcagcaatgccttcgggcatttcctgggcgcactggccggagaaagccgtgcgctccagccgccaggggaaaaatgggcgcacgctggttgtgtgtctggaccccgccgccgcatcgcctggcgcgtgctcgacgctcaatatttcggtgtcgcccaacgccgcaagcgcgtgtttcttgtggcatgtggtggtgatgacctcgatccctccgaagtactttttgagcgcacaggcctgcgcggggattcttctgcgggccgcgcgccgtggcaagaagctgcccgcgctgctggaccgggtgctgcagcagcaggcggatacgcaggattcgctggactgaaccagccctacggcaaggtcacgacgacgttcggattcagcggcggcattggccccgtcgatgttgcggcatgcctgatggccgcgggtcccaagcacgacatccgcaccgagacgttcatggtgcagtccatcgccggcagcatcgcccacaccctcgacaccgccaacaacggcaagggcagcagcgaggacggtacgggaaagggcgtgccgatcatcgccttcaccgcccagggcagcggcgcggacgccacgatcgacctgacgccgacgctgcgtgccggcgggcatcgcaacagccatgcgaacgcaggcgtcgtgcccgccatcgccttcgcgcagaacaaccgcggcgaagtgcgcttcgagtcgggccatggacaggtgtcttgcaccgtcctgtccaacggcaagccgggctacggtgtgccgatggtggcctgcgttgccctgcggggacggacgcagggtcttgctgccgaactgggcggaagcgttgcggcggcgttgcgtaccagcggcggcggcgcagacaagccccatgtcctggcccccgacttcgaggcacatttccgctacgactggaatgaatccggtgcagcggactggtcgcaatggcgggtgcggcgactgatgcccatggagtgcgagcggctgcagggcatgcccgacgactacacgctgatcccgtatcgcggcaagcctgccgcagacgctccgcgctacaaggcgattggcaactccatggccgtcccgtgcatggcttggctgggcaaccggctggtgcagtgcctgcacaagacggactcgaccgcttcggattga

SEQ ID NO: 367994 - DNA, 750 bp, Pseudomonas aeruginosa; identical to SEQ ID NO: 346003

SEQ ID NO: 367995 - DNA, 330 bp, Pseudomonas aeruginosa
atgtccagcgtgccgatgatcgagccatcgcacgtagtcggcctgccaaaaggccaatgcttcgcgctgctgcagggcggccagctttggaaggttcgcatgccgctgccgctaccagacccggatgaagtgatgccgacggacctgcaacaactggcagggtacatgcgccagagctacagcgaggctacgcagtggtgggagttcaccagttccccggccttgcaggatgcggccttgcccgatgacctgctggatgatgctgctccagccgagcctgctgcggtggccaccgacaccgaccacagtggcgacgaggccgcgccgtga

SEQ ID NO: 367996 - DNA, 330 bp, Pseudomonas aeruginosa
atgttgtgccgtatccgctggcaggccaacgactacggcactgtgcgttggcagctcatggtgatgcaggcttgcacgccgctggatgcagcgcagcgcatccccggcgtgcagccgggggcgcgcttgctgctccacgccgaaggggagaaccaggtgcgcgcggtgctggagtgcatcgacgccatcgaggcgctgggcatcgcgcccgccgctgtctcgcccgcgtactggcgcacgctcgccaaccggctcgctgcacgcctgccgctgcccgaatacaccgccgagcggcacgctgcctggctaaccgggaggacgctgccatga

SEQ ID NO: 367997 - DNA, 588 bp, Pseudomonas aeruginosa; identical to SEQ ID NO: 360199

SEQ ID NO: 367998 - DNA, 210 bp, Pseudomonas aeruginosa; identical to SEQ ID NO: 330047

SEQ ID NO: 367999 - DNA, 1605 bp, Pseudomonas aeruginosa
atgtcgccgatctcctgggacgattcgccgaggcgcttgattcgcttcgaggtgtccgtcctggatctgctcgcggatgttgtccatgccggtgatggtgttgtgcaccacctcgttgcccttgttggcgatggctaccgaacgttccgctaccgccgaggattccgaggcgttcgccgatacctggtcgatcgacaccgccatttcgttgatcgccgccgaggcgccggcgatttcctgcgcctggtgctcggaggcttcggccaggtgcatcgcggtggactgggtttcctgggccgctgcggccacctgcacggcggtctggttgatggtctccaccagttcgcggagctggtcgatggagtagttgatcgagtcggcgatggcgccggtgaagtcctcggtcacggtcgcggccacggtcaggtcgccgtccgcgaggtcggcgatctcgtcgagcagacgcaggatcgcggcctggttgcggtcgttcttctcggcggtctcggccagccggcggttggtctcgcgcaccatcaccaggccgatcaggatgatcgaggccagggccagggcgccgaggacgtaaccggcgaacaggttgatgctacgcccgccggccaggttctcgaagccgtcggccagttgcgaggccttgtccagcagggtctgcgaaacgctgaagatgttgttcgccgcttcccggacctggaacaggtcgggcgaggtctcgaggatctcgtccaccgaaccggagacgaactcgaagagttcggcgatctcgttcaggcgatccaccgcctcggcgttggtcaccttggagatgctcatcgccgcgttgccttcctgcatgcccttcagtacgcggccgaacaggctggcgtcgcggccgaagctgtcggcggcctgcaccgagttctcgtcgccggccagcaccttgttcaccgagccgaggatacgttcggcgagcagcgactggcgctgggcgaccgcgacctggtcggccggggcaccgttctccagcaggatgtcgaccacctcttcgtattccacctgcagctgcgggatggtttcggcgagggtcgaggccacctggtgcagggacagtacggtctgttcgctggcgaggatggagtcggcgttcttgcgcaggccgtcccagtcctgctgcaccacgtccatctgcggcttcaccgcttcggggctgggcggcagggatgtgctctcgtcgccgttgaccaggatgttccagcgtttctcgaagtcgttgcgcgcatccttcaggagcttgaacgcctcgcccttgcccgccgccgcttcggtggcgttcttcgcgatccgctgcgacaggacgcgcagttcgccggcatggccgatgtactgcttgtcatggttcgactgggtgttgaggtaggcaaagttggcgaacagcaacacgatcgagacgatgaggacgatgaacagccccgcgatcaccgagctgctgcgcatgcccgcgaaaagattgcctgcgttgattttcttcatatttggcccccgcccggaccgaccacgattacgatttccatgtcacgacacgggccggcagaccggcccaaccggtga

SEQ ID NO: 368000 - DNA, 669 bp, Pseudomonas aeruginosa
gtggtcatattcgatgacgtcgtcaacgcgatcgacgacgaccatcgcgatggcatctggcgtaccttcttcgaggacggtttgctccacggcaagcaggttatcctcacctcgcacgcagaggagttcctgcaccgcatccagcaggagttgggcgtgcgccgcgccgcggccattaagcgctacaagtttctcccgcatcagggagagcacgaactgcgggtcgacagcgacccgccagcgaagaactatgttcttctggcccagcaggcgttggcggctgacgagaaacgcgaggcactgcgtcaggcccggccggcgctggagagtctgacggaccgcctgtggacgtggctgggtcggcgggcggacggccggatcgacatcaagctgagcgggccccgcgcgccttgggagctgaacaataaatgcaccaagttgcggtcggccgtcgagcgtatcgcggcgcaacatgcgggtgcgccggatgccgtaggggcgttggtccggctgctcaatgtcagcggtacgagtattgaatggggttacctcaatagcggtgtgcacgacgctcagcgcgatcatgagtttgatcgggcgacggtaagaacggtcgtcgaggcggttacggcgttggatgctgctcttgataccctgcagaaccgatga

SEQ ID NO: 368001 - DNA, 552 bp, Pseudomonas aeruginosa
gtggtgacctccgactgggacggcatcatcccggcgttgaacgccaagaagttcgacttcatcgtcgcgtccatgtcgatcaccgacgagcgcaagcaggcagtcgacttcaccgatccctactacaccaacaagctgcagttcgtcgcgccgaagagcgtcgacttcaagaccgacaaggactccctgaagggcaaggtgatcggcgcccagcgcgccaccatcgccggcacctggctggaagacaacatggccgacgtggtcaccatcaagctctacgacacccaggagaacgcctacctcgacctctcctcggggcgcctggacggcgtgctggccgacaagttcgtgcagtacgactggctgaagagcgacgccggcaaggagttcgagttcaagggcgaaccggtgttcgacaacgacaagatcggtatcgccgtgcgcaagggcgacccgctgcgcgagaagctcaacgccgcgctgaaggaaatcgtcgccgacggtacctacaagaagatcaacgacaagtacttccccttcagcatctattga

SEQ ID NO: 368002 - DNA, 201 bp, Pseudomonas aeruginosa
atgaagaactataagaagatcctgctggccgccgctgcaaccctggccttcgccctcgacgccagcgccgccgacaagctgcgcatcggcaccgaaggcgcctacccgcccttcaacggcatcgatgccagcggccaggcggtcggcttcgacctcgacatcggcaaggcgctgtgcgccaagatgaagaccgagtgctag

SEQ ID NO: 368003 - DNA, 531 bp, Pseudomonas aeruginosa; identical to SEQ ID NO: 318746

SEQ ID NO: 368004 - DNA, 180 bp, Pseudomonas aeruginosa
atggcagccaaattccatctgaagaaagcgaaagacggccagttccacttcaacctgcatgccgccaacggcgagatcattctcaccagcgaactgtatgccagccaggccaacgccgaagccggcgtgcagtcggtgaagcgcgcagcgccggaagccggtctcagcgacgaaagctga

SEQ ID NO: 368005 - DNA, 849 bp, Pseudomonas aeruginosa
atgaaagcactgcgctggcacgctgcccgcgacctccgcctgagcgaactggaacgccaggcgccgcggcccggcgaagtcgaactggaagtcgcctactgcggcatctgcggcagcgacctgcacgaataccagagcggcccgcactcgattccccaggccgaggcgcacccgctgtccggttgccgcgcgccgctgaccctcggccatgagttctgcggcgtggtcgccgcgctcggccctggcgtggagggactgcgcatcggcgaccgcgtcgcggtggagccggaataccgctgcggcgaatgccgctactgccgggaaggccgctacaacctctgcgagtcgatgggcttcatcggcctgatgggcgacggcggcttcgccgagcgcgcgcgggtgccggcctacatgctgcaccgcctgccggacgcggtgggcttccgccaggccgccgtgctcgaaccggccgccgtggccctgcacgcgctgcgccgcagcagcctggcgccaggccagcgctgcgcggtgttcgggctcggcccgatcggcctgctgctggtgatgctcgcccgcctgcgcggaatcgaggacatcgtcgcgatcgacgtcagtcccgagcgcctcgccctggccggggagttcggcgccagccgggcgctcgacgcccgcgacgcctacccggagctgatcgccctgctcgccgacggccgcctcgacctggcccgcgcagtgacccgcagcgtgcccctggagcaggccgtcgagcacggtttcgaggccctgctgcgcgacaagtcgcaggtcaaggtgctggtcaatcccaacccggccctggccgacgcctga

SEQ ID NO: 368006 - DNA, 306 bp, Pseudomonas aeruginosa; identical to SEQ ID NO: 318892

SEQ ID NO: 368007 - DNA, 318 bp, Pseudomonas aeruginosa
atggacccactcgaccggctcatccagctcgccaacctgcagggccgcctcgaccagcgctgccagctacagggcagctgggcgctggagcacccgcaagcggtgcccggcgaggcgaccttccatatcgtcatggccggcacctgctattgcgaattcctcgatggcggtcgcctcgacctgcatcccggcgacctgatcctgttgccacgcggcaccccgcacctcctgcgcagcgacagcccggcgcaaccctgcgaacccaccgtagagcaccgcggcagcatcccgctgtaccagttgaacggccccggctag

SEQ ID NO: 368008 - DNA, 966 bp, Pseudomonas aeruginosa; identical to SEQ ID NO: 347255

SEQ ID NO: 368009 - DNA, 438 bp, Pseudomonas aeruginosa
gtggtgatcggcgccttcgccgcccgcgccgcgatcggagcggcgctgggcgccggcatcgagctggggatgcagaccggcaagcaggtgctggggcagatgaaggacaattgggacagcgatcgcgacctcaccgatatcaagtggaagtgcatcgacatcaactggaaacacgtcggcgcctcggcggccatcggcaccgtggcgccgggcatgctcagcaccggcaagaccgtggtgcagtccgccaaggcgatcaggaccctttccggacaggcggccaacaccgccaaccgcgcggccaagctggccgcgcgcaaggccgcccatgccgataccatcaagaaggccgtggccacccaggccgcctggcagacgggcaagcagatcgtcaaatgcccgctgaaggacgaagaagaggagtgcccgccgcaatga

SEQ ID NO: 368010 - DNA, 420 bp, Pseudomonas aeruginosa
atggaggacgaggagcatcgccggcaggtcctgcgcaccctggagaagcaactggagcgcgaccacgcgaagaccaacatcatcggcatcaccgagttgggcctggtgcagatgacccgcaagcgcacccgcgaaagcctggtgcagatcctctgcgagccgtgcccctgctgccagggacgcggcatgctgaagactgcggaaaccacctgctacgagattttccgtgagatcctccgcgaggcgcgtgcctaccaggccgactcctacctggtgctggccaaccagaaggtggtggaccggctgctcgacgaggagtcgggtaacgtcgccgatctcgaggcgttcatcggccgcaccatcaagttccaggtcgaggcgatgtactcgcaggagcaatatgacgtggtcctgctctga

SEQ ID NO: 368011 - DNA, 459 bp, Pseudomonas aeruginosa
atggaactgatccgcaacctggacgatgcgaacatgggcgaagtgtattggcgcctgtaccggcgctacatcagcctgttcatcgagaacgaggccgacgacgcctacgcctggcgctgcgcccgagccctcgacgaactggatgacgccgtggtcgagcggctttgtgccgccagcctgcgctaccgcgccgcgcgcctggagcggctgggcgagtctgcggaggaagtcgcgccggcgcgcggggtgctggaacggatcgaaccgggcgagctgatcgtgcccgacccggaacagggcgacgaagcggtgatccacctgtcgctgaactgcgaatgggaccgcgaacacggtatggaatggatcgtccggggcggcgaggtgctctatgtcggccccttccacggcgaagacccgtggcgggacttcaccgtgaaggaaccatggaactacgcctga

SEQ ID NO: 368012 - DNA, 966 bp, Pseudomonas aeruginosa; identical to SEQ ID NO: 347255

SEQ ID NO: 368013 - DNA, 459 bp, Pseudomonas aeruginosa; identical to SEQ ID NO: 368011

SEQ ID NO: 368014 - DNA, 939 bp, Pseudomonas aeruginosa; identical to SEQ ID NO: 347254

SEQ ID NO: 368015 - DNA, 429 bp, Pseudomonas aeruginosa
gtgacccgggtcgatttctacgtgatccccagcgccgatccgtcggcgcgcctgcaggtcgcctgccgcctggccgagaaggcctggcggcagggcatgcatgtctacctgcattgcgccgacgaggcgcagcgcagcgagttggacggccgcctgtggagcttccgcggcgaggccttcattcctcacagcctggccgaggaagacgccgaggcgcccgtcgccctgggcctgggcgagcccccggggaaccatcgcgacctgctgatcaacctgaccctcgaggcccccggcttcgtcccgaacttttcgcgggtggccgaactggtggtcgaggagccggcgatccgccaggcggcacgggataaattccgcttctaccgggagcagggctatcctctacaggaccatcgcctgccgcgtatctga

SEQ ID NO: 368016 - DNA, 318 bp, Pseudomonas aeruginosa; identical to SEQ ID NO: 368007

SEQ ID NO: 368017 - DNA, 186 bp, Pseudomonas aeruginosa
atgaagggcgcgttcgacctcaacctggcggaaggcggcggccagcttccctgcgagtccatgaccatttggggccgatcctactccctctgcgtcgccgactacgccgaccagctctccaacctgcgtgtggcgctgctgctgatggccgcgctgatcgccgctttcatactgctgagggactga

SEQ ID NO: 368018 - DNA, 318 bp, Pseudomonas aeruginosa; identical to SEQ ID NO: 368007

SEQ ID NO: 368019 - DNA, 1533 bp, Pseudomonas aeruginosa
atgagcgaaccaccgatcgttctcatcggtatcgtcggtaccggtgccatgggccagggcatcgcccagctcgctgcctgtgccgggctgtcggtgctgctctacgacagccgccagggtgcggcactgcaagcacgcgagcagatcgccacggtccttgcccggcaggtggagcggggccggctggaggcggaggctgtcgagcgcgcgatgggcaatctgcgggtggtcgaggacttgcgggtcctacgcggctgccagttggtgatcgaggcgatcgtcgagaacctggaggccaagcaggcgttgttccgccaattggaagaggtggtcggcgacgaagcgatcctcgccagcaatacctcctcgctgtcggttaccgcgatcgcctcggcctgtcgcgatcccggccgggtcgccggtctgcacttcttcaatccggtgccgctgatgcgtctggtggaggtgatcgagggtctcgccacccgcaccggcatcgccgagcgactgtgcgccctggtggcgaccttcggccaccaggcggtgcgtgccacggacagccccggcttcatcgtcaaccatgccggacgggccttcggcaccgaggcgctgcgtatcctcggcgagggcgtggcgccggtggcggcgatcgacgaagtcctgcgcgagggcgccggcttccgcatgggcccgttcgagctgttcgacctggtcgggttggacgtcagcctgccggtgatggagtcgatctaccggcagtactacgaggagccgcgttatcgtccgcatcccttgctgcgccagatgctcgccgccggccgcctggggcgcaagagcggccagggcttctaccgctacgacggcgctgggcaggtgcccgccgccgccccggcggttgcgccaggcgcggcgttgccgccggtgtggctgggcgtcgacgacgaacatgaccgcgcgccattgctgacgttgctacaacgtctgggcgccgaggtggagagcggcgagcgtccttccggggcggcgttgtgcctgcttgcgccactgggcgccgacgtcagcgccgcagcgcggcggttcgccgtcgatccgacgcgcagcctggccatcgacgtgctgtcggacctggagcgacaccgctgcctgatggcctgcccggcgacccgagcagagctgcagcaggccgctcgcaccctgttcgcacgggacggcgtgggcgtcacgctgattcgcgacagcgccgggttcatcgtccagcgcaccctcgcctcgatcgtcaatctcgcctgcgacatcgcccagcagggtatcgcttcggtggagcacatcgacctggcggtgcgcctcggtctcggctatccgctggggccgctggagtggggcgaccgaatgggtgccgggcgcgtgctgcgcatcctcgaacgcctgcatgcgctcagcggcgacccgcgctatcgccccagcccctggctgcgccggcgcgcccaactgggcctttccctgcgccagccggacagcccgttggcctcctga

SEQ ID NO: 368020 - DNA, 1431 bp, Pseudomonas aeruginosa
atgctcgatgcctatatctacgccggcctgcgtacgcctttcggccggcatgccggtgcactctcgacggtgcgtccggacgacctggccggcctgctgctggcgcgtctcgcggaaacctccgggttcgccgtcgacgacctggaggatgtgatcctcggttgtaccaaccaggccggcgaagacagccgcaacctggcgcgcaacgcgctgctcgcagccggcctgccggcgcggctgcccgggcagacggtcaaccgcttgtgtgccagcggactgtcggcggtgatcgacgcggcgcgcgcgatcagttgcggcgagggccggctgtacctggccggcggcgccgaaagcatgtcccgggcgccgttcgtcatggccaaggcggagagcgccttcagccgcacgctggaggtcttcgacagcaccatcggcgcgcgcttcgccaaccccaggctggtcgagcgctatggcaacgacagcatgccggagaccggcgacaacgtggcccgcgccttcggcatcgatcgcgaggatgccgaccgtttcgccgcttcttcccaggcgcgctaccaggctgcgctggaggagggctttttcctcggcgagatccttccggtggaggtgcgcgccggacgcaagggcgagacgcggctggtggagcgcgacgagcatccgcgaccgcaggccgacctggcggccctggcgcgcttgccggcgttgttcgccggtggggtagtgaccgccggtaatgcctcggggatcaacgacggggcggcggtagtgctgctgggcgatcgcgcgatcggcgagcgcgagggcatccggccgctggcgcggatcctcgccagcgccagcgtcggcgtggagccccggttgatgggcatcggcccgcagcaggcgatcctccgcgcgctgcaacgcgccggcatcgacctggacgaggtcggcctgatcgagatcaacgaagccttcgcgccgcaggtcctggcctgcctgaagttgctcggcctggactacgaggacccgcgggtcaatccccatggcggcgccattgccctcggccatccgctcggcgcctccggtgcgcgcctggtgctcaccgccgcccgcgggctgcaacgcatcgagcggcgctacgcggtggtcagcctgtgcgtcgggctcggccagggcgtggcgatggtgatcgagcgctgccgaattcccaacgcttccgcctgcgccatggccggacagggacagcacgccggcagcgcctcggcgctgatgggcagcctgcagttcagcgtggcggcgggcgcttcggcgctggtcggcgtgctccacgacggcacggcgatccccatgactctggtgatcgccgtctgcggcgcggtcgcgaccctgctcgcctggcagaccgggcgcctggagcgccaggccgcctga

SEQ ID NO: 368021 - DNA, 363 bp, Pseudomonas aeruginosa
gtgttccccaacccgaacaacgagctgctgcccggcatgttcgttcacgcgcagttgcaggaaggcgtcaagcagaaggccatcctcgctccgcagcaaggcgtgacccgcgacctcaagggccaggctaccgcgctggtggtgaacgcgcagaacaaggtcgagctgcgggtgatcaaggccgaccgggtgatcggcgacaaatggctggttaccgaaggcctgaacgccggcgacaagatcattaccgaaggcctgcagttcgtgcagccgggtgtcgaggtgaagaccgtgccggcgaagaatgtcgcgtccgcgcagaaggccgaggccgctccggcgaaaaccgacagcaagggctga

SEQ ID NO: 368022 - DNA, 966 bp, Pseudomonas aeruginosa; identical to SEQ ID NO: 347255

SEQ ID NO: 368023 - DNA, 966 bp, Pseudomonas aeruginosa; identical to SEQ ID NO: 347255

SEQ ID NO: 368024 - DNA, 882 bp, Pseudomonas aeruginosa
atgaggcgctgcggagttcgctgcaggggcagggcgcacggcctctggccgggcagcccattcctgaccttggtagggctgggagaatgcctcgtccgggatgtgccgatactgaccatccagcacatcgtccgggctgagggtacgaaggtaaggctccggaagacgatcagcctcgggcatttggaaggtgcgcaggtgaggctcgacgcccatagctgcatcttcggcgatgtgcacttcctcctgggcgggctgagctgcgtcaggacctgcagcccccgccgaatcctgcggcagcgaagcgagcacatcggcaagcccgccatgactgggcggggcaacctctgcccaaactcgctccacatgagcacgatggcccgcatcgatcgcagagcgaatcatggactcgatcatcgtccactcgatcatctggcctgcgggatccgcagggttctccgaccagtcgtggttccgcaggatctcgcgcagcaaatagatcgaggagggcaggccatccatcagatcgtcttgcccggcctggtcaccaagcgcctccgcaggcgcaacgacttcttccagagcggactcgtcttccttaccggcttcgccctgttctttcagcgaatcacgaatggcggcttcgtcagccgcagtgtcatctgcagggacttcaacgaacccatcgtcgacttcgccgacgccggcctcttctcccgggttttcagactgcgttttcttcaagaagcccattctcgtcccctccagatgagatctgcactagaaccgcactgccggcaggcgcggcgtatccgtactgtgcacaaattttactttcgttgcattataataagcgactctagcaaacattcccatatatag

SEQ ID NO: 368025 - DNA, 1104 bp, Pseudomonas aeruginosa
atggagagaccacctattactggggtgcttttggccttcggcgcagcaccctacaagttcgagaaagacgagtcggcaagcttctacgtccagttacagctgcccactggcgagaccaaaaccctatggggtgtgggcttggaaaaagcactcgaagactctggggtgcaacttggtgaggtcctgactgcccagaacctggggaggcagccagtcgaggtcgatatcaaggttcgtgacgaagacgggaaactaacgggcgaggtccgccgagaggtggtgcatcgcaacgtatggtcagtgatgggtgcgccggagttggactggcggcgggacgcggagcagaaggagcagcctggccaaagcgacaatgaccaggctcgtggtggccctgcggattcctcctcgaccgaaagggccgctgccggcgccaccgcgaccagtaccgatcaagttttcgcagatgcaggcaatgcgtcagctcaagaaacctcggtgaaagactcagcccgtactggatctcggcgggacaagcgagatcgctccccgtctcggggccggcgagcggagcccgccgaggcgggggtacaacagcatggggccgccggcaccggtggtggcctcggccccgacctggtatcgaaggccttttcggcgcccttcaatgtcgcaaccgcccttggcggcctgttctcgacttcctttaaagaggtggggcacaagttcacagcgcgaagcgtagatggctatggcgttctggaaggacagctttcggatctggccaatgccgttgagcgcaaggccacctggttgaagtcgcagggggagatagatggtcaggtggcaccaggtgctgcgcaaacggcggaagatctgaagcggcttctgggggatttcgacaccctttccggtcggttttccgatatgggcagcaagctcggatatgactacgccgaaactctggaaaaacattctacttccatgaagtccgccctcgatagtctaaatggaaaagtcgaaattattgctgagcttcaagagcttgtcagtaaacttgtagacaaacttgaacgacttttttcgaacataaaaatgggtcgataa

SEQ ID NO: 368026 - DNA, 168 bp, Pseudomonas aeruginosa
atgggcaaggctcgcttgagggaagggcagctagaaaacagggcgatgacggtgttcaagttcttcttcctgttcgtcctgcaaaacatcgagctggctgatcagctgagcagccagctcggcatcgccctccagggcaacctgcatggcatggttgaccatgtgtga

SEQ ID NO: 368027 - DNA, 471 bp, Pseudomonas aeruginosa
atgagcaaggccgaagaattcatcgcgcaagatttcgtttacgccggtcgccgcttgctgaagagcgggaagatgggaggagaggtgtttgtcgtgactggcagtgctcttggtgagcgcatgctttttgattaccgcacactgaaaggcaaggcggtgggcggcatctatcgtggcgcgagcttttctgccgatcaggtgcgcgacttgagcaaggcgagctaccagggccagtgggcggatgatctcgcccgcgtggactggcgggttcgtgatgaggccgccgaagcagagcagcgcaccgacaagctggaggccgatgccaagcgcgcccatgaaattgaggagctgctgctgccactgcggaagctgtacgccagttattcgcagcgtaacgactatggcggtaaggaagcgctagaggcagctgtattgcgcgccttgcgtcgtcgcccgcccaagacagcgtga

SEQ ID NO: 368028 - DNA, 840 bp, Pseudomonas aeruginosa
gtgcactttctgttccgttgctccccaaacggcagattcagggcttacgttggtttttggttccattgctccccaaacccccagaacgagacggcgccggtccaaattcatttcgaccagggcctgaaacgctcgcagcagatcttcgctgacatcaacagcaaggcggtcaagccatcgtctgccatcaacgcgctgtacgaccaccgcaatccctacaacgcctggatccagcagctactcaacggcatgcccagcatcaagaagcgcatcgacttcgagaacgcaacgcctgggcagcgctcgtacaaactatggagcctggtggcgttcaagaagttcgttaccctgctcacgggtgtcagtgagcgaaccatcggccaggtcgacgaaacacgcctgcagggcatcgctggattggttcgccaattcctggaggagtgcggaaaacatctgcctcaatgggcccacatgatcagtggtgggattcccgcggctgatgtgcgagaagtcatgatcattggtcatgcggtgttcttggaggcgctggggatttttggtcgggaagcactgtttgctggcacctatctgacgccgatcgagcgcgatgcaaaagtcattgacccgagccgtgcccgctggcattccatgcagcggctggccgctctagaaacgagcaaaagcgacgccatgtgggaaaatcgttgcgtcgtgctcgggaagatgcagaagactaccgacggtacaaagtccactgcagcaaaattgctgcaggtcgccggcatcgccttgccggaggatctagccgccgtgaacggccgggttgaagcgtctcaataa

SEQ ID NO: 368029 - DNA, 219 bp, Pseudomonas aeruginosa
atgaaatacctaagactgctgctgataatgggggcgactctgctgtcatccaccgtatgggccgagggcgggagtgatcgagcgcttgatcgagccacggctatgcgtgacaaggctgaagcggccttgatggcggataccctcaagaagattgagcagatgggcgccacagcggctggccgggtcgaagaacagcccgcctgtccgccggcacggtag

SEQ ID NO: 368030 - DNA, 279 bp, Pseudomonas aeruginosa
atgaaaaaactgctcgcatccttcgccctcgccactctcgtctctacccctgtctgggcggctatccagaccgtcaccctggcggtgcccggcatgacctgcgccgcctgcccgttcacggtgaagaaggcgctgaccaaggtcgacggcgtgaccaaggccgaggtgagtttcgagaaccgcgaagccatcgtcaccttcgacgatgccaagaccagtgtcgaagctctcacccaagccagcgaaaacgcgggctacccggcttcgctcaaggagtga

SEQ ID NO: 368031 - DNA, 249 bp, Pseudomonas aeruginosa
atgagcaaccccaaaacgctattgaagattggcgtgagcggctcggtagtggcggcattgtgttgtttcacgccggtgctggtggttctgtttggagtaatcggcctatccgcctgggtaggctacctggactacgtactgtttccggcgctcggcgccttcattgcgctgaccctgtatgccctgcacaagaagcgtaaagccgaggcctgctgcacaaccgattcaaatacgggagaaaaaccatga

SEQ ID NO: 368032 - DNA, 1671 bp, Pseudomonas aeruginosa
atgatcgaactccaggtggagggcatgacctgcggatcgtgcacggagcacgtcaaacaggcattggagcaggtggcgggcgtgcgttcggcgagcgtttcctatccgcagggattggcagcgatcgcaaccgacggccatgtgagcttggagccgcttatcgcggtggtcaccgcactcggctatcgcgcgcggggcgccgacggctctgccggtccattcgaccaggcgtcgggctggtcgggtcgggaaactacgcagaccggcgatgagcaatcgctgcacattgccgtcatcggcagcggcggcgccgccatggcggccgccctcaaggcagtggaaggcggtgcccgcgtcaccctgatcgagcgtggcatcatcggcggcacctgcgtcaacgtggggtgcgtgccctccaagatcatgattcgcgccgcgcatgtagcccatctgaggcgcgagagtccgttcgacgccgggctgtcggccaccacgccggccgtcctgcgcgaacggctgctcgcgcaacaacaaggtcgcgtggacgaactgcgtcatgccaagtacgaaaacatcctggagggcacgccggccatcagcgtgctgcgcggcagcgcccgtttcagcgatggccgcacgctcagcgtggaactggcaggcggcggcgagcgcatccttgccttcgaccgctgcctggttgccaccggcgcgagtccggccattccgccgattcccggcctccagggcacgccctactggacctctaccgaggcgctggtgagcgacagcattcccaaacgcttgacggtgatcggatcctcggtggtagcgctggaactggcgcaggccttcgcccgcttgggtagcaaggtgacgattctggcgcgccacacgctgttcttccgtgaagacccggccatcggcgaagcgctgacggcggccttccggatggagggcatcgaagtgctggagcagacgcaagccagccaggtgtcctacgccaacggcgagttcgtgctgaccaccaaccacggcgaagtgcgcgccgaccaactgctcgtcgccaccggccgcacgcccaacacccagggcatgaacctagaagcagccggcgtgcagctggacgaacgcggcggcatccggatcgactccggcatgcgcagcagcgcccccgatatctatgcggccggcgattgcaccgaccagccgcaattcgtctatgtcgccgcggccgccggcacccgcgcggcgatcaacatgaccggcggcgaggcaacgctcaatctcgacgccttgccggccgtggtgttcaccgacccgcaggtggccaccgtcggctacagcgaggcggaagcgcatcacgccggcctagaaaccgacagccgtaccttgaccctggataacgtgccacgcgcgctggccaacttcgacacccgcggcttcatcaagctggtcgccgaagcgggctccggccgactgctgggcgtgcaggcggtgaccccggaagcgggcgagatcatccagaccgcagccatcgccatccgggcgaggatgacggtgcaggaactggccgaccagttgttcccctacctgaccatggtggagggattgaagttggcggcgcaaaccttcaccaaggatgtgaagcaactgtcctgctgcgcgggttaa

SEQ ID NO: 368033 - DNA, 744 bp, Pseudomonas aeruginosa
gtgagatcacaacagccgaggaggtggagagttgacactcgcatcaccaccgcatgcagtgacgggacgcagaccgaaggggccagcgcggcgcctctgttgttggagcgcttgcgcagcggcgaccgggaggcattcacggtcctggtgcgtgagcatcatcgtgcgctgcgggcgctggccgtctgtatcgtcggcgaagcctgggccgacgacgccgtgcaagaggcctggctcgcggcctatcgggcgctgcccaggttcgaaggaagggccaacctcaagacctggctctgggcgatcgtgcgtaaccaggcactggctcggctgcgtcgggagcggcgctacgtgccctgggcggcggtgttcccggacgcagacgacggcaagagcctgcgcttcgacgcggccgatccctggccgacaacttcgggcccctggcatcaggaggggccggaagcgctgttgacctgcgccgagtcggcccagtgtctggggcgcgccatcgccgcgctgccgggcgcgcaacggcgggcctatcggctgcgcgagatggagggcctggaactcgaccatatcgccgagggcatggcgacctccaacggcaacgtgcgcgtgctgctgcaccgggcccgctccgcgttgaggcgtgtgctgaacgcctatcaggggttgtacgccggaatcccagaaatttccgtcagcccagctccagtcccgccacgagcgcatccaggtcgatga

SEQ ID NO: 368034 - DNA, 960 bp, Pseudomonas aeruginosa
atgtttaattttttcaagtccaagaaaaaatcttcagaaaatacttctgtaaacgacctgctaattgaattcatagaagaatacaactcatctcagcaaaaaaatatgtatgccgtacatctctggggaattgttgaagccttcaataaaatatttggcgatctcgggaattaccataaatcagatcagtcacggaaagctcagtatatttctatgattgggaaacatgcaattgaacaaattaaagcaagagaattaatcccagcatcctgcaataggttctttattaactatctagtcgctacgaaaggagttgatagagctactctcagcggatcaattgagcaagtcgcagatattctagatggtatcgtacggaatggagcgctagagatgcgtaagtccggacagctagcagagaaagcccaagaatttatttcagaaaaatctattttccgtataggctctgccgtgattaaaggcccggttacggagcgtgccgttgttgatttgtctacaagcgtgtcacttgatttacagaaaattctgcacacacgggaggattattactggtttgtcattgaacaatatgatcgtttatttgaaaaaaagacagcgattcgctctttgctcgataatatagcgcttttcccaattgagcatgaagggcgaaggtctgaacaatcatatgtaggcaagccaaatcctggagtaatgtatatgacagaaattagctctgcagtgcgggcttggtgcgcggctacagctccaacttttaatccagatgagctttcattgagagtagttgctgcaatttacggtcactttcgactagagcacaaaactgccatagatgtaatccgcctcgaacacgcctctcattttcacaacaactgtattgccagtggtagctttcaaagcgcacagcagtggaatgaagtgattaacgcagttgcttga

SEQ ID NO: 368035 - DNA, 1539 bp, Pseudomonas aeruginosa
gtggctacgttcatttttaggcgaaatagtaaaattggcaacttagatgcagaaactgatacatttcttaaaagctgctttctcgaaacagatatttattccaacttattgagttttgatgatggcattgattttgccaagcgcattgtagtaggaagaacaggatctggcaaaacggctctgataaagcaattatcagaaaatccgaaaatcaaaaaacatttggtaattgaagcagaatccaccgtattcgagcacatcaagaataacgtattcatatcgaagttaatcgataacaacattgacctgaggattttttataagtcactgtggattcatgttcttttagtaagggtggtagagttattgtatccgggcaaaacatttttcgagatgattttagacctaccaaccagcagcaaaaaaaaatacaacgcatcgcttgccaaagaatatgttgaaaaatttaaggacaatttttttaacgaaagcatagttagtgagataaccgaaaggatgcagatggagttggcgggcggaattaatatcccacccatcaaattagacggtaagggtagtgccgagcttactgaaaaaatacaacgcgccactgcgcaatatgtgagcacagagttactacgaaagcaaaaggaacttatcaaggttttgacgcaagaaaaatcaagagagggtcagcaccgcttccttatcagtattgatgacctagataaatcctggttaagctctagcgaaatacgttacgattttattaatgccctactggacgcttttaaagagctactagacatcaagaccgtgaaaataataatatcggtccgcactgacataataaggggcatatatttaaaaaatctaaggcaagaagagaaagacaagtctcttattctagatattcattgggacaaattagagatccaagaaattcttgacaaaagaatagacttcctcataaaagataaatatcaatcaaatgctacgacaaaattttctgatatttttgatttttctataaaaaatgaacgatcacaagatttcatccttagacgcaccatgcttaggccgcgtgacgccatcgattttgtaaacttatgcctttctgaagcagatggatctacggttcttaatgaaaatttggtgttagaggcagaggaaaaattctatgtctcaagaaaacaggctttgtgcaaagagtgggcaagtatttatccgaacattactaaatatattgatgcgcttgctgaagtatccacgccatctttcacgtgtgaaacgctgagcgaaaaagctgataagatacagaatgacgtgatcagccatattgcaaacaacattgactctgtgacaaacgatattataaacgacataagcgcacttataaatatatggttcgttgtaggtgttgttggcattaaaaagtctgaaacattaattatctactcaagcttcgaaaagcaagagctagacgtcagtgactataaaaaagagtttagtattcatccattatttttccgatactaa

SEQ ID NO: 368036 - DNA, 345 bp, Pseudomonas aeruginosa
gtggtcggaaagtcagttcaagcgaccatgcttgtaccccgctcgaacgggcgcgggctcatcttcagtgaagttcgcgtggttcgcgcattcgactacccgatagcagggcggtcgttccgtttcgccattcatccccctgtcgcgcctctggggcgcgtcgcctacgtcatttccgagttcaagacaggtcggcagtgcggcctgctgcacatgaaagcgaagcgccgcttgatctccgccgctgagcggcatctcgcggaggttgttcgcgttcagggtgaaaccgagctcgtgcggttgatcgagcagacccaggccgagggcacgttgaatgactactga

SEQ ID NO: 368037 - DNA, 201 bp, Pseudomonas aeruginosa
atgaatcgtttacgggtacttaaacagcgtgcagcgcggggcaaggccggcgtatgcagaaacccggatggctggtatgccgcccatggtcgcggctggggtgactgccatgggccggtatcgcgtcgagaggcgatccagctggccgccaggtgggggatgccgacgaaggcagtcaagatcgtggttacgaccgattga

SEQ ID NO: 368038 - DNA, 1407 bp, Pseudomonas aeruginosa
atgggtagcggagttaccgattttctgatgtccgggacgactgttgtgcactcgaaagagggttctacgcctggggcgaagacactgctcagaacgattgctgccggcgtcctggcgtcattgtgtttggcagcgccggtgagcgctgcagatggccgccaggcgggtctctcgggcctggctcatctggggcaggactccatttcccaggagcttcagaatctggcggctccgggctctacttctatccgaatcgtgtcgacatcatcggctgatttcatgcagttcgtcagccaggcccccgcttttctgatgcgaggttccccagaccttctggatccgcagagccgtttctggttggcagcagagcgaggtggggaccgccagttcgccatcaaattgtcggagaagaagtacctctggagtgagcgagagactctttgctttgttggcggtcttgaaggcgtcggcgccgatatggctatcagcgattccggtctcaaatatgtggatgacgcgatcaatggtgggcctcgggtccttcagtcggcagaggaaaaattgttttttgcgacggtccacgagctgcagcattgccgcgatgtgagtggtgatgacctgcggcgtcgtgccattgctgagtttggggaagccggaaagttatatggcactgcgcttcgcgagctcaaggccgacctcgctgtagcgctcgcgcatgcgagcaaggatggctccttcgtcaacgcagcggcttcgctgggggccttccgcggggcttcgttggcggatcccgagcatgcgacggagcacatgctcgggattgtccttcagcggctggacgcaagtagctatcgcggcatgcacgtcgccgaactgtatgacgccgttgagcaaattttcgagatgttggatcccctttctaacaggcagctgcggcatgcctttgtgagcgaagttgccgagaaggctgagctctacgagcggattcagcgccggccggcgacatgggctgacgaggctatgaagttgttgccggcactggtcctttctggtgagagccgacctgtcctggatgtcgatggtcgggcttcacgcctggtcgatgtactcctgcagaacgatctgcgtcatccgcacattctcgctgaagagaagctgcggtcttccgagatgtacaaggcgctgctcgatctcgttggggagcacgccactgctcagcaagttgccagaatggctttggtcgacgaaatcacggctcacggacgtcagcccgtctttcagttgccaggcgatcaaggtctgggggcggaagggtatctggacatgctgaatgctcaatccagcgggcttactcaggaaatagttcgacagcacgaggcggactcgttgaggccctcgccgatctag

SEQ ID NO: 368039 - DNA, 210 bp, Pseudomonas aeruginosa
atgccggacctcggtcactccgggccgcggctggaaaagcacgtgaagacccgccgcctcgataatctcaaggcattgactctccacggccggcaggacgatatcaccggcctcgctcttgatccggacatcacgtcgaacgtcgagaggcctcgacaccacctgcacaacggcatcgtggaatggccaatcggacgcaagccagagtaa

SEQ ID NO: 368040 - DNA, 891 bp, Pseudomonas aeruginosa
atgattcaggatgatctcggtatccccgcttcggtccgcgctattgttgaggcctttcctgctctgaaagtgcacttgcgggaacccgctcaaagtattgccgcgtcgagcgttgttctatggcatgaatggggtggcgcggtgcacggctcttggccccgtctagctgccggagaaatgctcgggtggcgcaatcagggcggccaatacggcagcttccatctcacccgggaggatctcgcccgcttgggctgtcgcgaggtcaaggagcaatggcggtgcgagattcaggatgtcgaaggcctttcagcgtcgaaatcggagctgcgtgacttcgcgagccttgacgatatggtcgccaccaactcgcgaccgatgatcgagcctatgagcttggaaaagctggatcaaaacctcgcctggtccgagatacgaatacttcatcgcgaggatccttcggatcatttcgcctgctatcggtgggatgggcggcttttcctgatgaactccggtggctcgcatcactttgcggcagcacgctatatcgcttcgcggttgcgtcgttctgtgccgctgcaggggcggctaaagatctacggcctcaacagcgcttctgtcagtttcctggtgcgtgactttgagatattcgcgctacgggacgagccgatgagctacatggcgtttcacgatgccatgcgggcttatggcgctgcctacctgcaccgacgcctgccccgtccttatgaggattcccgagctgtgtttctgccgcgagatgatattcgttcggtgcgagttgcggccgtgctccacgagtgggggttcttcgacctgggtgatcatctgcaagagctggctcgcagaaacatggcggctttcagattgaactga

SEQ ID NO: 368041 - DNA, 276 bp, Pseudomonas aeruginosa
atgcttgtagttctccgcgattcgaagatgtttcgagccgtcccgagggtgatcctatggggtggcgttgcgctgttcttgttcctcatcttggtgctggccgagggtagcgtctacttggggaaggtgggggaggccagggacgcagctatcgctcaatggctgaatgaacatccggaagatggcgaggcggtggcccgctaccggactgtctgcatcggatctccaggcgaaccggatgtcgaaaagattgcctccccccccagcccgttctga

SEQ ID NO: 368042 - DNA, 270 bp, Pseudomonas aeruginosa
atgtctgacattaacactctgcttgaagttgcactgcgagattcgcgcaatttggaagtgataattgcgctggatcgactgcttcttcttccggagaacgatgctgcacttcatgcggcaatgaaagatcttgagacggtaaaatcattcattaatacaaagttgccaagtcaccttaaagagtttgccagaggactgttcgtccagcatggccgactggtggcggagcactacaaggcgaaattggaaaccggggagaccgctagatga

SEQ ID NO: 368043 - DNA, 930 bp, Pseudomonas aeruginosa
atgagtattgatcaggaagatattctcgggcaacagaatgagttcgatgaggacgatgccccgcctgccgacaagaaaaagagcaacaagaacggtcaactgatgacctacgggatgtacgttgttgcggctctcgttgttggcctcgcattgttcaagatattcggcccccggttcttccatagcaatgaccaaggttatgggaccgccccgatcactatcgatcagccttctggccaaggggcagggcagtacggctaccaggggcaggggtatcagccgcaaccgaatcccccctctcccgtgccggagccggttggccagtaccagcaggcgcagaactatgtggcagatccacaagtgcaggccgcgctgccggtatccgaatcgccggcaccaccggttatgcagcagcctgttgctccggtcggacaagctgcgcagatacagccgcacgtaacgatggagccgcaagctgcaacggcggctccggtgccgacatcgggccaggaaatggcttcgattgctcaggttcaaaaacagttggagcagcaagatattcagttgaaggcaattcaggaaacgctggacgaaatcaagaagtcgctgccgaaaaccgctgccaagccggcgccgaagcctagttccgcaagtaagtccagcacttctcaagcagcctcgcagaagaagccacaaccgcaaccccagcgtcaggttcagaagtctcaggctggatcgggccagcagaaaaattcgcctgccagcatgtcgctcaaggccgtgctcgaaggtcgagcgtggttcgtgacgaagggaggggagagcatcagcgtttccgttggcgacacgatcccaggagttggctccgtgcagcgcattgatccagaccaagggcaagtgatcatgtccaacggcgtcgtctaccgctga

SEQ ID NO: 368044 - DNA, 270 bp, Pseudomonas aeruginosa
atgcctagaaaaaacgaatggcgtaataccgccctcacggtgcggttcttcattttcgatgcacgggcggcgttcccgtttgctttggctcttatgcacattcggccgtggacgatgggcgcagcgctcgcagtgtttgtgcttttcggggtgctggagtggcttggaatttcaatggtggtggctttacgcgccctgcgcagttggatcgccgggccggttcggtacggcgttgcgtggtggcacaagccgcaaagaaaaatcaaataa

SEQ ID NO: 368045 - DNA, 522 bp, Pseudomonas aeruginosa
atgcccaaaaataagatgcctgctgcgatcgtaatcgcaatgttggtcgtatcgtccagtgcgctcgctgccgacgcaaccgtgggcgacctgactcaactgcaggggcaggtgctgctcaagaaagcgcaagtcgacctggccaggcaggaagatgagctgcgcaagctcaatggcggcagcgccggcggggtcccgatggggttgtcgtcgggcggcctcgctgacgcaggtactccatcggttcgatctgtagcgggtgtcaacggcaagctttacgcgacgtttgtttattcctcggggatcacggccgatgctgcagccggggaaactattcccggcggattcaaggtcgtacacgtcaccgtggacaaggtggagctgcagaaaggaggtcgacggttccaggtgggcttcgcctcgcacgcaccgtcggcaggtgtcgctaacggcatgaatcctgggatggggcagcctggatacggcgtacctcagccgatgcttcctggcttgaatccgtaa

SEQ ID NO: 368046 - DNA, 567 bp, Pseudomonas aeruginosa
atggaaaaagcagcagaagtaaagccagttcagcctggcatcaatcgcaaggcccatgcgaagaagcaggcgggtttcggggctatcgagatgatcgtggtgctcatcatcgtgatcggcctgctggccctggcggcgagtcgctgggacaccctgttcggtagcaacgaggccgccgaagagatctccaacgtcaacatgctcatggctggcaccaagaacctgaaaacctcttccggctacggcgcttccggtacgaacctggtgccggcgctgatcaaggccggtgctgtgccgaagaacatgactgttacctccggcgcgctttacaacacctggggtggtgctgtgaccgtggtatccaccggtaccggtttcacggtcgcgtctgccgctgttcccgaaggcgtttgcctgaccttggccaccaagctggcccggggtggggtgtactccaccaggatcaactccggtaccgcgatcattggtgaggtcacccaggctgctgcgaccgccggttgcagcagtgccaccagcaactccctcacctgggcgagcaacacctaa

SEQ ID NO: 368047 - DNA, 1254 bp, Pseudomonas aeruginosa
atgaacagaacctatgacatcgtgattgccggcggcggcgtgatcggcgcgtcctgcgcctaccaactgtccaggcgcggcaacctgcgcatcgccgtggtcgacgacaagcgaccgggcaacgccacccgcgcctcggccggcggcctctgggccatcggcgaatcggtgggactgggctgcggggtgatcttcttccgcatgatgtcctcccgcaaccggcgcgaggcccagggcgcggcggtggcggtggacgcgagcacgccgcacatcctgccgccggcgttcttcgacctcgccctgcaatccaacgcgctgtacccggaactgcaccgagaactgatcgaacgccacgggatggacttcaagttcgagcgcaccgggctgaaatacgtgatccaggacgacgaggatcgccagtacgccgagcacatcgtggcgcagatcccgcatctggccgagcaggtgcgctggctggaccgcgaggaactgcgtcgtgccgagccggcggtcagccacgcggcccacggcgcgctggaattcctctgcgaccaccaggtcagcccgttccgcctggccgacgcctacctggaggcggcgcgccagaacggcgtcgagctgttgccgggaaccaacgtcaccggcgtgctgcgccagggccggcggatcagcggggtgcgcacggacaatgccggggtgctgcattgccggaccctgatcaacgccgccggcgcctgggccgcggaactcagcgaaatggccaccggccggcgcatcccggtgaagccggtgaagggccagatcgtcctcaccgagcgcatgccacgactgctgaacggttgcctgaccaccagcgactgctacatggcgcagaaggacaatggcgagatcctgatcggcagcaccaccgaggacaagggcttcgacgtcagcaacaccttcccggaaatcgccggcctggtgcagggcgcggtgcgttgcgtgccggagctgcaacaggtcaacctcaagcgcacctgggccggcctgcgcccgggctcgccggacgaactgccgattctcggtccggtggctgaagtggagggctacctgaatgcctgcgggcatttccgcaccggcatcctcacgtcggcgatcaccggggtgctgctcgaccggctggtccacgaagagacgctgccgctggacatcgcgccgttcctcgccgcgcgcttccagccggagcctgccgccgtggcggtcgcggcctgctag

SEQ ID NO: 368048 - DNA, 1371 bp, Pseudomonas aeruginosa
atgtcccaatccacgcaggtcaaccgccgcatcgtcctcgcctcgcgcccccacggcgccccgacccgggataacttccgcatcgagcaggttccgcttcctgagcccggcgcgggccaggtgctgctgcgcaccgtctacctgtcgctcgatccctacatgcgcggacggatgagcgacgcgccgtcctacgcgccgccggtggaactcggcgcggtcatggtcggcggcacggtcagccgggtggaagcctcgaaccatcccgggttcaaggtcggcgactgggtgctctcggccaacggctggcaggactacgcgctatccgacggcagcggcctggcgcgcctgggcgagtcgccggagcatccgtcctacgccctgggcctgctcggcatgcccggcttcaccgcctacatgggcctgctcgacatcggcaagccccaggccggcgagaccctggtggtggccgccgccaccgggccggtcggcgccaccgtcggacagatcggcaagctcaagggctgccgagtggtcggcgtcgccggcggtgcggaaaaatgccgccacgccgtgcaggtgctcggcttcgatgcctgcctcgaccaccatgccgcggacttcgccgaacgactggccgaggcctgcccggacggcatcgacatctattacgagaacgtcggcggcaaggtcttcgacgccgtcttcccgctgctcaacgccaaggcccggatcccggtctgcggcatcgtcgcccactacaacgacaccgagctgccacccgggccggaccgcttgccggcgctgatgggcacgatcctgcgcaagcgcatcaaggtgcagggcttcatcatcttcgacgactacggccatcgctacgctgaattccagcgcgacatgtcgaagtggttcgccgacggcctcatccagtaccgcgaagagcgggtcgacggcctggagaatgccccgaggccttcttcggcctgctccagggacgcaatttcggcaagctggtggtgcgcgtcggagccgacgcatgaaccaggcggtccgtgtggtagcgctgttgcaggcgcgcgagggcagggcggcggaggtcgagcggctgctgctggcctgcgtgcagccgtcgcgggccgaggacggctgcctgtcctatgtcctgcaccggagcctcgacgaggccgggcgcttcgtcttcgtcgagcgctgggcccaccgcgacgccatcgagcggcaccgacggatgccgcactacagggcgatggccgatgccgtcgccgatctcctggcggaccgccaggtgttcctcctcgaggaactgccagcggccagcctgtctccggtagatccggaacctacaagcccccatga

SEQ ID NO: 368049 - DNA, 435 bp, Pseudomonas aeruginosa
gtgaagcaagcactgctctggcgtgacagcgagaccctcattctcagcagcatcgaactctataactggggcggctttcagggctatcaccgtgccgagatcgatccctcaggcaccgccgtgatcggcccaacgggtagcggtaaaacgacgctggtggatgctctgatgaccttgctgtgcgccaacccgcgctacaacctggcttccacaggtgggcatgaaagcgaccgtgatctggtgtcctatgtgcgcggggttaccggccctggagacggaggtgtagagcaatctcatatcgcgcgccagggtaagacggtcaccgccattgccgccacgctcgagcgtgacggtgcgcaggtgcgactgggcgctgtactctggttcgagggcaccagctcctcggcgtccgatctgaaaaactgtggctgttaa

SEQ ID NO: 368050 - DNA, 138 bp, Pseudomonas aeruginosa
ttgagcctgggcatccagaacctgttcaaccgcgactactacccgctctacagccagttgctgcgcaacaacaacaacaccagccacctgccggcgccgggcacggtgctgacggcgagctatacacacaactggtga

SEQ ID NO: 368051 - DNA, 561 bp, Pseudomonas aeruginosa; identical to SEQ ID NO: 341232

SEQ ID NO: 368052 - DNA, 612 bp, Pseudomonas aeruginosa; identical to SEQ ID NO: 357340

SEQ ID NO: 368053 - DNA, 246 bp, Pseudomonas aeruginosa
gtgcagatcgaccaactcatcaatcacagtcgcggtgctctccagcactacggcggccagggtcgcgtagcgccgctgcggctcgaacttgccaaggtctttgggcgtcatctgccccccttcgcgggccagcttgagcaggcggttctggtggatgtgccggcccagagcttcgggcaaatccaccagctgaaatgtcttcagccgctcgatgtgttcgagcatgtgccgggagttcggttttag

SEQ ID NO: 368054 - DNA, 1296 bp, Salmonella enterica
atggcgcaattctactctgcaaaacggcgcgtgacgacgcgtcagatcataaccgttaaagtcaatgacctcgattcatttggtcagggcgtagcccgtcataacggaaaagcgctgtttatccccggtttattgcctgaggaaagcgcagaagtcattattacagaagataaaaagcaatttgcccgcgcacgcgtttcgcgccgtttgaatgatagcccggaacgagaaacgccgcgctgcccgcattttggcgtctgcggcggttgtcagcaacagcatgtcagcatcgccctgcaacaacgcagcaaaagcgcggcgctggcgcgtttgatgaaacacgaggtgaatgacatcatcgccggcgcgccctggggttatcggcgtcgtgcgcggttaagtctgaattgcccgccggataaaccgctgcaaatgggatttcgcaaagcgggttccagcgatatcgtcaatgtcgaacagtgccctgttttggcgccccagcttgcagcattgctgccccgaatcagggcgtgtctggcgagtttacacggcacccgacatcttgggcatgttgagctggtacaggcgggaagcggtacgctgatgattctgcgccataccgcgccattaagtgcggcggataaagaaaaactggaacgcttttcgcattctgagggattgtctctgtttctggcgccgtttagcgagatactggaaacggtatctggcgaagcgccctggtatgattcgcacggcttacgtttagccttcagtccgcgagactttattcaggttaatgaggcggtaaaccagcaaatggtcgcccgcgcgctggagtggcttgatgtgcgcgccgaggatcgtgtcctggatctgttctgcggaatggggaattttacgctgccgctggcaacgcgcgcggcaagcgtgattggggttgagggcgttccggcgctggtagaaaaaggccgtgaaaacgccatccgcaatggtttacataatgtgacattcttccatgagaacctggaggaagatgtcacgaagcagccgtgggcgaaaaacggctttgacaaagtcttactcgatcctgcgcgtgcgggggctacaggagtgatgcgacatattataaaattaaaacctattcgcattgtttatgtatcctgtaacccggcgacgctggcgcgcgatagtgaagcgctggtcaatgcgggatatgaggttacgcgtttagcgatgctcgacatgttcccgcacacaggacatctggaatcaatggttctgttcgagcgcatgtaa

SEQ ID NO: 368055 - DNA, 2235 bp, Salmonella enterica
atggtcgcggtaagaagtgcacatattaataaagctggtgaatttgatccgaagaagtggatcgcaagcctgggaatttccagccagcagtcgtgtgagcgcttagccgaaacctgggcgtattgcctgcaacagacacaaggacatccggatgcggatctgttgctgtggcgtggcgtggagatggtagaaattctttccacgctgagtatggatatcgacacgctgcgggcggcgctactgttccctctggccgacgccaacgtagtcagcgaagatgtactgcgcgaaagcgtcggcaaatctatcgttaccctgattcatggcgtgcgcgatatggcggcgatccgtcagctaaacgccactcataacgactctgtttcttcggagcaggttgataacgtccgtcgaatgttattggcgatggtggatgatttccgctgcgtggcgatcaaactggccgagcgaatcgctcatttgcgcgaagtgaaagaggcgccggaagatgagcgcgtgctggcggcgaaagaatgtaccaacatctatgcgccgctcgctaatcgtctgggcatcgggcaactgaagtgggaactggaagactactgtttccgctacctgcatccggcggaatacaaacgcatcgccaaactgctgcatgagcgccgtctcgatcgcgaacattacatcgaagagtttgttggacatctgcgcgccgaaatgaaaaacgaaggcgtgcaggcggaggtctacggacgaccaaaacatatttatagcatctggcgcaaaatgcagaaaaagcatctggcgtttgatgaactctttgacgtgcgcgccgtgcgtattgtcgctgaacgtctgcaggactgctacgccgcgttggggatagtgcatacgcactatcgtcacctgccggatgaattcgatgattatgtcgctaacccgaaaccgaacggttaccagtctatccacaccgtggtcctgggaccgggcggtaaaaccgttgagatccagatccgtaccaaacagatgcatgaagacgccgaactgggcgtggcggcacactggaagtataaagaaggcgccgcgtccggcggcgtgcgctccggtcatgaagacagaattgcgtggctgcgtaagctgatcgcctggcaggaagagatggccgattccggcgaaatgctggatgaagtgcgcagccaggtgtttgacgatcgggtctacgtttttacgccaaaaggcgacgtggttgacttgcctgccggatctacgccgctcgattttgcttaccacatccacagcgatgttgggcaccgctgcattggcgctaaaatcggcggccgtattgtgccattcacctatcagttgcagatgggtgatcaaattgaaattatcactcagaagcagccgaatcccagccgcgactggctgaatccaaacctgggctatgtgacgaccagccgcggacgctcgaaaattcacgcctggttccgcaagcaggatcgtgacaaaaatatccaggctggacggcagatcctcgacgatgagctggcgcatttggggattagcctgaaagaggcagaaaaacatctgctgccgcgctacaactttaatgagctggaagagttgctggcggcgataggcggcggcgatatccgtcttaatcagatggtgaatttcctgcaatcgcagttcaataagccgagtgcggaggagcaggatgcagcggcgctgaaacagcttcagcaaaaaacatacgcgccgcaaaatcgtcgtaaagacgacgggcgcgtggtggtggaaggggttggtaacctgatgcaccacattgcccgctgctgccagccgattcctggcgatgaaattgtcggcttcattactcaggggcggggaatttccgtgcaccgggccgactgcgaacagctggcggaactgcgctcccatgcgccggagcggatcgtagaggcggtatggggcgaaagctactcggcgggatattcgctggtggtgcgcgtccaggccaacgatcgcagcggcttgctgcgcgatatcaccactattctggctaacgaaaaagtcaacgtgctgggcgtcgccagccgcagcgacattaaacagcagatcgccaccattgatatgaccatcgagatctacaacctgcaggtgctgggccgcgtgctcggtaagctgaaccaggtgccggatgtgattgatgcacggcgactgcacggggggtaa

SEQ ID NO: 368056 - DNA, 1032 bp, Salmonella enterica
atgaatcaaaaagtattattttttctaagtataattgcatatcctgggataactcaggccattaaccaaaatgtaatgattgaaccattagtaatacgtgactcaacaaattatttagtactacctcaggctcaacaggctgaattctcacaatgcaaaagctggccgcatgatagcactgttattccagcaaaatatgaggcaaccctgcttaatggaagtctcatatctatgtttattggtggcataacagttaatttatatacaacagcagatgtcaaagttaatacagatgcccagtgtacattactcaatggtaattttcctggttattacggcataacatgctttgttactggttatgacacagacaaagctgtacctgtaaggacagataatggcatgtcaattatcgaaagtaaattatatgctacaggaacaatgagatatataacagagatcccgatggatggcagtggctttcagggtatggcgattggtggtgcagtagtaattaatacaggcgcaataacaccaacccctaatacgggtgttatttctaacataacaatgccaccactatatgatcccgggtttatttttacggtacctggatgcggtcaatacaaatatcattctgggacaggttctgtttttacgaataacaattcaacttatacggttgcatcgccgattggtttcataactgcgtctttggataagaactccgtgttaaattataatgaacttcattataacgataaggcagaaaatatagaactagggaaaatttatttgatgtataaggagaaaaatgtcacgtggggtgaaggattcgattatacattggaaaatagcacgatcaatgtagtttgtgctgatagcaggattaaaacaaatgtagattatcaatgtaggaatggtgatatgggggcatgcaacaatggcgaactgggaagaataatcggcaactgggaacgaataaacgttgatactaattgcagcgtgacagttattttgccctggcaatag

SEQ ID NO: 368057 - DNA, 492 bp, Salmonella enterica
atgttatgggcggtttgcaatacgctacctgccgccacgcctaatgtgcactacagcggtaagctggttgccggcgcctgtaacctggtagtggataatgacacgatggcgacggtggattttcatactattggcagtgacaatttcgacgccagcgggcaaacgactcctgttccattcacacttagcctccaggattgcaaaacagcgctagccaacggcgtgctggtgacctttcagggcgttgaagacagtaccctgcccggactgctggcgctggagccctcgtcggaagccagtggttttgcgattggcgtggaaacggctgcacagcaaccagtgagtatcaatgcaacagtgggtacagcttttgtgctgaaagaagggattaccaccatcaacttgcaggccaggctgcaaaaatacgctggtgaagaggttatgccgggggaattttcgggtagcgcaacagtgagttttgaatatcagtaa

SEQ ID NO: 368058 - DNA, 486 bp, Salmonella enterica
atggagagattcatagtgaaaagggtgcttatcctgacgcttttaatcacccagtttgcctgcgccgacaatttgacctttcacggcaaactgataaacccgcccgcctgtactatcaataacggtgaaatgctggaggtcagttttggtagcgtcattattgataatattgacggcgtcaattacctgaccgagatcccgtggacccttacctgcgacagcagctttcgcgatgacgcattaacttttacgttgagctatctgggcacggcgacgccttactccgcaaaagccttaaccaccagcgtccctgagctgggcattgaacttcaacagaacggcacggtgtttcctcccggcacgtcgctaaccatcaatgagtcatcgcttcccacactaaaagccgtgccggtaaaacagcccggtaaagagcctgccgaaggcgattttgaggcttttgccacgttacaggtggattaccaatga

SEQ ID NO: 368059 - DNA, 501 bp, Salmonella enterica
atgttgactcgctggaaaatgctggtgctgctgtgcggtggattcgttaccggcaccgaggctgccggcacaaaaaccgtgcaactggagctgcatctggtcgtcactcaaccaccgccctgtacggtaggcggcgcttccgtagagtttggcgatgtcctgaccaccaaagttggcgatgcttctcaaacgaaacctgtgggctacagcctgaactgcgatggcagagcgagtgactatctgaagctacaaattcagggaaccaccaccaccatcagcggggagcaggttctgcaaacttcggtgcaggggttaggcatccgtattcagcaggcgggcaataagcaactggttccggttggcataacggattggctgaacttcaccctgagcggcagcaatgggccagagctggaagccgtaccggttaaagagcccaccacgcagttagcgggtggcgattttaacgccagtgcgacgttagtcgtggattaccagtga

SEQ ID NO: 368060 - DNA, 774 bp, Salmonella enterica
atgaacaagaccaaccattttaagcgccaggcgcttatcgcttcggtattactggctgcgccgctggtatcgcacagcgcgattgtgccggatcgtacccgcgttatttttaacggcaatgaaaattcaatcaccgtcacgctgaaaaacggcaacgccactctgccctacctcgcacaggcgtggctggaagacgataagttcgccaaagatacccgctattttaccgccctgccgccgctgcagcgtattgagccaaaatccgacgggcaggttaaagtccagccgttaccagccgcggctagcctaccgcaggaccgggaaagtctgttttatttcaacgtgcgggaaattccgccgaaaagcgataagcctaatacgctccagctggcgctgcaaacgcgtattaagtttttctaccgcccggtagccgtcgcccggcaggtggataagacgcacccgtggcagacgaagctcacgctgacctaccagggcgatggtgtgatcttcgacaaccccacaccgttttacctcgtcatcagcaatgccggtagcaaagagaacgaaaccgcctccggctttaaaaacctgctgattgccccgcgtgaaaaagtgacctctcccatcaaaggtgcctcgctcggcagctcgccggtggtgggctacgtcgatgattacggcggccatcgcctgctggtttttacctgctcagggaatacctgcaaggtcaatgaggaaaaaacccgtgacgctgagaagaaagcgaataagtaa

SEQ ID NO: 368061 - DNA, 2646 bp, Salmonella enterica
atgcttctaagcctctccccttatagcgcgtcaggcaaagacatcgaatttaataccgatttcctcgatgtaaaaaatcgcgataacgttaacattgcacagttttctcgtaagggttttattctgccaggcgtctaccttttacaaattaaaattaacggacagactctgccgcaggaatttcctgttaactgggttattccagaacatgatccacaaggaagtgaggtttgcgcagaaccagaattagttacgcaattgggtataaagccggaactcgcggaaaaactcgtctggataacgcacggtgaacgacaatgtctggcgccagattcactgaaaggcatggattttcaggctgacctgggacactccacgctgctggtgaatttaccccaggcgtatatggaatacagcgatgtcgactgggacccgcccgcccgctgggataatggtattcccggcatcattctggattacaacattaataatcagctccgccacgatcaagaaagcggcagcgaagagcaaagcatcagcggcaacgggacgttaggcgcgaacctgggcgcatggcgactgcgggccgactggcaggccagctacgaccatcgtgacgatgacgagaacacttccaccctccacgatcagagctggagccgctactacgcctatcgcgcactaccgacgctcggggccaaacttacgctgggcgaaagctatctccagtccgatgttttcgacagctttaactatatcggtgccagcgtcgtttctgacgatcagatgctgccgccgaaactgcgcggctatgcgccggagatcgtgggcattgcgcgctctaatgccaaagtcaaagtctcctggcaggggcgcgtactgtatgaaacgcaggtgcccgcaggaccgttccgtattcaggatctcaaccagtccgtttccggtacgttgcacgtcaccgtggaagagcagaacggtcagacccaggagtttgacgttaacaccgcatcggttcccttcctgacgcgccccggcatggtgcgctacaagatggcgctgggccgcccgcaggactgggatcatcaccccattaccggcacattcgcctcggcggaagcttcgtggggggtcaccaacggctggtcgctctatggcggcgcaattggagaaagcaactatcaggccgtggcgctgggaagcggtaaggatcttggcgtggtgggcgcggtggcggtcgacattacgcactccatcgcccacatgccgcaagacgacgggtttgacggcgaaacgctgcagggtaactcatatcgcatcagctactcccgtgactttgatgaaatcgacagccgactaacctttgccggataccgcttctcagaaaagaactttatgagcatgagcgactatctggatgcgaaaacctatcatcatctcaatgccggtcacgaaaaagaacgctatacggtcacctataaccagaacttccgtgaacagggcatgagcgcctatttcagctactcacgcagtaccttctgggacagcccggatcagagtaactataacctgtctctttcctggtacttcgacttagggtcgataaaaaatctcagtgcgtcgctgaacggctatcgcagcgaatataacggtgataaagatgatggcgtttatatctcgctgtctgttccctggggcaatgattccatcagctacaacggtacgtttaacggtagtcaacaccgtaatcagctcggctattccggccacagccagaacggcgataactggcagcttcacgtcgggcaggatgaacaaggcgcacaggcagacggttattacagccatcagggcgcgctgacggacatcgatctgagcgcggattatgaagaaggatcgtaccgttcgctgggcatgtcgctgcgcggcggcatgacgctgaccacccagggcggcgcgctacaccggggaagtttagcgggcagcacacgtttgctggttgataccgacggcattgcggacgtccccgttagcggtaacggctcgccaacctcaaccaacattttcggcaaggccgtgattgcggatgtcggaagctattcgcgcagcctggcgcgtatcgatctgaacaaattgccggagaaggcggaagctactaagtcggttgtgcagatcacgctcaccgaaggcgccatcggctaccgtcactttgacgtggtcagcggcgagaaaatgatggcggttttccggctggcagacggcgacttcccaccgttcggcgccgaagtgaaaaacgagcgccagcagcagttgggcctggtggccgatgacggcaacgcctggctggcgggcgtaaaagccggggaaacattgaaagtcttctgggatggcgcggcgcagtgtgaagcatcactcccgtccacgtttacaccggagctattggccaacgcgctattgctgccgtgcaaaatgctggaaggtcagccccccaccgcaccgcagaaaagttctccgctgcctgcgcaaccgctaatccaggaacatacgcaaaccgatggccaaccggccgcgccggtggcgacaaccactcaaaccccgcccataccgctggctgacaaccatgcggtgaatcgcaaggatatggaataa

SEQ ID NO: 368062 - DNA, 588 bp, Salmonella enterica
atgaagtcatctcatttttgtaaactggcagtaactgcatctttagttatgggaattgtctccggcgctcaagccgcgggtagcaacacagcgaaggtcactttccttggtaatattgttgactccccctgctccgtcacattggatacggaagatcaaacagtcaatatgggttcaagtatcggtaatggcacgctgagtaatggtaaaacgaccatcaacaatgcccgtacctttcatatcgatcttgagggttgtacctgggctaccgagaaaaatatgaatgtggtattcactacaggtagtggaaccacagcggctacaggcgccacggataatctcgcgctgatgaagactgacggcactggcgctattagcaacgtaagcctggcaatcggcgatgctggcaaaaacaatatcaaactgggcgatacctatacacaggccattgcggacctggacggagataccattcttgatgagaagcaaagcctgaatttcaccgcctggctggttggcgcagcaaccggtaccgtgggcacaggtgaattcagcagcgccgccaacgtcactatctcttacctgtaa

SEQ ID NO: 368063 - DNA, 801 bp, Salmonella enterica
atgacaactaaccatcaaattgaccgtcttctcaccctcatgcagcgcctgcgcgacccggaaaacggctgcccgtgggataaagagcagaccttcgccagcatcgcgccttatacgctggaagaaacctatgaagtactggatgcgattgcgcgtgaggattttgacgatttgcgcggcgaactgggcgacctgttgttccaggtggtgttttacgcgcagatggcgcaggaagaaggccgcttcgattttaatgatatctgcgctgccatcagcgacaagctggagcgccgccatccgcatgttttcggcgagctttccgcggataatagcgaagaagcattagttcgctgggagcaaatcaaaacggaagagcgcgcgcaaaaagcgcagcattccgcgctggacgatattccgcgcagcttaccggccttgatgcgcgcgcaaaaaatccagaaacgttgctcaaacgtgggctttgactggacgacgctgggaccggtcgtcgataaggtctatgaagagatcgatgaggtgatgttcgaggcgcggcaggcggttgttgatcaggctaaactggaagaggaaatgggcgatttgctctttgccacggtcaacatggcgcgtcatttaggtacgaaagcggagctcgctttgcaaaaagcgaacgataaatttgaacgtcgttttcgcgaagttgaacgtattgtcgcagccagaggcctggaaatgaccggggtagacctggaaacaatggaagaagtttggcaggaagtaaaacgccaggaaattgatctctaa

SEQ ID NO: 368064 - DNA, 1638 bp, Salmonella enterica
atgacaacgaactatatttttgtgaccggcggggtcgtatcctctctgggtaaaggcattgccgcagcctccctcgcagccattctggaagcccgtggtctcaacgtgaccatcatgaaactggatccgtacatcaacgtcgatccgggtactatgagcccaatccaacacggggaagtgttcgttactgaagacggcgctgaaaccgacctggacttggggcactacgagcgtttcatccgcaccaagatgtctcgccgcaacaacttcacgactggccgcatctactccgacgttctgcgtaaagaacgccgtggcgactatctgggcgcaaccgtacaggtaatccctcacatcactaacgcgattaaagagcgcgtgctggaaggtggcgaaggccacgatgtggtactggtggaaatcggcggtaccgtcggtgatatcgaatcgctgccgtttcttgaggcgattcgtcaattggcggtagatatcggtcgtgaacacgcgctgtttatgcacctgacgctggtaccttacctggcggctgcgggcgaagtgaaaactaaaccgactcagcactccgtgaaagagctgctgtctatcggtattcagcccgatattctgatttgtcgttccgaccgtgcggttcctgccaacgagcgtgcaaaaattgcattgttctgtaatgtgccggaaaaagccgttatttcaatgaaagatgtcgattccatttataaaattccaggcctgttgaaatctcaggggcttgatgattatatttgtaaacgattcagcttgaactgtccggaagctaacctgtctgaatgggaacaggtcatttacgaagaagcgaacccggcaggcgaagtgactatcggcatggtcggcaaatatattgaactgccggatgcctataagtcggtgatcgaagcgctgaaacacggtggtctgaaaaaccgcgttaccgtcaacatcaaattgatcgattcgcaagatgttgaaacgcgcggcgtcgaaattctgaaagatttggacgctatcctgatccccggcggcttcggctatcgtggcgttgaaggtaaaatcgccactgcgcgctatgcgcgtgaaaacaatattccttatctgggcatttgcctggggatgcaggttgcgttgattgagttcgctcgtaacgtggccggcatggacaacgccaactcaacggaatttgtgccagactgtaagtacccggttgtggcgttaattaccgagtggcgcgatgaagacggtaacgttgaagtccgtagcgagaaaagcgatctgggcggcaccatgcgcctgggcgcgcagcagtgccagcttagcgatgacagtctggtacgtcagttgtacggcgcgtcaacgattgttgaacgtcatcgccatcgttacgaagtcaacaatatgttgttgaaacaaattgaagcagcgggtctgcgtgtcgcaggccgttccggtgatgatcagttagtcgagatcattgaggtaccgaatcatccgtggttcgtggcctgtcagttccatccggaatttacttccacgccgcgtgatggacatccgttgttcgctggctttgttaaagccgccaacgagcatcagaaacgtcaggcgaagtaa

SEQ ID NO: 368065 - DNA, 1299 bp, Salmonella enterica
atgtccaaaatcgttaaagtcatcggtcgtgaaatcatcgactcccgtggtaacccgactgttgaagctgaagtacacctggaaggtggtttcgtaggtatggcggcggctccgtcaggtgcttctactggttcccgcgaagcgctggaactgcgcgatggcgacaaatcccgtttcctgggtaaaggcgtaaccaaagctgttggcgcggttaacggcccgatcgctcaggctattcttggcaaagacgctaaagaccaggctggcatcgacaaaatcatgatcgacctggacggtactgaaaataaatctaacttcggtgcaaacgccattctggctgtctctctggctaacgccaaagctgctgctgccgctaaaggtatgccgctgtacgagcacattgctgaactgaatggcacgccgggcaaatactccatgccggttccgatgatgaacatcatcaacggcggcgagcacgctgacaacaacgtcgacatccaggaattcatgatccagccggttggcgcgaaaacggttaaagaagccatccgtatgggttctgaagttttccatcacctggcaaaagtgctgaaaggcaaaggcatgaacaccgctgtgggtgacgaaggcggctatgcgccgaacctgggttccaacgctgaagcgctggctgttatcgctgaagcggttaaagcggctggttacgagctgggtaaagacatcaccctggcgatggactgcgcagcatctgaattctacaaagacggtaaatacgttctggctggcgaaggcaacaaagcgttcacctccgaagaattcacccacttcctggaagaactgaccaaacagtacccgatcgtttccatcgaagatggtctggacgagtctgactgggacggttttgcataccagaccaaagtactgggcgacaaaatccagctggttggtgacgacctgtttgtaaccaacaccaaaatcctgaaagaaggcatcgagaaaggcatcgctaactccatcctgatcaaattcaaccagatcggttctctgaccgaaacgctggctgcaatcaagatggcgaaagatgctggctacactgctgtcatctctcaccgttctggtgaaactgaagacgctaccattgctgacctggctgttggtaccgctgcaggccagatcaaaaccggttctatgagccgttctgaccgcgttgctaaatacaaccaactgattcgtatcgaagaagctctgggcgaaaaagcaccgtacaacggtcgtaaagagatcaaaggccaggcgtaa

SEQ ID NO: 368066 - DNA, 672 bp, Salmonella enterica
atgcagtacccgattaacgagatgttccagactctacaaggcgagggttattttaccggcgtccccgctatttttattcgtttacagggatgtccggtcggctgtgcctggtgtgatactaagcatacctgggataaactgagcgatcgggaagtgtctctgttcagcattctggcaaaaaccaaagagagcgacaaatggggtgctgcgagcagtgaagacttgctggcagtaattaaccgtcagggctataccgcgcgtcacgttgtcatcaccggtggcgaaccctgtattcacgacctcatgccgctcaccgatctgcttgaaaagagtggttttagttgccagattgaaaccagcgggacgcatgaagtgcgctgtacgcctaacacctgggtcacggtttcaccaaaagtgaatatgcgcgggggatatgacgtgctttcccaggcgctggagcgcgccaatgaaatcaagcatcccgttgggcgagttcgtgatattgaggcgctggatgaactgttagccacgttgagcgatgataaaccgcgcgtgattgctttgcagcccattagccagaaagaagacgcgacgcgtctgtgtattgaaacgtgtattgcacgtaactggcggctgtctatgcaaacgcataaatatttaaatatcgcctga

SEQ ID NO: 368067 - DNA, 798 bp, Salmonella enterica
atggcgttaaggatcagggtattgctcgaaaatcataagggagctggagcggataaatcgttgaaggcccggccaggattaagcctgttagtcgaggatgagtctacgtcgatcttgttcgataccggccctgatggcagttttatgcaaaacgcgttggcgatggggatcgacctgtccgatgtgtctgctgtggtgctttcgcatggtcattacgatcattgcggcggcgtgccgtggcttcctgataacagtcgaatcatctgccatcccgatattgcgcgcgaacgttatgcggcaatgacttttctcggtattacccgaaaaataaaaaaattgtcgtgtgaggtggactattcacgctaccgaatgatgtacacgcgtgaccccctgccgattggcaaaaactttatctggtcaggggaaataccggtggttgcgcctgaagcctacggcatttttggcggccacgatgcggagccggactccattttggatgagggcgtactgatttaccaatcgacaaaaggattagtcatcattacgggatgcgggcatcgggggatcgcaaatattgtccggcactgtcagaacattaccggtataaagcggatttacgcgcttgtcggcggatttcatctccgctgcgcatcaccgttcacgctgtggcgagtcaggcgctttctgcaagaacaaaaacctgaaaaactatgcggttgtcactgtacaggggcctgggggcggttgtggctaccggaaataaccgcacctgcaaccggtgatgtgctgcgcttttaa

SEQ ID NO: 368068 - DNA, 363 bp, Salmonella enterica
atgtccaccacgttgtataaagatttcacctttgaagccgctcaccgcctgcctcacgtgcctgaagggcataagtgcggccgcctgcacggacactcgtttatggtgcgtctcgaaattaccggtgaagtcgatccgcataccggttggattatggatttcgcggatctcaaagcggcgtttaaaccgacttacgatcgtcttgatcactactatctgaatgatattccagggctgtccaatcccaccagcgaagtgctggcaaaatggatttgggatcaggttaagcccgtcgtgccgctactgagcgccgtgatggtgaaagagacctgtacagccggctgcgtctatcgcggcgaataa

SEQ ID NO: 368069 - DNA, 1800 bp, Salmonella enterica
atgacgacaccggctccactgactgggttgcttccgcttaatccggagcaactggcgcgccttcaggccgcgacaaccgaccttactcccgaacagcttgcctgggtctccggctatttttggggcgtactgaacccgcgctcaggcgttgttgccgtcacgcctgttcctgagcggaagatgccgggggttacgcttatctccgcttcgcaaaccggcaatgcgcgtcgtgtggcggaagcgctgcgtgatgatctgctggcggccaaccttaatgtgacactggtgaacgccggcgactacaaattcaaacagattgccagtgaaaaactgttggtgatagtgacgtccacccagggagaaggcgagccgccggaagaggccgtcgcgctgcataaattcctgttctccaaaaaagcgccgaaactggaaaacaccgcttttgccgtgtttagcctcggcgacacctcttatgaatttttctgccagtccggaaaagatttcgacagcaaactggcggaactgggcggtgaacgtctgctcgaccgtgtcgatgctgacgttgaatatcaggcagctgccagcgaatggcgcgcccgcgtggttgatgttctgaagtctcgcgcacctgtcgcggcaccttcgcaatccgtcgctactggcgcggtaaacgacatccacaccagcccctatactaaagacgcgccgctgatcgcgaccctctccgtgaatcagaaaatcaccggtcgcaactcggaaaaagatgtgcgtcatattgagattgatttaggcgactccggcctgcgctatcagccgggcgatgcgctgggcgtctggtatcagaacgatccggctctggtgaaggagctggttgagttgctgtggctgaaaggcgatgagccggtgacggttgatggtaaaaccctgccgctcgccgaagcgctggagtggcacttcgagctgacggtgaataccgccaacattgttgagaactacgcgaccctgacgcgcagtgagtcgctgttgccattagtgggcgacaaagcgcagctccagcactacgccgcgaccacgcccattgttgatatggtgcgtttctctccggcgcagctcgacgctgaagcattaatcggcctgctgcgtccgctgacgccgcgtctgtactccatcgcctccgcgcaggcggaagtcgaaagcgaagtacacgtaaccgtcggcgtcgtgcgctacgatattgaaggccgcgcccgcgcgggtggtgcttccagcttcctcgccgaccgcgtggaagaagagggcgaagtgcgcgtctttattgaacacaacgataatttccgcctgccagcgaatccgcagactccggtgattatgattggcccaggtacgggtatcgcgccgttccgcgcctttatgcagcaacgcgccgccgacggtgcggaaggcaagaactggctgttcttcggcaacccgcactttaccgaagatttcctctatcaggtggagtggcagcgctacgtgaaagaaggcgtgctgagccggatcgatctggcctggtcccgcgatcaaaaagaaaaaatttacgtacaagacaagctgcgtgaacagggtgccgagctgtggtgctggatcaatgatggcgcgcatatttatgtctgcggcgatgccaggcgcatggccgcagatgtcgaaaaagcattgctggaagtgatcgctgaattcggcggtatggacctcgaatcggcagatgaatatttaagtgagctgcgcgtcgagcgccgttatcagcgagatgtctactaa

SEQ ID NO: 368070 - DNA, 1713 bp, Salmonella enterica
atgagcgaaaaacatccaggcccactggtggtcgaaggtaaactgtccgatgccgagcgcatgaagctggaaagcaactatttgcgcggtaccattgcggaagatctgaacgacggtctcaccggtggttttaaaggcgataacttcctgctgatccgcttccacggcatgtaccagcaggatgaccgtgacattcgtgccgagcgcgccgagcagaagctggagccgcgtcacgcgatgctgctgcgctgccgtctgccgggcggggtgattactacgacgcaatggcaagcgatcgacaaattcgcggcggataacacgatttatggcagtatccgtctgaccaaccgccagaccttccagtttcacggcattctgaagaagaacgtcaagccggtgcaccagatgctgcactcggtggggctggacgcgctggcgaccgctaacgatatgaaccgtaacgtgctgtgcacctccaatccctacgagtctcagctgcacgctgaagcctacgagtgggcgaagaagatctccgaacatctgctgccgcgcacccgtgcgtatgcggagatctggctcgatcaggagaaggtcgcgatcaccgatgaagaaccgatcctcgggcagacctatctgccgcgtaagttcaaaaccacggtagtgatcccgccgcaaaacgatatcgatctgcacgccaacgacatgaacttcgtggcgattgccgaaaacggcaagttggtcggctttaacctgctggtgggcggcggtctgtctattgagcatggtaataagaaaacctacgctcgtacggccagcgagtttggctatctgccgctggagcacaccctggcggtggccgaagcggtagtgacgacgcagcgcgactggggtaaccgtaccgacaggaaaaatgccaaaaccaaatacacccttgagcgcgtgggactggagacatttaaagcggaagtcgagcgtcgcgcggggatcaaatttgagccgatccgcccgtatgagtttaccggtcgcggcgatcgtatcggttgggtgaaagggatcgacaacaactggcacctgacgctgtttatcgaaaacggtcgtatcctggattatccggggcgcccgctgaaaaccggcctgctggagatcgcgaagattcatcagggcgagttccgtattaccgctaaccagaacctgattattgccagcgtgccggaaagccagaaagcgaagatcgagacgctggcgcgcgaccacgggttgatgaatgcggtgagcgcgcagcgtgaaaactcaatggcctgtgtatcgttcccgacctgcccgctggcgatggcggaagccgagcgtttcctgccgtcgttcacggacaaagtggaagcgattctggaaaaacacggcattcctgatgagcatatcgtgatgcgcgtgaccggctgcccgaacggctgtggtcgcgcgatgctggcggaaattggcttagtagggaaagcgcctggtcgttataacctgcatcttggtggaaaccgtattgggacacgtatcccacggatgtatcaagaaaatatcaccgagccggatattctggcctcgctggatgaactgattgggcgctgggcgaaagagcgtgaagcgggtgaaggcttcggcgactttacggtgcgtgcgggcatcattcgcccggtgctcgatcccgcgcgtgatttctgggaataa

SEQ ID NO: 368071 - DNA, 735 bp, Salmonella enterica
atgtccaaactcgatctaaatgccctgaatgaactgccaaaagtcgatcgcgtactggcgttggcggaaaccaacgctcaactggaaacgctgactgccgaagaacgcgtggcttgggcgctggaaaatctgcccggcgaatacgtgctttcttcaagctttggcatccaggcggcggtgagcctgcacctggtgaatcagattcgcccggatatcccggtgatcctcaccgataccggctatttgttcccggaaacctatcagtttattgatgagctaacggacaaactcaaactcaacctgaaagtttaccgcgcgggcgaaagtccggcctggcaggaagcgcgctacggcaagctgtgggagcagggcgttgagggcattgagaaatacaatgagatcaacaaagtcgagccgatgaaccgggcgctaaaagagctgaaagcgcagacgtggtttgcgggtctgcgtcgcgagcagtccggcagccgcgcgcatttacctgttctcgctatccaacgcggcgtgtttaaagtgctaccgattatcgactgggataaccgcacggtttaccagtatctgcaaaagcacggtctgaaataccatccgctgtgggatcagggctatctgtcggtgggcgatacgcacaccacccgcaaatgggagccgggtatggcggaagaagagacacgcttcttcggactgaagcgcgagtgcgggctgcatgaagggtga

SEQ ID NO: 368072 - DNA, 954 bp, Salmonella enterica
atgccagtcactttaagcttcggtaatcatcaaaattatacgcttaatgaaagtcggcttgctcatctgttaagcgcagataaagaaaaagcaatccatatggggggttgggataaagtccaggatcattttagagcggaaaaaaaggaccatgcgctggaagtgttacactccatcattcacgggcagggccgtggtgaacctggagagatggaagttaacgtagaggatataaataaaatttacgcctttaaacggctacaacatctggcctgcccggctcatcaagatctgtttactatcaagatggacgcttctcagacacaatttttacttatggtcggcgacacggtgatcagccaaagcaatattaaggacatcctcaatatatcagatgatgcagtgatagaatctatgagtagagaggagagacagttatttttacaaatatgcgaggtgattggtgcgaagatgacctggcacccggaattacttcaggagtcgatttctacactacgaaaagaagtgacgggcaatgcacaaatcaaagcggcggtttatgagatgatgcgtcccgcagaggctccagaccacccgcttgtcgaatggcaggactcgcttactgaagatgaaaaatcgatgctggcctgtattaatgcaggtaactttgagcctacaactcagttttgcaaaataggttatcaggaggtacaaggtgaagtcgcttttagcatgatgcatccgtgtatctcctatttactacatacctattcgccgtttgcagagtttaaaccaacaaattctggttttttaaaaaaacttaatcaggattataacgactatcatgcaaaaaaaatgtttattgatgtaattcttgaaaagctatatctaacccatgaacgttctttgcacattggtaaagatgggtgcagtcgtaatatattactgacataa

SEQ ID NO: 368073 - DNA, 2664 bp, Salmonella enterica
gtgtcgatatatcactattggggaaagtctcgaagaggagaaactgacggcggtgatgattaccatttgctttgctggcattctttagatgttgcggctgtgggttactggatggtgataaataatatttattttattgaccactatctaaaaaaattaggcatccaggataaggagcaggcggcgcaattttttgcctggattttatgttggcatgatattggaaagtttgctcattccttccagcaactataccgtcatgaggctttaaatatctttaatgagcctacacggcattatgaaaaaatcgcgcataccacgctgggatacatgttgtggaactcctggctaagtgaatgccctgaattgtttcctccttcttcgctttcagttcgtaaaagtaagcgcgttatggcgctttggatgccagtcactacaggtcatcatggacgccctccagaggcaatccaggagctggaccattttcgccagcaggataaagacgcggcaagagattttcttctgagaataaaagcgctctttcctttaattactttgcctgaagcctgggatgaagatgagggtatcgaccaatttcagcaactttcctggtttatttccgctgcggttgtactggctgactggactggttctgccagccgttattttccgcgtactgcggaaaaaatgcctgttgatacctactggcagcaagctctcgctaaagcacaaactgccatcacgctatttccctcagcggcgaatgtgtctgcctttacgggcatagaaacgcttttcccttttattcagcatcccacaccgttacaacaaaaggcgcttgagctggatatcaacgtggatggcgcccaactctttattcttgaagatgtcaccggggccggaaaaacagaggcggcgctcatattagctcatcgactgatggcggcaggtaaagcgcagggactctattttggactgccgacaatggcgacagccaacgcgatgtttgaacgtatggcgaacacctggctggcgctgtatcagccggactcccgtcccagcctgattctggcgcatagcgcgcgtcgcttaatggatcgtttcaatcagtcaatatggtcggtcactctttctggtacggaagaacccgatgaagcgcagccttatagtcagggatgcgccgcctggtttgccgacagcaataaaaaagcgttgttggcggaggttggcgtaggcacgttggatcaggcgatgatggcggtaatgccatttaaacataacaacctgcggttactgggtcttagcaacaagatcttactggctgatgagatccatgcctgtgatgcctggatgtcccgaatacttgaaggtttgatcgaacggcaggccagtaatggcaacgccactattctgttatctgcgacgctatcgcagcagcagcgagataagctggtggcggcattttcccgtggggtgaggcgtagtgtgcaggcgccgttgctaggccatgacgattatccctggctgactcaggtcacacaaacagagctgatttctcagcgggttgatacacgcaaagaggttgagcgttgcgtagatattggctggctacatagtgaagaggcgtgtcttgaacgtataggtgaagcagtggaaaaaggaaactgtatcgcctggatacgtaactccgttgatgatgcgattcgtatctatcgccagcttcaactgagtaaggtcgtcgccacggaaaaccttttactcttccatagtcgctttgcttttcacgatcgtcagcggattgagtcgcagacgctgaatctctttggcaaacagagcggcgcgcaacgtgccggtaaggtcattatcgccacgcaggtaatcgaacaaagtctggatattgactgcgatgagatgatctctgatttagcgccggtggatttattaattcagcgggccggtcgactacagcgtcatattcgcgatcgtaacggtctggtgaaaaagagtgggcaggatgagcgagagacgccagtgctgcgcattcttgctccggagtgggatgacgcgccgcgagagaactggttatccagcgccatgcgtaacagcgcctatgtctatcccgatcatgggcgcatgtggctgacgcagcgcatattacgtgagcaggggacgattcggatgccgcaatctgcccgcttgttgattgagtcggtctacggtgaggatgtcaacatgccggttggatttgcaaaaaccgagcaattgcaggaaggcaaattttattgcgaccgggcatttgccggccagatgctgcttaactttgcgccgggctactgtgctgaaattagcgattctttaccggagaaaatgtcaacgcggctggcggaagagtctgtcacgctgtggctggcgaaaatcgtggatagcgtcgtaaccccttatgccagcggtgaacacgcctgggagatgagcgtgctgcgagtacgtcagagctggtggaataaacataaagacgagtttgaaaaattagacggcgaacccttgcgtaagtggtgtgcgcaacagcatcaggataaggattttgccacggtgattgtggtgacggactttgccgcttgtggttattcggcgaatgagggattgattggcatgatgggggaataa

SEQ ID NO: 368074 - DNA, 1557 bp, Salmonella enterica
atggacaatttttcacttttaacaacgccctggctccccgtccgtttcaaagacggttccacgggcaagctggcccccgtcgatctggcggatgaaaacgtggtggacatcgccgcaacgcgagcagatttacagggagcggcctggcagtttctgttgggattgctgcaatgcagtatcgcgccgaaaagatacaaaaattgggaggatatctggtttgatggattgcatgccgatgtgctccataaggcattagcaccgttagaacacgcttttcagtttggcgcggaatccccctcgtttatgcaggattttgaaccgttaagcggcgaaaaagtctctattgcctcattgttgccggaaatacctggcgcgcaaaccacgaagttcaataaagatcattttgtcaaacgcggcgtaacggaacgtttttgtccgcactgcgcggcgctggcgctgttctcgttgcagcttaacgcgcctgcgggcggcaaaggctatcgtaccgggctgcgcggcggcgggccactgaccacgctggttgaattgcaggaatatcagggcgagcggcaaacgccgatctggcgcaagctgtggctcaacgtgatgccgcaggatactgcggatctgcctttaccagaccagtgtgatgcgaccgttttcccgtggcttgccgcgacgcggaccagcgagcaggcgaatgccgttaccacgccggagcaggtcaataaactccaggcgtactgggggatgccgcgtcgtatccgcctggattttgccaccttacagtcaggttgctgcgatatttgcggcgctgaaagcgatgagcttcttggctttatgaccgtcaagaactacggcgttaactacgatggctggcggcacccgctgacgccttatcgcgccccggtaaaagatcaaaacgccttcttttccgttaaaccgcagcccggcggccttatctggcgcgactggctgggattaagtcagaacaaccagacggaagcgaattacgaatctcccgcgcaggtagtcaaggtgtttaacgcccgctcgctgactgacgttaaagcggggatccggggctttggcgcggatttcgacaatatgaaaatccgctgctggtatgagcatcacttcccgttgctgatgacggaaggtctgatccctgatttacgtaaggccgtgcaaactgcggcccgcctgttgagcctgcttcgcagtgcgctaaaagaagcgtggttcaccaatgcgaaggatgcgcggggtgatttcagttttatcgacattgatttctggaacctgacgcaggggcgctttctcaatctgatccacgatctggaaaacggacacaagccggacgaaaggctgaataaatggcaaagagaactttggctgtttacccgttgttacttcgatgatcacgtctttaccaacccctacgagagcagcgatctggagcgcatcatgaaggcgcgcaaaaaatattttacttcatcggcggaaaagcaaagcgcaaaagccgccaaagcaaagaaacaggaggctgctgaatga

SEQ ID NO: 368075 - DNA, 555 bp, Salmonella enterica
atgagtgttgtgacgaaagatgataaagccactttgcgtcagtggcatgatgaactacaagaaaaacgtggattacgtgccagcttacgacgtagtaaaacggtgaatgatgcctgtttggctgaggggcttcattcattgttaatgcaaacacattctttatggaaaaacaaagcaccctggaatgttactgcattggcaatcacagcggcactggctgcacatatcaaatttattgatgagcaaaagagttttgctgcgcagcttggacagaagaaaggtggcgacactccggtgatgtcaaaattacgcttctcccacctattagcggtaaaaacgccggatgaactgctgcgccagttacggcgtgcggtgaagctgttagatggttcggtcaacctgttttctcttgcagacgatattttctgctggtgccaggagcagaatgacttgctgaaccaccatcgccgccagcagcggccaaccgaatttcttcgtatccgctgggcgctggaatactaccaggctggcgataccgataacgaacaagattaa

SEQ ID NO: 368076 - DNA, 1059 bp, Salmonella enterica
atgacaacgtttattcagctccacttactgaccgcttaccccgccgctaacctgaaccgtgatgataccggtgcgccaaaaaccgtggtgcttggcggagcaacacgtctgcgtatctcctctcagagcctgaaacgcgcctggcgtacatctgagttatttgaacaggcattagctggccatattggtattcgtactggtcgcattgctcgtgaggcggcgcaaatcctcgttgatagcggcattgacgccaaaaaagcggttgagtacgtcaagaacatcgccaactgctttggcaaggtaaaagaggataagaaacccaaagatgagttgacgaatgctgaaaccgagcaactggtgcatatcagccctgctgagtttgaggccgtgaaagcgctggcgcgccgtctggcagaagaaaaacgtccggcaacagaagaggaagcggaactgttacgtcacgatcgcatggccgtcgatattgccatgtttggccggatgttagcgaagaaaactgattttaacgtggaagccgcctgccaggtcgcccacgccttcggcgtcagcgaaacgatcatcgaagacgatttctttaccgctgtggatgacctacgccaggcatcggcagaagatgcaggcgcaggccatctcggcgaaaccggctttggctccgcgctgttttacacctatatctgcatcgacaaagatctgctggtgaaaaacctgaacggcaatgaagaactggcaaacaaaacgctgcgcgcctttactgaagcggcgctgaaagtgtcgccgaccggcaaacagaacagctttgccagccgtgcctatgcctcgtgggcgctggccgaaaaaggcaccgaccaaccacgttcactggcggccgcgttttatgaaccgatcaacggtacagaccaattgaacgttgcggttaagcgtattaccgcgctgcatgaaaatatgaatgaggtctatgcacaggagacggcgttcaaaaactttaacgtgatgaatcagcagggaagcatgaaagacgtgcttgacttcatctgcgcgtaa

SEQ ID NO: 368077 - DNA, 747 bp, Salmonella enterica
atgagccaatatctggtttttcagcttcatgggccgatggcctcctggggcgtggatgcgccaggcgaagtgcgccacagccatgaacttccttcgcgttctgcgctgttggggttattagctgcggcgctgggtattcgccgcgatgaagaggaacggctaaacacctttaatcgtcattaccaatttttgctgtgcgccagcggcaacccgcgctgggcgcgggattatcacacggtgcagatgccgaaagaggtacgtaaggcgcgttacttcagccgccgtgaagagttgcaggatcctgagttactgagcgcgctgatttcccgacgcgactactacaccgacgcctggtggatgatcgctgtcagcgcgacgccggacgcgccttacacgttggcgcagcttcaggcggcgttacaacatcctgtgttcccgctgtatctggggcgcaaaagtcaccctctggcgttgccgcttgcgccgcaactgctggaagggaatgcggcggatgtcctgcgtgaagcatatcgttggtatcaggatcaattcaatgcgctgaaactgactctccccggattacagaatgaatgctggtgggaaggtgaacacgatggcttaacggcgaacaaaattttacgtcgtcgcgacatgccgttgagccgccagcaatggctgttcggtgaacgtagcgtgaatcaggggccgtggctccgcaaggaggacgcgtgtatctctcaagaataa

SEQ ID NO: 368078 - DNA, 651 bp, Salmonella enterica
gtgtatctctcaagaataacgctgcacaccagcgagctttcgccggcacagctcttgcatctggtggagcgcggcgagtacgtgatgcaccagtggttatgggatctctttcccggcggcaaggaacggcagtttctttatcgccgcgaagagttacagggcgcgtttcgcttttttgttctctcacaggaacagcctgccgccagcacgatttttgacgtacagactcgcccgtttgcgccaatgctgagcgcgggacagacgctgcggtttaacttgcgagccaatccgacaatttgcaaaaacggtaagcgtcacgatttgctgatggaggcgaaacgccagcgtaaaacgcagggcgatagccaggatatttggtcttatcagcagcaggcggcattggaatggctggcgcgccagggggagcaaaatggctttactctgcgcgaggcgagcgttgatgcttaccggcagcagcagatacgtcgagagaaatcccggcagatgattcagtttagcagcgtggactataccggcgtgctggtgattaacgagcccgcgcttttcctgcaacgtctggcgcaggggtacggtaaaagccgggcgtttggctgcggaatgatgatgatcaaacccggagacgacgcgtga

SEQ ID NO: 368079 - DNA, 921 bp, Salmonella enterica
gtgacgttcgtaccgctcaacccgatcccgttaaaagatcgaacctcgatgatcttcctccagtacggtcaaattgacgtgctggatggggcattcgtgctgatcgataaaacgggaatccgtacgcatattcccgtcggttcggtcgcttgtatcatgctggaaccgggaacgcgggtttcccatgcggcagtgcatttggcatcaacggtcggcaccctgttggtatgggtgggcgaggcgggagtgcgggtctattcctccggacaacccggcggcgcacgagccgataagttgctttaccaggcaaagctggcgttagatgatgacctgcggcttaaagtagtccgcaaaatgtatgaactgcgttttcgtgagccgcctcccgcccgtcgttccgttgagcaactgcgcggtattgaaggatcccgtgtgcgggcgacctatgcattactggcgaagcagtatggcgtgaaatggcatggtcgtaactatgatccgaaagactgggagaagggggatgtcgtcaaccgatgtattagcgcggcgacatcgtgcctgtacgggatttcagaagcggctatcctggcggcgggatatgcgccggctatcggttttatccatagcggtaagccgctttcttttgtttatgacattgccgatatcatcaaatttgaatcggtggtgcccaaagcatttgagatcgccgctcgtcacccggcggaacctgataaagaagtgcgcctggcctgccgggatatttttcgcagttcgaagctgaccggaaaattgatcccgctgatcgaagaggtgctcgctgccggtgaaattgaaccacctcagcctgcgccggatatgctgccgccagcaataccggaacctgaatcactgggtgatagcggccatcgggggcatggttga

SEQ ID NO: 368080 - DNA, 294 bp, Salmonella enterica
atgagtatggtggttgtggtcacggaaaacgtaccgccgcgcctgcggggacgtcttgccgtctggttacttgaggttcgtgcaggtgtttatgttggcgatacctcgaagcgtattcgggaaatgatttggcaacagatcacacagcttggcggagtcggaaacgtagtaatggcctgggcaacaaatactgagtctggttttgagttccagacctggggtgaaaacagacgtattccggtagatttggatggactgcgtttggtttcttttcttcctgttgaaaatcaataa

SEQ ID NO: 368081 - DNA, 1047 bp, Salmonella enterica
atgttttccgcaacgcgccgctttgccgtcattctggcgctcggcgtaggctttatccttcctgcacaagcagcatcaccagggcctggtgaaatagcgaatactcaggcacgacatatcgccaccttttttcccgggagaatgactggctcccccgccgagatgttgtctgccgattatttacgccaacaatttacccagatgggatatcaaagcgatattcgaacgtttaatagccgatttatttataccacgaaggataatcgcaaaaactggcataacgtgacgggcagtacggtcatcgccgcccatgaagggcgcgtgccgcaacagatcatcattatggcgcatctggatacgtacgctccgcagagcgacgctgatgtcgatgccaatctgggcggtttaacgttacagggaatggatgataatgccgcgggattaggcgttatgctggaactggcggcgcgtctgaaagatataccgacccattacgggattcgttttatcgccaccagcggggaagaagagggaaagctaggcgcggaaaatttactcaaacgaatgagtgacgctgagaagaaaaatacgctgctggtgattaatctcgataacctgattgttggcgacaagctctattttaatagcgggaaaaatacgccggaagcggtgcgtacactgacccgcgatcgggcattagcgattgcgcgccgttatggtatcgccgccaacaccaatccgggacgcaatccatcctaccccaaaggaacgggttgctgtaatgatgcggaggttttcgataaagcgggaatatcggtgctttctgttgaggcgacgaactggaatctgggtaaaaaagacggataccagcaacgcgtgaaaaatgcctccttcccgaacggcaatagctggcacgacgtacggcttgataatcaacagcatattgacaaggcgctgccagggcgaattgagcgccgtagccgcgatgtagtacggataatgctgccgttggtaaaagagctggcgaaggcggaaaaaacgtcctga

SEQ ID NO: 368082 - DNA, 909 bp, Salmonella enterica
atggatcaaaaacgactcacccacctgcggcaactggaggcggaaagtatccacattatccgtgaagtggcagcggaattcgctaatccggtcatgctgtactccattggtaaagactccagcgtcatgctgcatctggcgcgtaaggcgttttatccgggtacgttgccgttcccgctattgcacgttgataccggttggaaattccgtgagatgtacgcctttcgcgatcgtaccgccaacgcatatggctgcgagttgctggtacataaaaatccggaaggcgtggcgatgggcatcaatccgttcgttcacggtagcgctaaacacaccgacattatgaaaaccgaagggttaaagcaggcgctgaataagtacggttttgatgccgcgttcggcggcgcacggcgcgatgaggaaaaatcccgtgcgaaagaacgtatttactcctttcgtgaccgtttccatcgctgggacccgaaaaatcagcgtccagagttgtggcgtaactataacggtcagattaataaaggtgaaagtatacgcgtcttcccgctctccaactggacagagcaggatatctggcaatacatctggctggaaaacatcgacatcgtgccgctgtatttggctgctgaacgcccggttctggaacgtgacggcatgttgatgatggtggatgacgatcgtatcgatctccagcctggcgaagtcatcaaaaaaaggatggtgcgcttccgtacacttggctgttggccgctcaccggggcggtggaatcccacgcgcaaacgctgccggaaattatcgaagagatgctggtttctaccaccagcgagcgccaggggaggatgattgaccgcgatcaggcggggtcgatggagcttaaaaaacgtcaggggtatttctaa

SEQ ID NO: 368083 - DNA, 1440 bp, Salmonella enterica
atgaacaccatacttgcacaacaaatcgccaatgaaggcggcgtcgaagcctggatgattgcccaacagcacaaaagcctgctgcgttttttaacctgtggcagcgttgatgacggtaaaagtacgctgataggtcgtttgctgcacgatactctgcaaatttatgaagatcagctctcttctctgcataatgacagtaaacgtcatggcacgcagggagaaaaactcgatctggcgctgctggtagatgggctgcaggccgagcgtgagcagggcattactattgacgtcgcgtaccgctatttctccacggaaaaacgaaaatttattatcgccgacacgccgggccatgaacaatatacccgtaatatggcgaccggggcgtccacctgcgatctggcgatcctactgatcgacgcgcgtaaaggcgtgctggatcagacgcgtcgccatagctttatctccactctgttggggatcaaacacctggtggtggcaatcaacaaaatggatctcgttgactactgcgaagagaccttcgcccgtattcgcgaagattacctgacctttgctgaacagttgccgggcgatttggacattcgctttgtcccgctttcggcgctggaaggggataatgtcgccgcgcagagcgcgaatatgcgctggtacagcggtccgacgctgctggaagtcctggaaacggtagacatacagcgtgcggtagaccgtcagccgatgcgctttccggtacaatacgttaatcgcccgaatcttgattttcgggggtatgccggcactctggcgtctggtagcgtcaaagtcggagagcgcattaaagtgctgccgtccggcgtggaatccagcgtggcgcgtatcgtcacttttgatggcgataaagaagaagcctgtgcgggcgaagccattaccctggtactcaacgacgacattgatattagccgcggcgatctgctgctggcggcaaacgagacgctggcacctgcgcggcacgccgcgatcgacgtggtatggatggcggaacagccgctggcgccgggccaaagctacgacgttaaacttgcgggtaagaaaacccgcgcgcgtatcgaggctattcgctatcagattgatatcaacaatctgacccaacgagacgtcgagagcctgccgttaaacggtattggtctggtggagatgacattcgatgagccgctcgcgctggatatttatcagcaaaatccggtgacgggcgggctgatttttatcgaccgactttctaacgttaccgtgggcgctggcatggtgcgggaactggacgaacgcggagcgacgccgcccgtggaatacagtgcgtttgagctggagctgaatgcgctggtacgccgtcattttccgcactgggacgcccgagatttgctgggagataaacatggcgctgcatga

SEQ ID NO: 368084 - DNA, 606 bp, Salmonella enterica
atggcgctgcatgatgagaacgtggtctggcactctcatcccgttactgtcgccgcccgtgaacagctccacggccaccgtggcgtggtgctgtggtttaccggactctccggttcgggaaaatcaacggtggccggcgcgctggaagaggcgttacatcagcgtggcgtcagtacctacctgttggatggcgataatgtgcgccacggtttgtgccgtgatttaggctttagcgatgccgatcgccaggagaatatccggcgggtaggcgaagtggccagcctgatggcggacgccggcctgattgttttgacggcatttatttctccgcaccgcgccgagcggcaactggtaaaagagcgcgtcggccacgatcgttttatcgagatttatgtcaatacgccgctggctatctgtgaacagcgcgatcctaaagggttgtataaaaaagcgcgtgcgggcgagttgcgtaactttaccggcatcgacgccatttacgaagcgcctgactcgccacaggttcatcttaatggtgaacaattagtaacaaatttggtttcccaattattagacctgctgagacggcgcgatattatcagatcctga

SEQ ID NO: 368085 - DNA, 324 bp, Salmonella enterica
atgcgtaatagccataacattactttcacaaggtcagacgccttcatggtcgacgatgacgccaccagtgcatttccgggggcggtggtcggctttgtgtcatggctgctggcgttggggatcccttttctgctttatggccctaacacgctgttttttttcctctatacctggccctttttcctcgcgttaatgccggtatcggtgattatcggcattgcgttgcatctgctggtaaagggcaaaatactttttagcattatgtttactctactggccgtaggcgcgctgttcggcgcgttatttatatggctattagggtag

SEQ ID NO: 368086 - DNA, 312 bp, Salmonella enterica
atgggtaaactaacgctgctgttgctggctttactggtctggctacagtactcgctgtggttcggtaagaacggcatacatgactatagccgcgtcaacgatgatgtggtcgcgcagcaggcgacaaacgccaaacttaaagcgcgtaacgatcagctttttgccgaaattgacgatctcaatggcggccaggaagcgattgaggagcgcgcgcgcaacgaacttagcatgaccaaaccgggcgaaaccttctatcgtctggtgcctgacgcctcaaaacgcgcggcaacggcggggcaaactcatcgataa

SEQ ID NO: 368087 - DNA, 711 bp, Salmonella enterica
atggcagccactttattggacgtttgcgccgtggtgccggcggccggatttggccgccgaatgcaaacagaatgtcctaagcagtatctctcaatcggtaataaaaccattctggagcactcagttcatgcgctgctggcgcatcctcgggtgacacgcgttgttattgctatcagccctggcgatcatcgctttgcccaacttccgctggcgaatcatccgcaaatcaccgttgtggatggcggcaacgaacgcgctgattctgttttggccgggttgcaggccgttgcaaaggcgcagtgggtgctggtgcacgacgcggcaagaccctgtttgcatcaggatgaccttgcgcggttgctgaccatcagcgaaaacagccgggtcggcggtatcctcgccagtccggtgcgcgacaccatgaaacgcggcgaaccggggaagaacgctattgcccataccgtagagcgcgccgatttatggcacgcgctcaccccgcagtttttcccccgcgaactcttgcacgattgtctgacgcgtgcgctgaatgaaggcgcgaccatcaccgacgaagcgtcagcgctggaatattgtggttttcatccggcgctggtagaaggtcgcgcggataacatcaaggtcacccgtccggaagatctggcgctggcggaattttatctgacccgaaccatccaccaggagaaagcataa

SEQ ID NO: 368088 - DNA, 480 bp, Salmonella enterica
atgcgaattggacacggttttgacgtacacgcgtttggcggagaagggccgattattattggcggcgtgcgtatctcttatgaaaaagggctattggcgcattccgatggcgatgtggcgttacatgcgctgaccgatgcgctgctgggtgcggcggcgcttggcgatatcggcaagctcttcccggataccgatccggcatttaagggagcggatagccgcgaactactgcgtgaagcctggcgtcgtattcaggcgaaggggtacaccctcggcaacgtagatgtcaccattattgcgcaggcgccgaaaatgctgccgcatattccgcaaatgcgcgtctttatcgccgaagatctcggctgccatatggatgatgttaacgtgaaggcgacgacgacggaaaagctcggatttaccggacgcggagaaggcattgcctgcgaagcggtcgcgttgctgatgaaggcggcgaaatga

SEQ ID NO: 368089 - DNA, 1050 bp, Salmonella enterica
atgacagagtttgacaatctcacctggctgcacggaaaaccacaaggtagcggattgctgaaagcgaatccggaagattttgtggtggttgaagatttaggctttacgccagatggtgaaggcgagcacattctgctgcgtattttgaaaaacggttgcaatacccgttttgtcgctgacgcgctggcgaaattcctgaaaattcacgctcgcgaagtgagctttgccgggcaaaaagataaacacgccgttaccgagcagtggctgtgcgcgcgcgtgccggggaaagagatgcccgatttcagcgcctttcagctggaaggttgtaaagtgctggaatacgcgcgtcacaagcgtaagctgcgtttaggcgcgctgaaaggcaatgcctttacgctggtgttgcgtgaaataagcgatcgccgcgatgtcgaaacacgattgcaggcgattcgcgatggcggcgtgccgaactatttcggcgcacagcgattcggcattggcggcagcaacttgcagggcgcgctgcgctgggcgcaaagtaacgcgccggtgcgcgatcgcaataaacgcagtttttggttgtcggcggcgcgtagcgcgttgtttaatcaaattgttcaccagcggctgaagaaaccagactttaatcaagttgttgacggcgatgcgctacaattagcggggcgtggaagctggttcgtcgcgacatctgaagaactgcctgaattgcagcgccgggtagacgaaaaagagctgatgattacagcgtcgttgccgggcagcggagagtggggaacacagcgtgcggcgctggcgtttgagcaagatgccattgcccaggaaacggtgttgcaatcgctgttgctgcgcgaaaaagtagaggcgtcgcgcagagcgatgctgctttatccgcaacaattaagctggaactggtgggatgacgttaccgtcgagttacgtttctggctgcccgcaggcagttttgccaccagcgtagtaagggaactgatcaacacaatgggtgattatgcgcatattgctgagtaa

SEQ ID NO: 368090 - DNA, 762 bp, Salmonella enterica
atgcgcatattgctgagtaacgatgacggggttcacgcgcccggtatacaaacgctggcgaaagcgctgcgtgagtttgctgatgtacaggtcgtagccccggatcgtaaccgcagcggcgcgtctaattccctcacgctggaatcttcgcttcgtacttttacctttgataatggcgatatcgccgtacagatggggacgccgaccgattgcgtctatctgggcgttaatgccttaatgcgtccgcgtccggatattgtcgtttccggtattaacgcgggtccgaatctgggcgatgatgtgatctattccggtactgtcgccgcggcgatggaaggtcgtcatctcggctttccggcattagcggtctcccttaacggctatcaacattatgatacggctgcggccgtgacttgcgcgcttttgcgagggttaagccgggagccgttgcgtaccgggcgtattctcaacgtgaatgtcccggatctaccgttagcgcaggttaaaggcatccgcgtgactcgctgtggtagccgccatccagcggataaagtaatcccgcaggaagatccgcgcggtaatacattgtactggattggcccgccgggcgataaatacgatgccgggccggataccgatttcgcggcggtggatgaaggctacgtctccgtcacgccgttgcatgtggatttaaccgcgcacagcgcgcatgatgtggtttcagactggttagacagcgtgggagttggcacgcaatggtaa

SEQ ID NO: 368091 - DNA, 627 bp, Salmonella enterica
atggtaagtggacgtgtacaggctcttcttgaacaattgcgcgcgcagggcatcagagatgagcaggtgcttaatgcgcttgccgcagtgccgcgcgagaaatttattgatgaagcgtttgaacataaggcctgggaaaatatcgctttgccgataggccagggtcagacgatttcgcagccctacatggtggcgcgaatgacggaactgctcgaactgacgccgcaatccagggtgttggaaattggcaccggttccggctatcagacggcgattctggcgcatctggtacatcacgtttgctccgttgagcggattaaggggctgcaatggcaggcgcgccgccgcctgaagcagctcgatttacataatgtttctacccgtcatggcgatggctggcaaggctggcaggcgcgtgcgccgtttgacgctatcattgtgacggccgcgccaccggaaattcctaccgcgctcatggcacagttggatgaaggcggcattcttgttctgcccgtgggcgatgagcagcagtttttgaaacgcgtgcgtcgccggggcggcgaatttattatcgataccgtggaggccgttcgcttcgtcccgttagtcaagggagagctggcctag

SEQ ID NO: 368092 - DNA, 1134 bp, Salmonella enterica
atgagcgcgggaagcccaaaattcaccgttagtcgcattgcggcactatcactggtttcactatggctggcaggttgtaccagttcgtcaaaccctccggcgccggtcacgtctgtggacagtgggtcgtcatcaaataccaattccgggatgttgatcacaccgccgccaaaaatgggcgcgacgacgcaacaaacgccgcaacaagcgccgcaaattcaacccgttcagcgtcctgtaacgcagcccatgcaaactcaaccggtcacggaacaacccgtgcagatggaaaatgggcgaattgtatacaatcgccagtatgggaatattccgaaaggtagctatacgggtggcagtacttacaccgtgaaaaagggtgatacgcttttttacatcgcctggattaccgggaacgatttccgcgatctggcccagagaaacagtatttctgccccgtatagcctgaatgtagggcaaactttgcaagttggtaacgcatccggtacgccaattactggcggaaatgcgatcacccaggcggatgcagcacagcaaggagttgtgaccaggtctgcacaaaattccaccgttgcagttgcgtctcaaccaacaattacgtattctgagggctcaggtgaacaaagtgctaacaaaatgttgccaaacaacaagcctgctgggacggttgtcacagcgcctgtaacggcaccaacggtaagcacgaccgaaccaaatgcaagcagtacgtcaaccagcgcgccgatttccgcatggcgctggccgacggatggcaaagtgatcgaaaactttggcgcttccgaagggggcaataaagggatcgacattgcaggcagtaagggacaggctatcgtcgcaaccgctgatgggcgcgtcgtatatgccggtaacgcactgcgtggttacggtaatcttattatcatcaaacataacgatgattacctgagtgcctacgcccataatgatacgatgctggtccgggaacaacaggaagttaaggcggggcaaaaaatcgctactatgggtagcaccggcaccagctctacacgcttgcattttgaaattcgttacaaggggaaatccgtaaacccgctgcgttatttaccgcagcgataa

SEQ ID NO: 368093 - DNA, 993 bp, Salmonella enterica
atgagtcagaatacgctgaaagttcatgatttaaatgaagacgcggaatttgatgagaacggagtagaggcttttgacgaaaaagccttgagtgaagaggaacccagtgataacgacctggctgaagaagagctgttatcgcaaggggccacacagcgtgtgttggacgcgactcagctttaccttggtgagattgggtattcaccactgttaacagccgaagaagaagtctattttgcgcgtcgcgcactgcgtggagatgtcgcttctcgccgtcgcatgattgagagtaacctgcgtctggtggtaaaaattgcccgccgttatggcaatcgtggactggcgttgctggacctgattgaagagggcaatctggggcttatccgtgcagtcgagaagtttgacccggaacgcgggttccgcttctcaacatacgcaacctggtggattcgccagacaatcgaacgggcgattatgaaccaaacccgtacgattcgcttgccgattcacattgttaaagagctgaacgtatacctgcgcaccgcacgtgagttgtcgcataaactggaccacgaaccgagtgcggaagaaattgcagagcaactggataaaccggttgatgacgtcagccgtatgcttcgtctcaacgagcgcattacctcggtagacaccccgctgggcggtgattccgaaaaagcgttgctggacatcctggccgatgaaaaagagaacggtccggaagacaccacgcaagatgacgatatgaaacagagcatcgtcaaatggttgttcgaactgaacgccaaacagcgtgaagtgctggcgcgccgtttcggtctgctgggatatgaagctgcgacactggaagatgtaggccgtgaaatcggtcttacgcgtgagcgtgttcgtcagattcaggttgaaggcctgcgccgtctgcgcgaaattctgcagacgcaggggctgaatatcgaagcgctgttccgcgagtaa

SEQ ID NO: 368094 - DNA, 237 bp, Salmonella enterica
atgatttgtccacgctgtgccgatgcacatattgaactcatggcgacttctccggtaaaaggagtctggacggtatatcagtgtcagcattgtctgtatacctggcgcgataccgaaccgttacgccgtaccagccgcgaacactatccacaagcgtttcgcatgacgcaaaaagatattgatgacgcgccaatggtgccgagtatcccgccgctgctggcagaagacaaacggtaa

SEQ ID NO: 368095 - DNA, 1428 bp, Salmonella enterica
atggcatttgatgatttgcgcagttttttacatgcgctggatcagcagggacaactgctgaaaatcagcgaggaagtgaatgcggagccggatctcgccgccgctgccaacgcaacgggacgcatcggcgatggcgcgcccgcgctgtggtttgacaatattcgtggttttaccgacgcccgcgtggcgatgaataccatcggttcctggcagaaccatgccatctcactgggtttgccgcctaacacgccggttaaaaaacagatcgatgaatttattcgccgctgggacaattttccggtagcgccggaacgacgggcgaatccgggctgggcggaaaataccgtcgacggcgacgcaatcaacctgtttgatatcctgccgctgtttcgtctgaacgacggcgacggcggattctatctggataaagcctgtgtggtatcacgcgatccgctcgatcccgataacttcggcaagcagaatgtcggcatctaccgcatggaagttaaaggcaagcgtaagctgggtctgcaaccagtgccgatgcatgatatcgcattgcacctgcacaaagctgaagagcgcggggaagatctgccgattgcgatcacgttgggtaacgatccgatcattaccctgatgggcgcaacgccgctgaaatacgatcagtcagagtatgaaatggcaggcgcgctgcgtgaaagcccctatcctatcgccaccgcgccgctgaccggttttgatgtgccgtggggatctgaagtcattcttgaaggggtcatcgaaagccgtaaacgtgaaattgaaggaccgttcggcgaatttaccggccactattccggcggtcgcaacatgaccgtggtgcgtatcgataaggtctcttaccgcagcaaacccatttttgaatcgctctatttggggatgccgtggacggaaatcgactacctgatggggccggcgacctgcgtgccactgtatcaacagctgaaagccgaatttccggaagtgcaggcggtaaacgccatgtacacccacggcttgctggccatcatctcgaccaaaaaacgctacggcggctttgcccgtgcggtgggcctgcgagcgatgacgacgccgcacggtctgggatatgtgaagatggtgatcatggtcgatgaagatgtcgatccattcaatctgccacaggtgatgtgggcgttgtcgtcgaaagtgaatccggcaggcgatctggtacagctaccgaatatgtccgtcctggaactggacccgggctcaagcccggcggggattaccgacaagctgatcattgacgccaccacgccggttgcgccagataaccgtggtcactatagccagccggttgttgatttaccggaaactaaagcctgggctgaaaagctgaccgccatgctggccaaccgtaaataa

SEQ ID NO: 368096 - DNA, 594 bp, Salmonella enterica
atgagattgattgtggggatgaccggtgcgaccggcgcgccgcttggcgtcgagctactccaggcattgcgggcgatacctgatgttgaaacgcatctggtaatgtcaaagtgggcgaaaaccactattgaactggagacgccctacacgcccgctgaggtagccgccctggcagattattgtcatagcccggccgatcaggcggcgaccatttcctccggctcatttcgtaccgacggcatgattattatcccctgcagtatgaaaacactggcgggggttcgcgccggctatgccgaggggctggtgggacgcgctgccgatgtcgtgttgaaagagggtcgcaagctggtgcttgtgccgcgggaaatgccgctcagcacgattcatctggaaaacatgctagcgctttctcgtatgggggtggcgatagtgccgcccatgcccgccttctacaacctgccgcaaaccgttgacgatattatccagcacatcgtagcgcgcgttctcgaccagtttggtctggagcatacgcgcacgcgccgctggcaaggactgcgacaggcagcaaatttttcacaggagaatggataa

SEQ ID NO: 368097 - DNA, 405 bp, Salmonella enterica
atggagttacgaaacaccgcgtttcatctgttacgccaactttttcagcaacataccgcacgctggcagcatgaactaccggagctcaccaaacctcaatatgcggtgatgcgcgttattgctgaacatccgggtattgaacaggtcgatctgaccgaagcggcggtcagcactaaagcgacgctggcggagatgttaagccggatggaaaatcgtgggctggtgaagcgagaaaacgatccgctggataaacgtcggcgttttgtctatctcaccgttcagggccaaacgttgctcgccgccgcgataccactgggggatcgcgttgacgatgagtttttggggcgactgagcgctgaagaacgcgaacagtttacgcaactggtacgcaagatgatgacgtaa

SEQ ID NO: 368098 - DNA, 765 bp, Salmonella enterica
ttgatacctactgagcgtcgacaaatcattcttgatatggtggcggagaaaggaatcgtcagtatcgctgaactgaccgagcgcatgcatgtatcccacatgactatccgccgtgatttacaaaaactggagcagcaaggcgcggtaatccaggtctctggcggcgtgcaatcatcgactcgcgtggcgcacgaaccctcgcatcagatcaaaaccgaactggcgacgccgcagaaagcggcgattggcaaactggccgccagcctggtacagccagaaagctgtatctaccttgatgcaggtactaccacgctggcgatcgccaggcagctggttacgatgaataaacttacggtggtgaccaatgatttcgttatcgccgattacctgatggacaatagcgattgcacaattattcacactggcggggcggtatgccgggaaaaccggtcgtgcgtcggtgaagccgcggcgacgcttttgcgtgggttgatgattgaccaggcctttatttccgcctcttcctggagcgtgcgcggtatttcaacgccggcagaagataaagtcacggtgaaacgggccgtcgccagcgccagccgccaaaaaattctggtgtgcgacgcgaccaaatacggccaggtcgctacatggctggcgttaccgctggcggaattcaaccaaatcgtcaccgatgacggcctgccggaaagcgcaattcgggcgctggccaaagtggatatctcactgctgatggccaaacaatag

SEQ ID NO: 368099 - DNA, 924 bp, Salmonella enterica
atgacaacaggaactgattttcatgtcggcattgtggggcttggctcaatgggaatgggcgctgcgcgttcatgcctgcgcgccgggctttccacatggggggccgatcttaacccgcaagcgtgcgcgaatctgctcgctgaaggggcttgtggggctgccgccagcgccagggagttcgccggcgtcgtggatgcgttagtcattctggtcgtcaatgccgcccaggtcagacaggtgttattcggtgaggatggcgtcgcccatctgatgaaacccggaagcgcggtgatggtttcgtctacgatctcaagcgccgacgcgcaagagatcgccgcggcgttgacggcattgaatcttaacatgctggatgcgccggtttccggcggcgcggtaaaagcggcgcagggcgaaatgacggtgatggcctccgggagcgaggcggcgtttacccgcctgaagcctgtgctggacgccgttgccagcaacgtttatcgcatcagcgatacgccgggcgcaggctcaaccgtcaaaatcattcatcagctgctggctggcgtgcatattgcggcggcggccgaagcgatggcgctggccgcgcgggctggtattcctctggacgtgatgtatgacgtcgtgacccatgccgccggcaactcctggatgttcgaaaaccgtatgcagcatgtcgttgacggcgactataccccgcgttcggccgtcgacatttttgtcaaagatttggggctggttgccgacacggcgaaagcgctgcgcttccccttaccgctggcctctacggcgttaaatatgttcaccagcgccagtaacgccggttatggcaaagaggatgacagcgctgtgatcaaaattttctcagggattactctgcctggcgtcacgcctgaggagccgtcatgttaa

SEQ ID NO: 368100 - DNA, 1263 bp, Salmonella enterica
atgttaaaaattggcgtcattgccgacgattttaccggcgcgactgacatcgccagttttctggtcgaaaacgggatgccgacagtgcagatcaatgatgtcccaaccgggacgcaaccggaagggtgcgacgcggtggttatcagcctgaaaacccgctcatgcccggcgcaagaggcgataaaacaatcgctggcggcgctggtatggctgaaaaaacagggctgccagcaagtctatttcaaatattgctcgactttcgatagtaccgccgaaggcaatatcggcccggtcaccgatgcgctgatggtggcgctggatacctcatttaccgtgatttctcccgcgctgccggttaacggacgcacggtttatcagggctatctgtttgtcatgaaccacttgctggcggagtccggtatgcgccaccacccaatcaatccgatgaccgacagctacctgccgcgtctgatggaagcgcaggcgcaagggcgctgcggcgttattccggctcagacgcttgatgaaggcgttgccgcgacccgtgcggcgctgtcgcgtttacagcaggaaggatatcgctacgcagtacttgacgcgctcaatgagcggcacctggaaatccagggcgaggttttgcgtgatgctccgctggtgaccggcggttctgggctggcaatggggctggcgcgtcagtgggcgaagcacggcgtttctcaggcccgttccgcaggctatccgctgagcggccgcgcggtggtgctttccggttcctgttcgcaaatgacgaatcagcaggtggctttctatcgacaacatgctcccacacgcgacgttgatgtggcgcgctgcctgtcatccgagacgcgcgaggcctacgctgaagcgctggcgcagtgggtgctcagtcaggacagcgaactggcgccaatgattagcgccaccgcctccacgcaggcgctggccgccatccagcagcaatatggcgctaccgaagccagccatgcggtagaggcgctcttttccctgctggctgctcgcttagcggaaggcggtatcacccggtttattgtggcgggcggcgaaacctcgggcgtggtgacgcaaagcctcggtattaccggttttcacatcggaccgtgcatttcacccggcgtgccgtgggtcaacgcgctccatgcgccagtctcgctggcgctaaagtcaggtaattttggcgatgaatcctttttcatccgcgctcaaagggagtttcaggtatga

SEQ ID NO: 368101 - DNA, 639 bp, Salmonella enterica
atgacgacactggcaaaagaagagcacgctttgcgagaagagatggtcaggatagccgcctcgtttttccagcgcggctatgccaccggctcggcaggcaacctctcgctgttactgccggacggcaatattctggcgacgcccaccggttcgtgtctgggtaatctcgacccgcagcggctatccaaagtggacccgcagggcgaatggctcagcggcgataaaccgtctaaagaggtgcgttttcatctggcgttgtatcgcaataacccttgctgcaaggccgtggtacatctgcacagcacctggtcaacggcgctttcctgtctcgaagggctggacccgcaaaatgtgattcgcccgtttaccccctatgtggtgatgcggatgggcgacattccgctggttccctactatcgcccgggggatgaccgaattgcccgcgatttggctgcgctggcggcccggcatcaggcctttttactggctaatcatgggccggtcgtgtgcggggagaatttgcaggaagccgctaataataccgaggagctggaagagacggcaaagctgatttttatccttggcgaacgcccgattcgttatttaaccaccgaagaaattacgcagttaaggagataa

SEQ ID NO: 368102 - DNA, 777 bp, Salmonella enterica
atgccgcgttttgccgccaatttgtcgatgatgtttaccgaagtgccgtttatcgagcgttttgccgccgctgccgaagccggttttcaggccgttgagtttctgttcccctacggctttgccgccagcgagattaaagcccagctatcgcgtcatgatctgacgctggcgctgtttaatacttcggcgggcgataccgcggcgggcgagtggggacgtgccgcgctaccggggcgcgaacacgacgcgcgcgccgatattgaactggctctggaatacgctctggcgctggaatgcgagcaggttcacatcatggcgggcgtagtgcaggatggcgctgatggcgcacgttatcgcgccacgtttatcgataatttgcgttatgccgccgaccggtttgccgcccacgataaacgtattttgatcgaagcgctgagtcccggcgttaaacccggctacctcttttccagccaatatcaggcgctgggcatcgcagaagaggttgaccgcccgaatgtgttcatccagctcgacactttccacgcgcaaaaagtggatggcaatttgagtcacctgattcgcgagtacgcgggccgctatgcccatgtacaaatcgcctcgctaccggacagacatgaaccggatgatggcgagatcaactacccgtggctgttccggctgttcgatgacgtaggttatcgcggctggataggctgcgaataccaaccacggaataccactcaggacgggcttggctggtttaacgcctggcgctaa

SEQ ID NO: 368103 - DNA, 951 bp, Salmonella enterica
atgcagattatcattaccggcgggggcggctttttaggccagaaactcgcaagcgccttattaaactcatcgctggcgtttaacgaactgcttcttgttgatttaaaaatgcctgcacggttatcagattcccctcgtttacgctgcctggaagctgacttaacccagccgggcgtgctggagaatgtgattaccgctaatacctctgttgtttatcatctcgctgcgattgtcagcagccatgcggaagacgatttcgatctgggatggaaagttaacctggatcttacacgccagttacttgagacgtgtcgtcgacaaccgcagaaaattcgttttgtcttctccagctcgcttgccgtttatggcggtacgctgccggaatgcgtcaccgataccaccgcgctcacgccgcgctcgtcttatggcgcgcagaaagccgcctgtgaactgttggtcaacgattatacccgcaaaggctatgtggatgggctggcgctgcgtttgccgacgatctgtgttcgcccgggtaaaccaaaccgcgccgcttcttcttttgtcagcgcgattattcgtgaaccgttgcagggcgagacgaccgtctgcccggtgtcggaaagtttgcggctgtggatttccagcccggcgacggtgatccataacctgtcgctggccgcaacgttacccgcgcctggcgaggcgagcagcatcaacttacccgggatcagcgtaaccgtgggcgagatgctggaaacgttgcgtcaggcgggcggccaggcggcgcgcgatcgggttacgcatcagcgcgatgaaggcgtcgagaaaattgtcgcctcctggccgggacgtatcgataaccagcgtgcgctggcgttaggttttgtcgccgataaacgcttcgatgacattattgaacgctttcgacaagatgatatggaggggaggtcatga

SEQ ID NO: 368104 - DNA, 1497 bp, Salmonella enterica
atgacaagtttaccgaccccaattattggcctgatcgttgccgttttcgtgctggtatggctggtgttacgcacccgtgttcatgcgctgatcgcgatgctggcggcggcctgcatcgccggtctgttggggggaatgggcattgataaaacgctctctgtcatcaccagcggattcggtacgacgctgggcagcattggcctggtgattggtctcggcgtaatgatggggcgcttgctggaggtttccggcgcggcggagcgtatcgcctggagctttatcaaatggctggggaaacgccgtgaagagtgggcgctggcgatcacgggttatattgtcagcatccccattttcgtcgattccgcttttgtcattctttatccggtggcgaaagcgctggcgaaaagcggtaaacgttcgctactgacgctgggcgtcgcgctggcgggcgggctggtggtcactcaccatacggtacctccgacgcccggtccgctgggggtagccgggatttttaacgtcgacatcggcgcaatgttattgaccgggatggcgctggcggtgccctgtgtgatcggcattgtgttctatgcgcagtggctggataaacgctaccctgatttcgtgccgcgcacgctgaacgccgatgaagtcaatgccgcgctggagcagtacaataaagagaaagagcaaaaggatctgccgagcctgacgctctctctgctgcctattgtggtgccgatcgtgctgatcttcctgaaggctatctgttccaccctcgccactgtagaaggatggtccggcctggcgacgcatccggtggtacaggcaatcaactttgtgggaagtccagtgatcgcgttggccatcagcgttctgctggcggtgtatacgctggtgccgcgcatggataaacataccaccgcagagcgtctggaagagggcttgcaaagcgccgggattatcttactggtcacgggcgctggcggcgcgttgggcgcgatcctgcgcgacagcggcgcggggcaacagctggcggagcaggttgccaacctgccgatctcgccgatcctgatcccgtttatcgtggcgacgttggtacgcctgattcagggatcggggacggtggcgatgatcactgccgcctcgatttccgcgccgatcctggcgcagatccccggcatcaatatgttgcttgccgctcaggccgcaacgatggggtcgctgttcttcggctacttcaacgatagcctgttctgggtggttaaccgcatgatgggcgtctctgatgtcaaacagcagatggtggtttggtctgtaccgacgactattgcctgggcgattggcggcaccggcgtggcgctgattaacctgctgttcggttccggcggcagttggctcgatccgttactgccgattgtcgttctggcggcaattatgctgtgggtgcgttggcaggcgcaggggatcaaagacaagctggtagttaaggattaa

SEQ ID NO: 368105 - DNA, 912 bp, Salmonella enterica
atgctcaatttgcagcgtatgtcgctgtttatcgccgtggtagatagcggcagcttcacggcggcggcggccgcatcgggccaaacaaaagcggtagtgagttttaatattcggcagcttgaaaaagagcttggcgtaacgttactgctacgttccacccgacgactgacgctcacagacgccggcgtcctcttttaccaaaaaggcgtgaatttactcaacgcagcgaaaaatttgcaggatgaagtgcgtgccagccatagtgggctgggcggcgagttacgtattaccactacgcccgagtttggcgaacaggtgatcattccgttactggcgcagtttagtcagcgccatcccgatctccgtattcggcatatgtcctcatcacatcatgccgatttaattgccgagcgctttgatgtggcgattcggcttggctcgctggccgactcccgctatcgcgccgcgctgatatcccgctttaccattctgccggtcgccgcgccgcagtggctcgcccgccaccccgtgtcgtcgctggagtcgttggctcaggcggaatggattattcatgagcgattacctacgccgctacggtggtcagtaacgaataatcatggccaacactcacgcctggagataagcaaagccggcaaaatttctgtcgacagcgcgcgctcgctgatggccttcgctctcgcgggaagcggcgtcgcattactgccgcaatggttagtcaacaccgcactggaggatggaacgttaattcacgtgttacccgactatcattttccccgtcagggcatttatgccgtttacccggacgcccgccatgtaacgacaaaagtacgcgcatttattgattttttacgttcgcaatgggattgcggggagcacgccccatcattgtag

SEQ ID NO: 368106 - DNA, 1209 bp, Salmonella enterica
atgacgtatcgcagtaaagtggcagtggtttacctgctcggcttctttcttgatctgattaatctgtttattgccagcgtggcttttcctgcgatgtccgtggagctgcatacgtccatatcggcgctggcatgggtgagtaacggttatatcgcaggattaacgctgatcgttccgtttagcgcgtttctttcgcgttatctcggcgcacgacggctgattatattttcgctcattctgtttagcgttgccgccgctgccgcaggttttgccgattccttacacagccttgttttctggcgtattgtgcagggggcgggcggtggcttattgatcccggttggtcaggcgttaacctggcaacagtttaaaccgcatgaacgcgctggcgtgtcatcggttgtcatgatggtggcgctactggcgccggcatgttcgcctgcgattggcgggctgctggtggaaacgtgcggctggcgctggatattctttgccacgctgccggtggccgttctcactttattgctcgcttatcgttggctgaacgtcgcttcgacgacaatggtgtcagcaagattgctccatctgccgttgttgacggacaagctgctgcgttttgccatgatcgtctatctgtgtgtgccgggtatgttcattggtatcagcgtggtcgggatgttttatctacagaacgtcgcgcagctatcgcctgcggcggcggggtcgctgatgctcccctggtcgatcgcttcatttgtcgccattatgcttaccggacgttatttcaatcggcttgggccgcgtccgctgattatcgtcggctgtcttcttcaggccgcagggatattgcttttaactaacgttacgcctgcgacatcgcaccgtgtactgatgatgatattcgccttaatgggcgctggcggcagtttgtgcagcagtaccgcgcagagtggcgctttcctgactattgctcgccgggacatgcctgacgccagcgcgctatggaatcttaatcgtcagatcagctttttccttggcgcgacgctgttgacgctgctgttaaatgcgttccagcgcgttatgtcgcttgaggttgcttatcgctggacctttattgccgccgccggtatcaccctgctgccccttatttacgctgtctgtctgaacaatagacaggcgcttctgtgcctgaaaaaggaaagaccatga

SEQ ID NO: 368107 - DNA, 381 bp, Salmonella enterica
atgaatccatataaagaagaaattattcacgcccatgcggcgattgagaactggcttagtaaggggatgggtagcctggaggcgttgatagcgcgtttcgctgttgattttacgatgataacgccaggaggtatttgtctggattatccggcgctgggcgcttttttccaggcgcagcgcgcgtgtcgcccggggatggttatcgtggttgagcacattgaccttgtggcggagtggccggaaggcgccgcgctgcgttatcgcgagcgacagcaactgccgggccaggctgagacggtacgctggtcgacggtcattttaaaaagggaaagaggacggatagtctggcgtcatttacatgaaacgacagccacagcctga

SEQ ID NO: 368108 - DNA, 2568 bp, Salmonella enterica
atgaatgagtcatttgataaggacttctccaaccacacccccatgatgcagcagtatctcaagctgaaagcccagcatccggagatcctgctcttttatcgtatgggagacttttacgagctgttttatgacgacgcaaagcgtgcgtcgcagttgctcgatatttcgctgaccaaacgcggcgcatcggctggcgaacctatccctatggcgggtatcccgcaccacgccgtagaaaactacctcgcgaaactggtcaatcagggcgaatccgtcgctatttgcgaacagattggcgatccggccaccagcaaaggtcccgttgaacgtaaggtcgtgcgtatcgttacgcctggcactatcagcgatgaagccctgttacaggagcgtcaggataacctgctggcggctatctggcaggatggtaaaggctacggttacgccacgctggatatcagctccgggcgctttcgtctgagcgaacccgccgaccgtgaaacgatggccgcagagctgcagcgcaccaatcccgccgaactgttgtatgccgaagattttgctgaaatggcgttaatagagggacgccggggtctgcgccgtcgcccgttgtgggagtttgagattgataccgcccgccagcagttaaatctgcaattcggtacgcgggatctggtcggtttcggcgtcgaaaatgcctcgcgtggattatgtgcggcaggctgcctgttacagtacgtaaaagatacccagcgcacctccctgccgcatattcgttccattacgatggaacgccagcaggacagcatcattatggatgccgcgacccgccgcaatctggaaattacccagaacctggccggcggtgtcgaaaataccctcgccgcggtgcttgactgtaccgtgacgcctatgggtagccgaatgcttaaacgctggctgcatatgccggtacgaaataccgacatattacgtgaacgccagcagaccatcggcgccttgcaggacaccgtcagcgaactgcaaccggtgctgcgtcaggtcggcgatctggagcgtatccttgcgcgtctggcgctgcgcaccgcgcgtccgcgcgatctcgcccgaatgcgtcacgccttccagcagctgccggaattgcacgctcagcttgaaaccgttgacagcgcgccggtacaggcgttgcgtaaaaaaatgggcgatttcgccgagctgcgcgacctcctggaacgcgccattattgacgcgccgccggtactggtccgcgacggcggcgttattgcgcccggctaccatgaagagctggacgaatggcgcgcgctggcggatggcgccaccgattatctcgatcgtctggaaattcgcgaacgcgagcgtaccgggctggatacgctgaaagtcggctataacgcggtacatggttattacattcagattagccgtggtcaaagccatctggcgcccatcaattatgtgcgtcgccagacgctgaaaaatgccgaacgctacattattcctgagctaaaagagtatgaagataaagttctgacctcgaaaggcaaagcgctggcgctggaaaaacagctatatgacgaattgtttgatctgctgttgccgcatctggccgatttacagcagagcgccaacgcgctggcggaactggatgtgctggttaacctggccgaacgcgcctggacgctgaattacacctgcccgacatttaccgataaacccggtatccgtattaccgaaggtcgccacccggtggttgaacaggtactgaatgagccgtttatcgctaacccgctcaatctgtcgccgcagcgccggatgttgatcattaccggccccaatatgggcggtaaaagtacctatatgcgacaaacggcattgatcgccctgctggcctatattggcagttacgttccggcgcaaaacgtggaaatcggccccatcgaccgtatttttacccgcgtcggcgcagcggacgacctggcttccgggcgttcgacctttatggtggagatgaccgaaaccgcgaacattctgcataatgccacggaaaacagtctggtattgatggatgaaatcgggcgcggtacctctacgtatgacgggctgtcgttggcctgggcctgcgcggagaatctcgcgaataagattaaagcgttaacgctgttcgctacccactacttcgagctgacccaattaccggagaaaatggaaggcgtggcgaacgtccacctggatgcgctggaacacggcgatactatcgcgtttatgcacagcgtgcaggacggcgcggcaagtaagagctatggcctggcggtcgcggcgcttgcgggcgtccctaaagaagtcatcaaacgcgcgcgccaaaaactccgcgagctggagagcatctcgcccaatgcggcggcaacgcaggtggacggcacgcaaatgtcgttgcttgccgccccggaggagacatcgcctgccgttgaagcgctggagaatctcgatccggactccctgacgccacgccaggcgctggagtggatctatcggctgaaaagtctggtgtaa

SEQ ID NO: 368109 - DNA, 669 bp, Salmonella enterica
atggaaagtcgtcaatacacccggcatctttcgctttcggagctgaaatggtttgctatcgggatcggtttttttattctcagcatagcaacagccaccgtgaattatcggctttccggtatatcgctactggtgggcctgttgtttatcatctggaaattcagcgtcacagttctgtttctgtttacgccgcgcaggatgacgttaaccgaaaccgcgttgcaggccgggcatcgtgttatccattacgatgcgcttgaatcaatgcgtctgctccaccaatccgacaaactcatcttgcgccacagtggcggcaagaagtacgtcatctaccttgatttctggaacgatggcaacggaatttacgaccgactggctgctgaacttgtccggcgacacggttctgcgctgggggcgcgcctcgccgccgatggacgtcttaaattcggcaaagtgaccgcgctggcggatcggcttgaacacaaaaaccgggcggtgccgtatgcgcagatcgccagtattcgcacccagcgcgaggagggggctggcagttcaatgagctatctgatgattagcaccgctacgggccggatctgcaaaatcgaccgctccactatcgtcaatgagccgctgctgctcaactttctttcccagcgtttacccgcctga

SEQ ID NO: 368110 - DNA, 495 bp, Salmonella enterica
atggaactgtacgtatcaaaaaccagccagcaaaacatgcctgtggagttcaatatctattattccagatctaaaacgttggttggtattgtgttctggatttgtatgatgggagtttttattgcgctggcggtgagtatggccaccgatcccgaggagcccaaaactggcggtgccgtctttatggggcttatttgttgcggcagtctgttatttattgtgcgcctggctcgctcatttttaagcgcggcaaagccggcagtcaccatcagtcgtgaaggtattcgcttctgtaatggcaaattcgcggcctggacaaatatcgccgaaaacacctggcattcacagagcattaacttcatcccggccgccgccggtattaagattgtgttgcatgaaggcaagccgatccatttcgccaccacggttattgcgctttcttccgataggtatcttgagatgtgcgatctttactcgtctcaggcgctcgggtaa

SEQ ID NO: 368111 - DNA, 657 bp, Salmonella enterica
atggaattaatccgttatgctgacatcaacagcgatctctatcgccacatttgggtcgttggtgatattcatggatgttactccttattgttaaccagactggctcaattaaatttctctcctgataccgatctcttgatctccactggagataacattgatcgaggaaaagaaaaccttgaaacactgagactgttaaataccccatggtttatttctgtagtgggtaatcatgaagctatggcgcttgacgcttttgaaacacaggatggcaatttctggtatgtaaacggtggttactggtacgactcggtcaccgaaaaagacaggcaagaagccactgagctattactaacttttaagcagcgtcctcacatcatagaggttgaaacgtcctcaaagaagtacgtgattgcccatgccgattatccagatgacagctacgattatgggaagcaagttgatattgatagcgttctatggtcacgcgatcgtctgcttggttcgttacaggggaatatccatccaatacgcggtgcggatactttcatcttcggccatatgattgttgactacacaacaacattcgccaatcaaatctacattgacacaggttctttctgttcaggcaatctgtctttttttaaaataaagtaa

SEQ ID NO: 368112 - DNA, 177 bp, Salmonella enterica
gtgggctatcaccgtcgttcagtagtggaaacagcgatgttccgtatcaaaaccttgctgggcggccatctgagcctgcggaactatgacgcgcaggtgggtgaagcgatggcgatggtcaaagcgctgaaccggatgacgttgttggcaatgccgtccagcgtcaggctcgtataa

SEQ ID NO: 368113 - DNA, 528 bp, Salmonella enterica
atgatgtttacagactggcatgaggccgcgatagggaaaacccacaatcgaatgaattttgattgtggggatgccgatctgaaccaattcctgcaacgccatgcacgacaaaatcatgagaaagggacaacgaaaacctatgttgcgcttgataattcggatgttacacgtatccacggcttttactcagtcagtcctgcatcactgatatatgcacaggttcccggcgcaatcagcaaaggattagggagatacgatgtgccagtgtttcgtctgggtcgtttagccgtagacaaatctatgcaggggcaagggctgggagcacaacttttgttatctgccggaaagcgttgcatacaggcggctttgcaggtcggtggcgtagccctacttattgatgccaaaaataaacaggtctgcgactggtacaaaggatttggcgcagtaccattaaacgatcaacccctttccttgttgctgtcgtttaaaacgctttatgctgctttatctgcatctggtaggttatga

SEQ ID NO: 368114 - DNA, 282 bp, Salmonella enterica
atgcctcagatagctatagaatctaacgaaaggctgtcgttgcgtgtatcgacggatgccaaaaagttgatagtccgcgctgcggcaatccagcaaaccaacctgacggattttgtggtcagtaacgtactacctgtcgcacagaagattgttgatgccgccgaacgggtatatctgacggagcgcgatactcaaatgatcatggaaattttagataacccgccagcgccgaatgaaaagcttcttgccgctgctttcgccctgccggacatgaagaaatga

SEQ ID NO: 368115 - DNA, 444 bp, Salmonella enterica
atgaaaaaattttatagctgtcttcctgtctttttactgatcggctgtgcccaggtgcccctcccttcctccgtgagcaaaccggtacagcaacctggcgctcagaaagagcaactggccaacgcaaatagtattgatgagtgtcagtctcttccgtatgtgccgtcagaccttgcgaagaataaatcattatcaaaccagaacgctgataattccgcatcaaaaaatagcgcaatcagctcaagcattttttgcgaaaaatataaacaaaccaaagagcaggcgctcaccttcttccaggaacatccacaatacatgcgttcgaaagaagatgaagagcaactcatgaccgaatttaaaaaagttcttcttgaacccggaagtaagaatttaagcatatatcagacgttacttgctgcccatgaaagactgcaatccttataa

SEQ ID NO: 368116 - DNA, 750 bp, Salmonella enterica
atgctaaatacgcaggaagtacttaaagaaggagagaagcggaaaatccgcagcccggaagcatggtttatacagacgtgttccgcgcaaaagctgcatatgtcattttctgaaagccgacacaatgaaaattgcctgattcaggaaggcgcgctgcttttttgcgagcaggccgttgtcgcaccagtatcaggagacctggtttttcgaccgttaaaaattgaagtactcagcaaattactggcatttatcgatggcgcaggattagtggacacgacatatgctgaatccgataaatgggttttgctgagtcctgagtttcgcgctatttggcaagatcgtaaacgctgcgagtactggtttttgcagcaaattattacgccttctccggccttcaataaggtactggcgctgttacgaaaaagcgagagttactggttggttggctatttactcgctcagtcaaccagcggcaacacgatgagaatgctgggagaagactatggcgtttcttatacccattttcgtcgtttgtgcagcagagcgttgggcggaaaagcgaagagtgaattacgaaactggcgtatggcgcaatcgctgctgaatagtgtagaaggccacgagaacatcacccaattagccgttaatcatggttactcatcgccttcacatttttctagtgagatcaaagagctgatcggcgtttcgccgcggaaattatcaaatattattcaattggcagacaaatga

SEQ ID NO: 368117 - DNA, 1689 bp, Salmonella enterica
atgaagacacatattcttttggccagagtgctggcatgtgccgcgcttgttctggttacacctggttattctagtgaaaaaatacctgtaacgggaagtgggtttgttgcgaaagacgatagcctgcggacatttttcgatgccatggcgctacagctaaaggagcctgtcattgttagcaaaatggcggcacgaaaaaaaattacgggcaactttgagtttcacgatcctaacgcattactggagaagctttccctacaactggggctgatttggtatttcgatgggcaggctatctatatttatgacgccagtgaaatgcgcaatgccgtggtttctttacgcaacgtctcactcaatgagttcaacaattttctaaaacgctcaggtttatataacaaaaattacccgctacgtggcgataaccgtaaaggaacattctatgtttcagggccacccgtctatgttgatatggtggtcaacgccgccaccatgatggacaagcaaaacgatggtattgagctgggacgtcagaaaataggggtgatgcgtctgaacaataccttcgtgggcgatcgtacctataatctgcgcgatcagaaaatggttatccccggtattgccacggccattgaaaggttgttgcagggagaagagcaacctttaggtaatattgtcagtagcgaacccccggcgatgccagcgttttcagcgaatggagaaaaaggtaaagcagcaaattatgccggtggcatgagtctgcaggaagctttaaagcaaaatgccgcggcgggcaatattaaaatcgtggcctatccggataccaacagtttgttagtaaagggaacggctgagcaggtgcattttatcgaaatgctggttaaagcgctggatgtcgccaaacgtcacgtagaattatccctgtggattgtcgatcttaataaaagcgatctggagcgtttgggcacttcatggagcggcagcattactattggggacaaacttggcgtgtcattaaaccagtcttcaataagtaccctcgatggcagtcgattcatcgccgcggtcaatgcgttagaagagaagaaacaggcgacggtggtttcacgcccggtattactgacccaggaaaatgttcccgctatttttgataacaacagaacgttttacaccaagctgattggggaacgtaatgtggcgcttgagcatgtaacatacggaacaatgatccgagtgctgccccgtttttccgcagatggtcagatagaaatgtcgctggacattgaagatggcaacgataagacgccgcaatccgatactaccacctccgtagatgcgttacccgaagtcgggcgaacgttaattagcactattgcgagagtgccgcacggaaaaagtttgctggtcggtggttatacacgggatgcaaataccgatactgtccaaagtattccgtttttaggcaaattaccgcttattggtagcctgttccgctattccagtaagaataaaagtaatgttgttcgtgtgttcatgattgaaccaaaagaaattgtcgacccgttaacgccggatgccagcgaatcggtaaacaatattctgaagcaaagcggtgcctggagtggggacgataagttacagaaatgggttcgtgtttatctggatagaggtcaggaggcaattaaatga

SEQ ID NO: 368118 - DNA, 1119 bp, Salmonella enterica
atgattcctggctcaacctccggtatttcattttccagaatattgtcccggcagacatctcatcaggatgcgacccagcatactgatgcgcaacaggcggaaatacaacaggccgcagaggattcgtctccaggggcggaagtacaaaaatttgtccagtcgacggacgaaatgtcagcggcgctggcgcaatttcgtaaccgtcgcgattatgaaaaaaaatccagtaatttatctaacagttttgaacgcgtgctggaagatgaggctttaccgaaggcgaagcaaatcttaaagctaattagcgtacatggcggcgcgttagaagattttttacgtcaggcgcgtagcttatttcctgaccccagtgatttagtccttgtgttacgcgaattgcttcgtcgtaaagacctggaagagatcgtgcggaaaaagctggagtcgttacttaagcacgttgaagagcaaaccgatccgaagaccctcaaggcagggattaattgtgcgttgaaggcccggctttttgggaaaacattatcgttaaaaccaggcttattgcgcgccagctatcggcaatttatccagagtgaatcacatgaagtggagatttactctgactggatagccagttatggctatcaacgtcgactggtggtactggattttattgagggttcgctattaaccgatattgacgcgaatgacgccagttgttcgcgcctggagtttggccagcttttacgacgcctgacgcaacttaaaatgttgcgctccgctgacctactgtttgtgagtacattgttgtcgtattcgtttaccaaagcgtttaatgcggaggagtcgtcgtggctactactgatgctttcgctattgcaacagccacatgaagtggattcgctgttagccgatattataggtttgaatgcgttattgcttagtcataaagaacatgcatcctttttgcagatattttatcaagtatgtaaagccataccctcttcactcttttatgaagaatattggcaggaagaattgttaatggcgttacgtagtatgaccgatattgcctacaagcatgaaatggcagaacagcgtcgtactattgaaaagctgtcttaa

SEQ ID NO: 368119 - DNA, 2058 bp, Salmonella enterica
gtgctgctttctctacttaacagtgctcgtttacgacctgaattactgattctggtactaatggtgatgatcatttctatgttcgtcattccattacctacctatctggttgatttcctgatcgcactgaatatcgtactggcgatattggtgtttatggggtcgttctacattgacagaatcctcagtttttcaacgtttcctgcggtactgttaattaccacgctctttcgtctggcattatcgatcagtaccagccgtcttatcttgattgaagccgatgccggtgaaattatcgccacgttcgggcaattcgttattggcgatagcctggcggtgggttttgttgtcttctctattgtcaccgtggtccagtttatcgttattaccaaaggttcagaacgcgtcgcggaagtcgcggcccgattttctctggatggtatgcccggtaaacagatgagtattgatgccgatttgaaggccggtattattgatgcggatgctgcgcgcgaacggcgaagcgtactggaaagggaaagccagctttacggttcctttgacggtgcgatgaagtttatcaaaggtgacgctattgccggcatcattattatctttgtgaactttattggcggtatttcggtggggatgacccgccatggtatggatttgtcctccgctctgtctacttataccatgctgaccattggtgatggtcttgtcgcccagatccccgcattgttgattgcgattagtgccggttttatcgtgactcgcgtaaatggcgatagcgataatatggggcggaatatcatgacgcagctgttgaacaacccatttgtattggttgttacggctattttgaccatttcaatgggaactctgccgggattcccgctgccggtatttgttattttatcggtggttttaagcgtactcttctattttaaattccgtgaagcaaaacgtagcgccgccaaacctaaaaccagcaaaggcgagcagccgcttagtattgaggaaaaagaagggtcgtcgttgggactgattggcgatctcgataaagtctctacagagaccgtaccgttgatattacttgtgccgaagagccggcgtgaagatctggaaaaagctcaacttgcggagcgtctacgtagtcagttctttattgattatggcgtgcgcctgccggaagtattgttacgcgatggcgagggcctggacgataacagcatcgtattgttgattaatgagatccgtgttgaacaatttacggtctattttgatttgatgcgagtggtaaattattccgatgaagtcgtgtcctttggtattaatccaacaatccatcagcaaggtagcagtcagtatttctgggtaacgcatgaagagggggagaaactccgggagcttggctatgtgttgcggaacgcgcttgatgagctttaccactgtctggcggtgacgctggcgcgcaacgtcaatgaatatttcggtattcaggaaacaaaacatatgctggaccaactggaagcgaaatttcctgatttacttaaagaagtgctcagacatgccacggtacaacgtatatctgaagttttgcagcgtttattaagcgaacgtgtttccgtgcgtaatatgaaattaattatggaagcgctcgcattgtgggcgccaagagaaaaagatgtcattaaccttgtagagcatattcgtggagcaatggcgcgttatatttgtcataaattcgccaatggcggcgaattacgagcagtaatggtatctgctgaagttgaggatgttattcgcaaagggatccgtcagacctctggcagtaccttcctcagccttgacccggaagcctccgctaatttgatggatctcattacacttaagttggatgatttattgattgcacataaagatcttgtcctccttacgtctgtcgatgtccgtcgatttattaagaaaatgattgaaggtcgttttccggatctggaggttttatctttcggtgagatagcagatagcaagtcagtgaatgttataaaaacaatataa

SEQ ID NO: 368120 - DNA, 408 bp, Salmonella enterica
atgcaacatttggatatcgctgaattagttcgttccgcactggaagtaagtggttgcgatccttcactcatcggaggaatagatagccattcaacaattgttctggatttatttgcattgccaagtatctgtatcagcgtcaaggacgatgatgtatggatctgggcgcaattgggtgctgacagcatggtggtattacaacagcgggcttatgaaatcttaatgaccatcatggaaggatgccattttgcccgcggcgggcaattactactgggggagcagaatggggagctaacgcttaaagccttagtgcatccggattttttatctgacggtgaaaagttctctactgccttgaatgggttttacaactatctggaagtttttagtcggtcgctaatgagatga

SEQ ID NO: 368121 - DNA, 1296 bp, Salmonella enterica
atgaaaacacctcgtttactgcaatatctggcctacccacaaaaaataaccggcccaattattgaggcggaattgcgcgatgtggccattggcgaactgtgtgaaatacgccgtggctggcaccaaaaacaggttgttgcacgtgcgcaggtggttggcttacagcgggaacgcaccgtgttgagccttatcggcaatgcccaggggctgagccgcgatgtcgtgctttatcccactggacgtgcgttatcggcgtgggtgggatactcggtattaggcgcggtgttggatccgacagggaaaatcgttgagcgttttacccctgaagtggcgccgattagcgaagaacgcgttattgatgtcgcaccgccgtcttacgcttcacgcgttggcgtccgtgaaccgctgattaccggtgtgcgcgcgattgacgggttattgacctgtggcgtaggccagcgaatgggcatttttgcctccgcaggatgcggtaagaccatgctgatgcatatgctgatcgagcaaacggaggcggatgtctttgttatcggtcttatcggtgaacgaggccgtgaggtcactgaattcgtggatatgttgcgcgcttcgcataagaaagaaaaatgcgtgctggtttttgccacttccgatttcccctcggtcgatcgctgcaatgcggcgcaactggcgacaaccgtagcggaatattttcgcgaccagggaaaacgggtcgtgctttttatcgattccatgacccgttatgcgcgtgctttgcgagacgtggcactggcgtcgggagagcgtccggcccgtcgaggttatcccgcctccgtattcgataatttgccccgcttgctggaacgcccaggggcgaccagcgagggaagcattactgccttttatacggtactgctggaaagcgaggaagaggcggacccgatggcggatgaaattcgctctatccttgacggtcacctgtatctgagcagaaagctggccgggcagggacattacccggcaatcgatgtactgaaaagcgtaagccgcgtttttggacaagtcacgacgccgacacatgctgaacaggcatctgccgtgcgtaaattaatgacgcgtttggaagagctccagcttttcattgacttgggagaatatcgtcctggcgaaaatatcgataacgatcgggcgatgcagatgcgggatagcctgaaagcctggttatgccagccggtagcgcagtattcatcctttgatgacacgttgagcggtatgaatgcattcgctgaccagaattaa

SEQ ID NO: 368122 - DNA, 444 bp, Salmonella enterica
atgcattcgctgaccagaattaaagtattgcagcggcgctgtacggtatttcattcacagtgtgagtcgatattacttcgctatcaggatgaggaccgcgggctgcaggccgaggaggaggcgatccttgaacaaatagcgggtctgaaattgttattagatacgctgcgtgcagaaaacagacagctcagtcgtgaggaaatttatacgttattacgtaagcagtctattgttcgccggcagataaaagatttagaactccagattatacaaattcaggaaaaacggagcgagctggaaaagaaaagggaagagtttcagaaaaaaagtaaatattggttgcgcaaagaagggaactatcaacgctggataatccgtcagaaaagattctatatccagcgagagatacagcaggaagaggccgagtcagaggagataatttaa

SEQ ID NO: 368123 - DNA, 1011 bp, Salmonella enterica
atgggcgatgtgtcagctgtcagttcatccgggaacattttactgccgcagcaggatgaggttggcggtttatcagaagcattaaaaaaagcggtggaaaaacataagacagaatattccggtgataaaaaagatcgcgactatggcgatgctttcgtaatgcataaagaaacggctttaccggtattactggcggcatggcgacatggcgcgccagcgaaatcagaacatcacaatggcaacgtttctggtctgcatcataacggaaaaggcgaactcaggattgctgaaaaactgttgaaagtcactgctgaaaaatctgtcggtttgatttctgcggaggccaaagtagataaatccgcagcgttgctatcgtctaaaaataggccgttagaaagcgtaagcggtaaaaaattatctgctgatttaaaagccgtggagtccgttagtgaagtagccgataacgccacgggaatctctgacgataatatcaaggcattgcctggggataataaagccatcgcgggcgaaggcgttcgtaaagagggcgcgccgctggcgcgggatgtcgcacctgcccgaatggccgcagccaataccggtaagcctgacgataaagatcataaaaaggttaaagatgtttctcagcttccgctgcaaccaaccactatcgccgatcttagccaattaaccggcggcgatgaaaaaatgcctttagcggcgcaatcaaagccgatgatgactatttttccgactgccgatggcgtgaaaggagaggatagctcgctgacttaccgttttcagcgctggggaaatgactattccgtcaatattcaggcgcggcaagcaggggagttttcgttaataccgtcaaatacgcaggttgaacatcgtttgcatgatcaatggcaaaacggtaatccccagcgctggcacctgacgcgagacgatcaacaaaatccgcagcagcaacagcacagacagcaatctggcgaggaggatgacgcctga

SEQ ID NO: 368124 - DNA, 912 bp, Salmonella enterica
atgtcattgcgtgtgagacagattgatcgtcgcgaatggctattggcgcaaaccgcgacagaatgccagcgccatggccaggaagctacgctggaatatccgacgcgacaaggaatgtgggttcggttgagcgatgcagaaaaacggtggtcggcgtggattcaacctggggactggcttgagcatgtctctcccgctctggcgggggcggcggtttctgctggcgctgagcacctggtcgttccctggcttgctgcgacagagcgaccgtttgagttgcccgtgccgcatttgtcctgtcggcgtttatgcgtagagaaccccgtgccgggaagcgcgctgccggaagggaaattgttgcacattatgagcgatcggggcggcctgtggtttgaatatcttcctgaactgcctgcagtcgggggcggcaggccgaaaatgctgcgttggccgttgcgctttgtaatcggtagcagtgatacgcagcgttcgttgctgggccgaatcgggatcggagatgtactcctgattcgtacttcccgtgcggaagtttattgctacgcgaaaaagttaggtcatttcaaccgtgttgaagggggaattattgtggaaacgttagatattcaacatatcgaagaagaaaataatacaactgaaactgcagaaactctgcctggcttgaatcaattgcccgtcaaactggaatttgttttgtatcgtaagaacgttaccctcgccgaactcgaagccatggggcagcaacagctattatcactgccgaccaatgctgaacttaacgttgaaattatggcgaatggtgttttgctgggtaatggcgaactggtacagatgaatgacaccttaggcgttgagatccatgaatggctgagcgagtctggtaatggggaatga

SEQ ID NO: 368125 - DNA, 675 bp, Salmonella enterica
atggggaatgatatctcattaattgccttactggcattttccaccctgttgccatttattattgcgtcaggaacctgtttcgttaaattttctattgtatttgtcatggtgcgtaacgccctgggattgcagcagataccttcaaatatgacgcttaacggcgtcgcattgctgctttctatgtttgttatgtggccaataatgcatgatgcctacgtctattttgaggacgaagatgtcacctttaatgatatttcgtcattaagtaaacacgttgatgaaggtctggatggttatcgcgattatctgatcaaatattcagatcgcgagttagttcagttttttgaaaacgcgcaactgaagcgtcagtatggagaagagaccgagacggtaaagcgtgacaaagatgaaattgaaaaaccatcaatatttgcgttattacctgcttatgcgctgagcgaaataaaaagcgcgtttaaaattggtttttatctctatttgccctttgttgtcgtcgacctggtggtatccagcgtgctactggcgctggggatgatgatgatgagtccggtgacgatatctacacctattaagttggtgctttttgtcgcgcttgatggctggaccttactgtctaagggattgatattacagtatatggacattgcaacatga

SEQ ID NO: 368126 - DNA, 261 bp, Salmonella enterica
atggatgatttagtgtttgcaggtaataaggcgctctatcttgttttgatcctgtcagggtggccgacgattgtcgcaacgattatcggcctcctggtagggttattccagacggtaacgcaattacaggaacagacgctgccttttggcattaaattacttggcgtgtgtttatgcttgtttttactgtctggctggtatggcgaagttttactctcttacgggcgtcaggtgatattcctggcgttggctaaggggtaa

SEQ ID NO: 368127 - DNA, 792 bp, Salmonella enterica
atgctttacgcgttgtactttgaaattcatcacctggttgcgtctgcggcactagggtttgctcgcgtagcgccgatttttttcttcctgccgtttttgaatagcggggtattaagcggcgcgccgagaaacgccattatcatcctggtggcattgggagtatggccgcatgcattgaacgaggcgccgccgtttttatcggtggcgatgatcccgttagttctgcaagaagcggcggtaggcgtcatgctgggctgtctgctgtcatggcctttttgggttatgcatgcgctgggttgtattatcgataaccagcgaggggcaacgctaagtagcagtatcgatccggcaaacggtattgatacctcggaaatggctaatttcctgaatatgtttgccgctgtcgtttatttacaaaacggcggtctggtcacgatggttgacgtgttaaataaaagctatcagctatgcgatccgatgaacgagtgcacgccttcattaccgccgctattaacgtttattaatcaggtggctcaaaacgccttggttctggccagtccggtggtattagtgctgttgctgtcagaagtattcctgggtttattgtcgcgctttgctccgcaaatgaacgcttttgcgatttcactgacggtaaaaagcggtattgccgttttaattatgctgctttatttctctccggtactaccggacaatgtactgcgactctctttccaggccacagggttaagcagttggttttacgagcgaggggcgacgcatgtcctcgaataa

SEQ ID NO: 368128 - DNA, 1071 bp, Salmonella enterica
atgtcctcgaataaaacagaaaaaccgactaaaaaacggctggaagactccgctaaaaaaggccagtcatttaaaagtaaagatctcattatcgcctgcctgacgctgggaggaattgcctatctggtgtcgtatggctcatttaatgagtttatggggataattaagatcattattgcggataattttgatcagagcatggctgactacagtttggccgtttttgggatagggttaaaatatctgattccatttatgctgctctgcttagtgtgttccgcattaccggcgttattacaggccggttttgtgctggcgacagaagcattaaagcctaatttatcggcgttaaacccggtagaaggggcaaaaaaactttttagtatgcgcacggttaaagatacggtcaaaaccctactgtatctctcatcctttgtggtggccgccatcatttgttggaagaaatataaggttgaaatcttttctcagctaaatggcaatattgtaggtattgccgtcatttggcgtgaacttctcctcgcattggtattaacttgccttgcttgcgcattgattgtcttattattggatgctattgcggaatatttcctgaccatgaaagatatgaaaatggataaggaagaagtgaagcgtgaaatgaaggagcaggaagggaacccagaggttaaatctaaaagacgtgaagttcatatggaaattctgtctgaacaggtgaaatctgatattgaaaactcacgcctgattgttgccaaccccacgcatattacgatcgggatttattttaaacccgaattgatgccgattccgatgatctcggtgtatgaaacgaatcagcgcgcactggccgtccgcgcctatgcggagaaggttggcgtacctgtgatcgtcgatatcaaactggcgcgcagtcttttcaaaacccatcgccgttatgatctggtgagtctggaagaaattgatgaagttttacgtcttctggtttggctggaagaggtagaaaacgcgggcaaagacgttattcagccacaagaaaacgaggtacggcattga

SEQ ID NO: 368129 - DNA, 498 bp, Salmonella enterica
atggattatcaaaataatgtcagcgaagaacgtgttgcggaaatgatttgggatgccgttagtgaaggcgccacgctaaaagacgttcatgggatccctcaagatatgatggacggtttatatgctcatgcttatgagttttataaccagggacgactggatgaagctgagacattctttcgtttcttatgcatttatgatttttacaatcccgattacaccatgggactggcggcggtatgccaactgaaaaaacaatttcagaaagcatgtgacctttatgcagtagcgtttacgttacttaaaaatgattatcgccccgttttttttaccgggcagtgtcaattattaatgcgtaaggcagcaaaagccagacagtgttttgaacttgtcaatgaacgtactgaagatgagtctctgcgggcaaaagcgttggtctatctggaggcgctaaaaacggcggagacagagcagcacagtgaacaagaaaaggaataa

SEQ ID NO: 368130 - DNA, 1782 bp, Salmonella enterica
atggtaaatgacgcaagtagcattagccgtagcggatatacccaaaatccgcgcctcgctgaggcggcttttgaaggcgttcgtaagaacacggactttttaaaagcggcggataaagcttttaaagatgtggtggcaacgaaagcgggcgaccttaaagccggaacaaagtccggcgagagcgctattaatacggtgggtctgaagccgcctacggacgccgcccgggaaaaactctccagcgaagggcaattgacattactgcttggcaagttaatgacgctactgggtgatgtttcgctgtctcaactggagtctcgtctggcggtatggcaggcgatgattgagtcacaaaaagagatggggattcaggtatcgaaagaattccagacggctctgggagaggctcaggaggcgacggatctctatgaagccagtatcaaaaagacggataccgccaagagtgtttatgacgctgcgaccaaaaaactgacgcaggcgcaaaataaattgcaatcgctggacccggctgaccccggctatgcacaagctgaagccgcggtagaacaggccggaaaagaagcgacagaggcgaaagaggccttagataaggccacggatgcgacggttaaagcaggcacagacgccaaagcgaaagccgagaaagcggataacattctgaccaaattccagggaacggctaatgccgcctctcagaatcaggtttcccagggtgagcaggataatctgtcaaatgtcgcccgcctcactatgctcatggccatgtttattgagattgtgggcaaaaatacggaagaaagcctgcaaaacgatcttgcgcttttcaacgccttgcaggaagggcgtcaggcggagatggaaaagaaatcggctgaattccaggaagagacgcgcaaagccgaggaaacgaaccgcattatgggatgtatcgggaaagtcctcggcgcgctgctaaccattgtcagcgttgtggccgctgtttttaccggtggggcgagtctggcgctggctgcggtgggacttgcggtaatggtggccgatgaaattgtgaaggcggcgacgggggtgtcgtttattcagcaggcgctaaacccgattatggagcatgtgctgaagccgttaatggagctgattggcaaggcgattaccaaagcgctggaaggattaggcgtcgataagaaaacggcagagatggccggcagcattgttggtgcgattgtcgccgctattgccatggtggcggtcattgtggtggtcgcagttgtcgggaaaggcgcggcggcgaaactgggtaacgcgctgagcaaaatgatgggcgaaacgattaagaagttggtgcctaacgtgctgaaacagttggcgcaaaacggcagcaaactctttacccaggggatgcaacgtattactagcggtctgggtaatgtaggtagcaagatgggcctgcaaacgaatgccttaagtaaagagctggtaggtaataccctaaataaagtggcgttgggcatggaagtcacgaataccgcagcccagtcagccggtggtgttgccgagggcgtatttattaaaaatgccagcgaggcgcttgctgattttatgctcgcccgttttgccatggatcagattcagcagtggcttaaacaatccgtagaaatatttggtgaaaaccagaaggtaacggcggaactgcaaaaagccatgtcttctgcggtacagcaaaatgcggatgcttcgcgttttattctgcgccagagtcgcgcataa

SEQ ID NO: 368131 - DNA, 1230 bp, Salmonella enterica
atgttaattagtaatgtgggaataaatcccgccgcttatttaaataatcattctgttgagaatagttcacagacagcttcgcaatccgttagcgctaaagatattctgaatagtattggtattagcagcagtaaagtcagtgacctggggttgagtcctacactgagcgcgcctgcgccaggggtattaacgcaaacccccggaacgatcacgtcctttttaaaagccagtattcaaaataccgacatgaatcaggatttgaatgctctggcaaataatgtcacgactaaagcgaatgaggttgtgcaaacccagttacgcgagcagcaggcagaagtcggaaagttttttgatattagcggaatgtcttccagtgccgttgcgctgttggctgccgcgaatacgttaatgctgacgttgaaccaggctgatagcaaactgtctggtaagttgtcattagtcagctttgatgcagctaaaacgacagcaagctccatgatgcgcgaagggatgaatgcgttgtccggtagtatttcccagagcgcgcttcagttggggatcactggcgtgggcgccaaactggaatataaggggctgcagaatgaaagaggcgcgcttaaacataatgccgcgaagatcgataaactgaccactgaaagccacagtattaaaaacgtgctgaacgggcagaatagcgtcaaactcggtgctgaaggcgtcgattctctgaaatcgttaaatatgaagaaaaccggtaccgatgcgacaaaaaatcttaatgatgcgacgcttaaatctaatgccggaaccagcgccacggaaagtctgggtattaaagacagtaataaacaaatctcccctgaacatcaggctattctgtcgaaacgtcttgagtctgtcgaatccgatattcgtcttgagcagaataccatggatatgacccgaattgatgcgcgcaagatgcagatgacgggcgatctgattatgaagaactcggtcacggtcggtggtattgcaggggcgtccgggcagtacgccgctactcaggaacgttccgagcagcaaattagccaggtgaataaccgtgttgccagcaccgcatcggacgaagcccgtgaaagttcacgtaaatcgaccagcctgattcaggaaatgctgaaaacaatggagagcattaaccagtcgaaagcatccgcacttgctgctatcgcaggcaatattcgcgcttaa

SEQ ID NO: 368132 - DNA, 1032 bp, Salmonella enterica
atgcttaatattcaaaattattccgcttctcctcatccggggatcgttgccgaacggccgcagactccctcggcgagcgagcacgtcgagactgccgtggtaccgtctaccacagaacatcgcggtacagatatcatttcattatcgcaggcggctactaaaatccagcaggcacagcagacgctgcagtcaacgccaccgatctctgaagagaataatgacgagcgcacgctggcgcgccagcagttgaccagcagcctgaatgcgctggcgaagtctggcgtgtcattatccgcagaacaaaatgagaacctgcggagcgcgttttctgcgccgacgtcggccttatttagcgcttcgcctatggcgcagccgagaacaaccatttctgatgctgagatttgggatatggtttcccaaaatatatcggcgataggtgacagctatctgggcgtttatgaaaacgttgtcgcagtctataccgatttttatcaggccttcagtgatattctttccaaaatgggaggctggttattaccaggtaaggacggtaataccgttaagctagatgttacctcactcaaaaatgatttaaacagtttagtcaataaatataatcaaataaacagtaataccgttttatttccagcgcagtcaggcagcggcgttaaagtagccactgaagcggaagcgagacagtggctcagtgaattgaatttaccgaatagctgcctgaaatcttatggatccggttatgtcgtcaccgttgatctgacgccattacaaaaaatggttcaggatattgatggtttaggcgcgccgggaaaagactcaaaactcgaaatggataacgccaaatatcaagcctggcagtcgggttttaaagcgcaggaagaaaatatgaaaaccacattacagacgctgacgcaaaaatatagcaatgccaattcattgtacgacaacctggtaaaagtgctgagcagtacgataagtagcagcctggaaaccgccaaaagcttcctgcaaggataa

SEQ ID NO: 368133 - DNA, 2058 bp, Salmonella enterica
atggttacaagtgtaaggactcagccccccgtcataatgccaggtatgcagaccgagatcaaaacgcaggccacgaatcttgcggcgaatctttccgcagtcagagaaagtgccacaacgacgctgtcaggggaaattaaaggcccgcaactggaagattttcccgcgctgatcaaacaggcgagtctggatgcattgtttaaatgcgggaaagacgctgaggcgttaaaagaagtttttaccaattcaaataatgtcgccggtaagaaagcgataatggagtttgccgggctctttcgttcagcgctcaacgccaccagtgattctcctgaggcgaagacgctactgatgaaggtgggggcagagtataccgcgcaaatcataaaagatggcctgaaagaaaagtcagcttttgggccatggctgccagaaacaaagaaagcggaagcgaagctggaaaacctggaaaagcagctgttagatattatcaaaaataacactggtggtgaattaagtaaattatcgacgaatcttgttatgcaggaggtgatgccctatattgccagctgcattgaacataactttggctgtacgttagatccgttaacccgcagcaatcttacgcaccttgttgacaaagcggcggcgaaggcggttgaggcgcttgatatgtgccaccaaaaattaacgcaagagcagggtaccagcgtaggacgggaagcccggcaccttgaaatgcaaacgttgatacccctgctgctacgtaatgtttttgcacaaattcctgcagataaactgcctgaccctaaaattccggagcctgcggctggaccagtacctgatggtgggaaaaaagcagaacctacgggtattaatatcaatattaatattgatagcagtaaccatagcgtggataacagtaagcatattaacaatagccgaagccatgtcgataatagccagcgccatatcgataatagcaaccatgataatagccggaagacgattgataatagccgaacatttattgataacagccaacgcaatggcgagtcacaccattcgactaacagcagcaacgtaagtcatagtcattcgcgtgtggattcgactacgcatcaaacggagacggcacacagcgccagcacaggggcaattgaccatggcatcgcgggtaaaattgacgtcacggctcatgcgacggcagaggctgtgaccaacgcttcatccgaaagtaaagatggaaaggtggtcacgtcagaaaagggcactacgggtgaaacaacctcttttgatgaagtcgatggcgtaaccagcaagagcattatcggcaagccggtacaggccacggtgcacggcgttgatgataataaacagcaaagccagacggcagagattgtgaatgtgaagccgcttgccagtcaactggctggcgtcgagaatgttaaaaccgataccttacaatcagacacgacggtaattacaggtaataaagccggtacgaccgataatgataatagtcagacagataagactggcccattttctggtttgaagtttaagcaaaatagtttcctctcaacagtaccgagcgttacgaatatgcattcaatgcatttcgacgcccgtgagacgtttttgggtgtgatacgtaaagccctggagccagatacctccacaccgttccctgtacgcagagcgtttgacggcttgcgtgcggaaatattacccaatgacacgataaagagtgcagcgttgaaagcgcaatgtagcgatattgacaagcacccagaattgaaagcgaaaatggagactctcaaagaggtcattactcatcatccacaaaaagaaaaactggctgagattgcactgcagtttgccagagaggcggggctgaccaggctaaaaggggaaactgactatgtgttaagtaatgtgctggacggccttatcggagacggtagctggcgagctggcccggcttacgagtcatacctgaataaacctggcgtggatcgggttattactaccgttgatggcttgcacatgcagcgttaa

SEQ ID NO: 368134 - DNA, 249 bp, Salmonella enterica
atgaatatggatattgaagcaagagtcaaaaaagtgatcacctcctgtattgccgttgatgttgatagtatcaatggtcagacccatctggttgaggatctttacgctgactcattggatttaattgatattgtatttggtcttagtgaggagtttgacattagttgcaatgaaaacgatcttcctgatatgacgacctttgcggatatatgccgtgttgttaaaaaaagtcttgagtccagggtgtag

SEQ ID NO: 368135 - DNA, 261 bp, Salmonella enterica
atgaaaatcatcacacatgtagtacccggttcaggtatggctgcaatatatgatgatattgctgacagttcgcgttttgttattaaaggcaagttacgtcatgttgaaaatgatccgaaggagctgctgatatgtgttccgatgcgtagtgaatggctattctactggattaaaggagagaaatattgcgcccggcgatgggcgcgaaaaagtatcaagacattgtgtaaccagattaaatttgaagaagcaatcttataa

SEQ ID NO: 368136 - DNA, 393 bp, Salmonella enterica
ttgcaagcacaccaggatattatcgctaatattggtgagaaattgggtttaccgctcacttttgacgacaacaatcagtgcttattattactcgatagcgatatttttacgtctattgaagctaaagatgatatctggttattgaacggtatgattataccgttatcgcctgtttgtggcgattctatctggcggcagattatggtgattaatggtgaactggctgcgaataatgaaggtacgttagcgtatattgatgccgcagagacgttgttgcttatacatgcaattaccgatctgacaaatacttaccatattatatcgcagcttgagtcatttgtgaatcagcaggaagtgctcaaaaacatactgcaggaatatgctaaagtatga

SEQ ID NO: 368137 - DNA, 1608 bp, Salmonella enterica
ttgaataatttaacgttgtcttcgttttcaaaagttggtgtgtcgaatgatgcccgactttatattgctaaggaaaatactgataaggcatatgttgcgcctgaaaaattttcgtcaaaagtattaacctggcttggaaaaatgccgttatttaaaaacactgaagtggtgcaaaaacatacggaaaatatcagagtacaggaccaaaagattttacagacatttctccatgcactaacggaaaaatatggggaaacagcggttaatgacgcactgttaatgtcccgtataaatatgaacaaaccccttacccaacgtttagcagtgcagatcacggagtgtgtaaaagctgctgacgaagggtttataaaccttattaagagcaaggataatgttggtgtcaggaatgccgctttagtcataaaaggcggcgatacaaaagtggcagaaaaaaataacgatgttggagcagaaagtaagcaacctttactcgatatcgcgctaaagggacttaaaagaacattaccgcaactggaacaaatggatggaaatagcctgcgagaaaacttccaggagatggcttcaggtaacggcccgctgcgttcattaatgacgaatttacagaatttaaataaaattccagaggctaaacaacttaatgattatgttacaacgttaacaaatattcaggtcggtgtagcccggttctcacaatggggaacctgtggaggagaggttgagaggtgggttgataaagcctctactcatgaattaacccaggctgtaaaaaaaattcacgttattgctaaagaactgaaaaatgttacagctgaacttgagaaaatagaagccggcgcgccaatgccacagacgatgagcggaccgacactgggcctggcacggtttgcggtcagcagcattccaattaatcagcaaacccaggtgaaactgagcgatggaatgcctgtgccagtgaatacgttaacttttgacggtaagcctgtggcattagccggttcgtacccaaaaaatacgccggatgcgctggcagcgcatatgaaaatgcttcttgaaaaagaatgctcatgcctggtggtgttaacgtcggaagatcagatgcaggcaaaacaattaccaccctatttcagagggagctacacctttggcgaggtgcataccaacagccaaaaagtgagctcagccagtcagggagaagcgatagaccaatacaatatgcaactgtcctgcggggaaaagcggtatacaatcccggtattgcatgtgaaaaattggccagatcaccagccgttaccgtctacggatcagttagaatacctggcggatagggtgaaaaatagtaaccaaaatggcgcgccggggcgtagttcatcagataagcatttaccgatgattcattgtctgggcggagtggggagaaccggaacgatggcggcggcccttgtacttaaggataatcctcatagtaatctggagcaggtacgtgcagatttccggaattcacggaacaatagaatgctggaagacgcctcacagtttgtacaactaaaagcaatgcaagcccagttgcttatgacgacggcacgctga

SEQ ID NO: 368138 - DNA, 483 bp, Salmonella enterica
atgcattatttttttatcatcgtaatctggttgcttagcataaatacggcatgggctgattgctggcttcaggctgaaaaaatgttcaatattgaatccgaactactttacgctatcgcccagcaggaatcggcgatgaaacctggcgccattggtcataaccgagatggttcaaccgatcttggcctgatgcaaattaacagcttccatatgaaaaggctgaaaaaaatggggattagtgaaaaacagttgttacaggacccctgcatttctgtcattgtgggcgcttccattttatcagatatgatgaaaatctacggttatagctgggaggccgttggcgcttataatgccgggacgtcgccgaaacgatcggatataaggaaacgttatgctaaaaaaatttgggagaattacagaaaattaaaaggaatgtcagcagaagagaaaaacaaaagactttctatcgcgtcaaacaaataa

SEQ ID NO: 368139 - DNA, 1662 bp, Salmonella enterica
atgccacattttaatcctgttcctgtatcgaataaaaaattcgtctttgatgatttcatactcaacatggacggctccctgctacgctcagaaaagaaagtcaatattccgccaaaagaatatgccgttctggtcatcctgctcgaagccgccggcgagattgtgagtaaaaacaccttactggaccaggtatggggcgacgcggaagttaacgaagaatctcttacccgctgtatttatgccttacgacgtattctgtcggaagataaagagcatcgttacattgaaacactgtacggacagggctatcggtttaatcgtccggtcgtagtggtgtctccgccagcgccgcaacctacgactcatacattggcgatacttccttttcagatgcaggatcaggttcaatccgagagtctgcattactctatcgtgaagggattatcgcagtatgcgccctttggcctgagcgtgctgccggtgaccattacgaagaactgccgcagtgttaaggatattcttgagctcatggatcaattacgccccgattattatatctccgggcagatgatacccgatggtaatgataatattgtacagattgagatagttcgggttaaaggttatcacctgctgcaccaggaaagcattaagttgatagaacaccaacccgcttctctcttgcaaaacaaaattgcgaatcttttgctcagatgtattcccggacttcgctgggacacaaagcagattagcgagctaaattcgattgacagtactatggtttacttacgcggtaagcatgagttaaatcaatacaccccctatagcttacagcaagcgcttaaattgctgactcaatgcgttaacatgtcgccaaacagcattgcgccttactgtgcgctggcagaatgctacctcagcatggcgcaaatggggatttttgataaacaaaacgctatgatcaaagctaaagaacatgcgattaaggcgacagagctggaccacaataatccacaagctttaggattactggggctaattaatacgattcactcagaatacatcgtcgggagtttgctattcaaacaagctaacttactttcgcccatttctgcagatattaaatattattatggctggaatcttttcatggctggtcagttggaggaggccttacaaacgattaacgagtgtttaaaattggacccaacgcgcgcagccgcagggatcactaagctgtggattacctattatcataccggtattgatgatgctatacgtttaggcgatgaattacgctcacaacacctgcaggataatccaatattattaagtatgcaggttatgtttctttcgcttaaaggtaaacatgaactggcacgaaaattaactaaagaaatatccacgcaggaaataacaggacttattgctgttaatcttctttacgctgaatattgtcagaatagtgagcgtgccttaccgacgataagagaatttctggaaagtgaacagcgtatagataataatccgggattattaccgttagtgctggttgcccacggcgaagctattgccgagaaaatgtggaataaatttaaaaacgaagacaatatttggttcaaaagatggaaacaggatccccgcttgattaaattacggtaa

SEQ ID NO: 368140 - DNA, 930 bp, Salmonella enterica
atggaaaatgtaacctttgtaagtaatagtcatcagcgtcctgccgcagataacttacagaaattaaaatcacttttgacaaatacccggcagcaaattaaaagtcagactcagcaggttaccatcaaaaatctttatgtaagcagtttcactttagtttgctttcggagcggtaaactgacgattagcaataatcacgatacgatttactgtgacgaacctgggatgttggtgctcaaaaaagagcaggtagttaacgtgacgcttgaagaggtcaatggccacatggatttcgatatactcgagataccgacgcaacgacttggcgctctctatgcacttatcccaaacgagcagcaaaccaaaatggcggtacccacagagaaagcgcagaaaatcttctatacgcctgactttcctgccagaagagaggtatttgaacatctgaaaacggcgttctcctgtacgaaggatacaagcaaaggttgcagtaactgtaacaacaaaagttgtattgaaaatgaagagttaattccttattttctgctgttcctgcttactgcttttctccgactcccggagagttatgagatcatccttagctcggctcagataacgttaaaggagcgcgtttacaacattatatcttcgtcacccagtagacagtggaagcttacggatgttgccgatcatatatttatgagtacgtcaacgctcaaacggaaacttgcagaagaaggtaccagctttagcgacatctacttatcggcaagaatgaatcaggcagcaaaacttttacgcataggcaaccataatgttaatgctgtagcattaaaatgtggttatgatagcacgtcctacttcattcaatgtttcaaaaaatattttaaaactacgccatcgacattcataaaaatggcgaaccattaa

SEQ ID NO: 368141 - DNA, 1236 bp, Salmonella enterica
gtgtcctgtgcggtaatctgctgctatcgagaacgacagacatcgctaacagtatatatggaaacatcaaaagagaagacgataacaagccctgggccatacatagttcgattacttaacagctcactgaacggctgtgagtttccattgctgacaggccgaacactctttgtggtaggtcagagtgatgcgctcactgcttcaggccaactccctgatatacctgccgatagcttttttatcccgctggaccatggcggagtaaattttgaaatccaggtggatacggatacgaccgaaattatactccatgagctgaaagaaggaaattctgaatctcgttcggtgcaattaaatacgccaatacaggtcggtgaattgcttatcctgattcgcccggaaagcgagccgtgggtgcccgagcagcctgagaagttagaaacgtctgcaaaaaagaacgagccgcgttttaaaaacggaattgtagcagcactggccgggttttttatattgggaattgggactgtggggacgttatggatacttaactcgccgcagcggcaggccgcagagctcgattcgttattggggcaggagaaggagcgttttcaggtgttgccaggccgggacaaaatgctctatgtcgctgcgcaaaatgaaagagatacgctgtgggctcgtcaggttttagcgaggggcgattatgataaaaatgcgcgagtgattaacgaaaacgaagaaaataagcgtatctctatctggctggatacctattatccgcagctggcttattatcggattcatttcgatgagccgcgtaaacccgttttctggctaagccgccagcgaaacacgatgagcaagaaagagctcgagatgttaagtcaaaagctgagagcgctaatgccttacgcggattcggttaacatcacgttgatggacgatgttaccgcagcaggccaggcggaagcggggctaaaacagcaggcgttaccttattcccgcaggaatcataaggggggcgtaacgtttgttattcagggggcgctcgatgatgtagaaatactcagagcccgtcaatttgtcgatagctattaccgcacatggggaggacgctatgtgcagtttgcgatcgaattaaaagatgactggctcaaggggcgctcatttcagtacggggcggaaggttatatcaaaatgagcccaggccattggtatttcccaagcccactttaa

SEQ ID NO: 368142 - DNA, 243 bp, Salmonella enterica
atggcaacaccttggtcaggctatctggatgacgtctcagcaaaatttgatacgggcgttgataatctacaaacgcaggtaacagaggcgctggataaattagcagcaaaaccctccgatccggcgctactggcggcgtatcagagtaagctctcggaatataacttgtaccgtaacgcgcaatcgaacacggtaaaagtctttaaggatattgatgctgccattattcagaacttccgttaa

SEQ ID NO: 368143 - DNA, 306 bp, Salmonella enterica
atgtcgattgcaactattgtcccagagaatgccgttatagggcaggcggtcaatatcaggtctatggagacggacattgtctcgctggatgaccggctactccaggctttttctggttcggcgattgccacggctgtggataaacagacgattaccaacaggattgaggaccctaatctggtgacggatcctaaagagctggctatttcgcaagagatgatttcagattataacctgtatgtttctatggtaagtacccttactcgtaaaggagtcggggctgttgaaacgctattacgctcatga

SEQ ID NO: 368144 - DNA, 759 bp, Salmonella enterica
atgattcgtcgatatctatatacctttctgctggtaatgacccttgccggctgtaaggataaggatcttttaaaaggactggaccaggaacaggctaatgaggtcattgccgttctgcaaatgcacaatatagaggcgaataaaattgatagcggaaaattgggctatagcattaccgttgctgagcctgattttaccgctgcggtgtactggattaaaacttatcagcttcctccccggccacgggtggaaatagcgcagatgttcccggcggattcgctggtatcgtctccgcgagctgaaaaggccaggttatattcggctattgaacagcgactggaacagtcattacagacgatggagggcgtgctctccgccagggtccatattagttatgatattgatgctggtgaaaatggccgtccgccaaaacctgttcatctgtcggcattagccgtatatgaacgaggttcgccgcttgcgcatcagatcagcgatatcaagcgtttcttaaagaatagttttgccgatgtggattatgacaacatttctgttgtgttgtcagaacgttctgatgcccaattacaggctcccggcacaccagtaaaacgtaattcttttgcaaccagttggattgtgttgattattttgttatccgtgatgtcagcaggctttggcgtctggtattacaaaaaccattatgcccgcaataagaaaggcataacggctgatgataaggcgaaatcgtcaaatgaatag

SEQ ID NO: 368145 - DNA, 579 bp, Salmonella enterica
atgaataggcagccattacccattatctggcaaagaatcatttttgatccgttatcgtatatccatcctcagcggttgcagatagcgccggaaatgattgtcagacccgccgccagggcggcggcaaatgagttaatactggcggcatggcggcttaagaacggagaaaaggagtgtattcaaaactcactgacgcagctgtggctgcgtcagtggcgccgactgccgcaggtagcgtatttactcggttgccataaactgagagccgatctggcaaggcagggagccttgcttggcctgccggattgggcgcaagcatttttggcaatgcatcagggaacaagtttatctgtctgcaataaggcgccgaatcaccggtttttacttagcgtcgggtatgcacagttaaatgccctaaatgaatttttacctgaatctttagcacagcgttttcctttgctttttcctccatttattgaggaggcattgaagcaggatgctgtagaaatgtcaattttgctactggccttacaatatgctcaaaaatatcccaataccgtccccgctttcgcctgttga

SEQ ID NO: 368146 - DNA, 681 bp, Salmonella enterica
atgctcaaaaatatcccaataccgtccccgctttcgcctgttgaggggatactgataaagcgtaaaacgctggaacgttatttctctattgaaagattagaacagcaggcgcatcaacgggctaagcgtattttgcgagaggcggaagaagaggcaaagaccttgcggatgtacgcctatcaggaaggttacgagcagggaatgatagacgcgttacagcaggtcgccgcttatcttactgataatcagacaatggcctggaagtggatggaaaaaatacagatttatgcccgcgagttattttcagctgcggtcgaccatcccgaaacgcttttaaccgtcctggatgagtggctaagggatttcgataagcctgaggggcaactttttttaacactgccagttaatgcgaaaaaagatcaccaaaaactgatggtgttgcttatggagaactggccaggcacttttaatcttaaatatcatcaggaacagcgctttatcatgagttgcggcgatcagatcgcagaattttcacctgaacaatttgttgaaacggcagtaggcgtcattaagcatcatcttgatgaacttccacaagactgccggacaatttctgataacgccattaacgcacttattgatgaatggaagacaaaaacgcaagcggaggttataaggtga

SEQ ID NO: 368147 - DNA, 453 bp, Salmonella enterica
gtgataccgggtacgattccgacttcttatttggtcccgacagcagatactgaagcgacgggtgtggtttcgttgagtgccagggccgctatgctgaataatgtggatagcgcgcctttaagcaatggcggcgacgttgatctttatgatgcattctaccaacgacttctggcgcttcctgagtcagcctcttctgaaacgcttaaagatagcatttatcaagagatgaatgccttcaaagatcctaacagtggtgattcggcttttgtttcttttgagcagcaaacggctatgctacaaaacatgttagcaaaagttgaaccgggcacccatttatatgaggctttaaacggggtattagttggtacaatgaacgcacagtcacaaatgacctcctggatgcaggagattattttatcgggcggggaaaacaaagaggcaattgactggtga

SEQ ID NO: 368148 - DNA, 888 bp, Salmonella enterica
atggtattgccttcaatgaataaatcagttgaggccattagcaataatcaccttcaacagccgaacaaatttccattaataaatggattagctgacgtaagagactattatgtcgcaaactgcttattgtttaaacttaataaaggcagtttgcgaattgaaaacgaatttggggagttcatcgaacaatctgcgccgtgtttatttttattggaaaaagatcaaacaatcacgcttagtatgagcgaaatagaagggcatattgatttttcttcactggaagtttcctatgacttaatgcaaaaattctacaaagttttttacagtacaagaaactataatgatcgagagctatcattaaaaacgaaaccaaagtatttttttcatgcggacttgttgccagggatgagtgatacttttgactctattttgcatggtgtggcatgtccacgggtttgtagtaatgtgagtattgatgatcatgattattcatatttctcattgatgtatcttatatcggcatttgtacgtaagcccggtgggtttgatttccttgagcgagcaataaaaattacgacaaaagagaaagtttataacattattatcagcgatctcacccgcaaatggtcacaggctgaggtggcgggaaagctgtttatgagcgtatcaagtctgaagcgaaaactggccgctgaagaggtgagttttagcaaaatatacctagatgctcgtatgaatcaggctataaaattattacgtatgggggctggaaatatttcacaagtcgcgacgatgtgtggctatgatacgccttcttattttatcgctatttttaaacggcattttaagattacaccgcttagctttatgcgtacgatgaaccattga

SEQ ID NO: 368149 - DNA, 756 bp, Salmonella enterica
atgagaaatgtaattatatacggtattaactggactaattgttatgcccttcagtctatttttaagcaaaaatatccggaaaagtgcgttaaaacgtgtaactcattaaccgcacttttgcattctctatccgatatgccggacgccgggctgattttagctttgaacccgcatgagcatgtttatctttttcatgcgttgctgacgcggttgcagaaccgtaaagttttggtagtggcagatcgcttgtattatatcgatcgctgtgtgctgcaatattttggcgttatggattatgttttaaaagacgaactatcctgcgctatccgctcggagcgagagaagctccgtcttccggaagcctggctgcgtttctgccacaggccacaaaagaaaaccgtggctgctacgtatgcttttaatgccggcgagacgccggaagaggtattgtttaatatcaatcaatacgcctggtggaatctacctcccggtgtcacgcaggcgaaatatgcgctgctgatattattatcctccggacatccggcaattgaactggcgaaaaaatttggtctgggaacaaaaaccgtcagtatttatcgtaagaaggttatgtatcgtttggggatggactcttcaccgctatcgctgttccggggactgaaactagacgcgcatttacagcgcactgcttttgcacataaccctgctgtacctgacgataattgcgcgttaccgattgcggtaggaatgaattaa

SEQ ID NO: 368150 - DNA, 867 bp, Salmonella enterica
atgctaagtcctacgactcgtaatatgggggcgagtttatcgcctcagcctgacgtcagcggggagctaaacaccgaagcattgacctgtattgttgagcgtctggaaagtgaaattatagatggcagctggattcatatcagttacgaggaaaccgatctcgaaatgatgccttttcttgttgcacaggccaataagaagtatccagagttaaatcttaaatttgttatgtcagtccatgagcttgtttcctctataaaggagaccagaatggaaggcgttgaatctgcccgatttctcgtaaatatgggaagttcaggtatccatatttcagtcgtcgattttagagttatggacggaaagacatcggtgattttgttcgaaccagcagcgtgtagcgcttttggacctgctttactggcgttgaggaccaaagcagctcttgaacgtgaacaactgcctgattgttattttgctatggtcgagctggacattcaacgaagctcttctgaatgcggtatttttagcctggcgctcgccaaaaaacttcagcttgaatttatgaacttagtaaaaattcatgaagataatatttgtgaacgtctgtgtggtgaagaaccttttctcccgtccgataaagcagaccgttatctgccggtgagtttttacaaacatactcaaggcgtacaacgattaaatgaatatgtggaggccaatccggcggcgggaagcagtatagtaaacaaaaagaatgaaacgctttatgagcgattcgataacaatgccgttatgctaaacgataaaaaactctctatatccgctcataaaaaaaggatagctgaatataagtctttacttaaatcgtaa

SEQ ID NO: 368151 - DNA, 849 bp, Salmonella enterica
atgttcttaacaacgttactggaaccctttcagtttgattttatggtgaacgcccttatggtttcggtcattgtggcgattccctgcgccttactgtccgtgtttttagtgttaaaaggctgggcgttaatgggcgatgcaatgagtcatgcggtattccccggggtcgtgctggcatatattgtggggatccccctggcgattggcgctttcattgccggattattttgcgctatcgcgaccggctatctggacgataacagccgcatcaaacgtgatacggtgatgggcatcgtcttttccgggatgtttggcgcaggtctggtgctctatgtttctattcaatcggaagtgcatctggatcacatcctgtttggggatatgctgggcgtatcgctgggggatatcgtacaaacgtcagttattgcactgggtattgcgttaatcattgggctgaaatggaaagatctcctgctacacgcttttgacccgcaccaggcgaaagccagcgggctgaatatcacgctactgcattatggcctgctatgtatgattgcgctgactatcgtcgccacgctgaaatcggtgggtattattctgtcgatttcattgcttatcgcccccggcgcaattgccattttgctgacgcgacgctttgcgcgcgcgctgggattagcggtgagtctgtcagttattaccgcttttgcgggcgtctatctgtctttttatcttgatagcgcgccagcgccgaccatcgtggtattatttgccatcgtgtttattgcggtatttatttacgcaacatggcgcgacaggcgtaatgaaatcgtaccagaggcgcaaggttaa

SEQ ID NO: 368152 - DNA, 861 bp, Salmonella enterica
atgaactggcttgttgagccgtttggctaccagtatatgctcaacgcgatgtgggtctccgcgatggtgggcggtctgtgcgcgtttctctcctgctatttgatgctcaaaggctggtcgctcattggcgatgcgctatctcactctattgtgcctggcgtcgctggcgcctggatgttagggctgcccttctcgctcggcgcgtttctttccggcggactggcggcaggcagtatgctctttcttaaccaacgctcacgcctgaaagaagacgcgattatcgggcttatcttctcctctttttttggcgtcggcctttttatggtgtcgctcaatccgatgtcggtgaatatccagacgattattctcggcaacgtgctggcgatcgcgccagcggatattgcgcaactggcgattatcggcgcagtctcgctgacgattctgctgttaaagtggaaagatctgatggtcgtctttttcgatgaaacccatgcgcgttctatcgggcttaatccgggtcgactaaagctgttgtttttcactctattgtccgtctctaccgtggcggccctgcaaaccgttggggcgttcctggtgatctgtctcgtcgtcacgccgggcgcgacggcctggttactcaccgaccgttttccacgtctgctcatgattgccgtcgtgattggcagcctgaccagttttctgggcgcatggcttagctactggctggatggcgccacgggtggaattattgtcgtcatgcaaaccttactgttcatcacagcctttattttcgccccgaaacacggtctgttagccaaccgtcgacgcgcccgcctgcagaaggagccgacatgttcttaa

SEQ ID NO: 368153 - DNA, 822 bp, Salmonella enterica
atgagtcaatctgcgattaccgttgatcaagtcacggtgacgtatcgcaacggtcataccgccctacgggacgccacttttcaggtgcctggcggttcaatcgccgcgctggtaggcgtaaatggttccggtaagtctacgttatttaaagcgttaatgggctttgtgcatcttgcgcagggagatatcactatcctgcaacagtcagtcaacaaggcgctgaaaaaaaacctcattgcttatgttccgcaatcggaagaagtggactggtcatttccggtgctggtagaagatgtggtgatgatgggacgctacggccatatgggctggctacgccgtcccactgcgcatgatcacgcctgtgttgacgccgcgctggcgcgggtggatatgcaggaatatcgtcacaggcagattggcgagctgtccggcgggcagaaaaaacgtgtgtttcttgccagggccatcgctcaggatggacaggtaatcctgctggatgaaccttttaccggcgtggatgtaaaaaccgaagcgcgaatcatcgatctactacgggaactgcgcgatgaaggccgcacgatgctggtctcaacgcataatctcggctccgtcaccgagttttgcgactatacggtaatgattaaaggaaccgtactggccagcggccctaccgaaaccacgtttaccgccgcgaatctggaacaggcgtttagcggcgttctacgtcatatcgcgctaagcggaggtgaagagcacatcatcaccgatgacgagcgcccctttatttcccggcgcgtggccagcggaggaaaatcgtcatga

SEQ ID NO: 368154 - DNA, 918 bp, Salmonella enterica
atgacgaatctacatcgtctgaaaacactcctgattgccggtattgtcgcgatactcgcgctatcgccagcctatgcaaaagagaaatttaaagtcatcaccacgtttaccgttattgccgacatggcgaaaaacgtggcgggcgacgcagcggaagtcagctcaattaccaagcccggcgctgaaatccatgagtatcagccaacgcccggcgatattaaacgagcgcagggggcgcagcttatcctcgcgaatggtctgaacctggagcgatggttcgcccgcttttatcagcacctttccggcgtaccggaagtcatcgtctccaccggcgtcaaaccgatgggcattaccgaaggcccgtataacggtaaaccgaacccgcacgcctggatgtcggcagaaaacgcgctgatttatgtcgataacattcgcgacgccctggtgaagtacgatccggataatgcgcagatctataagcaaaatgccgaacgctataaagcgaaaattcgccagatggccgatccgttgcgtgccgaactggaaaaaattcccgccgatcagcgctggctggtcaccagtgaaggcgcgttctcttacctggcgcgcgataacgacatgaaagagctttatctctggccaattaacgccgatcaacagggtacgccaaaacaggtgcgtaaagtgattgataccattaaaaagcaccatattcccgccatctttagcgagagtacggtttccgataaacccgcccgccaggtcgcgcgtgaatccggcgcgcattatggcggcgtactgtatgtcgattctctgagcgccgctgacggccctgtgccaacctatctggatctgctgcgcgtcacgaccgaaaccatcgtcaacggcattaacgacggactgaggagtcaacaatga

SEQ ID NO: 368155 - DNA, 345 bp, Salmonella enterica
atgcctggtaaacgtatcgctcgtgaaaaactgacgatcaaaaaaatgatcgcgctgtatgaaagccagtgtccacaggcgtcagcggtgcaggggcattacgacgcgctgtacgcctacgcgcaaaaacgtcttgataaatgcgtatttggcgaggaaaaacccgcctgtaagcagtgcccggtgcactgctatcagccggctaaacgcgaggagatgaagcagattatgcgttgggcaggtccgcgaatgctttggcgacaccctgtcctgaccgtgcggcaccttatcgacgataagcgccccgttccggaattgccggaaaaatatcagcgcaagaagtga

SEQ ID NO: 368156 - DNA, 2079 bp, Salmonella enterica
atgtcgtatacacccatgagcgatcttggacagcaaggcctgttcgatatcactcgtaccttattgcagcagcccgatttggcgtcgctcagtgaagcgctttcgcaactggtaaagcgttcagcgctcgccgacagcgccggcattgtgctatggcaggcgctgtcgcaacgcgcacaatattatgcgacgcgagaaaatggccgtcctgttgaatatgaagatgaaaccgtactggcgcacggcccggtacgtcgcatcctttctcgccccgatgcattgcactgtaatttccatgagtttaccgaaacctggccgcagcttgccgcgagcggcctctacccggaatttggtcattactgtctgcttcctttagccgcggagggccgtattttcggcggctgcgaattcatccgtcaggaagatcgcccctggagtgaaaaggaatatgaccgtctgcatacgtttacccaaattgtcggcgtggtcgccgagcaaattcaaaaccgggtaaacaataatgtcgattatgatctgttgtgccgcgaacgcgataacttccgtattctggttgcgatcaccaacgccgtcctgtcgcgtctggatattgatgagctggtaagcgaagtcgcaaaagagatccaccactatttcaatatcgacgcaatcagcatcgtgttgcgcagccatcgcaaaaataagctgaatatctactccacccactaccttgatgagcatcatccggcgcacgaacagagcgaagtcgacgaagccggcacgctcacggagcgcgtctttaaaagtaaagagatgctgcttatcaacctcaacgaacgcgatccgcttgctccctacgaacgcatgctgttcgatacctggggcaatcagatccagacgctttgcctgctgccgttgatgtccggcaagacgatgcttggcgtgctcaaactggcccagtgcgaagaaaaagtgtttaccaccgccaacctcaagctgctgcgtcagattgccgaacgagtagccattgccgtggataatgcgctggcctatcaggaaatccaccgactgaaggaacgcctggtcgacgaaaacctggcgctcacggagcagcttaataacgtcgacagcgagtttggcgagatcatcgggcgcagcgaagcgatgtacaacgtgctaaagcaggttgagatggtggcgcagagcgacagtaccgtgctgattctgggcgaaacgggaaccggtaaagagttgattgcccgcgccattcacaacctgagcggacgtagcgggcgcaggatggtaaagatgaactgcgccgcgatgccggcggggctgctggaaagcgatttgtttggtcatgagcgcggcgcgtttaccggcgccagcgcgcagcggattggccgtttcgagctggcggataaaagctcgctgtttctggatgaagtgggcgacatgccgctggagctacagcctaagctgctgcgcgtccttcaggagcaagagtttgaacgtctcggcagcaataaactgatccagaccgacgtgcggctgatcgccgcgactaaccgcgatctgaaaaaaatggtcgccgatcgcgaattccgtaacgatctctactatcggctgaatgtttttccgatccagcttcctccgttgcgcgaacgtccggaagatattccactactggtcaaagcgttcactttcaaaatcgcccgccgaatggggcgtaatatcgacagcattcccgccgaaacgctgcgcacgctcagcagcatggaatggccggggaacgttcgcgagctggagaatgtcgtcgagcgcgccgtgctgctgacgcgcggcaatgtgctacaactgtcgctgccggatattaccgccgtaacgcccgatacctcgcctgttgcgactgaaagcgccaaagaaggcgaagatgaatatcagcttattatacgcgtgctgaaagagaccaatggcgtagtggctggaccaaaaggcgcggcgcagcgtctggggcttaaacgaaccaccctgctgtcgcgtatgaagcgattgggtattgataaagacgcgttagcgtaa

SEQ ID NO: 368157 - DNA, 1011 bp, Salmonella enterica
ttgaacaatatacaactcgcccacggcagcggcggccaggctatgcaacagttgattaatagcctgtttatggaggcctttgccaacccgtggctggcggaacaagaagatcaggcgcgtctggagctggcgcaactgacggcggagggcgaccgtctggcgttttctaccgatagctatgtgatcgatccgctctttttccccggcggcaatatcggcaaactggcgatttgcggtacggcgaacgacgttgcggtgagcggcgcgatcccccgctatctctcctgcggctttatccttgaagaagggctgccgatggagacgttaaaaagcgtggtcaatagcatggcggcgaccgcgcgggaagcggatatcgccattgtaaccggcgacaccaaagttgtgcagcgcggcgcggcggataaattatttatcaacactgccggcatgggggcgattcccgccgatattcgctggggcgcgcaaacgctgagcgttggcgatgtgctgttagtcagcggtacgcttggcgatcacggtgccactatcctcaacctgcgtgagcaactgggactggatggcgagctggcgagcgactgcgcagtattaacgccgcttattcagacgctgcgtcatattgacggagtgaaggcattgcgtgacgccacgcgcggcggcgtgaatgcggtcgcccatgagtttgcgacgtcctgcggttacggtattgaattgtccgaatccgcactgccgctcaaacctgccgtgcgcggcgtctgcgagctgttggggctggatgccctgaactttgccaacgaaggaaaactggtgattgccgttgaacggcaggccgcagatcgggcgttggcggcattacgcgcgcatccgctgggacgtgatgcagcgctgattggcgaagtcgtggaacgcaaaggcgttcgcttagccggactctatggcgtgaagcgaacccttgatttgccacacgccgaaccattacctcgtatatgctag

SEQ ID NO: 368158 - DNA, 1122 bp, Salmonella enterica
atgcgttttgttgacgagtaccgtgcgccggaacaggtaatgcagctcattgaacacctgcgtgaacgcgccgcccttcttccttacactgccgaacgtccgttgcgcattatggaagtctgcgggggtcatacccacgcaatttttaaatttggtctcgatcagttactgcccgaaaacgtggaatttattcacggccccggttgtccggtctgcgtgctgccgatgggacgcatcgacagttgcgtggaaatcgccagccatccggaggtgattttctgcacctttggcgatgccatgcgcgtgccggggaaacagggttctctgttgcaggctaaagcgcgcggcgcggatgtccgtattgtttactctccgatggacgcgctgaagctggcgcaggataacccgacccgcaaagtggtatttttcgggctgggctttgaaaccaccatgccgaccaccgccatcacgctgcagcaggcaaaacagcgtgacgtgcgaaacttctactttttctgccagcacattacgctgatcccgacgctgcgtagcctactggagcagccggacaacggcattgacgcctttcttgcgccaggccacgtcagcatggtcatcggcaccgaggcgtaccagtttatcgccgccgattttaatcgcccgctggtggtggctggattcgaaccgcttgatctactgcaaggcgtggtcatgctggttgagcagaaaatagcggccctaagccaggttgaaaaccaataccgtcgcgtggtgccggatgccggaaacatgctggcgcagcaggccatcgccgatgtgttctgcgttaatggcgacagcgagtggcgcggtctgggcgtgattgaatcctccggcgtccacctgacgccagagtatcagcgctttgacgccgaagcgcatttccgcccagcgccacaacaggtctatgacgatccgcgcgcccgctgcggcgaagtgctgaccggcagatgcaagccgcatcagtgcccgctatttggtaaaacatgtaatccagagaccgcgttcggcgcgctgatggtctcttccgaaggcgcatgcgccgcctggtatcagtatcgtcagcaggagtgtgaagtttga

SEQ ID NO: 368159 - DNA, 273 bp, Salmonella enterica
atgtgcataggcgtgccgggtcaaatccgcgccattgacggcaatcaggcaaaagttgacgtctgcggcattcagcgcgacgtcgatctcacattagtcggcagttgtgatgaaaacggtcagccgcgtctgggtcagtgggtgctggttcatgtcggattcgccatgagcgtcattaacgaagcggaagcgcgcgacacgctcgacgcgctacaaaatatgtttgatgttgagccggacgtcggcgcactgctgtatggtgaggagagataa

SEQ ID NO: 368160 - DNA, 873 bp, Salmonella enterica
atgtgtacgacttgcggttgcgctgaaggcaacctttatatagaaggcgatgaacataatccgcactcagcgtttcgtagcgcgccctttgccccagcggcccgcccggcgctgaatattaccggcattaaaacgcctgactttgccccaagtcagaccgcagaaggcgatctgcattacggccacggcgaagccggaacccacgcgcctggtatgagtcagcggcggatgcttgaggttgaaatcgacgtgctggacaaaaataatcgtctggctgagcgcaaccgcgcccgtttcgccgcccgccagcaactggtgctcaacctggtgtccagccccgggtccggtaaaaccaccctgctgaccgaaacgctgatgaaattgaaagaccgtgtaccgtgcgcggtgattgaaggcgaccagcagacagtgaacgacgccgcccgcatccgcgctaccggcacgcccgccattcaggtcaacaccggtaaaggctgccatcttgacgcgcaaatgatcgccgacgccgcgccgcgcctgccgctggatgaccacggtattctgtttatcgaaaacgtcggtaatctcgtctgcccggccagcttcgatctgggcgaaaagcataaagtcgcagtgctttccgtgaccgaaggtgaagataagccgctgaaatatccgcatatgtttgccgctgcgtcgctcatgctgctcaataaagtcgatctgctgccctacctcaattttgacgttgagaagtgcatcgccagcgcgcgtgaagtgaacccggagattgaaattatcctgatttccgccaccagcggcgaaggcatggatcagtggctggcctggctggaggcgcagcgatgtgcatag

SEQ ID NO: 368161 - DNA, 357 bp, Salmonella enterica
atgcacgaaatcaccctctgccaacgggcactggaattgattgaacaacaggcttcagcatacggtgcaaaacgtgtgacagccgtctggatcaaaattggcgcattttcttgcgtggaaaccagcgctctttccttttgttttgatctggtatgccgcggcacgatagcagaaggttgtaaactgcacctcgaagaacaggaagccgaatgctggtgtgagcattgtcaacaatatgtcacgttgttaacccaccgtgtacgtcgttgtccgcaatgtcatagcgatacgctgcgaattgtggccgatgacggcttacaaattcggcgcatagagattgatgaaactgaagattaa

SEQ ID NO: 368162 - DNA, 462 bp, Salmonella enterica
atgactatttgggaaataagcgaaaaggccgattacatcgcgcaacggcatcgtcgcctacaggaccagtggcatatttactgcaactcgctggttcaggggatcaccctctcgaaagcgcgcctgcatcacgcaatgagctgcgcgccggaaagggatctttgctttgtcctgtttgagcactttcgtatttacgtcgcgttggcggatggttttaacagccacaccattgagtactacgttgaaaccaaagatggcgaagataagcaattgattgcacaggcgcagctcgatatcgacggcaaggttgatgaacgggttaacaaccgcgatcgcgagcaggtgctggagcactatctggaaaaaatcgccagcgtttacgacagcctctataccgctgtagaaaccaactcgccggttaatttgcgtcaattggtaaagggaaacagcccggcggtataa

SEQ ID NO: 368163 - DNA, 609 bp, Salmonella enterica
gtgaatcgttttgtaattgctgactccactctctgtatcggctgccacacctgtgaggccgcctgttcagagacgcatcgccagcatggcctgcagtcaatgccgcgcctgaaagtgatgctgaatgaaaaagaatctgcgccgcagctttgtcaccactgtgaagatgcgccatgcgccacggtatgcccggttaacgcgattaatcgcgttgacggcgctgtccagcttaatgaaagcctgtgcgtgagctgcaaactgtgtggtattgcctgtccgtttggcgctattgagttttccggcagccgtccgctgcatattccggcgaacgccaatacgccgaaagcgccgcccgcgccgccagcgcctgcgcgcgtcagtacgttgctcgactgggtgccgggcgtacgcgctatcgcggtgaaatgcgacctgtgcagctttgacgagcaaggcccggcctgtgtgcggatgtgcccgactaaagcgctacacctggtggagaacacggatatcgcccgcgccagcaaacgtaaacgtgagctgacgtttaataccgattttggcgatctcaccttgtttcagcaggctcagagtggggatgcataa

SEQ ID NO: 368164 - DNA, 1827 bp, Salmonella enterica
atgagttcactttcactgattactagcggcgtcgcgtggtttgccgccgccgccgttctggcgtttctgttttcgtttcataaagcgctgagcggctggattgccggtatcggcggcgcggtcggcagcctgtgtacggctggcgcggggttcaccgcactgaccagcgccgttacggtgagcggcgtgatgccgtttaccggtcacatgctgcaaataacgccgctgaatgctatctggctgattacgctggggctgtgcggcctgttcgtcagcctgttcaatatcgactggcatcgccatccacaggtaaaagccaacggactgttgatcaacctgctgatggcggcagccgtctgcgccgtggtcgccagtaacctggggacgatggtggtgatggcggaaatcatggcgctctgcgccgtgttcctcaccggcggtagcaaagagggcaaactgtggtttgcgctgggccgtctcggtacgctgctgctggcaatcgcctgctggctggtgtggcagcgctacggcacgctggatctggggctgctggatcaacgcgctcagcaactgccgctgggctccgatatctggctgctcggcgttatcggctttggtctgctggccgggattatcccgctacacggttgggtgccgcaggcgcacgccaacgccagcgctcccgccgccgcgctgttctcgaccgtggtgatgaaaatcgggctgctgggcattctcacgctatctctgcttggcggcaatgcgccgctgtggtggggcgtggcgctgttggtgcttgggatgatcaccgcctttgtcggcggtctgtacgcgctgatggagcataacattcagcgcctgctggcctatcacacgctggaaaatatcggcatcattttgctcggtctgggcgcaggcgttaccgggattgctctcaatcagccggtactgatcgcgctgggtctgaccggcgggctctatcacctgctgaaccatagcctgtttaaaagcgtgctgtttctgggcgcgggcagcatctggttccgtaccggtcatcgcgatatcgaaaaactgggcggtattggtaaacggatgccggttatttctatcgccatgctggtcggtctgatggcgatggctgcgttgccgccgctgaacggctttgccggcgagtgggtgatttaccagtccttcttcaaactgggcaacagcggcgcgtttgttggtcgtctgttaggaccgctgctggcggttggcctggcgattaccggcgcgctggcggtgatgtgtatggcgaaagtttacggcgtgacgttccttggcgcgccgcgcacgaaggaagctgaaaacgccagctgcgcgcctatcctgatgggcgtcagcgtggttgcgctggctatctgctgtgtgattggtggggttgccgcgccgtggctgctgccgatgatttccactgcggtaccgttgccgctggagaccgcgcacaccaccgtatcgcagccgatgatcacgctgctgttggtcgcctgtccgctactgccgttcatcattatggcgatgttcaaaggcaaccgtctgccgtcgcgttctcgcggcgcggcctgggtgtgcggctacgaccatgagcagtcgatggtgattaccgcgtacggtttcgccatgccggtgaaagaggcctttgccccggtactcaaattgcgtaaatggctgaacccggtatcgctggtgccgggctggcagaacgcggcggccgcggtgctgttccgtcgtctggcgctgattgagctggcggtgctggtggtgattgtggtttcacgaggagcctga

SEQ ID NO: 368165 - DNA, 924 bp, Salmonella enterica
atgagtgtgttttatccgttaattcaggcgctggtgctatttgccgttgcgccattgctgtccggtattactcgcgtggcgcgcgcccgtctacacaatcgccgtgggccgggcgtgttgcaggagtaccgcgacattatcaaactgctcggtcgtcagagtattgcgccctctgattccggctgggtttttcgcctgacgccgtttgtgatggtcggcgtgatgctgactatcgccaccgcgctgccggtcgtcaccgttggatctccgttgccgcaactgggtgatttaatcaccctgatttacctgttcgccatcgcccgtttcttcttctctattgcaggcctggataccggcagtccgttcaccgcgatcggcgccagccgtgaagcgatgctcggcgtgctggtggagccgattctgctgctgggtctgtgggtcgccgcgcaggtggcgggttcaacgcatatcagcaatatcgccgataccatttatcactggcctgtcgcgcgcagtattccgctgattctggcgctgtgcgcctgcgccttcgccacctttatcgaaatgggcaagctgccgttcgacctggcggaagcggagcaggagttgcaggaagggccgttgaccgaatacagcggtagcggctttgcggtgctgaaatggggcatcagccttaagcaactggtggtgctgcaaatgttcgtcggcgtgtttctgccgtggggacagatggaaaccttcagcgcaggcggactgttgctggcgctggtgattgccatcgtcaagctgattgtcggcgtactggtgatcgccctgtttgaaaacagcatggcgcgactgcgtttttgcgccacttcacgcgtgacctgggccggttttgggtttgcgtttttagccttcgtctccttgctggcggcgtga

SEQ ID NO: 368166 - DNA, 1710 bp, Salmonella enterica
atgtctgaagaaaaattaggtcaacaataccttgcggcgctgcaccaggcgtttccgggcgtcgtgctggacgaagcctggcagaccaaagatcagctgactattacggtgaaagtaaactatctgccggaagtggtggagtttctttactaccagcagggtgggtggctgtcggtactgttcggtaatgacgaacgccagttgtgcggccactatgccgtttattacgtgctgtcgatggagcagggcacgaagtgctggattaccgtccgcgttgaagtggatgccaataagctggaattcccatccgttacgccgcgcgtgccggctgccgtgtggggtgagcgcgaagtacgcgacatgtacggtttaatcccggtcggtctgccggacgagcgccgtctggtgctgccggacgactggccggatgaactctatccgctgcgtaaagacagtatggattatcgtcagcgcccggcgccgaccaccgatgcggaaacctacgagttcattaacgagctgggtgacaagaaaaataacgtggtgccgattggcccgctgcatgttacttccgatgaaccgggccacttccgtctgttcgtcgatggcgaaaacattatcgacgccgactaccgcctgttctacgtccaccgtggtatggaaaaactggcggaaacccgcatgggttataacgaagtcaccttcctgtcggatcgcgtgtgtggtatctgcggcttcgcccacagcaccgcctacaccacttccgtggaaaacgcgatgggcattcaggtgccggagcgtgcgcaaatgatccgcgctattctgctggaagtggaacgcctgcactcgcatctgctcaaccttggcctggcctgccactttaccggctttgactccggctttatgcagttcttccgcgtgcgtgaaacctccatgaagatggcggaaatactgaccggggcgcgcaaaacttacggtctgaacctgatcggcgggattcgccgcgatctgctcaaagaggacatgatccagacccgtcaactggcgcagcagatgcgtcgtgacgtgcaggagctggtggacatgctgctgagcacgccgaatatggaacagcgtaccgtgggtatcggtcgtctggacccggaaattgcccgcgacttcagtaatgtcggcccgatggtgcgtgccagcggtcacgcccgcgacacccgcgccgaccacccgtttgtcggctacggtctgctgccgatggaagtacatagcgagcagggttgcgacgtgatttctcgtctgaaagtccgtatcaacgaagtctacacctcgctgaatatgatcgatttcggtctggataatctgccgggcggcccgctgatggtggaaggctttacctatattccgcaccgttttgcgctcggcttcgctgaagcgccgcgtggtgacgatatccactggagcatgactggcgacaaccagaagctgtaccgctggcgctgccgtgcggcgacctacgccaactggccaacgctgcgctatatgctgcgcggcaacaccgtttctgatgcgccgctgatcatcggcagcctcgacccgtgctactcctgtaccgaccggatgaccgtggtcgatgtgcgtaagaagaagagcaaagtcgtgccgtacaaagaacttgagcgctacagcattgagcgtaaaaactcgccgctgaaataa

SEQ ID NO: 368167 - DNA, 543 bp, Salmonella enterica
atgtttacctttatcaaaaaagttatcaaaaccggcacggcgacctcgtcttatccgctggagccgattgcggttgataaaaacttccgcggcaagccggaacataatccgcagcagtgcatcggttgcgccgcctgcgttaatgcctgcccgtcgaacgcgctgacggtggaaaccgatcttgcgaccaatgagctggcgtggcagttcaatcttggccgctgcatcttctgcggtcgctgcgaagaagtttgcccgacggcggcgatcaaactgtcgcaagaatacgaactggcagtgtggaagaaagaagacttcctgcaacagtcccgcttcgcgctgtgcaactgccgcgtatgtaatcgtcctttcgcggtacagaaagagatcgactacgccattgcgctgcttgcgcacaacggcgacagccgcgcggaaaaccaccgcgaaagctttgagacctgcccggactgtaagcgtcagaaatgcctggtgccgtccgaccgtattgaactgactcgccatatgaaagaggtcagctaa

SEQ ID NO: 368168 - DNA, 768 bp, Salmonella enterica
atgagcaatttattaggcccgcgtgacgccaacggcattccggcaccgatgacggtggatgaatccatcgccagcatgaaggcgtctctactgaaaaatattaagcgttcggcatacgtttaccgcgtggactgcggcggctgtaacggctgtgaaatcgaaatctttgcgacgctttcgccgctgtttgatgccgagcgtttcggcatcaaagtggtaccgtcgccgcgtcatgccgatattctgctgtttaccggcgcggtgacccgcgccatgcgctctccggcgctgcgcgcctggcagtcggcgccggacccgaaaatctgtatctcttatggggcctgcggcaacagcggcggcatcttccatgatctgtactgcgtctggggcggtacggataaaatcgtaccggtggatgtgtatattccaggctgcccgccaacgcctgcggcgacgctgtatggctttgcgatggcgcttggcctgctggagcagaaaatccacgcccgcgcgccgggtgagctggacgatcagcccgcagagatcctgcatccggatatggtgcagccgctgcgcgtgaaggtggatcgcgcggcgcgccggctggcgggttatcgctatggtcgtcagatcgccgatgattacctgacacagttggggcagggcgagcagcaagtggcgcgttggctggaagcggaaaacgatccgcgtttaaccgaaattgtcacccatctcaatcatgttgttgaagaggcgcgtatccgatga

SEQ ID NO: 368169 - DNA, 411 bp, Salmonella enterica
atgagcgaacaggtggtgttcagtcaactgagccgtaagtttattgatgagaacgatgcgacgcctgccgaggcgcagcaggttgtctattacagcctggcgattggtcaccacttgggggttatcgattgtctggaggccgcgctcacctgcccatgggatgagtatctggcgtggatcgccaccctggaagccggtagcgatgcccggcgtaaaatggaaggcgtgccgaagtatggcgagatcgttatcgatttcaaccatgtgcaaatgctggcgcgcgcgtttgatgaggcgcgcgccgcgcagaccccgcagcagcaagaatggagcaaactgatgctcagtatgctgcatgacattcatcaggaaagcgccatctacctgatggtgaggaggcttcgtgactga

SEQ ID NO: 368170 - DNA, 471 bp, Salmonella enterica
gtgactgacgttttactctgtgtcggcaacagcatgatgggcgacgacggcgcaggcccattactggcggaaatgtgcgcggcgcagccgaaggggaattgggtggtgattgatggcggcagcgcgccggaaaacgacattgtggcgattcgcgaactgcgcccgcagcgtctgttgattgtcgacgccaccgacatgggacttaatccgggcgagatccgcatcatcgatccggatgatatcgccgaaatgtttatgatgaccacccacaatatgccgctcaactaccttatcgatcagctgaaagaggatgtcggcgaggtgatttttgttggtatccagccggatatcgtcgggttttattatccgatgactcaaccgattaaggacgcggtaaatatcgtctatcagcgcctggaaggctggcagggaaacggcggatttgccgcgctggaagcgccggaggcgtaa

SEQ ID NO: 368171 - DNA, 483 bp, Salmonella enterica
gtgttacacggcaaaggttgtaagaaggacgtgaagattatcgtatggagcggactgctatttctctgcctcgccgcacgcgcactggccaccggtgttgtcggttacctgccgatgagcgacggtgaatatgcgcaaaagcgtgcgctgaagccgctgttgaccctgccttattctgtatcgcccgaccagacctggcattttcgccaggtcggagtcagtggcgtgacgctactgccggagccgaaaaaagataacgaatggcggattagcggaaaagacagagccggtaattcgtgggttgtcccggtgggaaggctgattaatttggcgggtaatgcgcaattttatcgcgctgacctcgatcgtaacggcattcaggatctggttatctggttgggcaatcctgggttgggcctggcgccgagcgcgcaatacatcattttcaccatttctcaagaatggccgcccctgcgtctttga

SEQ ID NO: 368172 - DNA, 546 bp, Salmonella enterica
atgaaccgtttcatcattgcagacgcgagtaagtgcattggttgccgtacctgtgaagtggcttgcgtcgtatcccatcaggaaaatcaggattgcgcatcgctgacccctgaaacctttttacctcgtatccatgtcatcaaaggcgtgaacgtttccacggcaacgctgtgtcgccagtgtgaagacgcgccgtgcgccaacgtttgcccgaatggcgccatcagccgtgacaaaggctttgttcatgtgatgcaggaacgctgcattggctgtaaaacttgcgtagtggcatgtccttacggcgccatggaagtggtggtacgtccggtggttcgcaatagcggcgcggggctgaacgtgcgtgccgaaaaagccgaagccaacaagtgcgatctgtgtcaccaccgtgaagccggtccggcctgtatggccgcttgcccaacgcacgccctaatctgcgtggaccgcaataagcttgaacagctgagcgcggaaaaacgccgtcgcgcggcgctggattcaacggcatcgctgcttttctga

SEQ ID NO: 368173 - DNA, 2241 bp, Salmonella enterica
atggcgatagacacaccttccggcgtacagctacgcattcggggcaaagtacagggcgtcggttttcgtccttttgtctggcagctggcgcagcagttgcgattacacggcgacgtgtgtaatgacggcgacggcgtcgtcgttcggctgctggaagagccgtcgcaatttattgccgcgctctatcaggattgcccgccgctggcgcgcattgacagcgttgaacacgcgtcgttggtatgggagcgcgcgccgacggatttcaccattcgtcagagcgcaggcggttcgatgaacacgcaaatcgtgccggatgcggcgacctgcccggcatgtcttgccgagatgaataccccaggcgagcggcgctaccgttatcctttcatcaattgcacccactgcggaccacgcttcaccattattcgcgctatgccctatgaccggccatttacggtgatggcggcgtttcccttgtgtccggaatgcgacagcgaataccgcgatccgtacgatcgccgttttcatgcccagcccgttgcctgtccgtcatgcgggccgcatcttgagtggcggagccaacatgagcgagcggaaaaagaggcggctttgcaggcggcggtcgcccaactgaacgccggaggcattattgccgttaaagggctgggggggtttcatctggcctgcgatgcgcgcaacgataacgcagtggcgatgctgcgggcgcgtaaacatcgcccggcgaaaccattggcggtgatgttgcccacggcgcaaacgctgccgagcgcggcgcgttcgctgctgaccacgccagcggccccgattgtactggtggataagcagtatgtaccttcgctgagtgagggcatcgcgccaggacttacggaagtgggcgtgatgctgccagccaacccattgcaacacctcttgttgcaggcgctcaattacccgctggtgatgacatccggcaacctgagcggcaaaccgcccgccatcaccaacgaacaggcgctggacgatttacacgatattgccgatggttttctgttgcataatcgcgacattgtacagcgcatggacgactctgtcgtgcgcgacagcggcgaaatgctgcgtcgttcgcggggatacgtgccggacgcgattgcgttgccgcccggatttcgcgatgtgccgccgatactttgtctgggcgcggatctgaaaaacacgttctgtctggtacgcggcgaacaggcggttgtcagccagcatttaggcgatctcagcgatgacggtatccaggcgcagtggcgcgaggcattgcgtctgatccagtcaatctacgattttacgccagagcgtatcgtctgtgatgcgcatccgggctatgtttccagtcagtgggccagtgagatgcgtctgccgacagagacggtgttacaccatcatgcccatgcggcggcttgcctggccgagcatggttggccgctggacggtggagaggtgattgccctgacggtagacggtatcggcatgggtgagaatggcgcgctatggggcggagaatgtttgcgggtcaattatcgcgagtgcgaacatttaggcggtttacccgccgtggcgctgccgggaggcgatctggctgccaaacatccgtggcgtaatctgttggcgcagtgcctgcgctttgtgccggactggcaggattacccggagactgcggggctgcaacagcaaaactggaatgtcctggcgcgtgccattgagcgcggcgtcaatgccccgttggcctcttcctgcgggaggttgttcgacgcggtggctgccgcgcttcgctgcacgccagcatcgcttagctatgagggcgaggccgcctgcgcgctggaggcgctggcctctcaatgcgctaacgttgagcatccggtaacgatgccgcttaacggcgctcaactggacgtcgccgttttctggcggcaatggttgaactggcaggccacgcccgcgcaacgcgcctgggcttttcatgatgcgctggcgtgcgggtttgccacgctaatgcgccagcaggctacggcgcgggggataaccactctggtcttcagcggcggggtgatacacaaccgcttacttcgcgcgcgtcttgccttttatctttctgattttaaattgttatttccgcagcggttaccggcgggcgacggcggactgtcgtttggacagggcgtgattgccgcagcgcgagcgttaagggaagtgtag

SEQ ID NO: 368174 - DNA, 1134 bp, Salmonella enterica
atgagtcggggaatcatcattattgggtcgggcttcgccgcccgccagctcgtcaaaaatatccgtaaacaagatgcgcatgtgccgttaaccctgattgcggcggacagcatggatgagtacaacaagcccgatctcagccacgttatcagccagtcgcagcgcgccgatgatctcacccgccagttagcgggggaatttgctgaacagtttaatctgcgactgttcccgcatacctgggttgctgacattgatgccgatgcccatgtggtgaaaagtcaggataagcagtggcagtacgacaagctggtactggcgaccggggcggcagcctttgtgccgccgattgcaggacgtgagttaatgcttactttgaatagccagcaggagtaccgcgcctgtgagacacaactgcgcgacgcgcagcgagtgctgattgtcggcggcggtctcattggcagtgaattagcgatggatttctgccgcgccgggaaaacggtaacgctgatggataacgccgccagccttctcgcctcactgatgccaccagaagtgagcagtcgcttacagcatcacctgaccgatatgggggtgcatctgctgctgaaatcgcagttgcaaaaactggagaaaaccgaagccggtatccgcgctacgctggtaagccagcatagtattgaggtcgatgcggtgattgccgccaccggcttacgcccggaaaccgctctggcgcgccgcgccggggtagccgtcaaccgcggcgtctgcgtggatagctatctacagaccagtcacccggatatttatgcgatcggcgactgcgcggagatcaacggtcaggtgctgcccttcctgcaaccgatccagttaagcgcgatgtacctggcgaaaaatctgcttggcggcaacgcgccgctgaagctaccggcgatgctggtcaaagtcaaaacgccggaactgccgctgcatctggcgggagaaactcagcgcagcgatttgagctggcagattaccgcagaatctgacggtatgattgccaaaggcatgagcggagaaggccaactacgcgcctttgtggtgagtgaagaccgcatgaaagaggcctttgcactgctgaaaacgttgtccgtataa

SEQ ID NO: 368175 - DNA, 1440 bp, Salmonella enterica
atgtctattctggttaaaaataatattcattgggttggccagcgcgactgggaagtacgtgattttcacggcactgaatacaaaacgctgcgcggcagcagctataacagctatctcattcgtgaagaaaagaatgtgctgatcgataccgtcgatcataagtttagccgtgagtttgtgcaaaatctgcgcagtgaaatcgacctcgcggatatcgactacatcatcattaaccatgccgaagaagaccatgcaggcgcgctgaccgaactgatggcgcagatcccggacacgcctatctactgtaccgccaacgccattgactctatcaacggccatcaccatcacccggaatggaattttaaggtggtgaaaaccggcgatacgctggatatcggcaacggcaagcagttgatcttcgtggaaacgccgatgctgcactggccggacagcatgatgacctatatgaccggcgacgcggtgttattcagcaacgacgcctttggtcagcactactgcgacgagcgcctgttcaatgatgaagtggaccaaaccgaactgtttgaacaatgccagcgctactacgccaatatcctgacgccgttcagccgtctggtaacgccaaaaattaccgaaatcctcggcttcaacctgccggtggatatgattgccacctcacacggcgtggtatggcgcgacaacccaacgcaaatcgtggaactgtatctgaaatgggcggcagattatcaggaagatcgtatcactattttctacgataccatgtcgaacaatactcgcatgatggcggatgccatcgcgcagggtatcaatgaagtggacccgaacgtggcggtcaaaatctttaacgtcgcccgcagcgataaaaatgaaatactgaccaatgtcttccgttcgaaaggcgtgctggtcggcacttctaccatgaacaacgtgatgatgccgaaaatcgctggtctggtggaagagatgaccggcctgcgctttcgcaacaaacgcgccagcgccttcggttctcatggctggagcggcggcgcggtggatcgactgtccacgcgcttacaggatgccggttttgaaatgtccctgagtctgaaagcgaaatggcgtccggatctggatgcgctggagttgtgccgtcagcacggtcgcgacatcgcgcgtcagtgggcgcttgctccgctgccggaaaccacacagaaaaccgcgccagtcgaagaaaccacaacctgcgccgccgcagacttcggccccaaaatgcaatgcagcgtatgccagtggatttacgaccctgcgctgggcgagccgttgcaggatgtcgcgccgggtacgccgtggaacgacgtgccggataacttcctgtgcccggaatgttcattaggtaaagacgtgttcgacgtactggcgacggaggcaaaatga

SEQ ID NO: 368176 - DNA, 1521 bp, Salmonella enterica
atgagtttttccgtggaggtattggcgggcatcgccattgagttacaacgcggcattgggcatcaggatcgttttcagcggctgattactacgctgcgtcaggttctggcgtgcgacgcctcggcgctgttgcgttatgaatcacgacaatttattccactggcgattgatggcctggcgcaggacgttctcggcagacgttttaccctggaagggcatccgcgcctggaagccatcgctcgcgcgggggacgtggtgcgttttccggctgatagcgatttacccgatccgtatgacgggttaattcccggacaggaaagcctgaaagtccacgcctgtgttggtctgccgctgtttgccggacagaacctcatcggtgcgctgacccttgatgctatgacgccggagcagttcgaggtatttagcgatgaagagctgcggcttgtcgccgcgctggccgccggggcattgagcaatgcgctgttaattgaacaactggaaagccagaacatgctgccggggtcgtcaggcgtgtttgaaccgataaaagagacgcacatgatcggcctgtcgccggcgatgacgcagttgaaaaaagagatcgagattgtggcgggctccgatcttaacgtgctgatcggcggtgaaacggggactggtaaagagctggtggcgaaagccattcaccagggctcccccagagcggtcaatccgctggtctatctcaactgtgccgcgctgccggaaagcgtggcggagagcgagttgtttggtcatgtaaaaggggcttttaccggggctatcagtaatcgtagcggtaagtttgaaatggcggataacggcacgctgtttctggatgagattggcgaactgtcgctggcgctacaggccaagctacttcgcgtgttgcagtatggcgatattcagcgcgtcggcgacgatcgtagcctgcgcgtggatgtgcgggtgttggcggcgaccaaccgtgacctgcgtgaagaggtgctggcggggcgttttcgcgccgacctgttccatcgcctgagcgttttcccgctctttgtgccgccgctgcgcgagcgcggcgatgatgtggtgttgctggcgggctatttttgcgagcagtgccgactgcggctggggctgtcccgcgtggtactgagtcccggcgcgcgccgccatttgctcaactatggctggccgggcaacgtccgggagctggaacatgccattcaccgtgcggttgtactggcgagagcgacccgggcaggggatgaggtggtactggaggagcagcattttgccttgtcagaggacgttttacccgcgccgtctgcggaaagctttctggcgctgcctgcctgccgcaatttgcgcgaatcgacggagaacttccagcgagagatgattcgccaggcgctggcgcaaaataatcacaactgggcggccagtgcgcgggcgctggaaaccgacgtcgccaacctgcatcggctggcgaagcgtctgggactgaaggattag

SEQ ID NO: 368177 - DNA, 966 bp, Salmonella enterica
atgagtgatgcactactaaacgcgggccgtcagaccttaatgctggagctacaagaagccagccgtctgccggagcgtctgggcgatgattttgtccgcgccgccaatatcattattcactgtgaaggcaaagtgatcgtttccggtattggtaaatcaggtcatattggtaaaaaaatcgccgcgacgcttgccagtaccggtactcccgctttttttgttcatccggcggaagcactgcatggcgatctggggatgattgaaagccgcgatgtgatgttatttatctcctattccggcggcgcaaaagaactcgacctcatcatcccgcgtctggaagataaatccgtcgcgctgctggcgatgaccggtaaacctctctctccgctggggcgagcggcaaaagccgttctggatatttccgtcgagcgtgaagcctgtccgatgcatctggcgccgacatccagtaccgtcaatacgctgatgatgggcgatgcgctggcgatggcggtcatgcaggcgcgcggttttaacgaagaagatttcgcccgttcgcatccggctggcgcactgggcgcgcgtttgctcaataatgtgcatcacctgatgcgccagggcgatgcaataccgcaggtaatgctcgccaccagcgtgatggatgccatgctggaacttagccgtaccgggctggggctggtggcggtttgcgatgagcaacatgttgtgaaaggcgtctttaccgacggcgacctgcgtcgctggctggtgggcggcggcgcgctcaccacgccggtaagcgaagccatgacgcccaacggtattacgctccaggcgcaaagccgcgccattgacgccaaagagctcctgatgaaacgcaaaattaccgccgcgccggtggtcgatgaaaacggcaaactcaccggcgccattaacctgcaggatttctaccaggcggggattatctaa

SEQ ID NO: 368178 - DNA, 774 bp, Salmonella enterica
atgaaacctcgtcagcgtcaggccgcgattctggagcacctgcaaaaacagggaaaatgctcggttgaagaactggcccagtactttgacacgacaggcaccactatccgtaaagatctggtcattctggaaaatgccggaaccgtcatccgcacctatggcggcgtggtgttgaataaagaagagtccgatccgcctattgatcacaaaacgcttatcaacacccacaaaaaagcgctgatagccgcagccgctgtgaaatatatccatgatggcgattccattattctggacgccggaagtaccgtgttacagatggtgccgttgctttcgcgttttagcaacatcacggtgatgaccaacagcctccatattgtcaacgcgctatcggaactggacaacgaacaaactatcctgatgcccggcggcaccttccgtaaaaaatcggcgtcgtttcacggtcaactggcggaaaacgcctttgagcaattcagctttgataaacttttcatgggaactgacggtattgacctgaacgtcggtgtgaccacgttcaatgaggtttacaccgtcagtaacgcaatgtgcaatgcagcacgcgaggtgattctgatggcggactcctcaaaatttggtcgtaaaagccccaatgtggtgtgcagtctggaaaccgtcgacaaactgatcacggacgcgggtatcgatccggcatttcgtcaggcgctggaagcaaaagggattgaagtaatcataaccggagaaagcaatgagtga

SEQ ID NO: 368179 - DNA, 360 bp, Salmonella enterica
atggtttccactctgattaccgtcgccgttatcgcctggtgtgcgcaactggcgctgggcggctggcagatttcccgctttaatcgggccttcgataaacttagccaacaggggcgggtcggcgtcgggcgctccggcgggcgttttaagccccgggtggtggttgccgtggcgctggacgaacagcagcgggtgacggacactttattgatgaaaggccttacggtattcgccagaccggttaaaattgccgcaatgcaaggaaaacatttgcatgaattacagcctgatgtgatctttccccatgattcgctcgcgcagaatgcactatcattggcgcttaaactgaaacatgggtaa

SEQ ID NO: 368180 - DNA, 780 bp, Salmonella enterica
atgaatcaagttgccgttgtcattggcggaggccagaccctgggggcattcctttgccgtgggcttgcagaagaaggataccgcgtggcggtcgttgatattcaaagcgataaagccgcgaatgtcgcccaggaaattaacgccgattttggcgaaggtatggcgtacggttttggcgccgacgccaccagcgagcagagcgtgctggcgctttcccgcggcgtagacgagattttcgggcgcgtcgatctgctggtttacagcgcgggtatcgccaaagcggcgtttatcagcgatttccagttgggcgattttgaccgctcgctacaggtgaatctggtgggctatttcctctgcgcccgtgagttttcccgcctgatgatccgcgacggcattcaggggcgcattattcagattaactctaaatccggcaaagtgggcagtaaacacaactccggctacagcgcggcgaaattcggcggcgtggggttaacccagtctctggcgctggatctggcggaatacggcattaccgtacactcgttgatgctcggcaacctgttgaaatcgccgatgttccagtcactgctgccgcaatacgccactaaactgggcattaagcccgacgaggtggaacagtattacattgataaagtaccgctcaaacgcgggtgtgattatcaggatgtgctgaacatgctgctattttatgccagcccgaaagcgtcttattgcaccgggcagtcgatcaacgtaaccggcggtcaagtgatgttctga

SEQ ID NO: 368181 - DNA, 363 bp, Salmonella enterica
atgagcgtgatttatcaaaccaccatcacccgtatcggccagagcgcgaaggaggcgctcggcgaacagatgctgattacgtttcgggaaggcgcgccggcggatatcgaagaattttgcttcatccattgtcatggcgaactgaccggcgcgctgcagcctggcgcgcggtgtgaattgggtcaacattgctatccggtcacggcggtcggcagcgtagccgagcaaaacctgcgtgaactggggcatatcactttgcgcttcgatggtctgcgcgaagcagaatttcccggcaccgtacacgttgcggggcctgtaccggacgatatcgcgccgggctgtattttgacgtttgtcgcttaa

SEQ ID NO: 368182 - DNA, 972 bp, Salmonella enterica
atgacacgggttcgtattgagaaaggcgccggcggctggggcggcccgcttgaactggacgttacgccaggcaaaaagatcgtctatatcacagccggtacgcgcccggcgatcgtcgacaaactggcgcaactaacaggctggcaagcggtggacggctttaaagaaggcgaaccgccggaagcggagatcggcgcggccattatcgactgtggcggtacgctgcgctgcggtatctatccgaaacgccggattccaaccattaatattcactcgacgggtaagtccggcccactggcgcagtatattgttgaggatatttatgtctccggcgtaaaagaagaaaacattactcttgtcggcgaaacgcctgccagtcctcagcctgccaaaacgacattaggacgtgactacgacaccagcaaaaaaatcaccgagcagagcgacgggctgctggcaaaagtcggtatgggaatgggctccgccgtggcggtactgttccagtccggtcgcgacaccattgatacggtcctgaaaacaatcctgccgtttatggcgttcgtttcggcgctgatcggcatcattatggcctcaggtcttggcgactggatcgcccacggcctggcgccattagccagccatccactggggctggtgacgctggcattgatctgctctttcccgctgctgtcgccctttctcggccctggcgcggttatcgctcaggtcattggcgtcctgatcggcgttcagataggcctgggcaatatccccccgcatctggcgcttcccgccctgttcgcgattaacgcgcaggcggcctgcgactttatcccggtcggcctgtcactggcggaagcgaaacaagacaccgttcgcgtcggcgtaccttctgtgctggtcggacgcttcctgactggcgcgcccacggtacttatcgcctggtttgtttccggctttatctatcaataa

SEQ ID NO: 368183 - DNA, 564 bp, Salmonella enterica
atgatcgaaaccattacacatggtgcggagtggttcatcgggttattccagaaaggcggagaggtgtttaccggtatggtgacaggtattcttccgctactgataagcctgctggttatcatgaatgcgctcatcaattttatcggccagcagcgtattgagcgttttgcccaacgctgcgccggaaatccgctatcccgctacctgcttttaccgtttatcggaacgtttgttttttgtaatccgatgaccctgagtctgggacgctttatgccggagaagtacaagccgagctattacgcggcggcctcctatagctgtcactccatgaacggtctgtttccgcatatcaatcccggcgaactgtttgtttatctggggatcgccagcggactcaccacgttagggcttcctctcggcccgctcgcggtgagctatctgctggtaggtctggtgacgaacttcttccgcggttgggtcaccgatctcaccaccgctatttttgagaaaaaaatggggattcaacttgagcagaaagttcatctgacaggagcggtatcatga

SEQ ID NO: 368184 - DNA, 1080 bp, Salmonella enterica
atgttcaagcgtcgttatgtagcgttacttccactttgcgtattgcttgctgcctgtagcagcacgccaaaatcttccgagactcaagcgacgacgggcacgccttccggcggctttctgcttgagccgcagcataacgtcatgcaaatgggcggcgacttcgccaacaaccctaatgcgcagcagttcattgataaaatggtcaataaacacggtttcgaccgtcagcagctgcaggagatcctctcgcagtctaaaagactggattacgtcctgcgtctgatggacagacaagcgccgaccactcagccgcccgccggaccaaatggcgcctggttgcgctaccgcaaacaatttattacgccggataacgtgcaaaacggcgtcgcgttctggaatcagtatgaagacgcgctgaaccgcgcctggcaggtatacggcgtaccgccggaaatcatcgtggggattatcggcgtggaaacccgctggggacgtatcatggggaaaacgcggattctggacgcgctggcgacgctgtcatttaactatccgcgccgggcggaatatttctccggcgagctggaaaccttcctgctcatggcgcgcgatgagcaagacgatccgctcaatctgaaaggttcctttgcgggcgcgatgggctacggccagtttatgccatcttcctataaagaatatgcggtcgatttcaatggcgatgggcacattaacttgtgggatccggtagatgccatcggcagtgtggcgaactacttcaaggcgcatggttgggtgaaaggcgatacgattgcggtgccagcgaatggtcaggcgccgggactggcgaatggtttcaaaacaaaatacagcctctctcagcttgccgccgcaggcttaacgccgcagcaatcgttgggcaatcatcaggaagccagcctgcttcgtttggatatcggtacgggctaccagtactggtacggcctgccgaacttctacactattacccgatataaccacagcacgcattatgcgatggcggtttggcaactgggccaggcggtagcgctggcgcgggtgcgctaa

SEQ ID NO: 368185 - DNA, 246 bp, Salmonella enterica
atgtcactcaaaaaaacggaaagcacacagcacaaactgaaacaaacctgtcaactacggctgtggttaattgtgggtggagtatgttcattaggaatgggagtactgaatatattgtcgtcaggctattttgaaccgtatgatggcggtcaaattatcttaggcctgggatgtctgggatatagtctggcactatcaaagaagatatcccacttgcaggcagagaatcagcccaaaaagccataa

SEQ ID NO: 368186 - DNA, 498 bp, Salmonella enterica
atgactgacagtgaactgatgcggcttagcgaacaggtcgggctggcgttaaaagcgcgcggggcgaccgtaacgacagcagagtcctgtaccggcggctggctggcgaaagccattaccgacatcgccggaagctccgcctggtttgaacgcggctttgtcacctatagtaatgaagccaaagcgcagatgattggcgtgcgtgaagagactctggcgcagcatggcgcggtcagcgaacccgtagtggtcgaaatggcgatcggggcgctgaaggccgctcgcgccgattttgctgtcgctattagcggaattgccgggccggatggcggcagtgaagaaaagccggttggtacggtgtggtttgctttcgccagcgtcagcggagaagggattacgcgtcgggaatgcttcagcggcgaccgtgaatcggtgcgtcgacaggcgacgacgtacgcgctacaaaccctgtggcaacaatttctacaaaacacttga

SEQ ID NO: 368187 - DNA, 1062 bp, Salmonella enterica
atggctatcgacgaaaacaaacagaaagcgttggcggcagcactgggccaaattgaaaagcaatttggtaaaggctccatcatgcgtctgggtgaagaccgttctatggatgtggaaactatctccaccggttcgctttcactggacatcgcactcggtgcgggcggtctgccgatggggcgtatcgtcgaaatttacgggccggaatcttccggtaaaacgaccctgacgctgcaggtgattgccgctgcgcagcgtgaaggtaaaacctgtgcgtttatcgatgcggaacacgcgcttgaccctgtttacgcacgcaagctgggcgtcgatatcgataacctgctctgctctcagccggataccggcgagcaggcgctggaaatctgtgacgcgctggcgcgttcaggcgcggtggacgtcattgtggtcgactccgtagcggcgctaacgccgaaagcggaaatcgaaggtgaaattggcgactctcacatgggcctcgcggcgcgtatgatgagccaggcgatgcgtaagctggcggggaacctgaaacagtccaacacgctgttgattttcatcaaccagatccgtatgaagattggcgtgatgttcggtaacccggaaaccaccaccggcggtaacgcgctgaaattctacgcctctgttcgtcttgatatccgtcgtattggcgcggtgaaagagggcgataatgtcgtgggtagcgaaacgcgtgtgaaagtggtgaaaaacaaaatcgccgcgccgtttaagcaggccgagttccagatcctctacggtgaaggcatcaacttctatggcgaactggttgacctgggcgtgaaagagaagctgatcgagaaagcgggcgcatggtacagctacaacggcgagaagattggccagggtaaagcgaacgcgactacctggctgaaagagaacccggcgacagcgaaagagatcgagaaaagggttcgtgaattactgttgagtaatcagaatgccacgcccgatttcgccgttgacgatagcgaaggcgttgcagaaaccaacgaagatttttaa

SEQ ID NO: 368188 - DNA, 540 bp, Salmonella enterica
atgcggcccttttggcatttctccctgttaaggttttttatgagtgaacccacatcgcgccgtcccgcttatgctcgtctccttgatcgtgcggtacgtattcttgctgtccgcgatcacagcgagcaggaattacggcgtaaactctccgcgccggtgatgggcaaaaatgggccggaagagattgatgcgacggcagacgattatgaacgcgtgatcgcctggtgccacgaacatcactatcttgatgacgagcgcttcgtgatgcgctttatcgccagtcgtagccgcaaaggctatggcccggcgcgtattcgccaggagttgaatcagaaaggcatttcccgtgaatcgactgaaaaagcgatgcgagaatgtgaaattgactggagtgaaatggcacgtgaacaggccgttcgcaaatatggcgagccgctcccttcaaacttttcagaaaaggttaaggtacagcgctttttgctctatcgcgggtatctgatggacgatatccagcaaatatggcgaaattttgcagattga

SEQ ID NO: 368189 - DNA, 2631 bp, Salmonella enterica
atgagcaagagcaccgctgagatccgtcaggcgtttctcgactttttccatagtaaagggcatcaggtagttgccagcagttccctggtgcctaacaatgaccccactctgttgtttaccaatgccgggatgaaccagttcaaggatgttttccttgggctcgataaacgtaattattcccgtgcaaccacttcccagcgttgcgtacgcgcgggggggaaacacaacgatctggaaaacgtcggatacactgcacgtcaccatactttcttcgaaatgctgggcaacttcagcttcggcgattacttcaaacacgacgccattcagttcgcatgggaattactgaccggtgaaaactggtttgctctgccaaaagagcgtttatgggtcaccgtctatgaaaccgacgacgaagcctatgagatctgggaaaaagaagtcggcatcccgcgcgagcgtattatccgtattggcgacaataaaggcgcgccatacgcatcggataacttctggcagatgggcgataccggtccctgcggtccgtgcaccgaaatcttctacgatcatggcgaccacatctggggcggccctccgggaagcccggaagaagacggcgatcgctatattgagatctggaacatcgtctttatgcagttcaaccgtcaggctgaagggacgatggaaccattgccgaaaccgtctgtagataccggtatggggctggagcgtattgccgcggtactgcagcacgttaactctaactatgacatcgacctgttccgcacgttgattgaagcggtagcgaaagtcaccggcgctaccgatctgggtaataaatcgctgcgcgttatcgccgaccacatccgttcttgcgcattcctggttgccgatggcgtgctgccgtcgaatgaaaaccgtggttatgtgctgcgtcgcattattcgtcgcgcggttcgtcacggcaacatgctgggcgcgaaagagaccttcttctacaagctggttgggccgctgattgaggtaatgggctccgcaggcgaagagttgaaacgtcagcaggcgcaggtcgagcaggttctgaaaacggaagaagagcagttcgctcgtacgctggagcgcggtctggcgctgctggatgaagaactggcgaaattgcagggcgacaccctggacggcgaaaccgctttccgtctgtatgatacttatggtttcccggtcgatctaacggcggacgtctgccgtgagcgcaacatcaaagtcgacgaagccggttttgaagccgccatggaagagcaacgccgtcgcgcgcgcgaagctagcggttttggcgcggactacaacgcgatgatccgcgttgatagcgcttctgaatttaaaggttatgaccatctggaactgaacggcaaagtgactgcgctgtttgtcgatggtaaagcggttgaagcgattaacgcgggacaggaagctgttgtcgtgctggatcagaccccattctatgcggaatcaggcggtcaggttggcgataaaggcgagctgaaaggcgctggatttactttcgctgtggacgacacgcaaaaatatggtcaggcgattggtcacctcggcaaattgtctgcgggcgctctgaaagtgggcgatgcggtacaggctgacgtagatgaagcgcgccgcgcacgtatccgtctgaaccactccgccacgcacctgatgcacgcggcgttgcgccaggtgcttgggacacacgttgcgcagaaaggttcgctggttagcgataaagtgctgcgcttcgacttctcgcacaatgaagcgatgaagccgtcggagattcgtgaggttgaagatttggtgaatgcgcaaattcgccgcaacctgccgattgaaacgaacatcatggatctcgacgcggcgaaggcgaaaggggccatggcgctgtttggcgagaaatacgacgaacgtgtacgcgttctgagcatgggcgatttttctaccgaactgtgcggcggtactcacgccagtcgtaccggtgatatcggtctattccgtattatctctgagtccggcaccgcagcgggcattcgtcgtattgaggcggtaaccggtgaaggcgctatggccaccgttcatgcgcaaagcgatcgcttaaacgatattgcgcatctgctgaagggcgacagccagaatctgggcgacaaagtgcgtgccgtgctggaacgtacacgtcagctggaaaaagagttgcagcagttgaaggaccaggccgcagcgcaggagagtgcaaatctttccagtaaagcggtcgatctcaacggcgtgaagctcctggtcagcgagcttgctggtattgagccgaaaatgctgcgaaccatggttgatgatctgaaaaatcaactggggtctaccgttatcgtactggcaacggttgttgaaggtaaggtttctctgattgcgggcgtgtcgaaggatgtgaccgaccgggttaaagcaggggaattgattggtatggtcgctcagcaggtgggcggtaagggtggcggtcgtccggacatggcgcaagccggtggtacggatgcggcagctctgcctgcagcgttagccagtgtacaaggctgggtcagcgcaaaattgcaataa

SEQ ID NO: 368190 - DNA, 186 bp, Salmonella enterica
atgctgattctgactcgtcgagttggtgagaccctcatgattggcgatgaggtcaccgtgacagttttaggggtgaagggcaaccaggtgcgtattggcgtgaacgccccgaaagaagtttctgtccatcgtgaagagatctaccagcgtatccaggctgaaaaatcccagcagtccagttactaa

SEQ ID NO: 368191 - DNA, 567 bp, Salmonella enterica
atgtacgcacgttatgctggtttgatttttgatatggacggtactctcctggataccgaacccacgcatcgcaaagcgtggcgtgaggttttggggcgctatggtcttcgttttgatgaacaggcaatggtcgcgcttaacggttcgccaacctggcttatcgcccagtcaatcattgagcttaaccatgccgatcttgatcccctgtcactggcgcgtgagaaaaccgacgcggtaaaaagcatcctgctggactgcgtagaaccgctgccgctggttgaggtggtcaaagcgtggcatgggcggcgtcccatgtcggtcggtaccggtagcgaaagcgctatcgcggaagccttgttagcgcatctggggctgcgtcgttattttgatgcggttgtggcggcagatcacgtacagcatcacaaacccgcgcctgacaccttcctactgtgcgcccagcggatgggcatcatgccgacgcagtgcgtggtatttgaagatgccgattttggtttacaggcggcgcgggcggcgggaatggatgccgtggatgtccgactattgtga

SEQ ID NO: 368192 - DNA, 426 bp, Salmonella enterica
gtgagtgacggactgtcgctcctgtctctgtttgccagtagttttctcagcgcgacgctgttacccggtaattctgaggtggttttggttgctatgctggtctccggcgtcagtcatccctgggtcttagtcttaacagcaacaatgggtaatagccttggaggggtaactaacgttattcttgggcgtttctttccgctgcgcaaaacgtcgcgctggcaggaaaaagcgactggctggctaaagcgttatggcgcagccacactattattaagctggatgccggtcatcggtgatttgttgtgcctgttagcgggatggatgcgcatcccgtgggggcggacgatcttttttttgtgtcttggtaaggcgctgcgctatgttgcgctcgcagcggcgacggttcagggcatgatgtggtggtaa

SEQ ID NO: 368193 - DNA, 1557 bp, Salmonella enterica
ttgatcccggacgtatcacaggctctggcctggctggaaaaacatcctcaggcgttaaaggggatacagcgcgggttagagcgcgaaacgctgcgtgtcaatgctgatggcacgctggcgacaacaggtcatcctgaagcgttaggttcagcgctgacccataaatggattaccacggattttgcggaagccctactggagtttattacgccagtcgatggcgatatccagcatatgctcacctttatgcgcgatctccatcggtatacggccaggaaactgggcgatgagcggatgtggccattaagtatgccctgctatattgcggaagggcaggacatagagctggcgcagtacggcacatccaataccgggcgctttaagacgctctatcgcgaagggctgaaaaatcgttatggcgccttgatgcaaaccatctccggcgtacattacaatttttcattaccgatggcgttctggcaggcgaaatgcggcgttacggaaggcgaagcggcaaaagaaaaaatttctgccggctattttcgtctgattcgcaactattaccgttttggctgggtcatcccctatctgtttggcgcgtctccggccatttgttcctctttcctgcaagggaagccaaccacattaccgtttgaaaaaacggactgcggcatgtactacctgccgtatgcgacgtcgctgcgtttgagtgatttgggctataccaataagtcgcaaagcaatctcggaattacgtttaacgatttgcatgaatacgttgcaggtctgaagcgggcgattaaaaccccttccgaggagtacgcgcggattggtgtggaaaaagacggtaagcggctacagattaacagcaacgttctgcaaattgaaaatgagctgtacgcgcccattcgtcccaagcgcgtgacgcgcagcggcgaatcgccttctgacgcgcttctgcgtggtggtattgagtatattgaagttcgttctctcgatattaacccgttctcaccgatcggcgtagacgagcaacaggtgcgcttcctcgatctgtttatggtctggtgcgtattggccgatgcgccggaaatgagtagcgatgagctgttatgtacgcgtactaactggaatcgcgttattctggaagggcgtaagccgggcctgacgttaggcattggctgtgaaactgcgcagttcccgctgcccaaagtagggaaagatctcttccgcgatctgaaacgcgtggcgcaaacgctggacagtatccacgggggagaggagtatcaaaaggtgtgtgacgagttggtcgcctgctttgataatcctgaactgacattctccgcccgaatcttacggtctatgattgatgaaggcattggcggcaccgggaaagcgttcggtgaggcttaccgtaatctgttacgcgaagagccgctggagattttacaggaagaagagtttattgctgaacgtgacgcttcagtacgtcgtcagcaggagattgaggcggcggataccgagccgtttgccgcgtggcttgcaaaacacgcctga

SEQ ID NO: 368194 - DNA, 516 bp, Salmonella enterica
atgccattattagatagcttcgcagtcgatcatacccggatgcaagcgccggcggtccgggttgcaaaaacgatgaacaccccgcatggcgacgcaatcaccgtgtttgatctgcgtttttgcattccgaacaaagaagtgatgccggaaaaagggattcatacgcttgagcatctgtttgctggctttatgcgcgaccacctcaacggtaacggcgttgagattatcgatatctcgccgatgggctgccgtaccggtttctacatgagcctgattggcacgccggacgagcagcgtgttgccgacgcgtggaaagcggcgatggcggatgtgctgaaagtgcaggatcaaaaccagattccggagctgaacgtttaccagtgcggtacgtatcagatgcactcgctcagtgaagcgcaggacattgcccgtcatattctggagcgtgatgtgcgcgtgaacagcaataaagagctggcgctgccgaaagaaaaactgcaggaattgcatatttag

SEQ ID NO: 368195 - DNA, 1371 bp, Salmonella enterica
atgaaggctaaatatttggcgctgatgatcggtgcttgcttttctcataacctttgggcagcgaataatatcactattgagcagcgtctggctgaactggagcaacgtgttgttaatgctgaaaaacgggcatccgatgccgaggcgcaaattcgctcgttgaaacagcagcaggtcgccgctacgccgacggtgaatgtccagtccgccgagcccattgcagcagataaaacgccgccgaagctgaccttatccggattcagcgatattaagttctatggcgatgtcgaatttaatatggatgcggcaagccgttccggtagcctgacctcgatgagaacgtcagcgaataaagattgggcatcaggaaccaatgaacgctgggatattaacgggcgcttgttgctgggctttgatggctaccagcggctggacaacggtaattttgccggattctctgtacagcctctggcggacctgaccggaaaaatgaaccttgatgatgccgttttcttctttggtcgtgagaatgactggaaaattaaggttggtcgttttgaagcctacgatatgttcccgctgaatcaggatacgtttattgaatattcggggaatacagcgaacgatctttacagtgacggttacggctatatctatatgatgaaagaaggacggggacgtagcgacagtgggggtaacttcctgctgagcaaaaccatcgacaactggtatttcgaagttaacacattgctggaaaatggcagtacgttatatacagagaagcagtaccacggaatggatttaaccaacgataaaaacgtggcttacgtccgtccggttatcgcctggcaaaacgggcgtttttcaacggcgatagcgatggaaagtaacgtcgttaacaacgcctatggctattatgagaatgggaagtggatcgatcagtcagatcgtacgggctatggttttaccatgacctggaatggtcaaaaaactgacccggaagatggcgcagtgattaacctgaataccgcctatatggatgcgaccgatgagacagattttaccgctggggtgaatgcgctgtggcatcgatttgaactgggttatatctatgcgcataacaaaatcgaagccttcaatgctaccaatatcgatgccgtttgtgaggacgattgttggatcaccgatcccggcaattatgatattcacactattcatgcctcatatttattccccaacgtgatggatatgaaaaactttaacatctacctcggtgcctatgcttcatgggtagaggccaatccgaataatggcgataacagtgaagatgcgcgttacggcgggcgtctgagattcaaatatttcttttga

SEQ ID NO: 368196 - DNA, 1539 bp, Salmonella enterica
atgcaacagcaaaaaccgctggagggcgcgcagctcgtcatcatgacgatcgcgctgtcgctggcgacattcatgcaggtgctggactccaccattgccaacgtggcgattccgaccatcgccgggaacctgggttcttccctaagccaggggacatgggttatcacctctttcggggtggcgaacgctatctcgattcccttaaccggctggctggcgaaacgttttggcgaagtcaaactgttcatgtggtcgacggtcgcctttgccgcggcctcctgggcctgtggcgtatccagcagcctgaatatgcttatcttcttccgcgtggtgcagggcgtggtcgccgggccgctgattccgctctcgcaaagcctgttgctgaataactatccgcctgcaaagcgctccattgcgctggcgctctggtcaatgaccgtcattgtcgcgccgatttgcggcccgattctggggggctacatcagtgataattaccactggggatggattttcttcatcaacgtgccgattggcatcgccgtcgtcctgatgacgttacacacgctgcgcggacgtgaaacgcataccgaacggcgacgtattgacgccgtcgggctggcgttactggtgattggcatcggcagcctgcaaattatgctcgatcgcggtaaagagctggactggttctcctcacaggaaattatcatcctgaccgtggtcgccgtcatcgccatcagtttcctgatcgtctgggaactgaccgacgatcaccctatcgtcgatctttctctttttaaatcgcgtaacttcacgattggctgcttgtgcatcagccttgcctatatgctctatttcggcgccattgttctactgccgcagcttttgcaagaggtgtacggctataccgcaacgtgggcaggtctggcgtcggcgccagtcggcattattccggtaattttgtcgccgattatcggacgcttcgcgcataaactggatatgcgcaggctggtcacgttcagcttcattatgtacgccgtctgtttttactggcgcgcctggacgttcgaaccgggtatggatttcggcgcttccgcatggccgcagtttattcagggatttgccgtcgcctgcttctttatgccgctgaccaccattacgctctccgggttaccgccagaacggctggcggcggcatcaagcctgtcgaacttcacgcgaacgctggcgggctccatcggcacctcgattaccaccactatgtggaccgatcgtgagtcgctacaccatgctcagctcacggagtcggttacggcgtataatccaaacgctcaggctatgtacgataaactggaaggcttagggatgacgcaccaacaggcgtcaggctggatagcccagcaaatcacgaatcaggggctgattatttccgccaacgaaatcttctggatgtcggcggggatcttcctggtgctgctcggcctggtgtggttcgccaaaccgcccttcggtgcgggcggcggcggtggcggcgcgcactaa

SEQ ID NO: 368197 - DNA, 1173 bp, Salmonella enterica
atgagcgcaaatgcggagatccaaaccccgcagcaaccggctaagaagaaaggcaaacgcaaaacagcgctgctacttcttaccttgctctttgttattattgccgtggcatatggaatttattggtttttagtattgcgtcatattgaagagacagatgatgcttacgtggcagggaaccaggttcaaatcatggcgcaggtgtcaggcagcgtgacgaaagtctgggctgataacaccgactttgtaaaagagggcgatgttctggtcacgctcgatcagactgacgccaaacaagcgtttgaaagagccaaaacggcgctggcctccagcgtgcgccaaacgcaccagttgatgattaacagtaagcagttgcaggcgaatatcgacgtgcaaaaaaccgccctggcgcaagcgcagagcgaccttaaccgtcgtgtgccgctgggtaatgccaatcttattggccgggaagagctgcaacacgcccgcgatgccgtcgccagcgcgcaggcacagctggatgtcgccattcaacagtacaatgccaaccaggcaatgatactcaacagtaatctggaagatcagcctgcggttcaacaagcggcgaccgaagtgcgtaacgcctggctggcgctggagcgtactcgcatcgtcagcccaatgactggttatgtctcccgccgcgccgtccagcctggcgcgcaaatcagccccaccacgccgctgatggccgtggtgcctgcaaccgatctgtgggtggacgctaactttaaagaaacccaattagcgaatatgcgcattgggcagccagtgacggtgattactgatatttatggcgacgacgtaaaatacaccggtaaagtcgtcggtctggatatggggacaggcagcgccttctccctgctgcccgcgcaaaatgcgacgggtaactggattaaagtggttcaacgtctgccggtacgcgtcgaactggacgcccgccagttagaacaacatccgctgcgcattggtttatcgacgctggtcaccgtggataccgctaatcgcgacggtcaggtactggccagccaggtacgaacgacgccggttgccgaaagtaacgcacgcgaaattaatctcgcgccggtcaataaactgatcgacgacatcgtacaggctaacgcgggttaa

SEQ ID NO: 368198 - DNA, 531 bp, Salmonella enterica
atggatagttcgtttacgcccattgaacaaatgctaaaatttcgcgccagccgtcacgaagactttccttatcaggaaattcttttgactcgtctttgtatgcacatgcaaggcaagctcctggaaaaccgcaataaaatgctgaaggctcaagggattaacgagacgttgtttatggcgttgattacgctggagtctcaggaaaaccacagtattcagccgtctgaattaagctgcgcgctgggttcatctcgcaccaatgcgacacgcattgcagatgagctggaaaaacgcggctggattgagcgtcgtgagagcgataacgaccgccgttgcctgcatctgcaattaacggagaaaggccaggcatttttgcaagaagtgcttccgcctcagcatcattgtctgcatcaactctggtcatcacttagcacagccgaaaaagatcaacttgagcacatcactcgtaaactcctgacgcgtcttgatcaaatggagcaggaaggcactgttcttgaggcgctgcgctaa

SEQ ID NO: 368199 - DNA, 1185 bp, Salmonella enterica
atgacgaaacccactcatgagcttagcccggcgctgatcgttttaatgtctgtggccacgggtctggcggtcgccagcaactactatgcccagccgctgcttgataccatcgcgcatcacttttcgctttccgccagctccgcagggtttatcgttaccgccgcgcagttgggctatgccgctggcctgttgtttctggtgccgctcggcgacatgtttgaacgccgaacgctgattgtctccatgacgttgctggcggctggcggaatgctgatcaccgccagcagtcagtcgcttagcatgatgatactcggaacggccttaaccggactgttctccgtggtggcgcagattctggttccgctggccgccacgcttgcgacgcccgccacccgcggtaaagtggtcggcaccattatgagcggcctgttgctggggatcctgctggcgcgaacggtcgccggactgctggcaaacctcggcggttggcgcaccgtattttgggtagcgtcggcgctgatggcgctgatggccgtcgcgttgtggcgcggactgccaaagctcaaatccgacacccatcttaactacccgcagctgttgggttctgtattcagcctgtttattcacgataagctgctgcgtacccgcgcgctgctgggctgtctgacctttgctaatttcagcatcctctggacgtcaatggcctttttgctcgccgcgccgccgtttagctattccgaggggatgattggcctgtttggcctggcgggggccgccggcgctttaggcgcgcgtccggctggcggatttgccgataaaggtaaatctcacctcaccaccacgttcggcttactgctgctgttactctcctggctggctatctggcttgggcatacctcggtactggcgctgattattggcattctggtactggacctcaccgttcagggggtacatatcaccaatcagacggtcatctatcgtttgcatccggatgcgcgtaaccggctcaccgccggctatatgaccagctactttatcggtggcgccgcggggtcgctgatttccgcctccgcctggcaacatgccggctgggccggcgtttgtctggcgggtgtcacggtagccttacttaatttactggtctggtggcgaggttttcaccgacaggaagccgtaaattaa

SEQ ID NO: 368200 - DNA, 996 bp, Salmonella enterica
atgcgacataccgtgatatttgcctcagcgtttgccacccttgtcaccgccagcgctttcgctgccgacctgcctggcaaaggcattaccgtccaacctatccaaagcacgatttctgaagagaccttccagacgttactggtcagtcgggcgctggaaaagttgggttataccgtaaataagccgagtgaagtcgattacaacgtaggctatacctccatcgcctctggcgatgcgacgtttaccgccgtgaactggcagccgctgcatgatgatatgtatgccgcagcaggcggagacaacaagttttaccgcgagggcgtcttcgtctccggcgctgcgcagggctatctgatcgataaaaaaaccgccgagcagtacaacatcaccaatatcgctcagctaaaagatccgaaaatcgccaaaatcttcgataccaatggcgacggaaaagcggacatgatgggctgctcgccgggctggggctgcgaagccgtgatcaatcatcagaataaagcgtttgatctgcaaaaaaccgttgaggtcagccacggtaactatgcggcgatgatggctgataccattacccgttttaaagaaggcaagccggtgctgtattacacctggaccccgtactgggtgagcgacgtaatgaagccgggtaaagatgtcgtctggctacaggtgccgttctcctctctgccgggcgaacagaaaaatattgatactaaactgccgaacggcgcgaactatgggttcccggttaataccatgcatattgtcgccaataaggcatgggcggagaaaaacccggcggcggcgaaactgttcgccatcatgaagctgccgctggcggatatcaacgcgcagaacgccatgatgcatgccggtaaatcgtctgaagccgatgttcagggccacgtggacggctggatcaacgcccaccagcagcagtttgacggctgggtgaaagaagcgctggccgcgcagaaataa

SEQ ID NO: 368201 - DNA, 1065 bp, Salmonella enterica
atggctgatcaaacgaatccgtgggataccgcacaggtggccgatactacgacgcaaacggctgatgcctggggaacaccggcaggcgtagccacggacggcggcagtaccgactggttgaacagcgcgcccgcgccagcccctgaacacttttctcttctggacccgttccataagacgctgatcccgctggatagctgggtcacagagggaatcgactgggtcgtcacccatttccgtcccctttttcaggggattcgtgtgccggtggattacatcctcaacggctttcagcaactgctgctgggaatgcccgcccctgtggcgattattctctttgcgctgattgcctggcaggtttccggcgtgggcatggggatcgcgacgctgatatcgctgatcgcgatcggcgcgatcggtgcctggtcgcaggcgatgattaccctggcgctggtgttgaccgccctgttgttctgcgtcgtgatcggattaccgatgggaatctggctggcgcgcagcccgcgtgcggccaaaatagttcgtccgctgctggatgcgatgcagaccacgcccgcgtttgtctatctggtgccgattgtcatgttattcggcatcggtaacgtgccgggcgtggtggtgacgattatttttgctctaccgccgattgtacgcctgacgatcctgggcattaaccaggtgcctgccgacttaattgaagcgtcgcgctcgttcggcgccagcccgcgccaaatgttgttcaaagtgcaactaccgctggcgatgcccaccattatggcaggcgttaatcagacgctgatgctggctctctcgatggtcgtcatcgcctcgatgattgcggtcggcggacttggccagatggtactacgcggcattggtcgtcttgatatggggctggcaaccgtcggcggcgtcggcattgtgattctcgccatcattctggaccgtctgacgcaggccgtcgggcgcgactcgcgtagccgcggtaaccgtcgctggtataccaccggtcctgttgggctaatcacccgccctttcgttaagtaa

SEQ ID NO: 368202 - DNA, 1203 bp, Salmonella enterica
atggcaattaaattagaagtgaagaatctgtataaaatatttggagagcatccgcagcgtgccttcaaatatattgaaaagggactatcgaaagagcaaatactggaaaaaacggggctatcgcttggcgttaaagacgccagtctggccattgaagaaggcgagatatttgtcatcatgggattatccggctcgggtaaatccacaatggtacgccttctcaatcgcctgattgaacccacccgcggacaggtactgattgacggcgttgatattgccaaaatatcagacgctgagcttcgcgaggtgcgcaggaaaaagattgcgatggtcttccagtcatttgcgctcatgccgcatatgaccgtgctggataatacggcattcggtatggaattagcgggcatcgcggcgcaagagcgtcgcgaaaaagcgctggacgccttgcgtcaggtggggcttgaaaattacgctcatgcctatccggatgaactttccggtgggatgcgtcagcgtgttggacttgcccgcgcgctggcaatcaaccctgatatcttattaatggacgaagcgttttccgccctcgatccattaattcgtaccgaaatgcaggatgaactggtgaaattacaggcgaaacatcagcgcaccattgtctttatttcccacgatcttgatgaggctatgcgtattggcgacaggattgccattatgcaaaatggcgaggtcgtacaggttggtacgccggatgagatcctgaataatccggcaaatgattatgtccgcacgttcttccgtggcgtggatattagtcaggtctttagcgccaaagatattgcccgtcgcagtccggtcggcttaattcgtaaaacgccaggtttcggtccccgttcggcactgaaattattacaggacgaagaccgtgaatatggttacgtcattgagcgtggcaataaattcgtgggcgtcgtgtccatcgactcattaaaagcggcattaagccaggcgcaagggattgaagcggcgcttatcgacgaccctttagttgttgatgcgcaaaccccactcagcgagttgctctctcacgtcggccaggcgccctgcgcggtgccggttgtcgatgaagaacaccagtatgttggcattatttcaaaacgtatgttgctacaggctttagatcgcgaggggggtaacaatggctga

SEQ ID NO: 368203 - DNA, 960 bp, Salmonella enterica
atgaaattatctcgtattagcgccatcaactggaacaagatccaggacgacaaagatctggaggtgtggaaccggctgaccagtaacttctggctgccggaaaaagtgccgttatcgaatgatattccggcctggcagacgctgagcgccgccgaacagcagctcaccattcgcgtgtttacgggacttacgctgctcgacactatccagaacatcgcaggcgcgccgtcgttaatggcagatgccatcacgccgcatgaagaggcagtgctgtcgaacatcagctttatggaagcggtacacgcccgctcttacagttctattttttccacgctgtgccagacgaaagaggttgatgccgcctacgcctggagcgaagaaaacccgccgcttcagcgtaaggcgcagattattttggctcattacgtcagcgatgaaccgctaaagaaaaagattgccagcgtctttttagagtcttttctgttctattccggcttctggctgccgatgtatttctccagccgcggtaagctcacgaacactgccgacctgattcgtttaatcattcgcgatgaagcggttcacggttattatattggttataagtatcagatagcgctacaaaaactatcggcaatcgagcgtgaagagttaaagcttttcgcgctggatttgttgatggaactgtacgacaacgaaatctgctacacagaagcgttatatgcggaaaccggctgggttaacgacgtcaaagccttcttgtgctacaacgccaataaagccttaatgaacctgggttatgaggcgttatttccgccagagatggctgacgtgaatcccgcaatccttgccgcgctctcgccgaatgccgacgaaaatcatgatttcttttccggatcaggttcatcttatgtgatggggaaaacagtcgaaaccgaagacgaagactggaatttttaa

SEQ ID NO: 368204 - DNA, 2118 bp, Salmonella enterica
atgcaggaaaccatggattaccacgccctgaacgcgatgctgaatctttacgataaagcaggccatattcagttcgacaaggaccagcaggcgatcgacgccttctttgccacccacgtccgcccgcattccgtgacgtttgccagccagcatgaacgtctggagacgctggttcgggaagggtattacgatgacgctgtcctcgcgcgttacaaccgcgccttcgtcctccgcctgttcgagcacgcccacgccagcggctttcgcttccagacgtttcttggcgcctggaagttctataccagttacacgctgaaaaccttcgacggcaaacgttatctggaacactttgaagatcgggtgacaatggtggcgttgacgctggcgcagggtgacgaaacgctggccacccaactgaccgatgaaatgctttctggtcgctttcagcccgctaccccgacttttttaaattgcggtaaacagcagcgtggggaactggtctcctgcttcctgctccgtatcgaagacaacatggagtcgatcgggcgggcggtgaattcggcgctgcaactctccaaacgcggcggcggcgtcgcgtttttactctccaatctgcgcgaggcgggcgcgccgatcaaacgcattgagaatcagtcttccggcgtgatcccggtgatgaaaatgctggaagacgcgttttcgtatgccaaccagcttggcgcgcgccagggggccggcgcggtttatctccatgcgcaccacccggatattctgcgttttctggataccaaacgggaaaatgccgacgaaaaaatccggatcaaaacgctctctctcggcgtggtgatcccggatatcaccttccggctggcgaaagaaaacgcgcaaatggcgctcttttcgccctatgacgtacaacgacgctacggcaaaccgtttggcgatatcgccattagcgaacggtacgatgaattaattgccgatccgcacgtgcgtaaaacctatattaacgcccgtgacttttttcaaacactggcggagattcagttcgaatccgggtatccctacatcatgtttgaagatacggtaaaccgcgcgaatcccattgctgggcgcattaatatgagcaacctgtgctcggaaattttacaggtcaatagcgcctcccgttacgacgataaccttgactatacccacatcgggcatgacatttcctgcaatctcggctcgctgaatatcgctcacgtcatggattcaccggacattggtcgtaccgtagaaaccgctattcgcggcctgacggcggtgtcggacatgagccatatacgcagcgtaccctcaatagccgccggtaatgccgcctctcatgccatcggtctgggccagatgaatctgcatggctatctggcgagagaaggcattgcctacggttcgccggaggcgttggatttcaccaatctctatttttacaccattacctggcatgccgtgcatacttcaatgcggctggcccgcgaacgcggcaaaaccttcgccggatttgcgcagtcgcgctatgccagcggcgactattttacgcagtatttacaggacgactggcaaccgaaaacggcgaaagtcagaacgctatttgcccgcagcggcattacgctgcccacacgagaaatgtggctaaagctgcgcgacgatgtgatgcgctatggcatctataaccaaaatttgcaggcggtgccgccgaccggttcgatttcttacattaatcatgcgacctccagcattcatccgattgtggccaaaattgagattcgcaaagagggcaaaaccgggcgtgtgtattaccccgcgccgtttatgaccaatgaaaatctggacatgtatcaggatgcttacgatatcggtccggaaaaaattattgatacctatgccgaggccacgcgccacgtcgatcaaggactgtcgctcaccctgtttttccccgataccgccacgacccgcgatatcaacaaagcgcagatctatgcctggcgaaaaggtattaagtcactgtattacatccggcttcgccagttggcgctggaaggtactgaaattgaaggctgcgtatcctgcgcgctataa

SEQ ID NO: 368205 - DNA, 411 bp, Salmonella enterica
atgagcgcgctcgtctacttctccagcagctctgaaaatacgcaccgttttatgcagcgtctggggctgcccgccacgcgtattccgctcaatgagcgggagcgaattcaggtagacgaaccgtacattctggttgtgccgtcatacggcggcggcgggatggccggtgcggtgccgcgacaggtgatccgctttttaaatgatgaacacaaccgggcgcgcattcgcggcgttatcgcctccggtaatcgcaatttcggcgatgcctggggatgcgctggcgatgtgatagcacaaaaatgcggcgtcccctggctgtaccgctttgagctcatgggcacacaacgcgacatcgataacgtccgaaaaggagtaaatgaattttggcaacaactatcccggagcgcgtaa

SEQ ID NO: 368206 - DNA, 246 bp, Salmonella enterica
atgagcattactatttacactcgcaataactgtgttcagtgccacgccacaaagcgggcgatggaaagccgtggatttgaatttgagatggtgaacgtcgatctggtgccggatgcagcggatacgctccgggcgcaagggtttcgtcaattaccggtggtgatagcgggcgatttgagctggtctggcttccgtccggacatgattaaccgtctgcacccgacaccccacgcggcaaacgcatga

SEQ ID NO: 368207 - DNA, 432 bp, Salmonella enterica
atgacgacgttacgccaaccctattatgaactgagcccggaggtttacagcgctctggtgcaggcgaaaaacgcgctggaaaagagcacgattgaccccactctgatggagctgatttacctgcgtgtttcgcaaataaatggttgtgcattttgcctggagatgcacagtaaagcgctgcgtaaggctggcgtgaatcaagctaaattagatgcgctggcaggatggcgggtaagccaccatttcaacgagcaagagtgcgcggcgttagcctgggcggaatcggtgacgcacattgctgaaacccacgccgaagataatgtttacctgccgctgctcgatcatttcagcgcgcgtgaaatcagcgatctgaccttcgctattggtttaatgaactgctttaaccgtctggcgatcggtatgcgaatgtga

SEQ ID NO: 368208 - DNA, 1335 bp, Salmonella enterica
atgccgcgctatcagcacatcgctcgtcagttaaaaacggccattgagcaaggagaactcgcgcccggaacgcgcttgccttccagccggacgtgggcgcaggaactgggcgtttctcgcgccacggtggaaaatgcctatggcgagctggtggcgcagggctggctggagcgacgtggtcaggcaggcacgtttgtgagcaacgctctacggtttgagacggcgccgccgatacccgctgtttttgccggagaaagtccggaaccgaaaccctttcagatggggttaccggcgctggatctctttccacgcgagaagtgggcgcgagtgatggggcgtcggttgcgcacgcagacgcgcttcgatctggcattaggcgacgtctgcggcgaggcgattttgcgccaggcgatagtcgattacctgcgggtttcgcgtagcattgaatgcctgccggaacaggtatttattacctccggatatgcggattctatgcggctaatcctgcgtacattgtctgtgccgggagacagcatgtgggtggaagatcccggttttccgttaattcgcccggtgataacgcaggaggggattacgctggcgccgattccggtcgatgcggatgggctgaatgtcgcggcggggatgcgggattgcccgcaggggcgctttgcattggtgacgcccgcccatcaaagtccgttgggggtggcgctgtcgttaactcgccgacggcaacttctggcatgggcggcgaatgtgcaggcctggattattgaagatgactacgacagcgaatttcgttatcacggtaaaccgcttccgccgctcaagagtctggatgccccgcagcgagtgatttacgccggaacgttcagtaagtcgctctttccggcattacgtaccgcctggctggtggtgccgataaagcagattgagcatttccgccagcaggcgtcgctgatgccctgtagcgtaccgttgttatggcagcacacgctggctgattttatccgtgatggccatttctggcggcatctgaaaaagatgcgtcaacattatgctcagcgacggttatggattgaagaggcgctggcagaacagggatttgtcgtgacattacagaaaggcggtattcaactggttattgaggttgaaggcgatgataaagcgcaggtagcgaaagcgaatcaggccggactggcggtacaggcgctaagccgttggcgagtggtttcgtcaggaaaggggggcattttactgtcgtttaccaatattacttccgccgccatggcgaaacaggtcgcatggcagcttcgacaggcgatacagtaa

SEQ ID NO: 368209 - DNA, 327 bp, Salmonella enterica
atgcttaacaaaccgaaccgaaacgacgtcgatgatggtgttcaggatattcagaatgatgtcaatcgattagccgacagtctggaagatgtccttaaatcctggggaagcgatgcgaaagacgaagccgaggctgcgcgacgtaaagcacaggcgttgctgaaagagacccgggcgcggatgcatggacgtactcgcgtaaaacaagccgcctgtgatgcgatggggtgcgcggatacgtttgtgcgtgaaaaaccctggtgtagcgtaggaaccgccgcagcggtaggaatttttatcggggcgttgcttagcctgcgtcgctaa

SEQ ID NO: 368210 - DNA, 351 bp, Salmonella enterica
atgtatttacgacctgacgaggtggcgcgggtactggaaaaggcagggtttaccgtcgatgtggtgacgaataagacgtatggttatcgacgcggcgagaattatgtttatgttaaccgcgaggcgcgtatggggcgtaccgcgctgatcattcaccccagattaaaagaccgtagctcatcactggctgacccggcttcggatattaaaacctgcgatcactatcaaaattttccgctctatttaggcggcgagacccacgaacattacggtattccccacggctttagctcccgaatagcgttagaacgttatctgaatgggctttttggcgacgaaaaaaccgactaa

SEQ ID NO: 368211 - DNA, 450 bp, Salmonella enterica
atgttctctccacagtcacgcttgcgtcatgccgtagcagacacgtttgcgatggttgtttactgttctgttgtgaacatgttgatcgagatattcctctccggaatgagctttgagcagtcgctttcttccaggctggtggcgatacctgtcaacattttgattgcatggccatacggcgtttaccgcgatctgattatgcgcgtcgcgcgtaaggcaagcccggcgggatgggccaaaaacctggcggatgtattggcttatgtcacctttcagtcacccgtttatattatcatcttgctgaccgtcggtgccggctggcatcagatagtggccgccgtgagttcaaacattgttgtttcaatgttaatgggcgcggtttatggctacttcctggattattgtcgccgcctgtttaaagtgagcagctatcatcaggctaaggcgtaa

SEQ ID NO: 368212 - DNA, 402 bp, Salmonella enterica
atgaatttgatgttacagaacttaaataatatccgcacgctgcgcgctatggctcgcgaattctccattgacgttcttgaagaaatgctcgaaaaattcagggttgtcactaaagaaagacgcgaagaagaagaattgcagcaacgccagcttgccgagaagcaggagaaaattaatgcctttctggagctgatgaaagcagacggtattaacccggaagagttatttgccatggattcagcaatgccgcgttctgctaaaaagcgtcagccgcgtccggcaaaatatcgttttactgatttcaatggcgaagaaaaaacctggaccggacaaggccgtacgcctaaaccgattgcccaggcgctggcggcggggaaatctctggatgatttcttaatctaa

SEQ ID NO: 368213 - DNA, 180 bp, Salmonella enterica
atgttcacaccaggcgatatcgtacagccccgaatgggtgggccgaaactgaaagtgattgaagtcaacgaggatcatattgtcgcggtacaggtcggtaatgagcagggcgaaaaattgatcctcaaagcggcagatgtcaccccctattgcgaagagggcgattttggcgtgtgctga

SEQ ID NO: 368214 - DNA, 528 bp, Salmonella enterica
atgtccattgggatagtttccccccgtgaggcgcaagcgctgatagcgcaaggcgcgaaactgattgatgtacgcgacgccgacgaatatctgcgcgagcatattccacatgcgcaactggcgccgctttcccggcttgaacagggcgatttgcccgccaacctgcgagcggaacagattatttttcactgtcagtcaggtaaacgaaccagcagcaatgcagcaaaactacaggccattgccgcccctgctcaggtcagtctactggaaggcggcatcgacggatggaaagcggcaggattgcccgtcacagaagacaaatcgcaaccgttgccactgatgcgtcaggtgcaaatcgccgccggcgggttgacgttgcttggggtgattctgggctatacggtccacggcggctttttcctcattagcggttttgtcggggccgggttaatgctggcaggcatgaccggcttctgcggaatggcgcgactactggaaaaaatgccctggaatacccgtactcattaa

SEQ ID NO: 368215 - DNA, 300 bp, Salmonella enterica
atgacagagcttgaacaacttcaggccagcgcagaacaggcggcggccctgctcaaagcgatgagccacccaaaaagattactgattttatgtatgctttgcggttcgccaaaaaccagcgcaggcgaactggcgcgcattaccgggctaagcccctccgcgacgtcgcaacatctggcgcggatgcgggaagaagggctgattgatagtcaacgcgatgcccagcgcattcactatttcattaaaaatgaggcggttaatacgattatcgccacgttaaagaatctctattgtccataa

SEQ ID NO: 368216 - DNA, 159 bp, Salmonella enterica
atgggtttctggagaattgtatttacgattattttgcctccgctcggcgtacttttaggaaaagggttcggttgggcatttatccttaatatcctgctgacattactcggatatattccggggcttatccacgcattttgggttcagatgcgtcattaa

SEQ ID NO: 368217 - DNA, 450 bp, Salmonella enterica
atgggacttttcaattttgtaaaagatgcaggtgaaaaactctgggacgcggtaaccgctaatcatgataaggacgatcaggcgaaaaaagtccaggaacatttaaataaaacgggaatacccgacgctgacaaagtgaatgtgcaaatagctgatggaaaagcgacagtgacgggggatgggctgagtcaggaggcaaaagaaaaaattctggttgccgtggggaatatcgccgggattagcagcgttgacgatcaggttaaaaccacgacgccagcggctgaaagtcagttttataccgtaaaatcaggcgacaccctgagcgctatttcaaagcaagtgtatggtaacgccaatctgtataataaaatcttcgaggcaaataaaccgatgctgaaaagcccggaaaaaatatatccgggacaagtgttgcgtattcctgaagaataa

SEQ ID NO: 368218 - DNA, 678 bp, Salmonella enterica
atgaccgccctttcccaaccgacggccatagatggctatcgctggcttaaaaatgacattattcgcggcacttatcagccggatgagaaactgcggatgagtttattaaccgcccgctatgcgctcggcgtagggccgctgcgtgaggcgctgtcgcaactggtggcggaacggctggtcaccgtggtgaatcaaaaaggctatcgcgtggcatccatgtcagaggcggaactcctcgatatttttgacgcgcgcgccaatatggaagcgatgctggtacgcctggcgattgaacgcggcgatgatgcgtgggaggcggagatcctggcgcgagcgcatatgctcagtaaactggaagccagcgatgccagtgaacatatgctcgatgaatgggatcagcgccaccaggcgttccattccgccattgtcgccgggtgcggctcccactatctgctacagatgcgcgaacgcttatttgacctggcggcccgctaccgctttatttggttacgtgaaaccgttctgtccgtcgagatgctggaagataaacatatccagcatcacacgctaaccgaagcgatactggcgcgcgaggcggcacgcgccagcgaattaatgcgtcagcatttgctgacgccgattcccattattcgccaggcgatggcagggaaaatgtag

SEQ ID NO: 368219 - DNA, 1401 bp, Salmonella enterica
atggggcaattgtcagaatcacatgcattagggggcgggctgaaatcacgccacgtcaccatgttatcgatcgccggcgtcatcggcgccagcctgtttgtcggttccagcgtggcgattgcggaggccggccctgcggtactgctggcctatctgttcgcaggacttttagtcgtcatgattatgcgaatgctggctgaaatggccgtcgccacaccggataccggttctttttccacctatgcggataaagcgatcggcccctgggccgggtataccatcggctggttatactggtggttttgggtgctggttattccgctggaggccaatattgccgccattattctgaattcatggataccgggtattccggtatggctattttcattagtgattacgcttgccttaaccggaagcaatttattgagcgtcaaaaattacggcgagttcgaattctggctggcgctatgtaaagtaattgccattctggcgtttatcgcgctgggcgcgacagcgattagcggtttttatccgtatgctgaggtaagcggtatctcccggctatgggatcacggtggttttatgcctaacggcttcggcgcggtgttaagcgccatgttgatcaccatgttctcttttatgggcgcggaaatcgtcactattgctgccgcggaatccgatacgccggataaacatatcgtacgcgccaccaattctgttatctggcgaatttccatcttttacctgtgttccatttttgtggtggtggcgctgatcccgtggaatatgccgggtctgaaaagcgtaggttcgtaccgttcggtactggagctgcttcatattccgcacgcaaaattcattatggactgcgtgattttgttgtcggtgaccagttgtctgaactccgcattatataccgcctcccggatgctctattcccttagccgccgcggcgatgcgcctgcgataatgggaaaaactaaccgtagcaaaacgccctgggtggcggttctcctctctaccggcgcggcctttttaaccgttatcgtcaattattacgccccggcaaaagtgtttaaatttcttatcgacagttccggcgccatcgcgctgctggtctatctggtgattgcgatttcgcaattgcggatgcgtaaaattctgctggcgcagggcggagaaattaagttgaaaatgtggctttatccgtggctcacctggctggttatcggctttatctgctttgttctggtggtgatgctatttcgaccggcacagcaactagaagtcatttcaacggggctgttagggctgggcataataggtactgtccccattatgtctcgctggaaaaaactgataaggtggcaaaaagcccccctgcaaaacctacgttag

SEQ ID NO: 368220 - DNA, 1284 bp, Salmonella enterica
atgaataccaataacgctttaatgcagcgccgtcataacgccgttcctcgcggcgtgggccagattcacccaattttcgccgagcgggcggaaaattgtcgggtctgggatgtcgaaggccgtgagtatctcgatttcgcgggcggcattgccgtcctgaacaccggtcatttacatccgggcattgtttcagcggtcgaagcgcagttgaagaaattgtcccatacctgttttcaggtgctggcctatgaaccgtatctggcgttgtgcgaacgcatgaaccagaaggtaccgggcgatttcgccaaaaaaacgttgctggtcacgaccggttcagaagcggttgaaaacgccgtgaaaatcgcccgcgcggcaacaaaacgcagcggcgctatcgcgtttagcggcgcttaccacggtcgtacccactacacgctctctctgaccgggaaagtacacccgtactctgctggtatgggattgatgccaggccatgtctaccgcgcgctttatccttgcccgctacacaacgtcagcgacgacgacgcgatcgccagcattgaacgcatctttaaaaatgatgccgcgccggaagatatcgccgccattattattgagccggtacagggcgaaggcggattttacgccgcctctcccgcgtttatgcagcgactgcgcgcgctatgcgaccaacacggcattatgttgattgccgacgaagtgcaaagcggcgcgggccggaccggtacgctgttcgccatggaacagatgggcgttgcggcagatattaccacgtttgcgaaatcgatcgccggcggctttccgctggcaggcgttaccggccgggcagacgtgatggacgctatcgcgccgggcgggctgggcggcacctatgccggaaacccgattgcctgcgccgccgcgctggcggtactggacattttcgagcaggaaaatctactgcaaaaggcgaatacgcttggcaaaacgctgcgcgatggcctgatggagatagcggaaacgcaccgtgagattggtgacgtgcgcggactgggcgccatgatcgccattgagttgttcgaaaatggcgaccccggcaaaccgaacgcggctctgaccgccgacattgtggcccgcgcccgcgagaaagggttaattctgctctcctgcggtccttactacaacatcttgcgcatcctcgttccactcactattgaggcctcgcagattcggcaaggcctggagattatcgcccagtgctttgatgaggcgaaacaagcgtaa

SEQ ID NO: 368221 - DNA, 1449 bp, Salmonella enterica
atgcaacttaacgactctaccctgttccgccagcaggcctttatcgatggcgactggcgcgacgcgcgcggcggcgatgtcatccccgtgagcaaccccgccaacgggaaaccgctcggcaatgtgcccaaaatgggggcggaagagacgcgcgacgccatcaacgccgccaatcgcgccctgcccgcctggcgcgcgctcaccgccaaagagcgagccaatatcctgcgtcgctggttcaatctgatgatggaacatcaggacgatttggcgcatctgatgacgctggaacagggtaaaccgctggcggaagcgaaaggcgaaattagctacgccgcctcgtttattgaatggttcgccgaagaggggaagcgtatctatggcgacacgattccaggtcatcaggccgataaacggctgctggtgattaaacagcccatcggcgtcaccgccgcgattaccccgtggaactttccctcagcaatgatcacccgtaaagccggccccgcgctggccgcaggctgcacgatggtactcaaacccgccagccagacgccgttttccgcgctggcgctggcggaactggcccggcgcgccggaattcccgcaggtgtatttaacgtcgttaccggttcggcaggcgatatcggcggcgagctgaccagcaacccgctggtacgcaaactgtcgtttaccggctcgacggagattggccgccagctaatggaacaatgcgccaaagacattaaaaaagtgtcgctggaattgggcggcaatgcgccgtttatcgtctttgacgatgccgatctggataaagccgtcgaaggcgcgctggcttcgaagtttcgcaacgccgggcagacctgtgtctgcgccaatagattgtatgttcaggacggcgtttacgatcgttttgcggaaaaactcaaccaggcggtaaataagctcgcggtcggcgacggcctgcaagccgacgtcgctatcgggccgctgattgatgaaaaagccgtggcgaaagtccaggagcatatcgccgacgcgctggaaaaaggcgcccgcgtcattacgggcggtgaagcgcacaaattgggcggcaacttctttcaaccgaccattctggcggatgttcctgataacgcgaaagtcgccaaagaagagacattcgggccgctcgcgcctctgttccgcttcagcgacgaggcggatgtcatcagacaggctaacgataccgagttcggcctggcagcctatttttatgcacgcgatttaagccgcgttttccgcgtcggcgaagcgctggaatacggcatcgtcggtattaataccggcattatctccaacgaagtcgcgcctttcggcggtattaaggcctccggattaggccgtgaaggttccaaatacggcatcgaagattatttagaaatcaaatatatgtgcatcggcctttaa

SEQ ID NO: 368222 - DNA, 1269 bp, Salmonella enterica
atgtatgattttgtgattatcggcggcggcattatcggcatgtcgaccgccatgcaacttattgatgtctacccggatgcgcgcatcgcattgctggaaaaagagtccgcgccagcctgccaccagaccgggcataacagcggcgtgagccatgccggggtgtactacacgcccggcagcctcaaagcgcggttttgtctggcgggcaatcaggcgaccaaaaccttttgcgatcaaaacaacatccgctacgacacctgcggcaaaatgttggtcgccacctcggagctggaaatggcgcggatgcgcgcgctatgggagcggacggcggccaacggcttagagcgcgagtggttaagcgcggcggagctgcgtgaacgcgaacccaatatcattggcctgggcgggatttttgtcccttccagcgggattgtcagctatcgcgatgtcgcgacggccatggcgaaccgctttcaggccaaaggcggcgagatcatctaccatgccgaggtcagcgcgctaacagaacatgccgctggcattgttattcgcacctcgcaaggtcgggaaatagaaaccgctacgcttatcggctgtgcagggctgatggcggatcggctggtcaaaatgctgggcgtggagcccggttttattatctgccctttccgcggcgagtactttcgtctggccccgcgacacaaccggatcgttaaccatttgatctacccgatccccgatccggcaatgccgtttctcggcgtccatcttacccgcatgatcgatggcagcgtcacggtcgggccgaatgcggtgctggcgcttaaacgcgaaggctaccgtaagcgcgacgtttccttcaccgacaccctggagattttccgctccgccggcattcgccgcgtactgcaaaaccatctgctttccgggctgggcgagatgaaaaactcgctgtgcaaaagcggctatttgcggcgagtacaaaagtattgccccagcctgaccgtcaacgatctccagccctggccggcaggcgtgcgggcgcaggcggtttcaccggacggcaaactgattgatgattttctgtttgtcacgacgccgcgttccattcacacctgtaacgccccctccccggcggcgacatccgcgatacctatcggcgcgcatatcgtcagtaaagttcaggcgctacgcgcaagccagagcaaccccggacgtacgctgcgtgcggcacgcagcgtggacgcattacacgccgcatttacccgttaa

SEQ ID NO: 368223 - DNA, 978 bp, Salmonella enterica
atgaatgcactgactgccgtaaaagcgaacacagatgatttagcccaacgccatactggtttcacccttgccccttcggcgcagtcgccgcgtctgctggcgttaacgtttacggcggataccacaagacaatttctccatcaggttgcacagtggccggtgcaggcgctggaatacaaatctttcttacgtttcaaaatcggcaagatcctcgacgatctgtgcggcaatcagctacaaccgctgttgatcaaaacgctactcaatcgtgcacaaggcgcgctgttgatcagcgccgaagggctcgatgatgtcgcacaggcagaagagatggtcaaactggcgacggcggtggcgcatcttattggtcgctccaactacgatgcgatgagcggccagtattacgcgcgtttcgtggtcaaaaacgtcgacaactccgacagttatctgcgccagccccaccgcgtaatggaactgcacaatgacggcacctatgttgaggaggtgaccgactacgtgctgatgatgaaaatcgacgaacaaaatatggaaggcggtaattcgctgctgctgcaccttgatgactgggaacatctggagtcgttttttacccatccgctggcgcgtcgcgtcatgcgctgggcggcaccgccaagcaaaaatgttagccatgacgtctggcacccggtgtttgatgtcgaccaacaaggccgcccggtcatgcgttatatcgaccagttcgtccagccaaaagactttgaagaaggcgtctggctcagcgagctttcagacgcgctggaaaccagtcaaaacatcctctccgtgccggtaccggtcggcaaattcctgctgattaacaatctgttctggctacatggacgcgatcgttttacgccgcatcctgacttgcgtcgcgaactgatgcgccagcgcggttacttcgcctacgccgccagccattatcaaactcaccaataa

SEQ ID NO: 368224 - DNA, 135 bp, Salmonella enterica
atggggaaagtgatgctggcggggttgcccggcctgacacatgagcgcgtaggccggacaagtacaacgtatttcagcagtcaattaaccggcgtcaacctgcggtttacggctgtgtttacggagcagacgtaa

SEQ ID NO: 368225 - DNA, 1515 bp, Salmonella enterica
atggatacctggatatatctttctcagggctttgcggtggcgatgacgccggaaaacctggttatcgcgttgattggctgcttcgtgggcacgatcgtcggtctgctgccgggcctgggaccgatcaacggcgtggcaatcttactgccgctggcctttgcgttgcatctgcctgcggagtcggcgctaattctgctggcgacggtgtacattggctgtgagtatggcggcaggatctcctccatattgctcaacgtccccggcgatgcggcggcgatcatgacggcgctggacggttacccaatggcgcagcaagggaaaggcggcgtagcgctgtcgatttccgcagtcagctcatttttcggttcattaatcgctatcggcggcatcattctgttcgcccctttactggcgcaatggtcgctggcctttggtcctgcggaatatttcgccttaatggtttttgccatcgcctgtcttggcagcatgatggcgcaaaacccgcttaaatcatttctggcagcgctgatcggtcttggccttgcgaccgtcggcgtggacgccaacaccggggtttatcgctttacctttgacagcgttcatctttccgacggcgtacagtttatcgtcgtggtgatcggcctgttctcggtatcagaaatacttttaatgctggaacataccagcagcgggcaaacaatggtccgcaaaacgggtcgaatgttgttcaacctgaaagaaggcgcgcagtgtatcggcaccaccctgcgttcttcggtaatcggcttttttgtcggcgtattgcccggcgccggggcgaccattgccagcgccattacctatatgaccgagaaaaaactcagcggcaacagcgatagcttcggcaaaggggatattcgcggcgtcgcggcgccggaggcggcaaacaacgcctcagcctgcggctccttcatcccgatgctgacgctgggcgttcccggttccggtactacggcagtgatgatgggggcgctgacgctgtacaacatcacgccaggcccggcgatgttcaccgaacagccggatatcgtctggggactcatcgctgcgctgctgattgcgaacgtgatgctgctgatcatgaatatcccgttgatcggtctgttcacccgtatgctcaccattccgctgtggttcctggtacccgccatcgctgccgtatcggcggtaggggtgtatgcggtacacagcaccaccttcgatctggtgctgatggtcgcgctcggcgtgttagggtacattttacgtaaaatgcacttccccatgtcgccgctgatcctgggattcgtactgggggaaatgctggagcagaacctgcgtcgcgcactctccatcagtaacggcaatatggcgattttgtggcaaagcggcgttgccaaagccctgctgatcatggcgatcatggtcattgtcgtaccgccagtgttacgtctgctccgtaaacacagccgtaaaccgcaggttgacgccggttaa

SEQ ID NO: 368226 - DNA, 432 bp, Salmonella enterica
atgagcgatcgtatctttgcgggtatctggctgttgctctgtatcgccgggctattcatcgcctggcagatccaaagcgaatacagctatgaacccgtcggcccccgcccttttccgctggggattatcggcctgatggcgctctgcgcgctggcgctgttattgcgccatcccgacacggtgagctggccgcgccgccatgttctgcaaaagctaattaccatgatcatcatcctgctgatgtatgcctggggattcgaatggctgggttttcccatcgccaccgcgcttctcaccatggttatcgggatgctgttcggcgccacgattccggcggcgggtatctccggcgcggtattgggtattctgctgtggtatgcctttgaccggctgcttgatgtcaccttacctctcggcgcctggctgagttaa

SEQ ID NO: 368227 - DNA, 978 bp, Salmonella enterica
atgaaaaaacaattacttcgtacccttactgcaagcattttattaatgagtacctctgttctggcgcaggaggcgccgtcgcgaacggaatgtatcgcgccagccaaacctggcggcggtttcgacctcacctgtaagctgattcaggtgagtttgctggagactggcgctatcgagaaacccatgcgggtaacgtatatgcccggcggcgtcggcgctgtggcctataacgcgatagtcgctcaacgccctggcgaacccgggactgtggtcgccttttccggcggttcgctgctcaacctgtcgcaggggaaatttggtcgctacggcgtggatgatgtgcgctggctggcaagcgtgggcactgattacggcatgatcgccgtgcgtgcggattccccgtggaaaacgctgaaagatctgatgacggcgatggaaaaagatcccaacagcgtggtcattggcgctggcgcctctattggcagccaggactggatgaagtcggcgttgctggcgcaaaaggcgaacgtcgacccgcacaagatgcgctacgttgcctttgagggcggcggcgagccggtgacggcattaatgggcaaccatgttcaggttgtctccggcgatctcagtgaaatggtgccttatctgggcggcgacaaaatccgcgtgcttgccgtcttttcagaaaatcgtctgccgggccagcttgccaatgtccctaccgctaaagaacagggttacgacctggtgtggccgattattcgcggcttctacgtcgggcccaaagtcagcgatgccgattaccagtggtgggtggataccttcaagaagctccagcaaaccgacgagtttaaaaagcagcgcgatctgcgcggcctgtttgagttcgacatgaccggccagcagctcgatgactacgtgaaaaaacaggttactgattaccgtgaacaggcgaaagccttcggactcgcgaaataa

SEQ ID NO: 368228 - DNA, 675 bp, Salmonella enterica
atgcgtctcttattggcggaagataaccgtgagctggctcactggctggagaaagcgctggtgcaaaacggctttgccgtggactgcgtatttgacggcctggcggctgaccatcttctgcacagtgaaatgtacgcgctggcggtgctggatatcaatatgccgggaatggatggactggaggtggtgcaacggctgcgtaaacgcggtcagaccttgcccgttttgctgctcacggcgcgaagcgcggtggcggatcgtgtaaaaggtctcaacgtcggcgccgatgactatctgccgaaaccctttgaactggaagagctggatgcccgtttacgggccttgctgcgacgcagcgctgggcaggttcatgaagttcagcaactgggggaattgatctttcatgatgaagggtattttctgttacagggacagccgttagcgctgacgccgcgtgagcaggcgctcttaaccgtattgatgtaccgacgaacgcggccggtttcgcgtcagcagctttttgaacaggtgttcagcctgaacgatgaggtaagccctgaaagcatcgaactttatattcatcgactgcgtaaaaaactccagggaagcgatgtacgaattacgacgctgcgcggcctgggttatgtgctggagcgcggcgatgaagtgggttaa

SEQ ID NO: 368229 - DNA, 1416 bp, Salmonella enterica
atgaagtgggttaagccgcaatcgttgtacctgcaactcttactgttcctggggttgccgctgattctgctatgggggctgtcggcgtttaacagctatgtcaatgcgctacaggccgccactcaggcttatgatcgtacgttgctctcctcggcgcgaacggtatcggaacggctggtggtgcgcaataaccatctggaagttaacgtgccctgggtggtgctggatagcttcgagcttaatatgaatgatcgactctattacaaagtcgtcgacccttccggaaaggtcatttccggttatgacgatctgcccgtcatgccgcccgctacgccccgtacccggctttatccggcgctggcgtggttctatcataccgagtatcgcggcgaggcgatccgcgtggcgcgtttgctacagccggtcaacgaaggcggcattatcggcatggcggagatttatgtcgcagagacgctgcagtcccgtcgttatctggcgggccaactgctgttctcttcctggatctcacaggggctgctggtgttgctgaccctggtgctggttggctggttattacgccggatcctgcgccctatgcgtcaactttcgtcattaatggtacgccgcgaaccgggtctgttaacgccgctgccggaactgctgccgtggtcggaaacacgcttgttaatcgtggcgtttaatcgctacattgacaggctccgcggcattctctcccggcaggaacgctttagtgccgatgcttctcaccagttaaaaacgccgctggcggtgttaaaaacgcaggcggcggtggcgttagccagccagcaccctcatcattggtacgaaagtctgcaggcgatgagcgtaacgctggatagtaccattcagctcacggaaagattgttgcaactttctgcggtaaagcataaagagcagggcgagcggcgcttttccccggtgaatctgtacgatatcgtacagagcggctgctttacccgcctggcgcaggcgcggagtaaacatatcgacctgggctacgaaggcgaacaggaagcgatgtggatcgagggggatgaggtactgcttagcgagctatgcggaaacttgctggataatgcgctgaaatacacgcctgagcaaggtatcgtcaccgcgcggcttgaacgggatggcgatgccgtgacgctggttgtcgaagatagcggccccggcattgatgatgaacacatccatctggcgctacagccgttccaccggctcgataacgtaggaaatgtggccggggcgggcattggtctggctttggtcaatgatattgcacgcctgcaccgtactcatccccatttttcccgtagtgaagcgttgggagggttatacgttcggatacgctttttaagccttgttccgcagtaa

SEQ ID NO: 368230 - DNA, 1014 bp, Salmonella enterica
atgaataatcatactaaacgacggggaatagcattaaccgtctttcttgtcggggttaacatcctggcctggatttgggcgttctgtgtttttcatcaccatgcagtcatgctaagtgcagccatactggcgtatagctttgggctgcgtcatgcggttgatgccgatcatatcgcagccatcgataccgtcacccgtaaactgatgcagcagggtaaaacgcctttaggcgtgggggcgtttttttcattgggtcattcgaccattgtcgttctggcatgtctggcgattgttgtgacgtcgatggcatttcgcgatcgtattgatgttttgcatcaatatggttcgttgattggtacggctgtttccgctttttttctgctggcgatggccctgcttaacctgtttattttgttcaacgtctggcggcaatttcgctcggttacccgcggcgagtcagtgagggcgcatgacgaggccatacctggcgggctgatgacgcgtatatttcagcgtacgtttcgtttggtcacttccagttggcatatgtattttgtcggttttctgtttggtctgggatttgataccgcaaccgaggttgggttgctgggcatttccgcttcagcagccaaccaggggctatctctctggtcaatgatgatttttcctgtgctgtttaccgccgggatggcgctggtagattccctggataactttgtcatggtcggcgcttacggttgggctttctcgcatccattacgcaagctttattataatatgaccattaccgccgcatccgtcattgtcgcgctggcgattggcgggcttgaggcgctggggttgattgatgatgcgttacagttaagcggaacattttggcagaccgtcagcacgcttaacgatcatatggggaatgtgggcttctgggtagtgggtgcttttgtgctattctggctgctctcgttgttgaattatcgctggcgcggctatgataaaatcaccctcaatacctga

SEQ ID NO: 368231 - DNA, 897 bp, Salmonella enterica
gtgaaaatacaagaagttaagcgtatattaacccgctggcagccgtcttcctttaccctataccgggaggtgtttacgcaatacggcggtagtatcaatatgcacccagatattgttgattattttatgaagcgccataactggcattttaaattcttccactataaagaagatgataagattaaaggcgcctactttatctgtaatgatcagaatattggcatcctgacgcgcagaaccttcccgctatcgtcagatgagatacttattccaatggcaccagatttacgctgcttcttacccgatcgtactaaccgactttcggcgttgcatcagccacaaatacgcaatgccatatggaaactcgccagaaagaaacaaaattgtctggtcaaagaaacgttctcttctaagtttgaaaaaacacgccgtaatgaatatcagcgatttcttaaaaaaggcggaagtgtaaaaagcgttgctgattgttcttctgatgaactgactcatatttttatcgagttatttcggtctcgtttcggcaatacttcatcctgctatcccgctgataaccttgccaacttttttagtcaactgcatcaccttctgtttgggcatattctttatattgaagggataccctgtgcatttgatatcgtattgaaatctgaaagccagatgaacgtctactttgacgtatctaatggtgcaattaaaaatgagttcagaccactcagtcccggcagcatactaatgtggctaaatattaaccgtgccagacattactgccaggaaagacaaaaaaaattgcttttttccatcggcatactaaagcctgaatgggaatataagcgcatgtggtcgaccccctattttaccggaaaatcgatttgctaa

SEQ ID NO: 368232 - DNA, 930 bp, Salmonella enterica
atgacgatgcagcaaagtgatatggaaagatataatccattattaatgttaaaagaagtcatggcgcagacgccttatcgccataaacgctggggagagcgtaagtttcgctataaatttgtattacgttgccttattaaccccgtaacgacaattaaatacttcaatgaattatgccatctgtctcagcccagaacgctgattattcatcgtccactgttgccggcaaaaatccagcggccctatttgtataccgggcttagcatacgttgccgggcaaaagctattctggaacactaccagttcgttcagtcctttccggaaagtaaaattaaaaagatcctcctgtccgaggaacaaatcttgctcgctcacctggaaggaaaaaacgacgctctggtagatatctactgcggtccctgtggctatgacagagaaggtgagctgacattaacgctgtgtttcaatgatacgccgttggcacgtttatcattttcctttatccgccatgaagggaagcaaatagcgctggttgccgggttacaagggcccagtaaacatgtcggcccacaagtcatacgtaacgccaccaaagattgttacggtctctttcctaaacggatgctgtatgaagcttttgcaacattgatgcaggcctgtaatgtcgacgagatttatgcggtaagtgaaaacaaccatgtttatcgtcaactcaggtacttattccagaagaaaaaaacttttgtggccagctatagtgaattctgggagtcgctaaacggcgttaagaaaggtgccttatatcatctgccatcacaggtgatgcgtaaagcgcctgaaagtatccccagcaaaaaacgcgcagagtatcggaaacgctatcatattctggatacaataatacaagaggttaacagcctctcccggtag

SEQ ID NO: 368233 - DNA, 1053 bp, Salmonella enterica
atggagcgttcactcgatagtctggctggtatggctaaatctgcttttggcgcggggacttctgctgctatgcggcaagctacctcgcccaaaaccattctggaatatatcattaacttttttacctgtggtgggatacgtcggagaaatgaaacacaatatcaggaattgatagagactatggctgagacattgaaaagtacaatgcctgacagaggtgctccgttgccagaaaacatcatcctggatgatatggatgggtgtcgtgtcgaatttaatcttcctggtgagaataacgaagctggacaagttattgtacgagtcagtaaaggcgaccattctgagacaagagaaattccgcttgcctcttttgaaaaaatatgccgagctttactattcagatgcgaattttctctccctcaggattctgtaatattaactgcccagggaggcatgaatcttaaaggcgctgtccttaccggagcaaatctgacgtcagaaaatttatgtgacgcagacttaagcggcgcaaatttagagggggcagtgctgtttatggcggattgtgaaggtgcaaattttaagggcgcaaatctatcgggaacatcactaggcgacagtaatttcaagaacgcctgtctggaagatagcattatgtgtggcgctaccctcgatcacgctaatcttactggcgccaatttacaacacgcgagtctgttaggctgtagcatgatagaatgtaattgctccggtgcaaatatggatcacactaatctttcaggcgcaacccttatacgtgctgatatgagcggtgcgacattacagggtgctactataatggctgcaattatggaagacgctgtcttaacccgggcaaatctgcgaaaggcgagtttcatttctacgaacctggacggggctgatttggctgaggctaatttaaacaatacctgttttaaagattgtacactaacccatttgcgtaccgaagacgccacaatgtctacaagtacacaaacactctttaacgaattttatagtgaaaatatttag

SEQ ID NO: 368234 - DNA, 231 bp, Salmonella enterica
atgcctggatgtataagtgcctgttcgtgcgttgtcagctcgacgcctaccgatcctaaggccccccctaagcctaagtggatagagttaaaaggttattgtgttacatgtactagtcaggaggatattcgtccacctaaagagggtgaaccaaagcaaaaaatgacacccaaggatttagtgctgttacgcggtcttttaaaagacctgggggtaacacaaaatccctag

SEQ ID NO: 368235 - DNA, 2175 bp, Salmonella enterica
atgaaagttaataagttcctctggttaataaccgtggtttctacaggggttaatagtccattatcagcagcagaatctacagacgacaacggcgaaacgatggtggttgaatccactgccgagcaagtattaaagcaacagccgggcgtttcgattattactcgtgacgatattcagaagaatcctcccgttaacgatcttgccgatattattcgtaagatgcctggggttaatcttaccggcaatagcgcctcggggacgcgcggaaataaccgacaaattgatattcgtggtatggggccggaaaataccttagtgctgattgacggcgtgccggtgacgtcacgaaattcggttcgctatagctggcgcggagaacgcgacacccgtggcgatacgaactgggtaccgccggagatggtagaacgtattgaagtgatccgtgggcccgccgccgcgcgctatggctccggtgccgctggcggggtggtgaatatcatcaccaaacgtccgactaacgactggcatggttcgctgtcgctctataccaaccagccggaaagcagcaaagaaggtgacacccggcggggtaactttagccttagcggcccgttggctggagatacgttgacgatgcgcctgtacggtaatctcaacagaaccgatgccgacagctgggatattaactcctccgccggtaccaagaatgccgccggacgggagggggtcaccaataaagatattaatagcgtcttctcatggaaaatgaccccgcagcaaatccttgattttgaagcgggatacagtcggcaggggaatatctatgccggcgatacgcaaaacagtacttcgaacgcggttactaaaagtctggcgcagtccgggcgggagaccaatcgcctgtaccggcagaattacggtctaactcataacggcatctgggactgggggcaaagccgcctggggttctactatgaaaaaaccgataatacccgcatgaatgagggactctccggcggcggcgaggggcgcattaccaacgaccagacgttcaccactaaccgcctgatctcgtatcgcaccagcggcgaggtgaatgtcccggtgatatggctatttgagcaaacgctcaccgtcggcgcggagtggaaccgcgatgagctgaacgatccttcctctaccagtctgacggttaaggatagcaatatcgccgggattcccggttcggcggctaaccgtagcagcaaaaataaatcggaaatcagtgcgctgtacgttgaagataatatcgaacccatggccggtaccaatattattccgggtctgcgttttgactatttgagcgaatccgggagtaattttagtcccagtcttaacctttcccaggagttaggtgaatacgtcaaggtgaaagccggtattgcccgggcctttaaggcaccgaacttgtatcaaaccagtgaggggtatttactctattcgaaaggcaacggttgtccaaaagatattacgtcaggcggctgttacctggtcggtaataagaacctcgatcctgaaattagtatcaataaagagattgggctggaatttaccgtagacgattatcacgcaagcgtaacgtatttccgtaacgattatcagaataagattgtcgcaggtgatcagattattggcagaagcgcatctggcgcttatgtattgcagtggcagaacggcggtaaagcgctgattgaaggtattgaagccagcatggctgttccgctgatgccggaccgtctgaactggaataccaatgcgacttatatgatcacttctgagcaaaaagataccggtaatcccttatcgataatcccgaaatatacggtgaataccttcctcgactggactatcaccagcgcgctctccgctaacgtcaactggacgttatacggcaagcaaaaaccgcgaacacatgcggagtcgcgtagtgaagagaccaaaggattgtccgggaaagcgctgggggcttactcactggtcggcgctaacgttaactacgatatcaataagaacctgcgtcttaatgtcggtatcagcaatatcttcgataaacagatctatcgctccgccgaaggggcaaatacctataacgaaccgggtcgggcttattatgccggtgtgacggcctcgttttga

SEQ ID NO: 368236 - DNA, 930 bp, Salmonella enterica
atgtatggtcgccagtaccacaacaagtgctatcgcatggcgctatttttagtgagtttttgttttagcgcgctgagttatgcgcagccggatatgcagccattaggaccgaatattgctgataaaggttcgggatattaccattttagggtcaatgactttcaatctgccgatggcgcaagacattaccgggtatggaccgctattcccaataaagccgccccgccgtcgggttatcctgtcttatatatgctggacggcaacgcagtgatggacagactgccggagacgctgctcaaacagctggcagaccactcgccgccggtgattgtggcgattggctatcagactaacctgccgtttgatcttaacggcagagcttatgactatacgccggcgccgggaatcgaaggcagtgaaaataacccgcgttttcatcgtaagaccggcggcgggccagcgttccgccagctactggagagacatatcgcgccgcaggtggaacaaggaataaccatcaaccccgaacggcgcggggtatggggacattcttatggcggcctgttcgttttagactcctggctgtcatcatccttctttcatatctattacagcgccagcccgtcactcagcagggataactttgccctgttgaatcgccttacggcagtgaagccgtcgccgttctgccataaaaaactcatcataatggaaggttcagcgtcgaatggggatagcaggcaacgccagatggccgagctcctgcaaaaagttcaggagaccgtgagaacgcttgagaacaacggcgttaacgcggccctgcagcattacccgggcctgggccacgggcccatgtttaacgcctcttttcgcagtgcattgctggatatcagtcgcgaaccggcaagccaaaaaccacgctgtcattaa

SEQ ID NO: 368237 - DNA, 1245 bp, Salmonella enterica
atgagactgagcccgcccgtcgctcctgtcgctatacagaccgctacgcgccttcgccgccaactcgccgccggaagccaggttgacgcttctcacttctggcgagaagcaaactcgctcgcactgccgctggtgacagccattaacggcgcagacgatgaacgggaagtcaccttcctgtggcgtgccgcctctcctctgcggggggtttatgttcgcctgaaccgtgtcaccgataaagataacgtggcgaaaggtatgatgacgcaactgcccacaacggatatctggcatctgacgcttcgcttaccggcgtcctactgcggttcctatacgatggtcgaaataccaccggaaaccccggacgagacggtgttgcagcttggaagccgtttcgcctcccttgtcgggaaggcggacccgctgaacagcacgccgggaataaatgttcggggcaatgcgcaggagtccgttctggcgctggatcatgccccggcacaggaggagtggtcaggctgtcgcgcttacgccgggcagcttttcacctcagagcatcggctcgccggacaatgtcgccgtgtgcggctgtatcttcctgacgttcctgtcgtacaaccgctgggcttgctggtactcacggatggcgagatctggttcgaccatcttggggtaagcgccgccattgacgccgccatccgcagcggacgcatcgcgccggtggccgtactcggcattgataacatcaacgcgcgtgaacgcgtcgcaatcctcggcggtcgccgcgagctggtgctcgacattgccgaacgcctgctgccaactcttcgcgccaactacccggaacggcggtgggcggaccgtacacaaacggtgctggcagggcaaagcctcggcggcgtgaccgcgctgatggcggcccgccacacgccagagagcttcggcctggtgctgagccactccccctcaatgtggtggacgccggacaaccgcaatcgcccgccccatttcagcgcagaagagcgctcatgggtcagcgaacatgtgttatccgcgccctcgccagccgtacgtacgcatctgtgcgtgggagcgctggaaggttcgacggtcccgcaggtcaaacagttgcatgaaaaattgcgcgccgccggcgttgaaagccattgcagcgtgtacaccggcggtcacgattatgcctggtggcgcggcgcgctgattgacggattacgtctactgccccgataa

SEQ ID NO: 368238 - DNA, 3657 bp, Salmonella enterica
atgcccgcgactcattcccccatgcccgctcgtgcctggatagttcgccttgcccgcgtgtgttgggaacgtaaaacactgagcatcattgtcatcgtagcatcagtatcgaccattttactggctgcgctgacgccgctaataacgcgtcaggccgtcaatgacgcgatagcaggcgatacgacccacctgccgttacttgcctgcggcctgctgttaattgccctttttgattttatcgggaattacgtgcgccgcggctatgccggggaactctcgctgtgggttcagcatacgttacgtagccgtgcgttcgacagtattcaaaaactggacggcgcaggccaggacgccttgcgtaccgggcaggtcatttcgcgtaccaacagcgatcttcaacaggtacacaccttgctacagatgtgtccggtgccgctggcggtgctcacttactatgtggccggtatcgcggtgatgctatggatgtcgccatccatgacgcttatcgtgatttgcgtactggccgcccttgctattaccgccctgcgcgcccgtcgccgtgttttcgcacaaacggggcttgcctcagaccggctggcgcacatgacggaacatatgcgcgaagtattggaacagatctcagtggtgaagtcctgcgtggcggagttacgcgaaacgcgttggctcgatggtcagtcgcggcagatggtgcgggtacgcatcggcgccgctatctcgcaggcgatgccgggcgcaaccatgctggcgctaccggtgatagggcaaatcgtcctgctgtgctatggcggctggtcggtaatgaatgggcgcatcgatctgggaaccttcgttgcgttcgcgagttttctcgctatgctgaccggccctacccgcgtactggcatcgtttttggttatcgcacagcgcacacaggcgtcggtggagcgcgtcttcgcgcttatcgacacgcgttctcgcatggaagacggtactgagtcggttgaaggtcagattatcgggctggacgtggagaagatgagtttccactacgacaacggtaaccgtatcctcaatgagatctcgttttccattcacgccggtgaaaccgtggcagtggttggcgcctccggctccgggaaatcaacgttgctgatgttgctggcgcgcttttacgatcccacctccggcggggtgtggctcaacaccactacgggtcaacagaatattcgcgacctgaaactgacggcgcttcgtcgtcgcgttggcgtagtgtttgaagacgcgtttctgtttgccggtacggtggcggaaaacatcgcctatgggcacccgcaagcgactcaggacgacattcgacgcgccgccgatgccgcaggcgccagcgggttcatcaatgcgctaccgcaggggttcaacacccgactggccgaacgcggaagcaacctctccggcggccaacgccagcgtattgcgctagcccgggcactgattaccgcgccggaactgctgattctcgatgacacaacctcggcggtcgatgccggtactgaagcggaaattaacacggctcttggtcgttatgccgataatgagcatatgctgctggtgattgcacgccgccgttcaacgctgcagttagccgatcggatcgtcgtgctggataaaggccgcgtcgtggatatcggtacccaggcggagctggatgcaaggtgtccgacgtttcgctcgctgatgagcggcgagggtgattttctcgcccttgccccggcagaacaacggacgctatggccaacaacgcaggcggcaaaatccgacgacgcgcatgagcgccagacacccgccggaaaaggttttgtcgaccggatgacgcgcgttccggaacgcgccgtacagatggcgctggcaggccacgggcgtcaagtctcatcgctgctgacgccagtagcctggatgttcgtcatcgccgccctgcttatcgcgcttgattccgccgcaggcgttggcgtgctggtgcttttgcagcgcggtattgactcaggcgttgccgcaggggatatgtcgactattggcatatgcgctctgctcgcgctgtgtctggtagcgatcggttggtgctgctatgcgctgcaaacgatcttcgccgcccgcgcggcagagtcggtacagcatacggtacgcttacgcagcttcagccacctgctacgcctgagtcttccctggcacgagaagcacatcgactcgcgtcttactcgcatgaccgtcgacgttgattcactcgcccgatttctgcaaaacggtcttgccagcgcggccaccagcatcgtgacgatggtcgctatcgccgcggcaatgttctggcttgaccccattcttgcgttaacggcattaagcgccgtacctgtagtgatactggcgacgtggatttaccgccgtttgagctcgcctgcctacgcccaggcacggctggaaattggtaaggtgaacagtacgcttcaggaaaaggtctccggtatgcgggtagtgcagtcacacggtcaacagaagcaggaagccgccaggctacgggcgttatcagacaacttccgcgccacccgcgtgcgggcgcaaaaataccttgctgtctattttccgttcctgaccctctgcaccgaggccgcctatgccgccgtgcttttaatcggggctacccgggtcgccggaggcgaaatgacgcccgggatactggcggcgttcttcctgctactgggacaattttatggcccggtacagcagttgtcaggcattgttgattcctggcagcaggcgaccgccagcggcaaacatatcaatgcgctattggcgactgaggaaacggagaatattgaaccgtcctccataacgcctggcactggcggcgcgctacgtctggaggcattgacattccgctatcccgaaaaaacgcaacctgtgcttgataatctctcgctcaccattccgccaggaacggtagtcgcggtggtcggacgtagcggcgccggcaaatcgacgctgatcaagctgctggccgggctctactctcccggcagcgggcaaatccgtgtcggtgagcgcctaattgatgccgcgtcgcttagtgattatcgtcgccagacggggctggtcactcaggatgtcgcattatttagcggcgatattgccgaaaatatccgctattcgctgccagacagcagcgacacggaggtggagatcgcggcgcgacaggcgggactctttgaaactgtgcaacatctgccgctggggttccgtactccggtcaataacggcggcacggatctgtccgcgggccagcgtcagttgattgccctcgcccgcgcccacctggcgcaggcgcatattctgctgctcgacgaggcgacagcgcgtatcgaccgtagcgccgaggagcgcttaatgacctcgcttaccagggtgacgcataccgagaaacgcatcgcgcttatcgtcgcgcaccggctgaccaccgctcgccgttgcgatgttattgtcgtaatcgataaaggatgtatcgctgaatatggcagccatgagcagttgatagcgactcatggcctgtatgctcgtctgtggcgggacagcatcggccagacacgcgatacgcaaggagaggtcataggatag

SEQ ID NO: 368239 - DNA, 1116 bp, Salmonella enterica
atgcgtattctgtttgtcggtccaccactgtatggactgctataccctgtgctgtccctggcgcaagcgtttcgtgttaatggccatgaagtgctgattgcaagcggtggaaaatttgcacagaaagcagccgaagctgggttggtggtatttgacgctgcgcctggtttcgattcggaagcgggttatcgccgtcaggaggcattacgaaaagaaaataacattggaacaaaaatggggaacttctcattcttcagcgaagagatgactgacccgctggtcgcgttcgtcgggcagtggcgaccagatctcatcgtctaccctccccttggggtcgttggaccactgattgccgctaagtatgacattccggtagtgatgcaaaccgtcggcttcggtcatacgccctggcacatcaaaggcgtgacgaaatcactttctaacgcctaccgccgccatggggtcagcgcgccaccaagagatctggcgtggatagacgtcacaccgcccagcatgagcatactgcaaaatgacggagagccggttatctccatgcaatacgtcccgtataacggcggcgccgtctgggaagaatggtgggaacgtacacctgatcgcaagcgtcttctggttagcctcggcaccgtcaaaccgatggtggatggcctggatctgatttcctgggtaatggattctgccggcgaagtagatgccgaaatcatcctgcatcttccggcaaacgcccgctcggatttacgttcgctgccgtcgaatgtccgtctggtcgactggcttccgatgggcgttttccttaacggcgccgacggttttatccaccatggcggcgcaggcaacaccctgacggcgctacatgctggcattccgcagatagtctttggccagggtgccgacagacccgtcaatgcccgcgccgtggtcgagcgcggatgcggcattattcccggtaagagcgggcttacgagcagcatgatcaataccttcctcggtaatcgcgcgcttcgcgaggcgtcgcaggaggtcgcggcggaaatggcggcccagccttgcccgaccgaggtggcaaaaaaactgatcgccatgctgcaacacggctaa

SEQ ID NO: 368240 - DNA, 246 bp, Salmonella enterica
atgagtgtgtcgagtttcatgggatatctgaagggtaaaagtagtctgatgctttacgagcagtttggggatctaaaattcaaatacaggaacagggagttctggtgcagagggtactatgtcgatacggtgggtaagaacacggcgaagatacaggactacataaagcaccagcttgaagaggataaaatgggtgagcaattatcgatcccttatccgggcagcccgtttacgggccgtaagtaa

SEQ ID NO: 368241 - DNA, 267 bp, Salmonella enterica
atgcgtaaagcccgttttactgagcatcagatcatcactgtgattaagtcggttgaagctggacgaaccgttaaagatgtctgccgggaggccggtatctctgaggccacctactataactggaagtccagatacggcggcatggaaccttctgatattaaaaagataaaagatcttgaggacgagaaccgacgcctcaaacagatgtttgccgacctgagccttgagaaccgggcgctgaaagacgttatcgaaaaaaagctttaa

SEQ ID NO: 368242 - DNA, 624 bp, Salmonella enterica
atgtggaatcacaaaaggatccaccgtatttattgtctgctgaagctgaattttcgccgtaagggcaaacaacggctgccggtgcgtaacccttcgccactggccacgccggaagcgctgaaccagagctggtctgttgattttatgcatgatgccctggtctgtgggcgtcgttttcgcacgttcaatgtcgttgatgactttaaccgtgaggcgttgtcgattgaaatagatcggaatctgccagccccacgagtggtccgggtgcttgacaggatcgcggcaaaccgtggctatccggccatgcttcgcatggataacggcccagaatttatctctctggcactgactgaatgggcagagaaacatgccgtaaaactggtgtttatccagccgggtaagccgacacaaaatgctttcattgagcgttttaacaggacatatcgcacagaaatactcgatttttatctgttcagaacgctgaatgaagtacgtgaaatcacggaaaaatggttatcagaatataactgtgaacgtccgtatgaatcgctgaacaatatgacaccggaggaataccgacagcaccattatttggccgggaactcaaaaaatgtatggaactaa

SEQ ID NO: 368243 - DNA, 804 bp, Salmonella enterica
atggaatcgaacgatcctggaaagctgatttggcatgtcgcctgcgatgaatcagggatagatggtcagcgattttatggatttggtagcttatggatgaaataccagaggcgtggcgattttgcgcgtattgtccgcgaacttcgtgagaaacataactgtagcgatgaaattaaatggcagaaagctcattccaagcgtaacgctgcattctatcaggatttaatcgagaccttcttcaaacacccttggctagcttttcattgcatagtcgtggaaaagtcgaaggtagaaaaatctttccacggtggcgactatgatcttgcaatgcgtaagcattttggcaagctaatagagactaaaattggcaatgtcatcaaagcccaccccgacagagagtgtgagtttcgtgttgaagtagatccattaccatcccgctacaaaaaagctgatgaggaattccatgtaatcaccaaccacactttggcacgtaggtttgggcgcaaagatattatcaaaagcgtagtaagtaaagactcaaaggcgtcagaacatattcagatagcagattttttgctaggtgcggtcatgtgcgcttatcaaggtaaagcaacttctgaggcaaagctagccgtcgcaaacaatgttgcatcctacttgggatgggactcactgatgcatgatacttggccaacagaacgtaaattcaatatttggtttttcttcgacaggtcaaaaggaccaagggatattgtcacccaagaagttaagctcacttacgcccttcccaacacacgaaaatag

SEQ ID NO: 368244 - DNA, 594 bp, Salmonella enterica
atgccaacacctgaaagtttgtggaaaattctggcttcacccatttcgacaaagacggctgttaggtatggattcctctctgtagcaattgtcctttctatccgctttatactcccaatacttaaggacattgcgcctctaactgaacaagacttgccggggtattcctatgcagcgcattttgctctaacgattttgttttcacttattgcggaaactctaacctttgaactagtagcttggatgtatctcaagctcgaaaaattcatagaaaggaggaaattaagaaaagaactcgcccgcaaacaagagattgagagcaaggaaatcaagagaatccaagaaaagtttattgaaaatttcatactggcatggcccctcatagccccccgctataaatattttgtctatgagctacgaaggggccacaagggctactcagatacgaattcggccatcaattaccttagacaacaaggttggattcacccaataactgaactaccttatagccattgcctttatcggttagacgaactcatttttgaagccctaaataggatagagtcagccgcaacagcaacagactcctag

SEQ ID NO: 368245 - DNA, 1191 bp, Salmonella enterica
atgaaaatcaatcagcatgatgccgcgatggacgatcccgatattcagcgtgaacgggcgttttccggcgcgggtcgtattgttctgatctgctcactgttatttctcattctcggcatctgggcgtggtttggccgactggatgaggtttccaccggcaacgggaaagtgatccccagttcacgcgaacaggttctgcagtcgctggatggcggcattctggcgcagttgacggtgcgggaaggcgacagagttcaggctaaccagattgtcgcccggcttgatccgacgcgtctggcgtccaatgtgggtgaaagtgcggcaaaatatcgcgcttcactcgcctccagcgcacggttaaccgcggaagtcaacgacttacctctcgccttccccgctgagctgaacggctggccggatctgattgccgcagagacgcgtctctataaaagccgccgcgcgcagctggccgataccgaagccgagctacgggatgcgctggcgtcggttaataaagagctggccattacccagcgtctggagaaaagcggcgcggccagtcatgttgaagtgctgcgcctgcaacgacaaaaaagcgatttaggcttaaaaattaccgatctgcgctcacaatattatgtgcaggcacgcgaagcgttatcaaaagcgaacgctgaggtcgatatgctctccgccattttaaaaggacgcgaggattccgtcacccgccttaccatacgttcgccggtacgcggcattgttaaaaatatccaggtcacgacgattggcggcgtgatcccgcctaacggtgagatgatggagatagtgccggtagacgatcgtctgttgattgaaacccgcctttcgccgcgtgatatcgcctttattcatcccggccaacgcgcattggttaaaattactgcttacgattacgccatttacggcgggcttgacggcgtggtggagaccatttcaccggataccattcaggataaagtgaaaccggaaattttctactatcgcgtgtttatccgcacccaccaggactatctacaaaataaatcaggacgccgtttttcgattgttccaggcatgatcgccacggtggatatcaaaaccggtgaaaaaaccattgtcgactatttaatcaaaccgtttaatcgcgcgaaagaagcgctgcgcgagcggtaa

SEQ ID NO: 368246 - DNA, 2181 bp, Salmonella enterica
atgacccgcgccgcccccgatgtagaagaggtactcagtgagcgcgcgctaagccaatgggcgcaggccatcagctatgtcgccggtcattatcgcgttgcctgttctcccggttcaattcaggccaacgccccgtggtttaggggtaaaagcagaacgaccgccttaacgcagctcgcgcggcaggcgggtttatcctttcatgcgccggacatagacaaaacggcatttagtcagtggcgattgccgttggttgtcgagctccgggacgggcagttattggtcatcgagcatgttaatggcgaagatgcggtagacgtttttgtgattgaagaagagggtcagcgtaaccgcctgacgctcagcgagttattgccggagatcctctatgttgccgcgctacgcccgctatcggcgctcaaggatagccgcgtcgatcgctatatctcccgctttaaacccgactggatgcgcgagctggttctgcaggatattcgcccttatttaccggtaatggtcgccgcctttctgattaacgtgctgtcgctggccgggattgtgttctctatgcaggtttacgatcgggtgatccccgctcagtcatatcctaccctgtacgtgctctccttcggcgtgctggtagcggtgctgttcggttttctgctgcgtgaagcgcgtacgcacattatggacgtgctcggtaaacgcgccgatatgcgcatttccgatcgggtattcggtcatgcgttaaggctgcgcaacagcgctatcccccgttccaccggcagttttatctcgcagttacgcgaactagagcagatccgcgagatgattacctcttcaacgctggcgaccattgtcgatctgcctttctttttcctgtttatgatagtcctggcgattattgccccaccgctggcatggatagcgcccgtggcggctctgctgatgatcctgccgggcgtcgcactgcaaaaaaaactggctgtcctcgccaaccaggccgcccacgaagcgacgctacgcaatgcagtcttggtcgaaagcgttcaggggctggaggatattaaactgatgcaggcggagaaccgctttcttcagcagtggaatagctatatccgtattaccggcgagtcgggtctacgcacccgcaaactcacgcaagggcttatcagttgggggatgtcggtacaaagtctggtgtatgccgcagtgattatgttcggcgcgccgatggtcattgaaggcagtatgactaccggcgccgtggtcgccgcgtcgatgctcggctcacggatgatcgcgccaatggctaacctgtgcggcgtgctggcgcgctggcagcaggtgaaagcggcgaagatgggtctcgacaacattatgcaactgcccaccgagacacagcatgacgatagcctgatacaccgcgacatcctccacgggcattacctctttgaaaatgctcagtttcgttaccataacgacgatcaacgcataccgctgcgcctcgtgcgtctggagatcatgccaggcgagcggattgcgatactggggcgtaacggcgcgggtaaatccacacttttacaggcgatggcgggcggcctggagatgattcagggagatgcccggcttgataatctcagcttgtcgcacatcgatatggcggatttacgccgcaacatcggctttcttagccagaacgcgcggcttttcttcggcaccctacgagagaacctgacgctcggcgcgccgcacgccaacgatgaacagatttttgacgcgctcgaagtcagcggcggcgccgtcttcgtcaggcggctggcaaaagggttggatcatcccattatggagggcggtaacggcctgtccggtgggcagcgccagtccctgttgctggcgagaatgctgctgcgctcccccaatattgtgctacttgatgaacccagcgcctcgctggacgagcatacggaacgagagtttattcagcggttacatcagtggcttggcaaccgtaccctggtcgtcgcgacgcaccgggtaccaatactggagctggttgagcgtgtcgttgtcctgaaagaaggacaactggtgatggatgcgccaaaagcgcaggcgcttaacgcggatcggatgcaaagtcaccgtcgggagtggaaaaatgaaaatcaatcagcatga

SEQ ID NO: 368247 - DNA, 1410 bp, Salmonella enterica
atgggaagagtcgcgcctgtcgccatcgtactggcatttgctttgtttcatcaccagccccggggcgcagaagcgccgccaatgattacatccgaaggattagcaacggaccagatgcttccttcgctggatggctccgccgctgagttgccgctcagcgccgccgcgccgggcaacctgacgctcaatgacgcggtcaatcgcgccgttaactggcatccttctattcgcgaagccgtcggcaaactgctcgcacagaatgaacaaatagaggtcgccaaatcgaaatattatccgcaagtcagcgctggcgtgaacaatgggtacagcaatacctacaccgatcacgggtatagcccctcgctggtgctgtcggtatcgcaaatgctttatgacttcggcaaagtggcaagccaggttcgcgccgaaaccgcaggcgcagcgcagcaacaggccaatgtgttgctcagtattgataccgtcgcgcacgaaaccgccaacgccattgtacaaacgcagagctggcagcaaatggtagacgcggcggaagaacagctcgtcgcgctggacagcatcggtaaacttatccggcagcgcagcgatgaaggcgctacgtcgctatctgacgtggtgcaaaccgaagccagaatcgaatccgcccgctcgcaactggcgcagtatcaggccaatctcgacagtgcgaaagcctcactgatgagctggctgggctggaattcgcttaacggcatcaataatgacttcccggcgaaacttgctcgcagctgtgagacggcgactcccgacgatcgactggtgcccgcggtactggccgcctgggcgcaggctaacgttgcgcgggcgaatctggactatgccagcgcgcaaatgacgccgacgatttcgctcgaaccttctgtacaacattatcttaatgataaatatcccagtcatgaagtgctggataaaacccagtattccacctgggtgaaagttgagatgccgctttaccagggcggagggctgactgcccgacgcaacgccgccagccatgcggtagacgcggctcagtcgaccattcagcgcacccggcttgatgtccgccagaaactgatggaggcgcgcagccaggcaatgagtcttgccagcgcgttacaaatccttcgtcggcaacagcagcttagcgaacgcacgcgcgaactgtatcagcagcaataccttaacctcggttcccgcccgctgctcgacgtgcttaatgcggagcaggaagtttaccaggcgcgttttgccgaactgcaaacggaaagccagttgcatcagttgcaactgaactgtctgtataacaccggcgcgcttcgtcaggcgttcgcgttaaatcatcgcagcattcaatccgtggagatccagccatga

SEQ ID NO: 368248 - DNA, 11475 bp, Salmonella enterica
atgcgtctactcgccgtggtttcgaaattgactggcgtctccaccactgtggaatcctcagcggtcactcttaacgccccgtcaattgttaaattatcagtggcccgggaggaaattagtcaacttacgcgcattaatcaggatctggtggtgacgctccattccggcgaaacgatcacgattaaaaacttttacgttaccaacgatctgggcgcaagccagctggtactggcggaaaacgatggcacgttatggtgggtagaaaatccgcaagccgggctacattttgaacaaatcgctgatattaatgaactgctggtcacttccggcgcttcccatgaagcaggcggcgccgtttggccgtgggtactggctggcgcggtggcggctggcggcattgccgctatcgcgtcttccggcggcggcgattcccaccatcattcggatggcgataatccgccccccgataacaccaatcctgacggtaatccccctgataacagcaatcccggcggcagtacccccaacggcaatactccaggtagcagtaatcctgtagatactaccccgcctctcgctcccggcgaattattgatttcagcggacggaaaaacggtaagcgggcaagccgaagcgggcagtaccattaccatcaaagatccctcaggcaacgtcgttggcgagggcaaagcggatagcgacggtaaatttagtattgatctgacagcaccacagattagcggcgaacaacttaccgtgaccgcgactgacgatgccggcaataccggcccatccgcaaccatcgatgcgcccaacattcctctccccgatacaccagctatcaccgccgctatcgatgatgccgctcccctcaccagcacgctgagcaataaccagtttacgaacgacaatacccccactctggagggcaccggcagcgcaggcacagtcatccatatttacgccaatggtcaggaaataggctcaacaacggttgataccagcggaaactggcattttgccattaccagcgcgctagcggatggggaaaatcatttcaccgccattgcgactaacgtgaaaggcgaaagtagcgaatcagcccgctttacgctgactatcgacacactcatccccgatgccccacgtgttgaactgattgccgataacaccggtttgctcaccgggccgctacagaataatgaccgaactgacgaggcaaaaccgctattttccgggcagggagaggcaggcaataccatcacgattaaagagggttcaaccgttatcggcagcgctaccgtagacgaaaatggacgctggacctttacgccgactacgccgttaagcgatggcgaacatacctttaccgtcgaacaaagcgacaaagccggaaacacgagccgcgtgacgacaacgcctactatcattgtggacaccacgccgcctgacgccgctatcattgataatgttgcgaaagacggcacaaccgttagcggcaccgctgaagctggcagtactgtgtcgatctatgacccggcgggaaattacctgggctccacgattaccggagaaaataaccacttcagcatcacgctgaatccggctcagacccacggcgagcgtctggaagcgcgtattcaggacgccgtcggtaacatcggccccgccacggagtttaccgcttctgactcacagtatcctgcccagccgactatccttaccgtgacggatgacgctggcgccgttaccgggctgctgaaaaatggcgatgccacagatgataaccgcccaaccctcagcggtactgctgaaccaggcagtacgatatcgattaacgataatggctttcctgtagcgacctttccgcccattgtcgctgacgctgacggcaaatggagctttaccccctcgctggcgcttgccgatggcgaccatgtctttaccgctaccgcgaccaacgatcgcggcaccagcgggcagtccgtctcctttaccattgatatcgacacgcagccgccggtgctggaaggcctggcggttagcgacgtcggcgacagactcaccggcactacggaagctggcagtactgtggttatcaaagacagcctgggaaatacgctcgggagtggaacggcaggcgacgacggtaccttctcaataggtattagcccggcgaaaattaacggcgaaacattaagcattagcgttaccgataaagccgcgaatagcggtccggtagaaacgctgaacgcgccggataaaactgcgcctgcggcaccggacggtcttaccgtggcgaccgacggtctgtccgtaagcggtcaggcggaagccggggcaacggtcactatccgcgacagtagcaacaccgtacttggcagcgccgtcgctaatggcaacggacaatttatcgttccgctgaatacggcgcagactaacggccaggcgcttatcgctaccgccaccgatgtcgcgaaaaacgaaagcgccgccgcgacggttatcgcgccggacagtaccgcgccggaaatgccgaaaaacgtggtaattagtgaggatggcaccagtatcagcggcaccgccgaaccgggtagcgccatcacgatcgccacgccggacggcaagccgcttggcagcggcaaagcagatggcgaaggtcattttacccttcccctcgtccccgcacagaccaacggcgaacaggttaccgtcaccgccaccgacagcgccaacaacgtcagcccgccaaccacagcgcaagcgcccgatatcaccgccccggataagcccattatcactcaggtactggacgatgttgaaagcttcaccgggccgctggttaacggacaaaccaccaacgacaaccgtcccacccttagcggtacggcggaggccggcgcgcgtgtcgaagtctttgataacggcgtttcactgggactcgccacgctacagcccaacggtgcctggacgtttacgccgtcgcaaaatttaggtgaaggcgcgcatcgactgaccgtaatcgcaaccgacgctaaaggcaatgccagtcaggccgcgtcattcgacctggtggtcgatacgcaatcgccgcagcaaccggtaatcaccttcattacagatgatgcgccgggtattctcggtagcgtcgcgcatctggggctcactaacgacagcacgccaacgattaatggtacaggtgaaccgggttccacagtacacctgtatcagaatggcgcccggatagcagatattatcgtcggtaattccggcgtctggagctacgcttacaccacggcctcgccactggcggacgacacctacacctttaccgtgacggccagcgacagtaacggcaacaccacgcctttttcgaccgattttacgattaccattgatacccaggcccctgccgcccccggcgttatcggcgtagctgacggcgacggaaatacgattgataccaatcagattacccaggaatcccagccccggttgagcggtagcggcaccgcaggcgacacaatcatcctttacgataatggcaatgccataggtcaggcgctggtcggcacggacgggcgctggcagtttacgccgcctgccgcgctgggcgacggcgaccaccatctgaccgctcgcgccaacgatccggcggggaacgaaagtcccgaatccatcagctttaccctacgcatcgatacccaggcgccggatgcgccgcagatcgtgtcagccgccatcaccggcggagaaggcgaggtgctactggcaaacggcagtattaccaatcagcgtatgccgaccctcagcggcaccggcgaacccggcaccatcatcaccctgtacaataacggcgtagaactggctaccgtccaggtcaatccacagggtagctggacctatccgctaacccgtaatctgagcgaagggttaaacatcctgacggccaccgccacggatgccgcaggcaatagtagcccgacctccggcgttttctccgttacccttgatacccagcctccagcgcagcctgacgcgccgctaatcagcgataacgtcgcgccggttattggcaacatcggcaataatggcgcaacgaacgataccacgccgaccttcagcggcacgggagagatcggcagcacgataattctctacaataatggcagtgaaattggtcgcacaacggtaggcgataacggtagctggaactttacgcctgcggcactgacgccagaaacctataccattaccgtcacggaaaccgatagagcgggcaatatcagtccaccttccgcctcagtcacttttacgctagacaccactgcgcccgccaatccggttatcacttttgccgaagataacgtcggcgaagtccaggatactattgtcagcggcgcaaccactgacgacaatacaccggtcattcacggcactggcgacatcggcagcattattacgctctataatggcagcagcgttttaggcgtagtcaccgtcgatgagaccggcacctggacgctagcggtgaccagcgcgctgccggatggcgtctacaccctgactgccattgccgccgatgccgccggaaacagcagcggcgtatcgaacagctttaccttcaccgtcgacaccgttccgttgcagccgcccgtcgtcaatgaaatccttgacgatgttgcgccagtgaccgggccattaaccgatggcgcctttactaacgatcggacgctgactattaacggcagcggcgaaaacggcagcaccgtcacgatttacgacaatggcgtggcaatcgggacggcgctcgtcaccgacggggtctggacattcaatacgcccgaattatcagaagccagccatgcgctaaccttcagcgcgactgacgatgctggaaataccacggcgcaaacccagccgatcactattaccgtggatatcactgccccgcccgcgccaacgatccagacggtggacgacgatggcacgcgcgtcgccggacttgccgatccttacgctaccgttgaaattcaccatgccgatggcaccctggtcggcagcgctgtcgctaatggcaccggtgaattcgtcgttacgctcagtccggcgcaaaccgatggcggtacgctgacggcaattgctatcgatcgcgcggggaataacggcccggctacgaattttcccgcttccgacagcggtctgcccgccgtcccggccatcacggcgattgaagatgatgtcgggagcgtacaggggaatattgcggcgggcggcgccacggacgacaccatgccgacgctgcgcggcaccacggatatcggctctaccgttgaagttttcattgatggcgattcggcaggctttgccaccgttgacgccagcgggaactggatctttgagatcgcgacgccattaagcgaaagcacacattacttcaccgtccaggcaaccaatgcgaatggcccgggcggcctgtccgcaccggtcgggatcactgtcgatcttagcgcgccggcgcaaccggttattaccagcgcaacggatgatgtccccggcatgaccggtacgctggataacggcgcgctcaccaatgattcacgcccgacgctcaacggaacgggagaagctggcgccacgatccgcattctggataacggcgtagaaatcggttccgccacggtagatcaaagcggcaactggcgcttcaccccgaacgcgccgctagagagcaacgcgcacatctttaccgccgtggcgaccgatcccgctggcaatagcggccagccttcggacggctttacgctgaacattgacgcgcaggcgccagatgtgccggttatcacgtccgtgattgacgataacaatcaaccgaccgttccggtgttaccggggcaatccaccgacgatcggcagccaatactgaacggaactggcgaacctggcgcgacaatcaccatttttgataacggtacgccgcttggcacggctcaggtaggcgaaaacggtagctggaccttcccggtgccccgcaatttgtcagagggaagccataatctgacggttagcgctaccgatccggcgggcaataccagcgcggtctccgcgccgtggacgatcgtggtcgatattacgcctccggcgatcccggttctcacctccgtcgtggatgaccagcccggaattaccggcaacctggttagcgggcagctaacgaacgatgcgacgcccaccctgaacgggcgcggagaggcaggcgcgacgattaatgtctatcttgacggtaatcccgcgtccatcggtaccacgacggtgaatagcgacggcacgtggagtttcacgccgcagacgccgcttgcaaacggtagccacacgttcacccttagcgccaccgatccggcgggtaatagcagctcggtgtccagcggatttgtgctgacgattgacgccacaccgcccgccgcgccggttatcgccagcgtggcagataatacggcgccggtaacgggcatcgtccccaacggcggctcgacgaacgaaacccgaccaacactctcgggtaccggtgaggcgggtacaaccatctcgatttataatggcagcgcgctggtcggtacggcgcaagttcaggccaacggtagctggagctttacaccgtctacctcgctgggcgcgggcgtctggaacctgacggcgacagcaaccgatgcggcaggcaataccagcgccgcgtccgaaatacgctcgtttactattgataccacggctcccgccgcgcctgttattgatacggtctacgacggtacgggccccattaccggcaatctgagttcaggacagatcacagacgaggcgcgccctgtcattagcggcacccgtgaagccaacacaactattcgtctctacgataacggcacgctgctggctgaaattcccgccgacaatagcagtagctggcgctacacgcccgacgcctcgctggcgacgggcaaccatgtaattaccgtcattgccgttgatgccgcaggcaacgccagccccgtttcggacagcgttaatttcgtcgtcgatactacgccgccgctgacgccggtaatcacatcagtcagtgacgatcaggcgccaggcctcggcacgatcgcgaacggccaaaataccaacgatcctacgccaaccttcagcggcaccgcagaagccggcgccacgatcacgctctatgaaaatggtacggtcattggcacgacaacggctcagcctgacggcgcgtggagcgtctccacctcaacgctggcaagcggaacgcacgtcatcaccgccgtcgccaccgatgccgcaggaaacagcagcccgaacagtacggctttcaccctgacggtcgataccaccgcgccgcaaacgccaatcctgacgtccgtggtggatgacgtcgcgggtggggtcacaggaaatctcgctaatggtcagataaccaatgataaccgccccacgctgaacggcactgccgaagcgggcagcgtggtcagtatctatgatggcgacactctgcttggcgtcacctcggctaacgcgagcggcgcgtggagcttcacgccgacgacagggttaaacgacggcacgcgcacattaacagtgaccgccaccgacccggcaggcaacgttagcccggccaccagcggttttactatcgtggtcgatacccttgcgccaacggttccgcttataaccagcatcgttgatgatgtcccgaacaataccggcgccattggcaatggacaatcgaccaacgacacacagccgacgctcaacggtactgcggaagccaacagcgcggtaagcatcttcgataatagcgcgctggtcgcgaccgtgaacgccaatgccagcggcaactggagctggacgccaaccgccgcgctcggccagggaagtcacgcctatagcgttagcgccgccgatgcggctggcaacgttagcgccgcttcgccatcgataacgattatcgtggataccattgcgcccggcgcgcccggcaacctggtcatcaatgctaccggtaatcgggtgacgggcaccgcggaagcaggcagtacagtgacgattacctctgatactggtgtggtactgggaaccgccaccgccgacggtacaggcagcttcaccgccacactcacgcccgcgcagaccaatggtcagccgctactggcatttgcccaggataaagcaggcaacacaggcattgccgccggatttaccgcgcccgatacgcgtgtgccggaagcaccgatcatcaccaacgtagtagatgatgtgggtatttataccggcgctatcgccaacggccaggtcactaatgacgcacaacccacattgaatggtaccgctcaggcgggcgccacggtgagcatttataacaacggggcgctgctcggcaccaccacggcgaacgccagcggaaactggagctttaccccgacaggcaatttgaccgaaggcagccacgccttcaccgccaccgcgactaacgccaacggtacaggcagcgtctccaccgccgcgacggtgattgtcgatacgctggcgcccggtacgccgtcaggtacgctcagcgccgatggcggttcactttccgggctggcagaggcaaacagcaccgtaaccgtcacgctgacggggggcgtgacgctcaccaccaccgctggcagcaacggcgcatggtctctcaccttgccgacaaaacaaattgaaggtcagctcattaacgtgacggccactgacgctgcgggtaacgcctccggcacgttaggcattaccgcgccggttctgccgctggcggcaagggataacatcaccagccttgatctgacctctaccgccgtcaccagcacgcaaagctattcggattacggcctgctgctggttggcgcgcttggcaatgtcgcctcggttttgggtaacgataccgctcaggttgagttcaccattgctgaaggtggtacgggcgacgtcaccatcgatgccgccgcaacgggaatcgtgctttcgctgctcagtactcaggagattgtggtacagcgctacgacaccagcctcggcgcctggacgacgatcgtcaacaccgccgttggcgacttcgcgaatttgcttaccctgaccgggagcggcgttaccctgaacctgagcggcctgggcgaaggccagtaccgggtactcacttataacaccagtctgctcgccaccgggtcatataccagcctggatgtcgatgtacaccagaccagcgcaggtattattagcgggccaaccatcagtaccggcaacgtcatggctgatgataccgcgccgacgggcaccacggtcaccgccatcaccaacgccaacggcgtcagtacgccggtcggcgcgggcggcgtggatatccagggacaatacggcacgctgcacattaatcaggacggcagttacacctacacgctggctaagcccacggcaggatacggacataaagagagcttcacctacaccattacccagaatggcgtcggtagcagcgccgcgcaactggttatcaatctgggtcccgcgcctgtaccgggcagcgtgatagcgacagacaataacgcctcgctggtctttgatactcacgttagctacgtcaacaacggtccctcgacacaaagcggcgtcacggtattaagcgtcggacttggtaatgtactgaacgcgaatctgcttgatgatatgactaatccgatcatctttaacgttgaagaaggcgctacgcgaaccatgacgttacagggaaccgtcggcggcgtctcactggtttccacgttcgatctgtacgtttatcgcttcaacgatgccattcagcaatatgagcagttccgggtggaaaagggctggattaacaccctgctgttagccggacagtcccagccgctgaccctgacgttgcctggcggcgaatacctgttcgtgctgaataccgccagcggcattagcgtcctcactggctatacgttggcgatttcccaggaccacacctatgccgttgacagtatcaccgccaacaccaccggcaacgtactgaccaatgatgtcgtccctacggacgccctcctcactgaagtaaacggcgtggcgattgcggcgaccggcacaacggaggtaaacgggctgtatggctcgctcatcattgacgcaagaggcaactatacctacacgctgaagaacggcgtcggcgccgacagcattaaaacgccggacagctttatctatacggtcaaagcgccaaacggcgataccgatacggcctcgctcaatatcacgccaaccgccagggcgctggatgcgattaatgatgtcagcgataccctcagcgtcgccacgcttcaggataccgctgcctggctggactccagcgtcggcagcgccagttgggggctactcggcaaatcgggcagcgggagcggcacctttgacgttgcaacgggcaccgtacttaaaggcgcgtcactggtctttgatgtctccacgctcattacgctgggcaatctgaatattagctgggccattcaggagaacgggaccgtcatacgcaacggaaccgttccggtggcgaatatcacgctgggcagcgcgacggtgaccgtcaacctgagcggtctggagctggatgccggaacgtacacgcttaactttaccggcaccaataccctggccggggcggcgacgatcacgccacgcgtcatcggcaccaccgtcgatctggataattttgaaacgtccggaacgcataccgttctcggcaatatttttgacggcagcgacgcggcgggggcgatggatcagcttaatacggtgaatacccgcctgagcattagcgggtataacggcagcgccgccacgctggacgccgcggcgaataccaccagcgccacgattcagggacattacggcacattgcaaattaacctcgatggcgcttacacctacaccctgaataatggcgtcgcgatgtcgtccatcaccagtaaagaggtctttacctatcaactggatgacaagatgggtcatacggatagcgccacattgaccattgatatggcgccacaaatcgtcagtaccaaccaaaacgatgttctcatcggctccgcctatggcgatacgctgatttaccatctgttaaacggcgcggacgcgaccggcggcaacggcgtcgatcgctggcaaaacttctctaccgcgcagggcgacaagatcgatatccacgaactgctgaccggctgggatcaccaggcggcgacgctgggtaactttgtgcaggttcataccagcggcgccaatacggtgatatccgtcgatcgcgacggcgccggcagtgcgtttaaatccactgaccttgtcactctggagaatgtgcagctcacgctaaatgatctgttgcagaacaaccacctgataaccggcggttga

SEQ ID NO: 368249 - DNA, 528 bp, Salmonella enterica
atggggtgttttcgatatcagattacctatgaattcacgacacttatgacgaagaaaaaagcacataaaccgggctcagccaccatcgcgctgaataagcgcgcccggcacgaatactttatcgaagaagagttcgaggctggtctcgccctgcaaggctgggaagtaaaatctctgcgcgcaggaaaagccaatatcggcgacagttacgttatcctcaaagatggcgaggcctggctgtttggcgcaaactttacgccgatggcggtcgcctcgacacatgtcgtatgcgacccaacccgaacccgcaaactgttgttaaatcagcgtgagcttgattcactgtatggccgtattaatcgtgaaggttatactgtcgtcgcgctttctctgtactggaaaaatgcctggtgcaaagtgaagatcggcgtggcgaaaggtaaaaaacaacatgataaacgttccgatcttaaagaacgtgagtggcaactggataaagcacgcattatgaaaaatgcaggccgataa

SEQ ID NO: 368250 - DNA, 438 bp, Salmonella enterica
atgcctcagattagtcggactgctttagtcccctacagtgcggaacagatgtatcagttagtgaatgacgtgcaatcgtatccccagtttttgcctgggtgtgttggtagtcgcgtcctggagtcatcgccagcacagatgacggcggctgttgacgtgtcgaaggcgggtatcagcaagacgtttacgacgcgtaatcagctaacgcgtaaccagagtattctgatgcatctggtggatggcccctttaaaaagctgatcggcggctggaaatttaccccgctcagccccgaggcgtgccgcattgagtttcagcttgattttgagtttaccaataaactcattgagctggcgtttggtcgtatattcaaagagttagcgtccaacatggtgcaggcgtttacggttcgcgccaaagaggtttaccgtgccggataa

SEQ ID NO: 368251 - DNA, 291 bp, Salmonella enterica
gtgccggataaacttgtggttgaagtggcttatgcgctgccggaaaagcagtatttgcagcgcgtaacgctggaggagggcgcgacggtcgaagaggcgattcgcgcttccggcttgctggaattgcgcacggatatcgatctggcgaaaaataaagtaggtatctacagtcgtccggtaaaactcaccgatacggtgcaggatggcgatcgggttgaaatttaccgtcccttaatcgccgatccaaaagcgttacgccgccagcgcgccgaaaaatcggctggcagataa

SEQ ID NO: 368252 - DNA, 339 bp, Salmonella enterica
atgcgctgtaaaacgctgactgctgccgcagcagtactcctgatgttgaccgcaggctgttccactctggagcgagtggtttaccgacctgacatcaatcaggggaactatcttacacctacggatgtcgccaaagtgcgtgttggtatgacgcaacaacaggttgcgtatgctttaggcacgccgatgatgaccgatccttttggtacgaacacctggttttatgtcttccgccagcagccaggacatgagaacgtgacgcagcagactctgacgctcacctttaacagcagcggcgtgttaaccaatattgataacaaaccggcgttgacgaagtaa

SEQ ID NO: 368253 - DNA, 1662 bp, Salmonella enterica
atgttggcgcaactgaccatcagcaattttgctatcgttcgcgagcttgagatcgattttcagagcggaatgaccgtcattactggtgaaaccggcgcgggtaaatctattgcgattgatgccctgggtctgtgtctgggcggtcgcgctgaggccgatatggtccgtaccggagcgacccgcgccgatttgtgtgcccgctttgcgctgaaagacacgcctgcggcattgcgctggctggaagaaaaccagcttgaagaaggtcgcgaatgcttacttcgccgcgttatcagcagcgatggccgctcacggggctttattaacggcaccgctgtgcccctgtctcaattgcgcgagctcggtcagttgctgattcaaattcatggtcaacatgcgcaccagcagcttaccaaacccgaacagcaaaaatcgctgctggatagctatgccaacgaagccgctttagcgcagcagatggctgcccgctaccaattatggcatcaaagctgccgcgatcttgcccatcaccagcaacaaagccaggaacgcgccgcgcgcgcagaactgctgcaatatcagttaaaagagttgaacgactttaatccgcaggccggtgaattcgagcaaattgacgaagagtacaaacggctggccaacagcgggcagttgcttacgaccagccagaacgctctggcgctactcgcggacggcgaagacgttaacctgcaaagccagttatatagcgcaaaacaactggttagcgagctggtaggtatggacagcaagctttccggcatcctggatatgctggaagaagccactatccaactcaccgaagccagcgatgaattacgccactattgcgagcgtctggatttagaccccaatcgcctgtttgagcttgaacagcgcatcgctaaacaaatttcgctggcgcgaaaacatcacgtcagcccggaagcgctgccgcagctttatcagtcactgctcgaagaacagcagcagctcgacgatcaggccgattcgctggaaacgctaacgctggcggttaataagcatcaccaacaagcgctggaaacggcgcaagcgctgcatcaacagcgtcagttttacgcccaggagctggggcagttgatcactgaaagtatgcatttactttcgatgccgcacggtctgtttactatcgacgtgaaatttgatgagcatcatctgagcaacgacggcgccgatcgcgtggagtttaaagtgacgacaaacccgggtcagccgctgcagcctatcgctaaagtcgcgtctggcggtgaactgtcgcgcattgcgctggctattcaggtgattaccgcgcgcaaaatggaaacgccggcgctaatttttgacgaggtcgatgttggcatcagcggcccaaccgccgccgtggtcggtaaactcctgcgtcagcttggcgaatccactcaggtgatgtgcgtcactcacctgccacaggtagccgggtgcggtcaccagcacttctttgtcagtaaagaaacagacggggcaatgaccgaaacccatatgcaaccgttggataaacgtgcgcgtttacaggaactggcccgcctgttgggaggaagtgaagttacgcgtaatacgctggcaaacgcaaaagaactgctggcggcgtaa

SEQ ID NO: 368254 - DNA, 765 bp, Salmonella enterica
gtggagcaacaaatcgcccacgaattacagctaaaaaatgtgccaaccggcacgctggcggaaattggtcaacaggcggatctggcggtagtcgtgggcggcgacggcaatatgcttggcgcagcgcgtacgctggcgcgttataacatcaatgtgattggcattaaccgcggtaatcttggcttcctgaccgatctcgatccggacaacgccctgcaacaattatctgatgtgctggaaggacgctatatctccgaaaaacgttttctgctggaagcgcaggtctgccaacaggaccgccagaagcgtatcagcacagccattaatgaagtggtgctgcatccgggaaaggtggcgcatatgatcgaattcgaggtttatattgatgaaaccttcgctttttcacagcgatctgatggtctgatcatttctacgccgaccggctccaccgcctattcgctctccgcaggcggccctattctgaccccttcactggatgccatcaccctggtgccgatgttcccgcataccttgtcggcgcgcccgttagtcattaacagcagtagcacgattcgtttgcgtttttcgcatcgccgtagcgatctggaaattagctgcgacagccagatagccctgcctattcaggaaggagaagatgtgctgattcgccgctgcgactaccatctcaacctgatacatcccaaagactacagctatttcaatacattaagcacaaaactcggctggtcaaaaaaattattctaa

SEQ ID NO: 368255 - DNA, 783 bp, Salmonella enterica
atgtgtcgtgagtgcggtgggatgacgcggatgccccacaatgccgatacacttgaaatgattattcatttttctgaggtccttgtagcgaagattgatgacaatgtgagtacttcccttgaaaccctgaatctgatccccataataagcgaagttagcgagatgaatgcgaaaaaaaacgcggagaaattcatgagtagtaaagaacagaaaacgcctgaggggcaagccccggaagaaattatcatggatcagcacgaagaggttgaggcagttgaaccaaacgattctgctgagcaggtggatccgcgcgatgaaaaaattgcgaatctggaagttcagcttgcagaagcccagactcgcgaacgcgacaccgtgttgcgcatcaaagcggaaatggaaaacctgcgccgtcgtactgaacaggatatcgaaaaagcgcataaattcgctctcgagaagttcgtcaacgaattgctgccggtcatcgatagcctggatcgcgcgctggaagtcgcagacaaagccaatccggatatggcggcaatggtcgaagggattgagctgacgctgaagtctatgctggatgtggtgcgtaagttcggcgtggaagtgattgctgagaccaacgtgccgctggacccgaacgtgcatcaggcgattgcgatggtggagtcggaagaggttccggcaggcaatgtgctgggtattatgcagaaaggctatacgctgaacggtcgtaccattcgcgcggcgatggtgactgtagcgaaggcgaagtaa

SEQ ID NO: 368256 - DNA, 606 bp, Salmonella enterica
atgtcagaagattatgtaattgaatgggataagaattttgcagacgacctcaacgtcgtcgccaacgtttttttatcacacaacccaaccttatggcccactattttctctcaactttcgacgcaacctgaaatctttgaagacgaagatgaagacgaatatgggttgcaggacgtcctggattgtagcggtggcgatctcggaaataacgagctggcacaggcatttttacaagttctacgcggcgaaagatttattcacctcgttgactggaaaggtgaagatgaagaaggcgaactggctaattttgccgcagatcgcttttatgaactcacaaaaaacctgacgaattctgaggaattaagaaatcttcttgtcgaaataacccaagaggatgaaatctccgatgtctgtgaagccggagaccgttaccttgacgagatctttgaacgcatccagaccgaactcaataagaggggcttccagatttttgatctgaatgaaggatctgacacctataatgtggtcgttctgccaatgagcgaatataaaaaaatagaggacttcaacacgccgtggctggaagtgcaggattttttaagctaa

SEQ ID NO: 368257 - DNA, 1242 bp, Salmonella enterica
atggtggtcatctcggcctatttttccggttccgaaactggaatgatgacgctaaaccgttaccgtttacgccatatggcgaagcaaggtaatcgctcggcaaaacgggtagaaaaattactgcgtaaacccgaccgactgataagcctggtgctgatcggcaataacctggtcaacattcttgcctcggcgctcggcacgattgtgggtatgcggctttacggcgacgctggcgtggctatcgccaccggggtactgacgtttgtcgtgttagtttttgccgaagtcctgcccaaaactatcgccgcgctctatccggaaaaagtggcctatcccagcagcttcctgctggcgccgttacagatactgatgatgccgctggtgtggttacttaacaccatcacccgcctgctgatgcgtctgatgggaattaaaacggacatcgtggttagcgggtcgttaagcaaagaggaattacgcactatcgtgcatgaatcccgttcgcaaatctctcgccgcaatcaggatatgctgctgtcggttctcgacctggaaaaggtcagcgtggatgacatcatggtgccgcgtaatgaaattatcgggatcgatatcaatgacgactggaagtctatcgagcggcagctcacccactcgccacacggacgcattgtgctctatcgcgattcgctggatgacgccatcagtatgctgcgcgtgcgtgaagcctggcggttaatggccgagaaaaaagagttcaccaaagagatgatgctgcgcgccgccgatgaaatctattacgtcccggaaggtacgccgctcagtacacaactgattaaatttcagcgcaataaaaagaaagtcggactggtcgtcaacgaatatggcgatatccaggggctggtcaccgtggaagatattctcgaggagatcgttggcgacttcaccacatcgatgtcgccgaccctggcggaagaggtcacgccgcaaaacgacggttcggtcattattgacggtaccgccaacgtccgggaaatcaataaagcgtttaactggcacctgccggaagacgacgcgcgcaccgtcaacggggtgattctggaggctctggaggaaattccggttgctggcacgcgcgtgcgcattgagcagtacgatatcgatattctcgatgtacaggaaaatatgattaagcaggtaaaggttgtaccggtaaagccgctgcgcgagagtgtggcggagtaa

SEQ ID NO: 368258 - DNA, 792 bp, Salmonella enterica
atgcccgtttttgctttacttgcccttgtcgcctactccttcagcctcgcgctgatcgttcccggactgttgcaaaaaaacagcggctggcggcgtatggctattctttctgcggtcatcgcgctggtgtgccatgctgtcgcgctggaatcgcgtattctgcccggcggcgacagtggacaaaacctgagcctgctgaatgtcggttcgctggtcagtctgatgatctgcacggtgatgaccattgtcgcgtcgcgtaatcgcggctggctacttctgcccattgtctatgcttttgcgctgattaacctggccttcgccacgttcatgcctaatgaatatattacgcatctggaagcgaccccaggcatgatggtgcacatcggtctgtcgcttttctcttacgcgacgctgataatcgccgcgctgtatgcgctacaactggcgtggatcgactatcagttgaagaacaaaaagctggcgtttagtaatgaaatgccgccattgatgagcattgagcgcaaaatgtttcatatcacgcagattggcgtcgtactgctgacccttactctgtgtaccggcctgttttacatgcataacctgttcagtactgaaaatattgataaagccgtgctctctattgtggcatggtttgtctatatcgttctgctgtgggggcattaccatgagggctggcggggtcggcgggtcgtgtggtttaacgtcgcaggcgcgggtattctgacgctggcctattttggtagccgcatattacagcaatttgtaagctaa

SEQ ID NO: 368259 - DNA, 1362 bp, Salmonella enterica
atgtttgataatttaaccgatcgtttgtcgcgcacgctgcgcaatatcagtggccgtgggcgccttactgaagacaacgttaaagagacgctgcgcgaagtgcgcatggcgctgctggaggctgacgttgcgctgccggtagtgcgtgagttcatcaatcgcgtaaaagagaaagcggttggtcatgaagttaacaagagcctgaccccagggcaggagttcgtcaagattgtccgtagcgaactggttgcggcgatgggcgaagagaaccagacgctgaatttagctgcgcagccgccagccgtagtattgatggcgggtctgcagggggcgggtaaaaccaccagcgtcggtaagttgggtaaattcttgcgcgagaagcacaagaagaaagtgctggtcgtctctgccgacgtctatcgcccggcggcgatcaaacagctcgaaacgctggctgaacaggttggcgtggatttcttcccgtctgatgtcggccagaaaccggttgatatcgtcaacgccgcgctgaaagaagcgaagctcaaattctacgacgtgctgctggtggataccgccggtcgtctgcacgttgacgaagcgatgatggacgaaatcaaacaggtccacgcttctatcaagccagtagaaacgctgtttgtcgtcgatgcgatgaccggtcaggatgcggcgaataccgcaaaagcctttaacgaagcgctgccgttaaccggcgtggtgctgaccaaagttgatggtgatgctcgtggcggtgcggcgctctctattcgtcatatcaccggcaagccgattaaattcctcggtgtcggcgagaaaaccgacgcgctggaaccgttccacccggatcgtatcgcctcgcgtattctcggtatgggcgacgtactgtctcttatcgaagatatcgaaagcaaagttgaccgcgcacaggctgaaaagctggcgactaaactgaagaaaggcgacggtttcgacctgaacgacttcctggaacagctcaaacagatgaaaaacatgggcggtatggccagtctgatgggcaaattaccgggcatggggcagattccggacaacgttaaatcgcagatggatgacaaggtgctggtgcgtatggaagcgatcatcaattcgatgacgctgaaagagcgcgcgaagccggaaatcatcaaaggttcccgcaagcgtcgtatcgcgcagggctgtgggatgcaggtgcaggacgttaaccgccttctgaaacagttcgacgacatgcagcgcatgatgaagaagatgaagaagggcgggatggcgaagatgatgcgcagtatgaaggggatgatgccgccaggcttcccgggtcgctaa

SEQ ID NO: 368260 - DNA, 249 bp, Salmonella enterica
atggtaactattcgtttagctcgtcacggcgctaaaaagcgtccgttctaccaggttgttgtcaccgacagccgtaatgcacgcaacggtcgcttcattgagcgcgttggtttcttcaacccaatcgctagcgaaaaagaagaaggcacccgcctggatctggatcgcatcgctcactgggttggccagggcgcaaccatttccgatcgcgttgcggcgctgatcaaagaagtaaaaaaagcagcttaa

SEQ ID NO: 368261 - DNA, 549 bp, Salmonella enterica
atgagcaagcaactcgccgcacaagtacccgctgaaccggttgtactggggaaaatgggttcttcatacggtatccgtggttggctcagagtgttttcctccactgaagacgccgaaagcatttttgactatcagccctggtttatccagaaggcgggtcagtggcagcaggtacagctggaaagctggaagcaccacaatcaggatctgatcatcaagctgaaaggcgttgacgatcgagatgccgcgaatcttctgaccaattgcgaaattgtcgtggattcctcgcaacttcctgcgcttgaggagggagactattactggaaagacctgatgggttgccaggtagtcaccgctgaaggctacgatctcggtaaagttatcgacatgatggaaaccgggtcgaatgacgttctcgtcattaaggcgaacctgaaagatgcatttggtatcaaggaacgactagtaccgttcctcgatgggcaggttatcaagaaagtcgatctcgctactcgtactatcgaagtagactgggatcctggtttttaa

SEQ ID NO: 368262 - DNA, 768 bp, Salmonella enterica
gtgtttattggcatcgttagcctgtttcctgaaatgttccgcgcaattaccgattacggggtaactggccgggcagtaaaaaaaggcctgctgaacatccaaagctggagtcctcgcgacttcgcgcatgaccggcaccgtaccgtggacgaccgtccttacggcggcggaccggggatgttaatgatggtgcaacccttgcgggacgccattcacgcagcaaaagccgcggcaggtgaaggcgctaaagtgatttatctgtcgcctcagggacgcaagcttgatcaagcgggcgttagcgagctggccacgaatcagaagcttattctggtgtgtggtcgctacgaaggcgtagatgagcgcgtaattcagaccgaaattgacgaagaatggtcaattggcgattacgttctcagcggtggcgaactaccggcaatgacgctgattgactccgtcgcccggtttataccgggggttctggggcatgaggcatcagcaatcgaagattcgtttgctgatgggttgctggattgtccgcactatacgcgccctgaagtgttagaggggatggaagtaccgccagtattgctgtcgggaaaccatgccgagatacgtcgctggcgcttgaaacagtcgctgggccgaacctggcttagaagacctgaacttctggaaaacctggctctgactgaagagcaagcaaggttgctggcggagttcaaaacagaacacgcacaacagcagcataaacatgatgggatggcatag

SEQ ID NO: 368263 - DNA, 348 bp, Salmonella enterica
atgagcaacattattaagcaacttgaacaagagcagatgaagcagaacgtaccttccttccgtccgggcgataccgtggaagtgaaagtatgggttgttgaaggtaccaagaaacgtctgcaggcattcgagggcgtggttatcgctattcgtaaccgcggtctgcactctgcattcactgttcgtaaaatttccaacggcgaaggcgttgagcgtgtcttccagactcactctccggtagttgacagcattgctgttaaacgtcgtggtgctgttcgtaaagctaaactgtactacctgcgtgagcgtactggtaaagcggctcgtatcaaagagcgtcttaactaa

SEQ ID NO: 368264 - DNA, 1221 bp, Salmonella enterica
atgaataaggaattttctctgtccagaccaacatttaaacgcacactacggcggattagtataatcagcgtgctgcttacaatgacattgatctggctattaatttgcgttgcgtctgtccttacgctcaaacagtatgcgcaaaaaaatctcgatttgaccgccgccacaatggcccatagccttgaagcggcactggtattttccgataacgcggccgcagcggaaacgctcgccacactgggacgccagggacaattttcagcggcggaggtccgcgataaaaatggccgtactatcgcctcatggcgctatgatgcgcgagccgcagacgataagctcatcggcttaattagccactggctttttccattgccggtatcacaacccgtctggcacaacggcagggccatcggcgaagtacggcttgtcgcccgcgacagccttattggtcattttatctggctatcgctggcagtgctgacaggatgtattctgctggcatccggcattgccctgctgctcacgcgttatttgcacaatggcgttgtggatgcgctgcaaaatattactgaagttgtacacgacgttcgcactaaccgaaatttttcacgccgggtacctgatgagcgtattgcggaatttcacctgtttgcgcaggatttcaatagccttctggatgagatggaagaatggcagctacggcttcaggctaaaaatgcccagttactacgtaccgcgctgcacgatccgctgacggggcttgccaatcgcgcggcatttcgcagctgtattaacgcgctgatgaaggacaattccgctcgtagcagttcggcattgttatttctggatggcgataactttaaatatattaatgatacctggggacatgcggcaggcgaccgcgtacttatagaggttgccaaaagattagcggaattcggtggtagccgttatcaaacttaccgactcggcggcgatgaatttgcgatggtgctttacgatgtacattcggagtatgaagtacaacgtatttgcgcagcgctatcccaggcgtttaatcgaccttttgaactgcataacggccagcggataacgatgaccctgagtattggctttgcgctgacatgggaacatgccactgccgaaaaactacaagaactggccgatcgaaatatgtatcaggctaaacaccggcgtgcggaacgctcgctaaattaa

SEQ ID NO: 368265 - DNA, 519 bp, Salmonella enterica
atgcgtttttctcaccgatttatccttctgttatcgctattattagcaagcttgcctctgtatgctcaacgcgtcacggaagaagagaaatccgtacgcgccatcgtctccggtatcgtcagttatacacactggccggcgttatccgggccgccaaggctatgcatattttcatctgcgcgttttgtcagggtacttagcgaagaggctgattgggctttcccttatcaaccgcttgtcatccgtaccacacaagaagccctgagcgcccgctgtgatggtttttactttggcaatgaatcgccagcttatcaggtggagttaacgcgtcattatccagttaatgccttgttattaattgccgagcaaaataccgaatgtattattggcagcgcattttgtctgatcattaacaatgatgaagtcaaattttccgtcaacctggactccctctcgcatagcggcgtgagagtaaatccagaagtattaatgcttgcacggaatcaaaagcatgaataa

SEQ ID NO: 368266 - DNA, 1071 bp, Salmonella enterica
atgcaaaaagacgcgctgaataacgtacgtatcaccgatgaacaggtattaatgacgccggagcagcttaaagcggcctttccgttgagcctggcgcaggaagcgcagatagcgcagtcccggggaatcatttctgacattattgccgggcgcgatccgcgtctgttggtggtatgcggtccttgttctattcacgatcctgaaaccgctctggaatatgcccgtcgatttaaagcccttgccgcagaggtcagcgatagcctctatctggtaatgcgcgtctattttgaaaagccgcgaactaccgtcggctggaaagggctgattaacgatcctcacatggatggctcatttgatgtggaagccgggttgaaaatagcgcgtcagctactggtggaactggtgaatatggggttgccattggcgaccgaagcgttggatccgaacagcccgcaatacctgggcgatctgtttagctggtcggcgataggcgcgcgcacaaccgaatcgcaaacccaccgcgaaatggcgtctggtctttctatgccggtcggctttaaaaacggcacggatggcagcctggcgacagcgattaacgccatgcgcgccgctgcgcaacctcatcgttttgttggcattaaccaggccggtcaggttgcgttattgcaaacccagggaaatccgcatggccatgtgattttgcgtggcggcaaagcgccaaactatagcccggcagatgtcgctcagtgtgaaaaagagatggaacaggcgggactacgtccttcgctgatggtagattgcagtcatggtaactccaataaagattatcgccgccagccagccgttgccgaatctgtggttgcgcagattaaagatggcaatcgttcaatcattggcttaatgattgaaagtaatattcatgagggtaatcagtcttccgaacagccgcgcagcgaaatgaagtatggcgtttccgtcaccgatgcttgtattagctgggagatgaccgatgccctgttacgtgaaattcataaagatttgagcggccagctggcggtgcgcgtcgcataa

SEQ ID NO: 368267 - DNA, 1122 bp, Salmonella enterica
atggttgctgaattgaccgcgttacgcgatcaaatagatgatgtcgataaagcgttgttgaatttactggctaagcgcctggaactggttgccaaagtcggcgaggtgaaaagccgttttggcctgcctatttacgtgccggagcgtgaggcctctatgctggcttcacgacgggcggaagcagaagcgatcggtgtcccgcccgatctcattgaagatgtcctgcgccgggtaatgcgtgaatcttactccagcgaaaatgataaggggttcaaaacgctttgtccttctctgcgtccggtcgtcattgtgggcggcggcggacagatggggcgtctgtttgaaaaaatgctcacgctgtcgggctatcaggtccgtattctggaacagcaggactggccgcgcgccagggacattgtcgccgatgccggaatggtgatcgtcagcgtgccgattcatgttactgaacaggtcatagcgcaactgccgcccctgccgtccgactgtattctggtcgatctggcatcggtgaaaagcgatccgttacaggcaatgttggcggcccatgatggccccgtgttgggcttgcatccgatgtttggcccggacagcgggagcctggcgaagcaggtggtggtctggtgtgacgggcgtcaaccggaagcgtatcagtggttccttgagcaaatccaggtgtggggcgctcggttgcaccgaattagcgctgtcgagcacgatcagaacatggcttttatccaggcgttgcgccattttgctaccttcgcttatgggctgcatctggcggaagagaacgtccagcttgagcagcttctggcgctatcatcgccgatttatcgactggagctggcgatggtcgggcgtctgttcgcccaggacccgcagctgtatgcggacattattatgtcgtcggagcgcaatctggcgcttatcaagcgttactataaacgttttggcgatgcgatcgggttactggaacaaggtgataagcaggcttttatcgacagttttcgcaaagttgaacactggtttggcgattatgccagacgcttccagaatgaaagccgtgtgttattgcgtcaggcgaatgacagccgaccataa

SEQ ID NO: 368268 - DNA, 909 bp, Salmonella enterica
atgactacgccgcacgttttatttgattatgccggacatttaccagaatgccccacatggagcgaggatgaaagcgcgctgtattggaccgatatcctggaacaggagatccatcgttaccatccggcgagcgggacgcatagcgtgctggcgtttccggaagaggtgggctgttttgccttgcgtgagcagggcggatttattgtggccatgcgtcatgctatctggctggccgataaaaatggattattgcagcgtaaggtttgcgacaatccctctaatacgaaactggcgcgtttcaacgatggcggcactgatggcgatggacgtttttatgccggaacgttctgggcgccaggtgactataatggcgcgttgctgatgcggatcgatcatgacctgacggcaaaagtgatccagtgcgatatccagggacacaacggcctggcgttcagcccggataaccagtggatgtatacctccgatacgccgaatggcgtgatataccgcacgttacttgataagcatggcgatccgggcaagcgtgaactttttcgccattttggcgaaggagaaggacttcccgacggcgcggcgatggatagcgaagggtgctactggagcgcgatgtttgacggctggtgcgtggcgcgtttctcaccgcaaggagagcagctggaagagtaccggttgccggtacgttgtccgacgatggtttgctttggcggcgcagatatgaaaacgctgtttattacaactaccagagaaaatatgtctgctcaggaagtggcggattatccgctctccggcgccatcttcaccctgcaggtagccgtcgcagggatgaagaaaagccgttttattgaacgtcaggcaggttctaccggcacgacgttttcgctgggatag

SEQ ID NO: 368269 - DNA, 1161 bp, Salmonella enterica
atgacatcggaaaacccattactggcgctgcgagataaaatcagcgctttagacgaagagttactggccttactggcaaaacgacgcgcgctggcgattgaagtgggacaagcaaaactactgtcgcatcgtccggttcgggatatcgatcgtgaacgcgcgctgctggacagactcatccatctcggtaaagcccaccatctcgacgcacactacattacccgtctgttccagcttatcattgaagactccgtgcttactcagcaggcgctgctgcaacaacatctgaataatactcaccctcattcggcacgtattgcgtttcttgggccgaaaggctcctattctcatctcgcggcgcgccagtatgctgcacgccattttgagcaatttattgagagcggctgcgcaaaattcgccgatatttttcatcaggtcgaaaccggccaggccgattacgccgtggttccgatagagaacaccagctccggcgctatcaacgatgtgtacgacttattgcaacacaccagtctgtcgattgtcggtgagatgactgtcactatcgatcactgcgtgctggtttccggcgctacagatctgaataccatcgaaacggtgtacagccatccgcagccgtttcagcagtgcagtaaatttttgagccgctatccgcactggaaaatcgactataccgagagtacgtcggcagcgatggaaaaagtcgcgcaggcaaactctccgcgcgtcgcggcgctcggcagcgaggcaggcggcatgttgcacggtttacaggtgctggaacgcattgccgcaaaccagacgcagaatatcacccgctttctggtactggcgcgcaaagccatcaacgtttccgatcaggttccggcaaaaaccactctgttaatcgccaccgggcagcaagctggcgcgctggtcgaagcgctgctggtgctgcgtaaccacaatctcatcatgacgaaactggagtcgcgccccattcacggcaatccgtgggaagagatgttttatctcgatattcaggcgaacctggagtcgcaggtaatgcaaagcgcgctaaaagagctgggcgagatcacgcgctcaatgaaagtgcttggctgctatcccagcgaaaacgtcgtgccggtagaacctgcctga

SEQ ID NO: 368270 - DNA, 339 bp, Salmonella enterica
atgacaatgaacattaccagtaaacaaatggaaattactccggcaatccgccaacatgtcgcagaccgtctcgccaaactggaaaaatggcaaactcacctgattaatcctcatatcattctgtctaaagagccacagggctttattgctgacgccaccattaatacaccgaacggacatctggtcgccagcgcaaaacacgaagatatgtacaccgctattaatgaattgatcaacaagctggaacggcagctcaataaagtgcagcataaaggcgaagcccgtcgtgccaccgcatcggtgaaagatgccagcttcgtcgaagcagaagaagagtag

SEQ ID NO: 368271 - DNA, 738 bp, Salmonella enterica
atgacgcgcatgaaatatctggtggcagcagccacgttgagcctgtttctggcgggttgctcgggttcaaaggaagaggtgcccgataatccgccgaatgaaatctacgcgactgctcagcaaaagctgcaggacggtaactggaaacaggcaataacgcaattggaagcgttagataatcgttatccattcggaccgtattctcagcaggtgcagttggatcttatctacgcctattacaaaaacgccgatttgccgctagcgcaggccgccatcgatcgttttatgcgtcttaatccaacgcaccctaatattgactatgtcatgtacatgcgcggcctgacgaacatggcgctggatgatagcgcgctgcaaggtttctttggcgtcgatcgcagcgatcgcgatccgcaacatgcgcgggcggcgttcaatgacttttcgaaactggtacgcagctatcctaatagccagtacaccaccgacgccactaagcgtctggtattcctgaaagaccgtctggcgaaatatgaatattccgtcgcagagtactataccgcgcgcggcgcatgggttgcggtcgtaaaccgggtagaaggtatgctacgcaattatcctgatacgcaggccacgcgcgatgcgttgccgctgatggaaaacgcctatcgtcagatgcagctgaatgcgcaggctgacaaagtcgcgaaaattattgccgctaacagcaaaaacacctga

SEQ ID NO: 368272 - DNA, 981 bp, Salmonella enterica
atggcacaacgagtacaactcaccgcaacggtctccgaaaaccaactcggtcaacgcttagatcaggctttggccgaaatgttcccggattattcacgttcgcgtataaaagaatggattttgaatcagcgcgtgttggtcaatggtcaactttgcgataagccaaaagaaaaagtgttaggcggcgagcgggtggctattgatgcggagatcgacgaagagattcgttttgaagcgcaggatatcccgttagatattgtttatgaagatgacgatattctggttatcaacaaaccacgcgatctggtggtacatcctggcgcgggtaacccggacggtacggtactgaacgcgttgctacattattatccgccgattgcggatgtcccgcgcgcgggcattgtgcatcgtctggataaggacacgacggggctgatggtggtggccaaaaccgttccggcgcaaacgcgcctggtggagtctttgcagctgcgcgagatcacccgcgaatatgaagcggtcgcgatcggacatatgacggcgggaggaacggtgaatgaacccatcagtcgtcacccgaccaaacgtacccatatgtcggtgcatcccatgggcaaaccggcggtgacccactaccgcattatggaacatttccgtgtgcacacgcgtcttaggttgcgtctggagaccgggcgtacgcaccagatccgcgtgcatatggcgcatattacgcacccgttagtgggcgatcaggtctacggtggtcgtccacgtccaccgaaaggcgcatcggaagaatttatttccacgctgcgtaagtttgaccgccaggcgctgcatgcaacaatgctgcgtctctaccatcctgtatcgggtatcgaaatggagtggcacgcgccgattccacaagatatggtggaccttatcgatgcgatgcgcgccgattttgaagatcataaagatgatgtggactggttatga

SEQ ID NO: 368273 - DNA, 732 bp, Salmonella enterica
atgaatgcactgattgtcccgcagtggccgctgccgaaaggcgtcgcagcctgtagttctacccgtattggcggggtgagtttaccgccttacgactcgctgaatctgggcgcgcattgcggcgataacccggagcatgttgaagagaaccgcaagcgtctgtttgcggcgggcaatctgccttcgaaacctgtctggcttgaacaggttcacggtaaaaatgtgttgaggcttaccggagaaccttatgcctccaaacgtgcggatgcgtcttacagcaatacgccaggaaccgtctgcgcggtaatgacggcagactgcctgcctgtgctattctgtaaccgtgagggaacagaagtggcggcggctcatgcgggctggcgcggattatgtgaaggcgtactggaggaaactgtcacctgctttgctgacaaaccagaaaatatcatcgcctggttaggtccggcgatcggcccgaccgcgtttgaagtggggccggaagtgcgtgacgcatttttagcaaaagatgcgcaagccgatagcgcatttttgccgcacggggaaaaatttctggcggatatttatcagcttgcatgccaacgtctggcgaataccggcgttgaacatgtctatggcggggatcgctgcacctttagcgaaagtgagactttcttctcttatcgtcgcgacaagacgacaggtcgtatggcaagttttatttggctgatataa

SEQ ID NO: 368274 - DNA, 2574 bp, Salmonella enterica
atgcgtctggatcgtcttactaacaaattccagcttgctcttgccgatgcccagtcgctcgcgctggggcacgacaaccaattcatcgaacctcttcatttaatgagcgccttgctgaaccaggaagggggatcgatacgtcctttattaacctccgccggcattaatgctggccagttgcgcaccgctatcgatcaggcgctgagccgtttaccgcaggtggaaggcaccggcggcgacgtacagccttcttcggaactggtacgcgtactgaacctttgcgacaagctggcgcaaaaacggggagacaattttatttcgtcagagctgtttgttctggcggcgcttgagtctcgcggcacgttaaccgatctgctgaaatcagccggtgcgaccacggccaatatcactcaggcaattgaacagatgcgcggaggtgaaagcgtgaacgatcaaggggctgaagaccaacgtcaggccttgaaaaaatataccgtcgatctgaccgagcgggctgaacaaggcaagcttgacccggtaattggtcgtgatgaagaaattcgccgtaccattcaggtactgcaacgtcgtaccaaaaacaacccggtgttaatcggtgagccaggggtcggtaaaacggcaattgttgaaggactggcgcagcgcattattaacggtgaagtccctgaaggcttaaaaggtcgccgcgtactggcgctggatatgggcgcgctggtggcgggggcgaaatatcgcggcgaatttgaagagcgtctgaaaggcgtgctgaacgatctggcgaaacaggaaggcaacgtcatcctgtttattgacgagctgcacacgatggttggcgcaggtaaggctgatggcgccatggacgccgggaatatgctgaaaccggcgctggcgcgtggtgaactgcactgtgtgggcgccaccacgctggatgaataccgtcagtacattgaaaaagacgcggcgctggaacgtcgttttcaaaaagtgtttgtcgcagaaccttcagtggaagacaccatcgctattctgcgtggcctgaaagaacgttacgagctgcaccaccatgtgcagatcactgacccggcgattgtggcggcggcaacattatctcaccgctatatcgccgaccgtcagttgccggataaagctatcgacctcatcgatgaagcggcatccagcattcgtatgcagattgactctaagccggaggagctggacagactcgaccgccggattattcagctcaaactggaacagcaggcgttgatgaaagagtctgacgaggcgagtaaaaaacgtctcgatatgctcaacgaagaactggacgataaagagcgtcagtactctgagctggaagaagagtggaaagcggaaaaagcatcgctttctgggacgcaaactattaaagcggagctggagcaggcgaagatcgccatcgagcaggcgcgtcgcgttggcgacctggcgcgaatgtctgaactgcagtacggcaaaattccggagctggaaaaacagctggaagccgcgacccagtcggaaggtaaaaccatgcgtctgttacgtaacaaagtaacggatgcggaaattgccgaagtgctggcgcgctggaccggtattccggttgccagaatgctggaaggcgaacgtgaaaaactgttgcgtatggaacaagagttacacagccgtgtgatcgggcagaatgaagccgttgaagcagtatcgaacgccatacgtcgtagccgtgctgggctgtccgatccgaaccgtccgattggttccttcctgttcctggggccgacgggggtcggtaaaaccgaactgtgtaaagcgctggctaactttatgttcgacagcgacgacgcgatggtgcgtatcgatatgtccgagtttatggagaaacactccgtgtctcgtttggtcggggcgcctccgggatatgtcggctatgaagaaggcggttatttgacggaagcggtacgccgtcgtccttattccgtcatcttgttggatgaagtagaaaaagcgcatccggatgtattcaacattctgttgcaggtgctggacgacggtcggctgactgacgggcaggggagaacggtcgacttccgtaatacggtggtcattatgacttctaacctcggttccgatctcattcaggagcgctttggcgaactggattacggtcgaatgaaagagatggtgctgggtgtggttagccaaaacttccgtccggaatttatcaaccgtattgatgaagttgtggtattccatccgttaggtgagcaacacatcgcttctattgctcagatccagctgcagcgtctgtacaaacgtctggaagaacgtggttatgaaatccatatctccgacgaggcgctgaaactgttgagcgccaacggttacgatccggtctacggggcgcgtccgttaaaacgtgctattcaacagcagatcgaaaacccactggcgcagcaaatcctgtctggtgaactggttcctggcaaagtgattcgccttgaagccagtgatgatcgtattgtggcagtgcagtaa

SEQ ID NO: 368275 - DNA, 432 bp, Salmonella enterica
atgtatatcggtccacacggacacgtcgttattgtggtcgcagacggtaatgcggaaacctttggtcttatggacggcggtgtggatgctgctattacggcatatttcgggtcgcaattacaggaacgggtacagcaaaatatcatccgtgaatacctgggggaacagcccgtcggcaccgcctttgttattgaaacgggtaacagtaaacatccgtggctggttcacgccccgacgatgcgcgttccgctgattattgacggcaccgacgcggtttataatgcaacacgggctgcgttactggcaatttttcagcacaataaaagcgccggagaagaccggaaaattacatctgttgcattacctgcaatgggggccggatgtggtcaggtccccccggacagcgtcgcccggcaaattgtactgatatag

SEQ ID NO: 368276 - DNA, 237 bp, Salmonella enterica
atgaatgatgaagctgcggaggccgcagccagacttcgtgaagctgaaggaacgaaaaacagactcctgcaaataacgtctgaaaaaatcgcgccgttacaggatgcagtggatctggacgaagcaaccaataaagaaaaagcttctcttctggcatggagaaagtaccgggtacaggtaaaccgtgttgatactttaaagcctgtctggccggagaaaccagccagtagtttataa

SEQ ID NO: 368277 - DNA, 123 bp, Salmonella enterica
atgtttgttatccatctggaaggttatctggctgatagcatcaagcgccagttgtggccattgcttcagtacccagtgtgccactacagtgccactacattggtggccgtaggccaaaactga

SEQ ID NO: 368278 - DNA, 615 bp, Salmonella enterica
atgaaaacgcatcatcatccaacaacacttgttcatctgattaatcaggtgggactccttgggatatgcgttgctctggttgtagccttttattatcaactcgtcaggcatgagctgccttgtccaatttgcttattacagcgggctggcctcatcatcgccggttttggctttttatttaacctctgctttggtctacgaggtatacattacgggatggtaattattggcagtatcctgaccggagttatggcatcccggcaaatatgtttgcatatcatgcccggtgacacaggatatggttctgcattttttggattacacttttatacctggactctgattacgtcaattctgattattattgctgttgcggtggttctggcaatcagtagcatgaatgttgcatttcgttcattgaatattaatccggacctgttcagtattgtcggttgggtatttctgttactgattactgccaaccttatttcaactgtactggaatgtggcggaggggaatgtgctgctaacccggtcacatataagctactgtcgaaacaggatattgcctttctgaaaacaggcctcctgacgagggcagttctccggttatga

SEQ ID NO: 368279 - DNA, 159 bp, Salmonella enterica
atgttcatgtttctgccattcttgcttgcactgagcgtggcaatgggggccataaacagaaaggataaagtcagctacattctgtgggccgttttactcatcgtcactattttatcattcattcatcatatgaccaattcgctgactttgtcattttaa

SEQ ID NO: 368280 - DNA, 915 bp, Salmonella enterica
atgcgcaaggtgtcgatatctatattattcatgctagtttcactgacttgggggactacatggttggccatgcgaattgccgttgaaactatccctccagtgtttgcaaccggaatgaggtttatgtttgcagcaccttttttaatcatcattgcatggttaagaaaaaaaacactgttgtttcctcccggacaacgattattccagtttgtgatatgcatcttttatttttgcattcctttctcactaatgatttatggtgaaacctatgtcaactctgggcttgccgccattatctttgcgaatatgcctgtggccgttttgatagcatcggttttgtttctaaatgaaaaagcgaaactaatgcagatcgcgggcttaactatcgcaatcactgcattgacggggatacttcttgaagaaacgaatacaagtacagagagtcactggcagggtatcactgcgcttatttctgctgtgttaatccatgccataatatatacacaatgtaagaaaagaagttgtactgtctctgttatcacatttaatgcgctcccgtgccttttagctgggttgatactttctgcgacaggatggttttttgaaagaccacaagtatcaaccttctcagtacactcaatattagctaccctgtatctcggggcttttgccggagtttttggtatcctgtgctactttgcgcttcagcaaaaggctaatgccttccaggcttcgcttgtatttcttatctttccgctgattgcggtaagtctggaagactatatttatggatatgctatttcaacacactcaatgctgcttattataccattagttatcgggatatttcttactcttgtcgccagaaatatccctgtaaccagcagatgccgggataactcatcacagaaataa

SEQ ID NO: 368281 - DNA, 1161 bp, Salmonella enterica
atggacgaaaagaaactcaaagcccttgcggttgaactggctaaaggccttaataccgaagccgacctcaatccgttttcccgtatgctgacgaaattaaccgtcgaaacggcgctcaatgcggagctggctgaccaccccgggtatgagaaaaatgcgcccaaaacaggctcaaacacccgcaatggctactcgtccaaaacggtgttgtgcgatgacggcgagatagaactgaacacgccgcgtgaccgtgaaaataccttcgaaccgcagctgattaagaagcaccagacgcgcattacgcagatggacagccaaattttatccctctacgccaaaggcatgactacccgcgaaatcgtcgccaccttcaaagagatgtacgacgccaatgtgtcaccctcgctgatatctaaagtcaccgacgccgtaaaagagcaggtcactgagaggcaaaaccggcaaccggatgcgctgtaccccattgtttatatggactgcattgtcgtcaaagtccgtcagaatggcagcgtaatcaacaaagccgtcttcctggcactgggtatcaacaccgaaggccagaaagagttactgggtatatggctggccgaaaatgaaggcgaaaagttctggctaagcgtgctgacggagctgaaaacccggggcgttcaggacatcctgattgcctgtgtggatggtctgaagggcttcccggatgcgataaacagcgtcttcccgcaaacccatatccagctgtgcattatccatatggtgcgtaacagcctgaaatacgtagcctggaaagactacaaagccgtcaccagcggccggaagatggtctatcaggccccgaccgaagaggcggcactgatggcgatggatgcgttcgcgaaagcccgggacgataaatatccgcaaatcagcaaaagctggcgtgcgcactgggaaaacctcaatacgctcttcagttatccgccggatatccgcaaggccatctacacgacaaacacaatcgaatccttgaacagcgtgatccgtgccgcgattaagaaacgcaaggtgttcccgacggatgactcagtacgaaaagttatttatctggcaatcaaggatgcgtcaaaaaatggagtatgccgatccagaactggtggctggcgatga

SEQ ID NO: 368282 - DNA, 420 bp, Salmonella enterica
atgaacattcaaatcacacatcaagttactgaatttgataaagaagaactattagccggattaagaagctacaatgctcagttcgtcgattttagtaaaaatgggcagcttggggtctactgcagaaacgaaagcggcgaaatggtaggcggattaattgctgacagaaaaggtccgtggctctgcatcgactatctttgggtaagtgaatctgcaaggaactgcggtctggggagcaaacttatggcgatggccgaaaaagaaggtttgcggaaaggctgtgttcatggacttgtagatacctttagcttccaggctctccctttttatgaaaaacagggttatatacttcaaatgtcgctaccggactttcctaaagtaggttcgcaaaggcattatttaattaagctcggtttatag

SEQ ID NO: 368283 - DNA, 477 bp, Salmonella enterica
atgagcaaggatgaaatcagttatcaaattctttaccggtactctctggaaaagctatacagtactcttgccagaagagtagataacgtgctgtcattcgccctcgtttttctcggggtcggcgtcaccataaacgtcgggagtccctttattctggggccaggcattgtgggtatcgccatactaaaaagagtactccgcttcggcacgcgatcagcacaggccgaccggcagtcccgcgcctggctgaaactttttaatactcagcaccgctttccttcagataaaacactgttccttgccttcacatcgcttgagcaagacgcgagtgaagtatggtccatgcttattggtcctgccatcgtcatgactgagaccgccctcggaaaaacgcccattgagccattgacggcgggtgaaaaactctgtgcatttttgagcggcgcgacgaaatcccagctagcagatcgcaattga

SEQ ID NO: 368284 - DNA, 396 bp, Salmonella enterica
atggaattacagcttatgcttaaccactttttcgagcgcgtcagaaaggatgcaaatttcaacgcatttctaatcgatctggaatataataatatcgcttattacatctattttgttgctaccggcaatgtgaaaattatcactcatgcaggccacttcatttctattaaaagcaatagaaagctgattaaagtcaattcaacaccgaatacgcaattaataaaattgatttcagctaaacacttttcgggggagcattcctatgaaaaatactgtactgatctggcaacggcaggcgtttttaaatggattgttgaattaaaccaaaaaactcgacaatactggtcgaaagacaaccaattattatatatagaaaatgtggtcatgccgctttaa

SEQ ID NO: 368285 - DNA, 723 bp, Salmonella enterica
gtgactaacataacactatccacccagcactacagaatccatagaagtgacgttgaaccagtaaaagaaaaaacaacggagaaggacatttttgcaaaaagtattactgccgttagaaatagctttatcagcctgtcgacgagtctgtcagatcgttttagcctgcatcaacaaacagacataccgactacccattttcatcgtgggaacgcttctgagggtagggcggtattaaccagtaaaactgttaaagattttatgctgcaaaagctcaatagtctggatatcaaaggtaatgcgagtaaagatccggcctatgctcgtcagacatgcgaagccatattatcagccgtgtacagtaataataaagatcaatgttgtaaattactcatcagtaaaggggtcagtattaccccctttttgaaagagataggagaggctgcgcagaatgcggagctacctggggagataaaaaatggcgtatttactccaggtggggcaggggcgaatccttttgtcgtccccctcattgcttccgcgagtattaaatatccgcatatgtttataaatcataatcagcaggtatcttttaaagcgtatgctgagaaaatcgttatgaaagaggttacgccgctgtttaataaggggacgatgccaacgccacaacaatttcagttaactatagaaaatattgcgaataagtatcttcagaatgcctcctga

SEQ ID NO: 368286 - DNA, 165 bp, Salmonella enterica
atgccgcctttaaaaaaaattgtgctgcgcctgtttgtgggggcgatggtcgccacggtaacgacacctgcattggcgctggtttgccttgaggatcactccgctaaagagtgtgctatatcgtgtgctgaggcgatgtggtttatgtttccgatatgtttttaa

SEQ ID NO: 368287 - DNA, 234 bp, Salmonella enterica
gtggtttatgtttccgatatgtttttaaggaggaagagtattgaaggtgaacaggcgatagtgagtagctcgctgcgccaggggataaccctcccctggcgcagccagttatattttattgcgatgataacaaagcatttactcgctaatggtgaaattcgctatttacaacagcgcacgcttactaagcaaaaaaatctgcacacgctatctttttatatctgtcctggataa

SEQ ID NO: 368288 - DNA, 651 bp, Salmonella enterica
atgatgcggcctgaagagatttatcagcgaatagaggcaaagaattggcggcatgtctgggtggttggcgatattcacggctgtttttcaatgttaatgaaaaggttacgtgagtgtcgatttgatccgcaacaagacttgttagtttctgtgggcgatctcattgatagaggcccggacagcttgggttgcctggctttactgcgtgagtcctggatgatggcggttcgcggcaatcatgaacaaatggcgctggatgcgcgggcctcattgcagtcgacgctgtgtttgatgaatggtggcgactggtttacccgcctgaccgctgaacacgctgcgcaagctgaagcgctttttatcctttgtcagcggctgccctggatactggaagttcgctgccgccatagcacgcatgtgatcgctcatgctgattaccccgcgtcaacctatcaatggcaaagaaaagtcgatttacatcaggttctctggagtcgcgaacggctcataaataagcgcggcgggattagcggagccgatcatttttggtttggccatacgccgttgcgccggcgcatggattttgccaacgtacactatattgatacgggcgcggtatttggcgggcaattgacgttagcgcggatacaatag

SEQ ID NO: 368289 - DNA, 192 bp, Salmonella enterica
atgttcgcgctggtactttttgtatgttacctggatggaggatgcgaggatattgtcgtggacatctacgataccgagcagcaatgtctttattcgatggacgatcaacggattcgccatggcggctgttttccggtagaggattttatcgatggcttctggcggcctgcgcagcaatatagcgatttttaa

SEQ ID NO: 368290 - DNA, 240 bp, Salmonella enterica
atgatgaaaaccagtgtgcgcattggcgcttttgaaatcgacgatgccgaattacatggcgaatcgccgggggagcgaacgttaacaatcccctgtaaatccgatccggatttatgtatgcaactggacgcctgggatgccgaaaccagcgttcccgccattctcaacggggaacattccgttttgttccgtactcattacgatcctaaatctgatgcctgggtcatgcgtcttgcctga

SEQ ID NO: 368291 - DNA, 1542 bp, Salmonella enterica
atggggtaccgctctgccacgttaaacacccggctccggcgtactcgcgccggagcgttttatgctacactgcgcgcctgtttttttgccggcgatacacctgtggctcaacacgctgtctattttcctgacgcttttctgacgcaaatgcgtgaagcaatgccttccacgctctcttttgatgaatttatttcggcctgccaacgcccgttgcgccgcagtatacgcatcaatacgcttaaaatatccgtggctgatttccttgccctaatcgcgccctacggctggtcgctcacgccaattccgtggtgtcatgaaggattctggatcgagcgcgatgatgaagaggcattgccgcttggcagtaccgctgagcatttaagcggcctgttttacattcaggaggccagttcgatgctgccggtcgcggccctgttcgccgatgataatcatccgcagcgggtcatggatatggcagcggcgcctggctccaaaaccacgcagatcgctgcccgcatggggaaccgcggcgccattctggccaacgaattttcggccagccgcgtcaaagttctgcacgctaatatcagccgatgtggaatcgccaataccgcactgacgcatttcgatggccgcgtatttggcgctgcgttaccggagatgtttgacgctatcctgctggatgcgccctgctctggcgaaggcgtagtacgtaaagatcctgatgcgctaaaaaactggtcgccagaaagcaatctggatatcgcggcgacacagcgggaactgctcaacagcgcttttcatgctttacgacccggcggcacgctggtctactccacctgcacgttaaatcgccaggaaaacgaagaggtctgcctctggctgaaagagacctacgccgacgccgttgaatttttgccgctgggtgatctgtttcctgacgctgaccgtgccctcaccccggaaggcttcctgcacgtcttcccgcaaatttacgactgcgaaggattcttcgtcgcacgtctgcgtaaaatgtcatcccttccagccatgcccgcgccggggtataaagtgggggcgtttccttttacccccctcaaaggccgcgaagcattacacgttacccaggcggccaacgccgtcggactgttatgggatgaaaatctccatctttggcagcgtgaaaaagaggtctggctgttcccggcagaaattgaatcactgatcggaaaagtccgtttttcccggctcggcattaagctggccgaaagtcataataaaggctatcgctggcaacatgaggcgacgatagcccttgcctgcccgactcatgctcacgcgttcgaactttctgtgcaagaggcggaggagtggtatcgcggtcgggatatttatccgcaaacaccccctgccgctgatgatgtcctggtgacgttccagcatcagccacttggtctggcaaaacgtatcggcgccagaataaagaacagttacccgcgtgaactggtacgtgatggcaaactctttactggtaatagttaa

SEQ ID NO: 368292 - DNA, 2634 bp, Salmonella enterica
atgagtcaggaaacgcccgcttcgaagactgaagcgcaaattaaaaccaaacgccgtatttcacctttctggctgctaccgcttatcgcgctaatgatcgcggggtggctggtatgggatagctaccaggatcgcggcaatagcgtgactatcgattttatgtcggcggacggtatcgtaccgggccgtactcccgtgcgttatcagggagtagaagtcggcaccgtggaagatgtcagtctgagcaaagatctgcgcaaaattgaagttcgcgtcagtatcaaatcagatatggaagatgcgttgcgcgaagagacgcaattctggctggtgacgcccaaagcctcgctggcgggcgtttccggcctggatgcgttggtcggcgggaattacatcggtatgatgccaggtaaaggcaagcccagagatcatttcgtcgccctggatacacagcctaaataccggcttagcaacggcgatctgatgattcatctcaatgcgccggatctcggttcgcttaatagcggttcactggtctatttccgtaaaatccctgtcggacgggtgtatgactattcgattaaccctaacaaacagggcgtgacgattgacgttctgattgagcgacggtttaccgatctggtgaaaaaaggcagccgtttttggaatgtctccggcattgacgccgatctaagcctgagcggcgcgaaggtgaaactggagagcctcgcggccctggtcaatggcgcgattgcgtttgactcaccggacaattccaaacccgccgcccaggatgacacgttcggcttatataaagatttagcccacagccaacgaggggtaatcgttaaacttgagctgcccagcggagacggtctgaaagcggaatctacgccgctcatgtaccagggactggaggtgggtgagctttctaaactgacgctcaaccctggcggtaaagtcaccggagagatgaccgtcgatcccagcgttgttccgctgatgcgggaaaatacgcgtattgagttacgcaatcccaaactgtcgctgagcgacgcgaatatcagttcgttgttaaccggaaaaaccttcgagctggtgccgggcgacggcgaaccgcgcagtgaatttgtggtggtgccgggtgaaaaggccctgctgcatgaggcgaatgccttaaccctgacgctgacggccccggaaagttacggcatcgaaccgggccagccgttaattttacatggcgtaaaaattggccaggtcattgagcgcaacttatccagtaaaggcgtgtcattcaccgtcgcgattgaaccgcagcaccgggatttggtacagggcgacagtaaattcgtggtcaacagccgggtggatgtcaaagtcggccttgacggcgtagagttcctcggcgccagcgccagcgagtggattgacggcggaattcgtattttacccggtacgagcgggaagatgaaatccacctacccgctctatgctaacctggaaaaagcgctggaaaatagtctcagtgacttaccgactaccaccctgacgctgacagccgaaacgttgccggatgtccaggcaggttccgtcgtgctgtatcgaaaatttgaagtaggcgaagtcatcaccgttcgcccacgcgccaatacctttgacatcgacctgcatattaagccggaatatcgccacctgttaaccagcaatagcgtgttctgggcggaaggcggcgcgaaggtgcaacttaacggcagcggcctaacggtacaggcctcgccactctcccgcgcgctgaaaggggccattagttttgataacctgagcggcgccagcgccagtcggcgcaaaggcgataaacgcattctttatgcttcagaaacttccgcccgcgcggtaggcggacaaattacgctgcacgcgttcgacgctggaaaattggcggaagggatgcccattcgttacctcggtattgatatcggccagatccagacgctggaattgatcaccgcacgtaatgaagtgcaggcaaaagccgtactttatccggagtatgtacagacatttgcccgcgccgggacacgtttttccgttatcacgccacaaatttccgcggcgggcgtcgagcatctggatacgattctccagccctatattaacgttgagccaggacgcggcgcggcacggcgcgactttgaactgcaggaagccacgattaccgactcacgctatctggatgggttaagcatcgtcgtggaggcgccagaagcaggctcgcttaatattggtacccccgtcctgtttcgcggtatcgaagtgggaaccgtcaccggaatgtccctggggtcgctctccgatcgcgtgatgatcaccttgcgcatcagtaagcgttaccaatatctggtgcgtaataactccgtattctggcttgcctccggctatagtctcgactttggtctgacaggcggcgtggtgaaaacggggacatttaatcagttcatccgtggcggtatcgccttcgctactccaccaggtacgccgctggcgccaaaagcgcaagccggtaagcatttcctgttacaagagagcgaaccgaaagagtggcgtgaatggggtaccgctctgccacgttaa

SEQ ID NO: 368293 - DNA, 1284 bp, Salmonella enterica
atggctctgaacacctcacacgtcacgccaacaaaaaagctaacgatcaggtcaattagcgaagcgctgccgcgcagccactaccagcgctgccctgaatgcgacatgctgttcagcttgccggagatgagcgctcatcaaagcgcttattgtcctcgttgccaggccaaaattcgcgatgggcgcgactggtcgctgacgcggctgaccgcgatggcggtaaccatgctgctattgatgccgtttgcctggagcgaaccgttactccatatctacctgttgggcgtacgcattgatgccaatgtgatgcacggcatctggcaaatgacgcagcagggcgatccgttaaccgccgcaatggtgctcttttgcgtggtgggcgcgccgcttattctggttttttcaattgcttacctgtggtttggcagcctcctcggcatgaatctgcgtccagtcctgctgatgctggaaaaactgaaagagtgggtgatgctggacatctatctggtcggtattggcgttgcctctatcaaagtgcaggactatgcctttctgcagccgggcatcgggcttttagcgttcgtctcgttggtggttcttagcattctgactatgattcatctgaatgtggagcaactatgggaacgattttatccgcagcgccctgctcaacgtgcggacgaaagattgcgcgtctgtcttggctgccactttagcggctatccggatgcgaaaggacgctgcccgcgttgtcatattccgctacggttacgcagaaaacagagcatacagaagtgttgggcggccttgctggcgtctattgtctttttgctgccggcaaacctgctgcctatctcggtaatctacattaatggcgggcgtcaggaagatactatcctgtcgggcattatgtcgcttgccagcagcaatatcgccgtcgccgccgtcgtttttatcgccagtattttggtgccgtttaccaaagtcatcgtgatgtttacgctactgttgagtatccattttaaatgccaacagggactgcggacgcgaattctgttgctgcgtctggtgacatggataggccgttggtcgatgctggatcttttcgttatctcgttaaccatgtctctgattaatcgcgatcagattctggcttttactatgggaccggctgcgttttatttcggcgcagcggtaattttgactattcttgcagtggaatggctggatagccgcttactttgggatgcacatgagtcaggaaacgcccgcttcgaagactga

SEQ ID NO: 368294 - DNA, 570 bp, Salmonella enterica
ttgagcaagaacgcatttaatgcttattttaatagcctgtgtttaggagtaagaccacgaagtgattatataatgagcaaaacagaactatacgcggcgttaaaccgcgattttcagtcgttaatggcaggtgaaaccagctttctggccacgctggcgaataccagcgcgctactgttcgaacgccttaccgaggtgaactgggcgggattttatctcctcgaaggcgatacgctggtgttggggccgtttcaggggcgaatcgcctgtgtgcggattccggttggtcgcggcgtgtgtggcgcagcggtagcgcagaataaggttcaacgtattgatgatgttcatgcgtttgacggccatattgcctgtgatgccgccagcaacgccgaaattgtgctgcctgtcacggttggcgaacggattatcggcgtgctggatatagatagcacagcgtttggccgttttaccgaagaagatgaacacggcctgcgtacgctggtcgcacagcttgaaaccgtgcttgcaacgacggattacaaaaaattctttgcgagcgttgcaggataa

SEQ ID NO: 368295 - DNA, 687 bp, Salmonella enterica
atggaaaatcaacctaagttgaatagcagtaaagaagttatcgcgtttctggccgagcgttttcctcactgttttagtgcggaaggcgaagctcgcccgctgaaaattggtatttttcaggatctggtagagcgagttgggggcgaaatgaacctcagcaaaacgcaacttcgttccgctttacgtctttatacttcaagctggcgttacctgtacggcgttaagccgggcgcaacgcgcgtcgaccttgatggcaatccgtgcggcgagctggaagaacagcatgtcgaacatgcgcgtaagcagcttgaagaagccaaagcccgtgttcaggcgcagcgcgcagagcagcaagcgaaaaaacgcgaagctgccgcggcggctggcgaaaaagaagacgcgccgcgacgcgagcgtaaacctcgcccggtagcgcgtcgtaaagaaggcgctgaacgtaaacctcgcgctgataaaccgacgacgaaagcgccgcgtgcgcctcgcgaagagaagcacacgccggtttctgatatttcagtattgaccgtagggcagtccctcaaggtgaaagcgggtaataatgcgatggatgccaccgtattagaaatcaccaaagatggtgtccgtgtacagctgaattcgggtatgtctttgattgtacgcgcagaacacctggtgttctga

SEQ ID NO: 368296 - DNA, 2049 bp, Salmonella enterica
atgaacactttttttaggcttaccgcgttagctggcctgcttgcattagcaggccagtccttcgccgtggaagatattacgcgtgccgatcaaattcccgtactaaaggaagagacgcaacatgcgacggtgagcgagcgcgtaacgtcgcgttttacccgctcccactatcgccagttcgatctggatgaggcattttcggcaaagatctttgatcgctatctgaatcttctcgactatagccacaacgttttgttggcgagcgatgtcgagcagtttgcgaaaaagaaaaccgtgttgggcgatgagctgcgcacgggtaagctggatgttttttacgatctttataacctggcgcaaaagcgccggtttgaacgttaccagtacgcgctaaaagtgctggaacggccaatggatttcaccggaaacgatacgtttaacctggaccgcagtaaagcgccctggccgaaagatgaggctgagctaaatgcgctgtgggatggtaaagtgaaattcgatgagctcagtctgaaactcaccggcaagagcgacaaagaaattcgcgaaacgctgacgcgtcgctacaaattcgctattcgccgcctggcgcagaccaacagtgaagatgtgttctcgctggcgatgaccgcttttgcgcgtgaaatcgacccgcatacgaattatctttctccccgcaataccgagcagtttaataccgaaatgagcctgtctctggaaggtatcggcgcggtgctgcaaatggatgacgattacactgtcattaactcattggtcgccggcggcccagcagcgaagagcaagtcgattagcgtcggcgatcgtatcgtcggcgtagggcaggccggaaaaccgatggtcgacgtcattggctggcgtcttgacgatgtggtggcgctgatcaaagggccaaaaggcagcaaggtccgactggaaatactgccggctggtaaagggacgaaaacgcgtatcatcacgctgacgcgtgaacggattcgtcttgaagatcgcgcggttaaaatgtcggtgaaaaccgtcggcaaggaaaaagttggcgtactggatattccaggcttctatgttggcttgaccgatgatgtcaaagttcagcttcagaagctggaaaaacagaatgttaacagcatcgttatcgatctgcgttcaaacggcggtggggcgctgacggaagccgtttcgctttccggtctgtttatcccttctggtccgatagttcaggtgcgcgacaataacggcaaagtgcgtgaggatagcgacaccgacggcgtggtctactacaaaggcccgctggtggtgctggtcgatcgtttcagtgcctcggcatcggaaatcttcgctgccgcgatgcaggattatggtcgcgcgctgattgtcggtgagccgaccttcggtaaagggacggtacagcaatatcgttcgctaaaccgaatttacgatcagatgcttcgcccggaatggcctgcgctgggttcggtgcagtacaccattcagaagttttaccgtgtcaacggcggtagtacgcagcgtaaaggggtcacgccggatatcatcatgccgactggcaatgaagagacggaaaccggagaaaaatttgaagataacgccttgccgtgggatagcattgatgcggcgaaatacgtgaaatcggacgatttggccccgtttggcccggaattattgaaagaacacaacgcgcgtatcgccaaagatcctgagtttcagtacatcatgaaggatattgcacgtttcaatgccatgaaggataagcgcaacatcgtctctctgaattatgcgcagcgtgagaaagagaacaatgaagaagacgctctgcgtctggcgcgtattaacgatcggtttaaacgtgagggtaaaccgttgctgaagaaactggacgatctgccaaaggattaccaggagccggacccgtaccttgatgaaacggtgaagattgctctggacctggcgcatcttgaaaaagaaaaaccagcggagcaggcggcagccaataagtaa

SEQ ID NO: 368297 - DNA, 882 bp, Salmonella enterica
atgatgcgaatcgcgctcttcctgctgacgaacctggccgtgatggtcgttttcgggctggttctgagcctgacagggatacagtcgagcagcgtgcaaggcttgctgatcatggcgctgctgtttggttttggcggttcttttatttcattgctgatgtccaaatggatggcgttaaaatccgtaggaggggaagttattgaacagcctcgcaatgaaagagaacgctggttgatgaacaccgtagcaacgcaagcgcgccaggccggtatcgccatgccgcaggttgctatctaccatgcgccggacattaacgcgtttgcgacgggcgcacgccgtgacgcctcattggtcgctgtgagcaccggtttgttgcaaaacatgagccctgacgaagcggaagccgtcattgcgcatgaaatcagccatattgccaatggcgatatggtgacgatgacgttgattcagggggtggttaacaccttcgttatctttatttcgcgcattatcgcgcaaattgctgctggttttctgggcggcaaccgcgatgaaggcgaaggaagtaacggtaatccgctaatctatttcgccgttgcgacggtgctggaactggtcttcggtattctggcgagcatcatcaccatgtggttctcccgttaccgtgagtttcatgccgatgcgggatcggcgaagctggttggccgtgaaaaaatgattgccgcgttgcagcgcctgaaaaccagctacgagccgcaagaagcgaccagcatgatggcgttttgtattaacggtaaatcgaaatcgttaagcgagctgtttatgacgcacccaccgctggataaacgcattgaagcgctgcgtagcggtgagtacctgaaataa

SEQ ID NO: 368298 - DNA, 1374 bp, Salmonella enterica
atggaaaaaacacgggccgatggcctgcccctcccgcagagatacggcgctatcctgacgattattatcggtatttcgatggcggttctggatggcgcaatcgctaatgtcgcgctgccaaccattgcgactgatttacatgcctcccctgccagctctatctggattgtcaatgcataccaaatcgccattgtcgtctcactgctttccctgtcttttttaggcgacatgtttggttatcgccggatctacaaatgtggtttagtggtatttctgctttcatcattgttttgcgcgctttcagactcgctgcagatgctgacgctggcgcgcatcgcgcagggatttggcggcgcggcgctaatgagcgtaaacacggcgctgattcgtcttatctacccccagcgtcatctgggacgaggcatgggaattaactcttttatcgtcgcagtctcttccgccgcgggtccgacgatcgccgcagcgattttgtccatctcatcatggaaatggctgtttctgattaatgtcccgttaggtatcatcgcgttaattctggccatacgctttttaccagcaaacatcgcccatgacactaagccgcgctttgacttaccgagcgcggtaatgaatgcgctcacatttggcctgctgattaccgcattgagcggatttgcccagggacagtcgctaacgttgattggcgcagagctgctcgttctggtcgtggtcgggtttttcttcgtgcgccgccagctttctttgcccgtccctttgttacccatcgacttgttacgcattccgcttttttcactctcgatcggcacgtcaatttgctcgttctgcgcgcaaatgttagccatggtctcgctacctttttatctgcaaaccgtgctgggccgtagcgaagtagaaaccggcctgttattgacgccctggccgctggcaacgatggtaatggcgccgctggcgggatacctgatagaacgtcttcatgccggtttgctgggggcgctgggaatggtgataatggcagccgggttgtttgcgctggtcatgttgccagcctccccctccgatctgaatattatctggccgatgatcctttgtggcgcagggtttggcctgttccagtcgccgaataatcacaccattatcacttccgcgccgcgtgagcgcagcggtggcgccagcgggatgctgggcacggcgcgactgttaggccaaagtactggcgccgcgctggtagcgctgatgttgaaccagtttggcgatagcggtacgcatctttctctgctcgcagcggcgatcctggcgactctcgcggcggtggtgagcggtttacgtattacgcaaccacgcgttcaggcgtaa

SEQ ID NO: 368299 - DNA, 792 bp, Salmonella enterica
atggcaaacgcagatctggataagcagcctgattctgtatcttctgtgctgaaagttttcggcattctgcaggcgctgggtgaagagcgtgaaatagggattaccgagctatcgcagcgcgtcatgatgtcgaaaagcaccgtttatcgctttttgcaaaccatgaaaactctgggctacgtggctcaggagggggagtctgaaaaatactctctgacgctaaagctgtttgagctgggcgcgcgagctttgcaaaatgttgatctcatccgcagtgcggacattcagatgcgcgaactgtctcgtctgacaaaagaaactatccatcttggcgcgctggatgaagacagcattgtctatatccataaaattgactctatgtacaatctgcggatgtactcacgtattgggcgtcgtaatccgctgtacagtacggccatcggtaaagtgcttctggcctggcgcgaccgtgatgaggttaagcagattctcgacggcgtagagtataagcaaagcacgggacgcacgattaccagcactgaagcgttgctgccgctgttggatgaagtgcgtgcgcaaggatacggtgaagataacgaagaacaggaagaaggattacgttgtatcggcgtaccggtatttgaccgttttggcgtagtcatcgcagggttaagcatttcgttcccgacgctgcgtttttcagaagaacgcctacaggaatatgtggctatgttacacgccgccgcgcgtaaaatttctgaacaaatgggttacaacgattatcccttctaa

SEQ ID NO: 368300 - DNA, 240 bp, Salmonella enterica
atgcgtttgatcattcgcgcaattgtattgtttgccctggtgtggataggcctgctgatgagcggctatggcatcctggtgggaagtaaagtgaacgctgcggggctgggtttacagtgccattacctgaccgcacgcggcaccagcacggcgcaatatctccataccaacagcggcattattggcttttccgactgtcccattttcagaaaaatcgccaccgtggtggataatggctaa

SEQ ID NO: 368301 - DNA, 144 bp, Salmonella enterica
gtgaaaaaatttcgatgggtcgttctcggcatcgtggtggtagtatgcctgttgctgtgggcgcaggtgtttaatatcatgtgcgatcaggatgtacaatttttcagcggtatttgcgccatcaataaatttattccctggtaa

SEQ ID NO: 368302 - DNA, 288 bp, Salmonella enterica
atgaacgacgttttaaactctggtgcgttttctcttgcatctttaatagtatcaatggtggttctggtggtggggctggcgctctggttctttgtcaaccgggcaagttcccgtgccaacgagcagatagaactgctcgaagcgttgttggatcaacagaagcggcaaaacgcgttgttacgccgcctttgcgaagcaaacgaaccagaaaaagaagcggaacccgcaacagcggcaagcgaaccgaaagaggatgaggacatcattcgtctggttgctgaacgataa

SEQ ID NO: 368303 - DNA, 210 bp, Salmonella enterica
atggcaaagattaaaggtcaagttaagtggttcaacgaatccaaaggttttggcttcattactccggctgacggcagcaaagatgtgttcgtacacttctccgctatccagggcaatggtttcaaaactctggctgaaggccagaacgttgagttcgaaattcaggacggccagaaaggtccggctgctgttaacgtaacagctatctga

SEQ ID NO: 368304 - DNA, 1746 bp, Salmonella enterica
gtgaaaaagaaaagcgacggcgatacccgtaattttacgcccatacgttttgcactactttgcactgccattctgctcagtatggcattgttgttagggcgggtggcatggctgcaaattgttacgccgtcgaaactggtgaaacaagaagatatgcgctcgcttcgtgaagtgaccacggcctctccacgcggcatgatcaccgacagagaagggcggcccttagcggtgagcgttccggttaatgctgtctgggccgatccgaagactatcataagcaaaggcggcgttggctacaatgagcgctggcaggcgctggccagcgccctgcatctgtcgctcagtacgcttgcggaacgggtaaacagtaacccggcaggtcgttttatctacctcgcgcgccaggtttcaccccagcaagccgaatggatagataaactgaatctaccgggtattaacctgcgggaagagtcgcgccgtttttaccctgccggacacgtagcggccaatttgatcggctttaccaatatcgacgggcagggaatagaaggtattgaaaagagctttaacgcgcaactgacgggaaaaccgggctcccgactggtgcgtaaagataaatttggtcacgttattgagaacattacggaagtgaatccggttcctgctcatgaacttcagcttagcattgatgaacgtctgcaaacggttaccgaagatgcgctggataacgccgtcatctggaacaaagcggaatccggcgctgccgtattgattaacatcccaacgggtgaaattctctcgatggcgagctacccggatttcaacccgaacaaccgtgaaggcgcgcagttggacgattttcgtaaccgcgcgattagcgatactttcgaacccggttctactgtgaagccattggtcattatgactgcgttacagcagggcatcgtgcagccggacagcgttatcgatacccatccttttactctcgatggacaccgtatccgcgacgtcggttactatccggaactgacattaaccggcattttgcaaaaatccagcgataccggcgtttctcacctttctctggcgatgccggtgcagaaattaatggatacttataaaagctttggtttcggcgtgcctaccggactgggtctcaccggagagagcagcgggttattaccgaaacgccgttactggagtgatttagatcgcgctaccttcgcttttggctatggattaatggtgacgccgctgcaactggcgcatgtttatgccacgattggcagctttggtatctaccgtccgttatcgatcaccaaagttgatccgcccgtgatcggcacgcgggtaatgccggaagaactggtgcacgaggtggaacatatgatggagagcgtcgcgttgcctggcggcggcggaacaaaagccgcagtaagagactaccgtattgcggtcaaaaccgggacggcgaaaaaaattggcgatgatggtaaatacgtcgataaatatgtggcatataccgcaggcgtcgcgccggcaagtaaccccagatttgcgctggtggtggtgattaataatccgcaaaacggggcttattatggcggcgcggtatctgcgcccgtattcagccagatcatgggcgatgtgctgcggctggaaaatgttgagccagacggtatgccagccgattcagatcaccttctggtgatgcatggcagccacgttgcggttccgggctcgtaa

SEQ ID NO: 368305 - DNA, 810 bp, Salmonella enterica
atgtcgtttacctgtccgctttgccatcagccgcttacgcagattaataacagcgttatatgtccacagcgccatcagtttgatgtggcgaaagagggctacatcaatctgctgccggtacagcataaacgttcgcgcgatccgggcgacagcgccgaaatgatgcaggcgaggagagcgtttcttgatgcgggccattatcagccgctgcgcgatgcggtgattaacctgttgcgcgagcggctggatcagtcggccacggcgattctggatatcggctgcggcgaggggtattacactcatgcttttgccgaggcgttgccgggagtcaccacgtttggactggacgttgctaaaacggcgatcaaagcggcggcgaagcgctattcgcaggtgaagttttgtgtggcgtcaagccatcgactgccctttgccgatgcgtcaatggatgcggtgatcagaatctacgccccgtgtaaggcgcaggaattggcgcgtgtggtgaaacctggtggttgggtcgttaccgccacgccagggccgcatcatctgatggaactaaaagggctcatttatgatgaggtgcgtttacatgcgccgtataccgagcagctcgacggattcacattgcagcagagtacccgccttgcttatcacatgcagctcaccgccgaagcggctgtagcactgttgcaaatgacgccatttgcctggcgcgccaggccagacgtgtgggaacaactggccgccagcgccggacttagctgccagacggatttcaaccttcatctctggcagcgtaaccgttaa

SEQ ID NO: 368306 - DNA, 567 bp, Salmonella enterica
atgcactttactgctactgttcttctcgctttcggtatgtcgatggatgctttcgcggcatcaattggcaaaggcgccaccctacataaacccaaattctcagaagcgttgcgtaccggccttatctttggcgcggttgaaacgctgaccccgttaatcggctgggggctggggatattggcgagtaaattcgttctggaatggaaccactggatagcctttgttctgctgatctttctgggcggacgcatgatcatcgaaggtatccgcggcggtagtgatgaagatgaaacaccgttacgccgccacagcttttggctattagtcacgacggctatcgcgaccagcctcgatgcgatggcggttggcgtcggtctggcgtttttgcaggtaaacatcatcgctaccgcattagctatcggttgcgccacgcttatcatgtccaccctcggaatgatgatcggtcgctttatcggcccaatgctgggtaagcgtgctgaaattctcggcggggtcgtactgataggaattggcgtccagatcctctggacgcattttcacggttaa

SEQ ID NO: 368307 - DNA, 459 bp, Salmonella enterica
atgactatcacggacctggtgctgattctctttattgccgcattattggcttacgctctctacgatcagttcatcatgccccgtcgcaatggccccactctgctttctatagccctgctccgccgcggtcgcgtagacagcgttatcttcgttgggctggtcgccatccttatttataacaacgtaaccagccacggagcgcagatgaccacatggttattaagcgcgctggcgttaatggggttttatatattctggatccgcacgccacggatcatctttaaacaacgtggctttttcttcgccaatgtctggatagaatataaccgtattaaagagatgaatttatcggaagacggcgtactggtgatgcaattagaacaacgacgcttgcttatccgtgtacgcaatatcgacaatctggaaaaaatatataaacttcttattgaaaatcaatag

SEQ ID NO: 368308 - DNA, 852 bp, Salmonella enterica
atggttgatatgactaaaactaccaccgagaaaaaactcactccgagcgatattcgcggcgtatttcttcgttctaacctgttccaggggtcatggaacttcgaacgtatgcaagcgctgggcttctgcttctctatggtgccagcgattcgtcgcctgtatccggagaataatgacgcgcgtaaacaggcgattaaacgtcacctggagttctttaacacccatccttacgttgcggcgccggtactgggcgtaacgctggcaatggaagaaaagcgtgcgaatggcgcagagattgacgatggcgctatcaacggtatcaaagtcggtctgatgggaccgctggcaggcgtcggcgaccctatcttctggggtaccgtccgtccagtattcgcggcgctgggcgcaggtattgcaatgagcggcagcctgcttggtccgctgctgtttttcatcctgtttaacctggtgcgtctggcgacccgttattatggcgtggcttatggctaccgcaaaggcgtcgatatcgttaaagatatgggcggcggcttcctgcaaaaactgactgagggggcgtcaatcctcggcctgtttgtcatgggggcattggttaacaagtggacgcatgtgaatatcccgctggtggtctccaccatcaccggtcaggatggtcagacacgcgttaccaccgtgcaaaccattctcgaccagctgatgccgggtctggttccgctactgttgacctttgcctgtatgtggctgctgcgtaagaaagttaacccgctgtggattatcgtgggcttcttcgtcatcggtatcgccggctactccgtaggactgctgggtcagtaa

SEQ ID NO: 368309 - DNA, 801 bp, Salmonella enterica
atggagattaccactcttcagattgtgctggtgttcatcgtcgcatgtatcgcgggtatggagtcggtacttgatgaatttcagttccaccgtccgctgatcgcctgtaccttaatcggcgccgttctgggggacatgaaaaccggtattatcatcggcggtactctggaaatgatcgctctgggctggatgaacatcggtgctgccgttgcgcctgatgccgcactggcgtccatcatctctaccgttctggtcatcgccgggcatcaaagcattggcgccggtatcgcgctggcgattccgctggcggcggcaggccaggtactgaccattatcgttcgtaccatcaccgtggcattccagcacgcggcggacaaggcggctgaaaacggcaacctgacggcgctctcctggctgcacgtttcttctctgttcctgcaggcaatgcgtatcgctatcccggcggttatcgttgccatctccgtaggcaccagcgaagtacagggaatgctgaatgcgattcctgaagtcgtcacgggcggtctgaacatcgccggcggcatgatcgtcgtggttggttatgcgatggttatcaacatgatgcgcgcaggctacctgatgccgttcttctacctcggtttcgtcaccgcggctttcacaaacttcaacctggtcgcactgggtgtcatcggcgcagtgatggctattctttacatccagctgagcccgaaatacaaccgtgtagcgggcgcgcctgcaacggctgctggcaataacgatctcgacaacgaactggactaa

SEQ ID NO: 368310 - DNA, 969 bp, Salmonella enterica
gtgaccattgctattgttataggcacacatggttgggctgcagagcagttacttaaaacagccgaaatgctgttaggcgagcaggaaaacgtcggctggatcgatttcgttccaggcgaaaatgccgaaacgctgatcgaaaagtacaacgctcagttggctaaactcgataccagtaaaggcgtgctatttctcgttgatacatggggaggcagtccgtttaatgctgccagccgcattgtcgtcgataaagagcgctatgaagttattgccggcgtcaacatcccgatgctggtcgaaacgtttatggctcgtgacgacgatccaagctttgacgagctggtcgcactggcggtagaaaccggtcgtgaaggcgtaaaagcgctgaaagcgaaaccggtagaaaaagccgcgccagcgccagtcgccgccgcgccaaaagcggccacgccggcaaaaccgatgggcccgaatgattatatggttatcgggcttgcccgtattgatgaccgtctcattcacggtcaggtcgctacccgctggaccaaagagaccaatgtcagccgtattattgttgtgagcgatgaagtcgcggcggataccgtacgtaaaacgctgctgacgcaagttgcgccgccgggcgttacggcgcatgtggttgacgtcgcgaagatgattcgcgtctacaataacccgaaatacgccggcgaacgcgtgatgcttctgtttaccaatcctaccgacgtcgagcgcatcgttgagggcggcgtgaaagtcacctccgtgaacattggcggtatggcctatcgtcaaggtaaaacgcaggtgaacaacgccgtttccgtcgatgaaaaggatatcgaagcctttaaaaagctcaacgagcgcggcatcgagcttgaggtgcgtaaagtttccaccgatccgaaactgaaaatgatggatttaattgccaaagtggcgaaataa

SEQ ID NO: 368311 - DNA, 1560 bp, Salmonella enterica
atggaattattaatggatccctcaatttgggtgggtttactcacgctcgtcgtcctggaaattgttctgggtatcgataacctggtctttatcgcgatcctcgccgataaattgccgccaaagcagcgtgacaaagcgcgtcttatcgggctctcgctggcgctgattatgcgtctggcgctgctgtccattatttcgtggctggtgaccttaacaaagccgctctttaccgtctgggattttaccttctccggccgcgatttaattatgctgctgggcggtatattcctgctgtttaaagcgaccaccgagctgcatgaacgtctggaaaaccgcgagcatgacaccggacacggtaaaggctatgcgagcttctgggtggtagtcacgcagattgtcatcctggatgcggtcttctcgctggacgccgtgattacggcggtaggtatggtaaaccatctgccggttatgatggcggcggtggtgattgcgatggcggtgatgctactggcgtcaaaaccgctgacccgttttgtcaaccagcatccgacggtggtggtgctctgtctgagtttcctgctgatgatcggcttgagcctggtggcggaagggttcggtttccatattccgaaaggctacctgtacgcggcaattggtttctcgatcgttatcgaggtgtttaaccagattgcgcgccgcaactttattcgtcatcagtccacgttgccgctgcgcgcgcgtactgcggacgctatcctgcgtctgatgggcggtaaacgccaggcgagtacgcaacatgaaacggatagcccggccgcgatatcggtgtcggaaggcgccttcgccgaagaagaacgctacatgattaacggcgtactgactctggcgtcgcgctccctgcgcggcattatgacgccgcgaggcgaaattagttgggtggatgcgaatctcagcgtagctgaaatccgtcagcagttactctcttctccgcatagcctgttcccggtatgtcggggcgagctggatgaaattatcggtatcgttcgggcgaaagagttgctggtggcgctggaagagggcgcggacgttgcggctatcgccgcgtcttccccggcgatagtggtgccggaaacgcttgatcctatcaatctgttaggcgttttgcgccgcgcgcgcggcagtttcgttatcgtcactaacgagttcggcgtggtgcaggggctggttacgccgctggatgtgctggaagcgattgccggtgagttcccggatgccgatgaaacgctggaaatcgttgccgatgccgagggctggatagtgaagggcggcaccgatctccatgcgctacagcaggcgctggaagttgatcatctggtgaacgaagagggcgatattgcgacggtcgcggggttagtgatcgccgctaatggccatattcctcgtgtaggcgatgtcattgatgttccgcccctgcggatcaccattgtcgaggccaacgactatcgtgtcgatctggttcgaattgttaaagaacagcctgcccacgacgaagaggaatga

SEQ ID NO: 368312 - DNA, 1602 bp, Salmonella enterica
atgcaaacagcacaacggatcatcaatcattatcgccgtaatcgtttcattgtttgcacgatttgtgcactggtcacgctcattcttacgctgagcatccgatttatttcggagcggaacttaaatcaccatcgcacggttgcattcgcgaatcatgccgttgatgcgctggataatgttttgcatcctctccaggtcggacgaaacgtactgctccccttgcttgagcttccgtgcgcgaccgcgcatctgccgttgcgtaagcaagccgcccgtctgcaaaccgttcgttctatcgggctggtgaaagagggaattctctattgctcaagcatttttggcgcccgtaatactcccatacgccagcttcagcccgatcttcccgcagtcggcgatctgctgctactttccacagaccaatcgttactcaagggaagcccgatcctcattcagtggtatcccgcctctgccgatggccaggatggcgtgatggaaattgtgaatattgacttgctgacgactatgctacttgagccgcagcagccgcaaattaccagcgccagcctgacggtcggcaaacggcacctgttatatggtcggggcgtggtcgatactcttccggaattaaaaaaagatgaagagcgttaccagctttcatcgcgacatttcccttttactatcagcgtcagcgggccgtcggcaggcgtactggcgttcaaacatctcccgacgcagttaccgctggccgtattgcttagcctgttgatcggttatatcgcctggctggcaacggccagcagaatgagcttttcctgggaaattaatctggcccttgccgaacgggagtttgagctattttgtcagccgttgcttaatgcccgcacgcagcagtgtaccggcgttgagatcctgttacgctggaacaacccgcgccagggctggatctcaccggatgtttttattcctatcgccgaggaacataacctgatagcgccgctgacccgctatgtgattgcggaaaccattcggcagcggcactacttccccatcaaccatcagtttcatatcggcatcaatgtggcggcaagccatttccgacacggcgtgcttctcaaggatcttaatcagtactggtttagtgcggaacctgttcagcaactggtgctggagctcacggaacgcgacgcgttgcttgacgttgattaccgcctgatgcgcgagctgcatcgtaaaggcgtgaagttagccatcgatgattttggcacaggaaacagctcgctctcctggctggaaaaactgcggccggatattttgaaaatcgataaatccttcaccgccgccatcggtaccgatgcggtcaattcaacggtgaccgatattattatcgctctggggcaaagactgaatattgaactggtggcggaaggggtcgaaaaccagacgcaggcacagcatttgcgccagcatggcgtgcaaatgttacagggctatctctatgcgaagccgatgcccattagcgaatttccacagtggctggcgggcagcgcgccgccgcccgcccggcataacggacagattatgtccgcgatgccgcatctatag

SEQ ID NO: 368313 - DNA, 1365 bp, Salmonella enterica
gtgattagcctattcgacatgtttaaggtagggattggtccctcctcttcccacactgttggcccgatgaaggccggtaaacagttcgtcgatgacctggtcgaaaaaggattactggataacgttacccgcgtcgctgtcgatgtctacggctcgctgtcgctgacggggaaaggtcaccataccgatatcgccattattatgggtctggcgggtaatgaacccgctaccgtggatattgatagtatccccggttttattcgcgacgtcgaaacgcgcgagcgtctgttactggcccagggacgtcacgaagtcgacttcccgaaagatgacggaatgcgttttcacaacggcaatttgccgctgcatgaaaacgggatgcagatccacgcctggcatgacgacacggtcatttatagcaagacgtactattccatcggcggcggctttatcgttgatgaagcgcatttcggccaggaagcgacgaatgaggttactgtaccttatccgtttaaatcggcgaaagaaatgctggagtattgcaacagtaccggcctttcactctccggcatggtgatgcaaaacgaactggcgctgcatagcaagaaagagattgaagagtatttcggtcacgtctggcagaccatgcaggcctgtattgatcgtggtatgaataccgaaggcgtgctgccggggccgctgcgcgtaccgcgtcgcgcctctgcgctgcgtcgtatgctggtttccagcgataagctttccaacgatccgatgaacgtcattgactgggtgaacatgtttgctctggcggtgaacgaagagaacgccgcaggcggccgcgtcgtgacggcgccaaccaacggcgcgtgcggtatcgttcctgcggtactggcttactacgaccattttattgaatcagtcagcccggatatttacacccgctacttcctggcggcaggcgctattggcgcgctgtataagatgaacgcgtctatttccggcgcggaagtcggctgtcagggcgaagtcggggtcgcctgttcgatggcggcggcaggccttgctgaactgttgggcgccagcccggagcaggtttgcgttgccgctgaaatcggcatggagcataacctggggctgacctgcgacccggttgccggtcaggtgcaggtgccgtgtatcgagcgtaacgccattgcttcggttaaagcgatcaacgctgcgcgtatggccatgcgtcgaaccagcgcgccgcgcgtctcgttggataaagtcatcgaaacgatgtacgagaccggaaaagacatgaacgcaaaataccgcgaaacgtcgcgcggcgggctggctattaaagtccagtgtgattaa

SEQ ID NO: 368314 - DNA, 579 bp, Salmonella enterica
gtggataccagccgtctgacgctcgatcatttcttatcgcgctttcagcttttgcgcccgcagatgactcatgaaacgttaaatcaacgtcaggccgccgtactgatccctgtggttcgccgcccccagccggggctgctgttgacccagcgggctattcatttgcgcaaacacgccggacaggtcgcctttcccggcggggccgtggacagtaccgatgcttcgcttatcgccgcagcgcttcgcgaagcgcaggaggaagtcgccatcccgccgcaagccgtggaagtgattggcgttttaccgccggtagacagcgtgaccggttttcaggtcaccccggtggtcggcattattccgccaaatctcccctggcgcgccagtgaagatgaagtgtctgcggtgtttgaaatgccgctggcgcaagcgttgcaactgggtcgatatcacccgcttgatgtttaccgtcgcggcaattcgcaccgcgtatggctctcctggtatgagcattatttcgtctggggcatgaccgcaaacattcttcgtgagctggcgctgcaaatcggcgtaaagccctga

SEQ ID NO: 368315 - DNA, 1365 bp, Salmonella enterica
atgatgaagacgttatctcccactgttatcaccttaccctggcgtccggacgccgctgaacactattttgcgcccgtaaatcatttgccctgggcgatgctgctgcattcaggtgatgctattcatccctataaccgttttgatattctggtcgccgatcctgtcaccacactgaccacgcgcgcgcaggaaaccacggtatgtactgcgcgcacgactaccgtcactttcgacgatccgttacacgttttgcagactcaactggaggcgctgccttttcatcctcagcctgaccctgacttaccctttcagggcggcgcgctgggtctgtttggttatgatttagggcggcgtttcgaaattctgcccgatactgctgcgcgcgatatcgctttacccgatatggcgattggcctttacgactgggcgctgattgtcgatcaccaaaaacaggtggtgtcgctgataagctatcacgatgcagacgcccgatatcgctggctcaccagccagcacgcgccgacccgcacgcccttcaggcttacctcggcctggcaatccaatatgacgcgttgcgagtatggcgaaaagtttcgtcaggtgcaggcctggctgcacagcggggactgctatcaggtcaatctttcccagcgttttcaggcgagctacgagggtgatgagtggcaggctttcgaacaccttaaccgcgccaatcgcgccccgttcagcgcctttcttcgtttacatgacggcgccatattgagcctttctcccgagcgttttatccaactggagaatggtcatattcagacgcgcccgatcaaaggtacgctcccacggcttaacgatccgcaggcggatcgtcagcaggcgcagaaactggccaactcaatgaaagatcgcgctgaaaatttgatgatcgtcgatttgatgcgtaacgacattggccgggtcgccgtgccgggttcggtgaaagtgccggaactgttcgtcgtcgaaccatttcctgccgttcaccatctggttagcaccattaccgcccgtttaccggactcgcttcatgctaccgacctgctgcgcgcggctttccccggcggctccattaccggcgcgcctaaagtgcgggcgatggaaattatcgacgaactggagccgcagcgacgcaacgcctggtgcggtagcatcggttatctgagtttctgcggcaagatggataccagtattactatccgcaccgtcacggcaacgcagggccaactctattgctcagccggcggcggtatcgtggccgatagcaaggaagaagcggaatatcaggaaacttttgataaagttaatcgtatcctgcacccactggagaactaa

SEQ ID NO: 368316 - DNA, 180 bp, Salmonella enterica
atgtttgcaggtttaccttcactcagtcatgaacaacagcaaaaagccgtagaacgtatccaggaattgatgtcgcaaggtatgagcagcggagaagcgattgcccaggtggcgggcgaacttcgcgccaaccataccggcgaacggatagtggcgcgttttgaggatgaagacgaataa

SEQ ID NO: 368317 - DNA, 345 bp, Salmonella enterica
atgtctatcgtgcgtattgatgccgaagatcgttggtcagacgtggtgatctacaataatacgctgtggtataccggcgtgccggaaaacctggacgccgatgcttttgagcaaacggcgaatactctggcgcaaattgatgcggtgctggaaaaacagggctccagtaagtcacgtattctggatgccactattttcctgagcgataaagcggattttgccgccatgaataaggcgtgggatgcgtgggtcgtcgcaggccatgcgccggtacgctgtaccgtacaggccgggttgatgaacccgaaatataaagttgagattaagattgtcgcggcggtataa

SEQ ID NO: 368318 - DNA, 1911 bp, Salmonella enterica
gtgacggacgattttgcagcagatggccaactggccaaagcgataaccggctttaaaccgcgcgaaccacagcgacaaatggcggttgccgtaacacaagcgattgaaaatgcgcagcctttggttgttgaagccggcaccggaaccgggaagacctatgcttacctcgctccggcgttgcgcgccgggaaaaaagtcattatttcgaccgggtcgaaagcgttgcaggatcaactctacagccgcgatctgccgacggtagcaaaagcgttggcgtttaccggtaagacggccctgttgaaaggacgttcaaactacctctgcctggagcgtctggaacaacaagcgctggcgggcggcgatttaccggtacaaacgttaagcgacgtgatattgctgcgctcctggtcaaatcagacgcgggatggcgatatcagcacctgcgtcagcgtggcggaggattcccaggcctggccgctggtcaccagtaccaacgacaactgccttggcagcgattgcccgctctacaaagagtgctttgtggtgaaagcgcgtaaaaaggcgatggacgcggatgtggtgattgtaaaccaccacctttttcttgcggatatggtggttaaagagagcgggtttggcgaacttatccctcaggctgaagtaatgatcttcgatgaagcccaccaactgcctgacatcgccagccagtatttcggacaatcgctctccagccgtcagttactggatttagcaaaagacatcaccatcgcctaccggacggaactgaaagacactcaacagttgcaaaaatgcgccgatcgccttgcccagagcgcccaggattttcgtctgcaactgggggagcccggctaccggggaaatttgcgtgaactgttagccgactcgcgtatccaacgggcatttttactgctggatgatacgctggagctttgttacgacgtggcgaagctgtcgctgggccgttcggcgctgctggatgcggcttttgaacgcgccacgctataccgttcacggctgaaacgcttaaaagagatcaatcagccgggatacagctactggtatgagtgcacctcgcgccatttcaccctggcgctgacgccgctcacagtggcggacaaattcaaagaggtgatggaacagaaacccggtagctggatttttacctcagccacgttatcggtaaatgatgatcttcaccactttaccgcccgtctgggaattgaacaggcagaatccatgctgctgcccagcccattcgactatacgcgccaggcgttactctgcgtaccgcgtaacctaccgcaaaccaaccagcccggcgcggcgcgacagttggcggctatgctcaggccgattattgaagccaataacgggcgatgttttatgctgtgcacctcacacgccatgatgcgcgatctggcggagcagtttcgcgccaccatgacgctgccggtattgttgcaaggggaaaccagtaaaggccaactgttacagcaatttgttagcgccggcaacgcgctgctcgtcgccaccagcagcttctgggaaggggtggacgtgcgcggcgatacgttatctttggtgattatcgacaaattgccgtttacttccccggacgacccgttgttaaaagcgcgaatggaagactgtcgtttgcgcggtggcgatccgtttgatgaggttcaactgcccgatgcggtgattacgctgaagcagggggtggggcggctaattcgcgatgcggacgatcgcggggtgttagtgatttgtgataaccggctggtgatgcggccctatggcgccacgtttctcgccagcctgcctcctgcgccgcgcacgcgtgatatcgcccgtgccgttcgctttcttgcgattccatccgccgagtaa

SEQ ID NO: 368319 - DNA, 696 bp, Salmonella enterica
atgcgaattctggctatcgataccgccacagaggcctgttctgtcgccctgtggaacaacggtactatcaatgctcactttgagctttgtccacgagaacacactcaacgtatcctgcccatggtgcaggagattctggccgccagcggcgtctcgctcaatgagatagatgcgctggcgtttgggcgcggtccgggcagctttaccggcgtgcgtatcggcattgggattgcgcaagggctggcgttaggggcaaatctgccgatgatcggtgtttcgacgcttgccacgatggcgcagggcgcgtggcgtaaaaccggcgcgacccgcgtactcgccgcgattgacgcgcggatgggcgaagtgtactgggcggaataccagcgtgatgcgcagggcgtctggcagggcgaagagacggaagcggtgctgaaaccggaacgggtcggtgagcggttgaaacagctttccggcgagtgggcgacggtaggaacgggttggtccgcatggcccgatctggcgaaggagtgcggcctgacgcttcatgatggggaggtgtcgctcccggcagcggaagatatgttgcccatcgccagtcaaaagctggcggcaggagagaccgttgccgtggaacatgccgagccggtttatttgcgtaacgaagtggcgtggaagaaacttcccggcaaagaatga

SEQ ID NO: 368320 - DNA, 582 bp, Salmonella enterica
atggcggttcaaaaacggttaataaaaggggcgctggcgtgcgcttttgcgcttatgctgagcggttgcgtgactatcccggatgccattaaaggttcgagtccgacgccgcagcaggatttggtgcgggtgatgaatgcgccgcagctctatatcgggcaagaggcgcgttttggcggcaaagttgtggcggtacaaaatcagcagggaaaaacccggcttgaaatcgcgaccgtaccgctcgacagcggcgcgcgtcctgttctgggcgaagcctcgcgcggcagaatttttgccgatgtgaacggttttctggacccggtggacttccgtggccagttagttaccgttgtcggcccgataaccggcacggttgacggtaaaatcggcaatacgccgtataaatttatgctgatgcaggctaccggctataaacgctggcatcttgttcagcaggtcgtcatgcctccacagccgatcgatccgtggttttacggcggacgcgcctggccttatggctatggcggttggggatggtataaccctggacccgcagaggttcagacgatagtaacagagtaa

SEQ ID NO: 368321 - DNA, 1752 bp, Salmonella enterica
atgttaacgacttgtttattaactggggttgtgatgacgacgaacactcattttagaggtgatgcattgaagaaggtttggcttaaccgttatcctgctgatgttccggcggagatcaaccctgaccgttatcaatccctggttgaactgtttgaacatgcggcgacgcgctatgccgatcagcctgcgttcgtcaatatgggggaggtaatgaccttccgtaaattagaagaacgtagtcgggcatttgcggcttatttacaacaagggctgggactcaaaaaaggcgaccgtgtggcgctgatgatgccaaacctgttgcagtatcctgtcgcgctatttggtattttacgcgctggcatgattgtggtgaacgttaacccgctgtacacgccgcgcgaacttgagcatcagcttaacgatagcggcgcggcggcaatcattattgtttctaactttgcccatacgctggaaaaagtagtcgagaaaacgtcggtacagcacgttattctgacgcggatgggcgaccagctttctaccgccaaaggtacggttgttaactttgtcgtgaaatacatcaagcgtctggtgccaaaataccacttgccagatgcgatctcgtttcgcagcgcgctacagcatggctaccgtatgcagtatgtcaaacccgaggttgtcgctgaagatctggctttcctgcaatataccggcggtacgacgggcgtggcgaaaggcgcgatgttgacccaccgcaatatgctggcgaatctggagcaggtgaaagcgacctatgggccgctgctgcacccggggaaagagctggtagtgaccgcgctgccgctgtatcacatttttgccttaaccatgaactgtctgctttttatcgagctgggtgggcaaaacctgctgattaccaatccgcgtgatatccccggcctggtcaaggagctggcgaaatatccatttacggcgatgactggcgttaatacgctattcaacgccctgctcaataataaagagtttcaacagctggatttttcttcgctgcatctgtcagccggcggcgggatgccggtgcaaaacgtcgttgcggaacgttgggtaaagctgaccgggcaatacctgctggaaggctacgggctgaccgagtgcgccccgctggtgagcgtcaacccgcatgatattgattatcacagcggcagtatcggcctgcctgtaccgtcaacagaagccaaactggtggatgacgatgataacgaagtcgcgccgggtgaggccggagagctttgcgtgaaaggccctcaggttatgctgggatactggcagcgtcctgacgcgacggatgaaatcattaaagatggttggctgcatacgggcgatattgcggttatggatgaagatggctttctgcggattgtcgatcgtaagaaagatatgattctggtttctggtttcaacgtttatccaaacgaaattgaagatgtggtgatgcagcattctggcgtgcaggaagtcgcggcggttggcgtgccttccggtagtagcggcgaagcggtgaagctttttgtggttaagaaagatccggcattgactgacgatgcgttgatcaccttctgccgtcgccatctgaccggatataaggtgcccaaacaggtagagtttcgcgaggaattaccaaaatctaacgttgggaaaattttacgacgagaactgcgtgacgaagcccgtggcaaagtagacaataaagcctga

SEQ ID NO: 368322 - DNA, 1116 bp, Salmonella enterica
atgattgaaacggacgatgcgctggcgagcctgtgtgaggctgtccgcgcatgtccggctattgctttagatacggaatttgtccgtacccgcacctattacccgcagttaggattgatccagttatttgacggggcaaatgtcgccctgatcgatccgctcggcatcagcgactggtcgccgttaaaagcggtgttgcgcgatacgggaatcaccaaatttctgcacgcgggtagcgaagatctggaagtatttctgaatgcgtttggcgaactgccggagcccctgattgatacgcaaattctggcggcgttttgcgggcgtccgctgtcgtgggggtttgcggcgatggtagaagagtatacgggcgtggcgctggataaaagcgagtctcgtaccgactggttagcccggcctttaagcgaacgtcagtgtgaatacgcggcggcggatgtctggtatctgttaccgatcgccaaaaagctgatgattgaaactgaagccgcaggatggctgcctgccgcgcttgatgaatgccgattgatgcagcagcgtcgtcaggagattcaggcgccggaagaagcatggcgggatatcaccaatgcctggcaactgcgtactcgccagttagcctgtctgcaacttttagctgactggcggatacgtaaggcgcgtgagcgcgatatggcggtgaactttgttgtgcgtgaagaaaacctgtgggcggtcgcgcgttatatgccgggcagtctcggtgagctggatagcctggggctttccggcagcgagattcgttttcacggcaagacgttgatatcgctggtggcgaaagcacaggcgttaccggaagaggcattgccggaacccctgttgaatctgatggacatgccgggctatcgcaaagcgtttaaggccatcaaagcgctggtggcggaggtgagcgcgtcgcatcacgtcagcggcgagctactggcatcgcgtcggcagattaatcagttgcttaactggcactggaaattaaaaccgcaaaatgggcaaccggaattgatttccggctggcgcgccgaactgatggcggagaagttaactcttctgttgcaggagtatccgcgttaa

SEQ ID NO: 368323 - DNA, 267 bp, Salmonella enterica
atggcattactggatttttttctctcgcggaaaaagagtaccgctaatattgcaaaagagcggttgcaaatcattgtcgcggaacgtcgccgtagcgatgccgaaccgcattatttaccgcagttacgtaaagatattcttgaggtcatttgtaaatacgtacaaatcgatccggaaatggttaccgtccagcttgagcaaaaagatggtgatatctccatccttgaacttaacgtaacgctgccggaagccgaagagtcaaaataa

SEQ ID NO: 368324 - DNA, 813 bp, Salmonella enterica
atggcacgcattattgttgttacttcgggtaaagggggcgttggcaagaccacctccagcgcggccatcgctacaggtttggcccagaagggaaagaaaactgtcgtcattgattttgatatcggactgcgtaacctcgatctgattatggggtgcgaacgtcgtgtcgtttacgattttgtaaacgtcattcagggcgatgcgacactgaatcaggcgctgatcaaagataagcgtactgaaaatctcttcattcttccggcgtcgcagacccgggataaagacgcgctaacgcgcgaaggcgtcgctaaggtactggactcactgaaagcgatggactttgagttcatcgtttgcgactcgccggcgggtatcgaaaccggggcgctgatggcgctctattttgccgatgaagcgatcatcacgactaacccggaagtctcttctgtccgtgactcggaccgtattctgggtattctggcatcgaaatctcgtcgcgcagaaaatggcgaagaaccgattaaagaacatctcctgttgacgcgctacaatccaggccgcgtcaataaaggcgacatgctcagcatggaagatgtactggagattctgcgtattaaactcgtcggggtgatcccggaagatcaatccgtactgcgcgcatctaaccagggtgaaccggtgattcttgacgccactgcggatgcgggtaaagcctatgcagataccgtagatcgtctgttgggagaagaacgtcctttccgcttcattgaagaagagaagaaaggtttcctcaaacgcctgttcggaggataa

SEQ ID NO: 368325 - DNA, 708 bp, Salmonella enterica
atgtcaaacacgccaatcgagcttaaaggcagtagcttcaccttatcagtggttcatttgcatgaagcggaaccagaggttattcgtcaggcgttagaagacaaaatagcgcaggctcctgcgtttttaaaacacgcccctgtcgttattaacgttagcggtcttgaaagcccggtaaactggccggaactgcataagatcgtgacctcaaccggcttacgcattatcggcgtgagcggctgtaaagacaccagcctgaaagtagaaatcgatcggatgggtcttcctttactgactgaaggtaaagagaaagcggttcggcctgcgcccgttgagccggcaacgcccagcgaaccgccgcaaaacgccaatcccatcacaaaaacgcgattaattgatgttccggttcgttccggtcagcgcatttatgctccacaatgtgatctgattgttacaagtcacgtcagcgctggcgcagagcttatcgctgacggcaatatccatgtctatggcatgatgagaggtcgcgcgctggcaggagcgagcggcgatcgggaagcgcaaattttttgtacccatctgacggcagaactggtctctatcgcaggtgtttactggctgagtgataaaatcccggcagaattttatggcaaagcggcgcgcctgcgtttagcagacaacgctttgacagttcaaccgttgaattga

SEQ ID NO: 368326 - DNA, 294 bp, Salmonella enterica
atgttttgtgtgatctatagaagtagcaagcgcgatcaaacctatttgtatgtcgaaaaaaaagacgatttttcgcgggtgcctgaagcattgatgaaaggattcggtcagccgcagttagcgatgatgctgccgcttgatggacgtaaaaaattagtcaatgccgagctcgaaaaagtaaaacaggcgttaagcgagcagggctattatttacaattgccgccgccgccggaagatttgctgaaacaacatctttcttcggtaggacaaaatacgtcgcccgctgaccgttaa

SEQ ID NO: 368327 - DNA, 660 bp, Salmonella enterica
atgtatcaacatcgtaactggcaaggcgccttgcttgattacccggtaagtaaagtggtctgcgtgggcagtaattacgcaaatcacatcaaggagatgggcagcgcgacgccggaagaacccgtgctttttatcaagccggaaaccgcattgtgtgatattcgccagccgctggcgattccggcggatatgggggctgttcatcatgaagttgagcttgctgtgctgattggcgcaacgctccgccaggcgaccgaagatcatgtacgtaaagcgatagccggttatggcgtggcgcttgatttaaccctgcgcgatattcaagggaaaatgaaaaaggccggacagccctgggaaaaagccaaaggttttgataacgcatgtccgatttcaggcttcatccctgtcgcggccttctgcggcgatccgcaaaatacggttatcggacttaacgttaatggcgaggttcgccagcaagggtcgaccgcggatatgattcatcctattgtgccccttatcgcctatatgagccgctattttacgctcaaagccggggacgtggtgctaaccggcacgccggcaggcgtggggccattattaagcggcgatgagctggacattcgttttaatggcgaaacgttgtctacccgcgttctgtaa

SEQ ID NO: 368328 - DNA, 447 bp, Salmonella enterica
atgagcgatacacctttctggcaacgtaaaaccctggatgaaatgaccgatgccgagtgggagtcgctgtgcgatggctgcggtcaatgctgcctgcataagctgatggatgaagatacagatgaaatctacttcaccaacgtggcgtgcaggcaattaaatatcaaaacgtgccagtgccgtcattatgagcgccgttttgaatttgaacccgactgtatcaaactcactcgcgaaaacttgccagactttgaatggttgccgatgacctgcgcctaccgtttgttggcggaaggtaagcccttgccgacgtggcatccgctgctgactggatcgaaagctgctatgcatggcgagcgaatttctgtccgtcatatcgcggttaaagaatctgaagtacgggactggcaggatcatattttaaataaaccgtcgtgggcagaataa

SEQ ID NO: 368329 - DNA, 138 bp, Salmonella enterica
atgtctgaacgtcctgatttagtcgatccattaccagaggatgagccgcttcctggtgaaaatattccggatacaccagagggagacgatcctctcgacccggatacccagaatgaggttgaagatcctcgtagatag

SEQ ID NO: 368330 - DNA, 174 bp, Salmonella enterica
atgaacagcgaagagttgacacataaagcagaagaggaaatcgcggcactcattagcaaaaaggtcgccgaactacggaagaaaaccgggcaagaggtttccgaaatagagttcgcgccgcgagaaacgatgaaagggcttgagggataccacgttaaaattaaactactctag

SEQ ID NO: 368331 - DNA, 342 bp, Salmonella enterica
atgtcccacttacgcatcccggcaaactggaaagttaaacgctctaccccctttttcaccaaagagaatgttccggcggcactgctctctcatcacaacacagcggcaggcgttttcggacaactctgcgtgatggaaggcaccgtgacctactatggctttgcgaatgaaaccgcgacagaacccgaagtgaaagtggtgattaatgccgggcaattcgccaccagtccgccgcaatactggcatcgggtagagctgagcgatgatgcgcggttcaacattcatttttgggtagaggaagaccatcagggcgaggaaatgtatcaacagaaaaaagcctga

SEQ ID NO: 368332 - DNA, 531 bp, Salmonella enterica
atgttgcgatttttaaaccagtgctcacggggtcggggcgcatggttactgatggcgtttaccgccctggcgctggaaatggtggcgctgtggttccagcacgtcatgttacttaaaccttgcgtgctatgtatttacgaacgttgcgccctgtttggcgtgatgggcgcgggtctggtcggcgctatagcgccgaaaacaccgctgcgatacgtggccatggttatctggatttacagcgcatggcggggtctacaactggcgtatgaacatacgatgattcagttgcatccctcgccgttcatgacctgtgactttatggcgcgctttccagactggttgccgttgggtaaatggctgccgcaggtgtttgtggcatccggtgattgcgccgaacgccagtggtcgtttttaacgctggagatgccgcaatggctgttggggatctttgccgcttaccttgtggtggcgatagccgtcgtcatagcccaggcatttaagcctaaaaaacgcgacctgttcggtcgttga

SEQ ID NO: 368333 - DNA, 1545 bp, Salmonella enterica
atggagatctcatggggtcgcgccatgtggcgcaactttttaggccagtcgcccgactggtacaaactggcactacttgtctttttaattgttaacccattcattttcttagctaatccctttattgccggttggctgctggtggcagagtttatcttcactctggcgatggcgttaaagtgttaccccctgctgcccggcgggttactggccattgaagccgttatcatcggtatgaccagcgccgcccatgtacgtgaagaggttgccgccaacctggaagtcttgctgctgctgatgtttatggtggcaggcatctactttatgaagcagttattgctgtttatttttacccgtctgttactcagtatccgctcgaagatggttctgtcgctggccttttgcgtcgccgccgcgttcttgtcggctttccttgacgcgcttaccgtcgttgcggtggtgatcagcgtcgccgtcggtttttacgggatttaccatcgtgtggcctcatcgcgcggcgaagagaacgatatgctggacgacagccatatcgatccgcattacaaaacggtgctggagcaattccgcggattcttgcgtagtctgatgatgcatgcaggcgtggggacggcgctgggcggcgtcatgaccatggtcggggagccgcaaaacctgatcatcgctaaagcggctggctggcatttcggcgacttctttttgcggatgtcgcctgtcaccgtcccggtactggtatgtggactgttaacctgtatgctggtcgagaaaatgcgctggtttggctatggcgaaacgttgcccgaaaaagtccgcgatgttttacagcaattcgacgatcaaagccgtaagaagcgcacccgccaggataaaattaaactaatagtccaggcggttattggcgtctggctggttaccgccctcgccctccatctcgcggaggtgggactgattggtctgtcggtcattattctggccaccgcgttaacgggtgtaaccgatgaacacgccatcggcaaagcgtttaccgagtcgctgccgtttactgcgctgttaaccgttttcttctccattgtggcggttattatcgatcaacatcttttcgcgccgattattcagttcgtcttgcaagcctctgaacacgcgcagctaacgctgttctatctctttaacggcctgttgtcttccatctcagataacgtctttgtcggcaccatttatatcaacgaagcgaaggcggcaatggaaaacggcgcaatcagcttaaaacagtttgagctgctagccgtggccatcaataccggtactaacctgccatcggtagcgacgccaaatggtcaggcggcattcttattcctgctgacctccgcgctggcgccgttaatccgtctctcctatggccgtatggtctggatggcgttaccgtacactatcgtactgaccctgatagggctactgtgcgtcgaattcactcttgcgccggccaccgaatggatgactcaggcaggatggttagcaacgctttcgtaa

SEQ ID NO: 368334 - DNA, 720 bp, Salmonella enterica
atggtcattaaggcgcagagcccggcgggtttcgcggaagagtatattattgaaagtatctggaataaccgctttcctcctggcacgatcttaccggcagaacgagaactctccgaactgatcggcgtgacgcgcacgacattacgcgaggtgttacagcggctggcgcgagatggctggctgaccattcagcatggcaaaccgacaaaggttaataatttttgggaaacgtcagggctgaatatccttgaaacgctggcccgccttgatcatgaaagcgttccgcaactgatcgacaatttgttgtcggtgcgtaccaatatttctactatctttattcgtaccgcgttgcgtcaacacccggataaggcgcaggaagtgctggccactgcccacgaagtggccgaccatgccgatgcattcgccgatctggactataacatctttcgtggtctggcattcgcctccggcaatcctatttacggcttgatcctgaacggcatgaaagggttatacacccgcattggtcgccactatttcgccaatccggaagcgcgcagtctggcactgggtttctatcataaattatcgtcgttatgcgagcagggcgcgcacgaccaggtgtatgaaacggtgcgacgttacgggcatgacagcggcgagatttggcatcggatgcagaaaaatctgcccggcgatttagcgattcagggacgataa

SEQ ID NO: 368335 - DNA, 1533 bp, Salmonella enterica
atggcaatgattgattccatgaacaaggacaccacacgtttgagcgatggacccgactggacatttgatctgctggatgtctatctggcagagatagaccgcgtggcgaagctctaccaactggatacttacccgcaccaaattgaagtcatcacttccgaacagatgatggacgcctactccagcgtcgggatgccgatcaactatccgcactggtcgtttggcaaaaagttcattgagacggaacgtctgtataagcatggtcaacaaggactggcttatgaaattgtgatcaactctaatccctgcattgcctacctgatggaagagaacaccatcaccatgcaagcgctggtcatggcgcacgcctgttacggccacaactccttttttaaaaataattatctcttccggagctggacggatgccagctctatcgtcgactacctgattttcgcccggaattacattacccgctgtgaagaacgctacggagtggatgaagtagaaaaactgctcgactcctgccacgcgctgatgaattacggcgtcgatcgctataagcgcccgcagaaaatctcgttgcaggaagagaaagcgcgacaaaaaagccgggaagagtatctacaaagccaggtgaatatgctgtggcgcacgctgccaaaacgcgaggaagaaaaaactgtcgccgaagcacgccgctttcccgctgaaccgcaggaaaacctgctctattttatggagaaaaacgccccgttgctcgagccgtggcagcgcgaaattctgcgcatcgtgcgtaaagtcagccagtatttttatccgcagaaacagacgcaggtcatgaacgagggctgggcgaccttctggcactacaccatcctgaaccatctgtatgatgaaggcaaagtgacggaacgctttatgctggagtttttacacagccataccaatgtcgtatttcagccgccctataatagcccctggtatagcggaattaacccctatgcgctcggctttgccatgttccaggatatcaaacgtatttgtcagtcgcccacggatgaagataaatactggtttccggatattgccggttccgactggctggaaacgctgcacttcgccatgcgcgattttaaagatgaaagctttatcagccagttcctgtcgccaaaagtgatgcgtgatttccgtttcttcacggtacttgatgatgacaggcataattatctggagatctccgccattcataacgaagaaggttatcgggagattcgatcaaaactgtcgtcacagtataacctgagcaacctggagccgaatattcaggtctggaatgtggatttacgcggcgacagatcgctgacgttgcgttatatcccgcataaccgcgcaccgctggataaaggccgcaaagaggtgctgaaacatgtgcatcggttatggggctttgatgtgatgctggagcaacaaaatgaggatggcagcgtagaactgctggagcgttgtccgccgcgcatgaacacgctgtaa

SEQ ID NO: 368336 - DNA, 1299 bp, Salmonella enterica
atgcgagttgtcatcctggggagtggcgtagttggcgtgaccagcgcctggtacttgagtcaggcggggcatgatgtcaccgtcatcgatcgcgaatccggcccggcgcaagaaaccagcgcggcgaatgccggacaaatttcaccgggatatgcggcgccctgggcggcccctggcgtaccgctgaaggcgataaaatggatgttccagcgccatgcgccgctggcggtgcgtctggatggcaccccatttcaactgaagtggatgtggcaaatgctgcgtaactgcgatacccggcattatatggaaaataaaggccgcatggtgcgcctggcggaatatagtcgcgactgtctgaaaacgctacgcgccgcgaccggtatcgaatatgaaggccgccaggggggaacgctacaactcttccgcaccgcgcaacagtatgagaacgccacccgtgatatcgccgtgctggaagatgccggggtgccgtatcagctcctggaatccagccgactggcggaagttgaacccgctctggctgaggttgcgcataaattaaccggcggactgcgcttaccgaatgatgaaaccggggactgtcagctctttacccagcgtctggcgcgcatggcggagcaggcgggcgtaacctttcgctttaatactcccgtggaaaaattactgtacgaaaatgatcagatttacggcgtgaaatgcgccgatgagatcattaaagcagatgcgtatgttatggcgtttggatcgtattcgacggcgatgcttaaaggcattgttgatatcccggtgtatccgctgaaaggctattcattaaccatcccaatcgtcgagccagacggcgcgccggtatcgacgattcttgatgaaacctacaaaatcgctattacgcgttttgataagcgtattcgcgtggggggaatggcggaaatcgtgggctttaataccgacttactgcaaccgcgccgcgagacgctggagatggttgtgcgcgatctctttccgcgcggcggtcatattgagcaggccacattctggaccggcctgcgccccatgacgccggacggcacgccggtagtaggacgcacccgttataaaaatctgtggcttaatactggacacggcaccttaggctggacgatggcctgcggttcaggccagttgttaagcgatatcttgtcgggtcgcacgccagcgataccctacgacgatctgagcgtggcgcgataccgttccgattttacgcccacccccccgcaacgtttgcatagcgcgcataactga

SEQ ID NO: 368337 - DNA, 1071 bp, Salmonella enterica
atgacccgccctatacaggccagccttgatttacaggtaatgaaacaaaatttggctattgtgcgccgggcggccccagaggcgcgcgtctggtcggtagtgaaagccaacgcctacggccacggtattgaacgcgtctggagcgcgctgggcgccacagatggtttcgctatgctcaaccttgaagaggcgattaccctgcgtgagcgcgggtggaaagggccgatattgatgctggaggggtttttccatgcgcaagacctggaggcgtatgacacttatcggctgaccacctgcatccacagtaactggcagttgaaagcgctgcaaaatgcgcggcttaacgcgccgctggatatctatgtcaaagtcaacagcggcatgaaccgactcggttttcagcctgagcgggcgcagaccgtctggcagcaattgcgggcaatgcgcaatgtcggtgaaatgaccctgatgtcacattttgctcaggccgatcatccggaaggtatcggggaggcgatgaggcgtattgcgctggcgacagaaggccttcaatgttcatactcgttatcaaattcggcagcgacgctgtggcatccccaggcgcattatgactgggtcaggccgggcattattttgtacggcgcgtcgccgtcaggacagtggcgggatattgccgataccggactaaaacccgtgatgacgctgagtagcgaaattattggcgtgcagacgctgaacgcgggtgaaagggtaggctatggcggagggtattctgtgactcaggaacaacgcattggcatcgtcgcggcgggttatgccgatggctatccacgccatgcaccgaccgggacgcctgtgctggtggacggtatccgtaccagaacagtaggcaccgtttcaatggatatgctggcggtggatttgacgccgtgtccgcaggcgggaatcggcacgccggttgaattatggggcaaagaaattaaggtcgatgatgtcgcctctgcggcaggcacgctgggctatgagctactgtgcgccgtagcgccgcgcgtgccatttgtgacaacgtaa

SEQ ID NO: 368338 - DNA, 1734 bp, Salmonella enterica
ttggatgctgcaacaattattagtctatttattttaggttccatccttgtaaccagcagtatcctgttaagttcattctcatcgcgactgggtatcccgattctggtcatttttctcgccattgggatgttagcgggtgtggatggcattggcggtattcctttcgataattatcctttcgcttatatggtcagtaacctggcgctggcgattattttactcgatggcggcatgcgcacccaggccagctctttccgggtagcgctgggccccgcgctgtcgctggcgacgctcggcgtactaatcacgtcggggttaacaggtatgatggccgcctggctgtttcatctggatcttatcgaaggtctgcttatcggcgcgatagtcggttccactgacgccgcagcggtcttttctctgcttggcggcaaagggctaaacgaacgtgtaggctccacgctggagatcgaatcgggaagtaacgacccgatggccgtttttctgaccattacattaattgagatgatccagaagcatgaaaccggcctggactggatgtttgccgtccatattatccaacagttcggtctcggtattgtttttggcctgggcggcggttacctgctacagcagatgatcaaccgtatttctctgcccagcggcttgtatccgatgctggcgctcagcggcggtattctgatttttgctttgacgaccgcgcttgaaggcagcggcattctcgcggtctatttgtgcggattcctgttaggaaaccgcccgattcgcaaccgttacggcatcctgcaaaactttgacggactggcctggctggcgcagatcgcgatgttcctggtcctggggctgttggtgacgccttccgatctgtggccgattgccgtccctgcgcttattctctccatctggatgattttcttcgcccgcccactgtcggtgtttaccggcctgctgccatttcgcggcttcaatcttcgggagcgcattttcatcagttgggttggactgcgcggcgcggtgccgattattctcgccgttttcccgatgatggccgggcttgaaaacgctcgcctgttctttaatgtcgctttctttgtggtactggtgtcgctgctcctgcagggaacatcgctgtcatgggcggcgaagagagctaaagtggtcgtgcctccggttggctggccagtatcgcgcgtggggcttgacatccatcctgataatccgtgggagcaattcatttatcagttgagcgccgacaaatggtgcgtcggcgcggcgttgcgcgacctgcatatgccgaacgaaacccgcattgccgcgctatttcgcaataatgaactgtttcaccccacgggtagcactcgcctgcaggaaggcgacgtactctgcgtgattggccgggagcgcgatctgccagcgctgggcaaattgtttagccagtcgccgccggtttcgttagatcagcgtttctttggcgattttatcctcgaagcgaatgcgaaattcgccgacgtggcgcttatctacgggctggaagaaggaacggaataccgggataaacaacaaactctgggtgaaatcatacagcagctgctgggcgctgcgccggtcgtcggcgatcaggtggagtttggcggcatgatttggacggtagctgaaaaagaagataacgtggtacgcaagattggggtacgcgtcgccgaagacgaagcagaataa

SEQ ID NO: 368339 - DNA, 915 bp, Salmonella enterica
atgtctctgtttcatttaatcgccccgtcgggctactgtattaaccaacaggccgcgttacgcggcgttcagcgcctgactgacgcgggtcatcaggtggagaatgacgaggtgattcgtcgccgctttcagcgttttgccggtacggacgcggaacggctggccgatgttaattcgctggcctcgctaacgtcgccggatacaatcgtcatgccggttcgcggcggctatggcgccagccgcttgttggatcgtatcgactggcaggcgctcgcctcccggcaacagcgcgatcccttactgatttgcggtcatagcgattttacggcgattcaggctggactcctggcgcaggccaatgtcatcacctttagcggtcctatgctggcggcaaattttggcgccgaaacgctgaatacgttcaccgagcaacatttctggctggcgctacgcaaggcgcaatttaccgtagagtggcaaggcgacggccctcagtgcgacgtacagggcaccttatggggcggaaatctggcgatgttgatttcccttatcggtacgccctggatgccgactatcgataaaggaattttagtgctggaagatgtcaatgagcatcctttccgggtggagcgtatgcttttgcaactggagtacgccggaattttaaaccgccagagcgccatcgttctcggcagctttagcggcgcggcgcccaacgagtatgacgccggctattctctggagagcgtctacgcgtttttacgttcccgtctgtccgttccgctgattaccggtctcgacttcgggcatgaacagcgtacggtaacgctccctatcggggcaaacgcgacgcttaaaaatacgcgccaggggactcaactcactttatctggtcatcctacgctgcaattgtaa

SEQ ID NO: 368340 - DNA, 612 bp, Salmonella enterica
gtgaaattaagatggtttgcttttttggtagtaatactcgctggctgtagctcaaaacaggattacaggaatccgccgtggaatgccgaagtgcctgtaaagcgtgcgatgcagtggatgcccatcagtgaaaaagccggggcggcatggggggttgatccgcatttaatcaccgcgattatcgccattgaatccggcggcaaccctaacgcggttagtaagtccaatgcgattggcctgatgcagttaaaggcgtcgacctccgggcgcgacgtttaccgtcgtatgggctggcgtggcgaaccgaccaccagcgagctgaaaaaccctgagcgtaacatctcaatgggcgcggcgtatttgagcattctggaaaatgggccgctggccggcatcaaagatccgcaggtgatgcaatatgcgctggtcgtctcttatgctaacggcgcaggcgcgttattgcgtactttttcatccgacaggaagaaggcgatagaaaaaattaacgatctggatgcggacgagttttttgaacatgttgttgataatcatcccgcgccgcaggcgccgcgctatatctggaagcttcagcaggcgctggacgccatgtag

SEQ ID NO: 368341 - DNA, 735 bp, Salmonella enterica
gtgagtggttacaatgagcagttcctgaaaaaaaatccattagcgatattaggcgtgctacgggatttaaataaaaatcaggttccactgcgtatttcatgggcgcatggtcaattcattagtaaaattttggcggtagacccggaaaaactcatcgtggattacggcagccaggaatatgaaaatagcgccgtattacgtgccgggcaggtagccattatcgcagaaacacagggcgcaaaagtcgagttcacgttgccgcaactcgttacaggcgaatatcagcggctgccggcctttatcacgcccctgccgtcgtcactgtggtttgtccagcgccgggagtattttcgtattggcgcgccgctgtatccgccttattacggcgtcaccacgctaccggacacccgtacgttacgttttcgcctgtttgatctttccctgggcggcatgggcgcgctactggaatccgccatccccgacggactaatcgaaggcgcgcgcttttcgcaggttgaactgaacatggggccatggggtatttttcacgttgacgcccagcttatcgccatcagcgagcgtaaggtgattgatgggaaaaatgaaacgatcaccactccccgcctgagctttcgtttccttaacgtcagcccggcggtagagcgggagttgcagcggattattttttcgcttgagcgcgaggcccgagaaagagcgaataaagtgcgagaataa

SEQ ID NO: 368342 - DNA, 255 bp, Salmonella enterica
atgggaattatcgcctggattgtttttggtttgattgccggcgttatcgccaaattgcttatgccggggcgcgatggcgggggatttatcctgacctgtattctcggtattgtcggggcggtcgttggcggatggctggcgacgatgtttggtattggcggcagtatcagcggctttaatctgcacagtttcctggtcgccgtggtgggcgcgattatggtgctggtgattttccgccttctgcgacgcggctaa

SEQ ID NO: 368343 - DNA, 1713 bp, Salmonella enterica
atgatacccccagagattcgccgttctgttctactacagaaagccataaaactggcgctggcagggacgctgctgacgtttgcatcgttttcggcgactgccgcagacccgtcttccgacactgaaactccgcagccgccggatattttgcttggcccgctctttaatgatgtccagaatgcaaaactcttccccgatcagaaaacctttgctgacgccatacctaatagcgatccgctcatgattcttgcggattatcgtatgcagcggaaccagtccggcttcgatttgcgtcattttgttgatgttaacttcaccctgccgaaagcgggtgaaaaatatgtcccgcctgccgggcagtcattgcgtgaacatattgatggcctgtggccggtgctgacccgttcaactaaaaacgtcgaaaagtgggactcgctcttgccgttgcctgaatcctatgtcgtaccgggtgggcgattcagagagatttactactgggacagctattttacgatgctggggctggcggaaagcgggcactgggataaggtggcggatatggtagcgaactttggttacgaaattgacgcctgggggcatattcctaacggcaaccgtacctactacctgagtcgttcgcagccgcctttctttgcgtttatggttgaattactggcgcaacatgaaggtgacgatgcgctgaaagaatacctgccgcaactgcaaaaagagtacgcctactggatggagggcgttgagacattgcagccagggcaacaaaaccaacgcgtcgtcaaactggaagacggtagcgttctcaaccgctactgggacgatcgggatacgccccgccctgaatcctgggttgaagatatcgctaccgtcaaaagcaaccccaaccgcccggcaacggagatctatcgggacctccgttctgctgccgcctccggctgggatttcagctcccgctggatggataatccgcagcagctcagtaccattcgtaccaccactattgtccctgtcgatcttaacgctctgctgtatcagctggagaaaaccctcgcccgcgccagcgctgcggcgggcgatcgggccaaagcctcgcactatgacgcgctggccaacgcgcggcaaaaagccattgaaatgcatctgtggaataacaaagagggttggtatgccgactacgatctgaagaacaataaaatccgtgaccaactcaccgctgccgcgctgttcccgctctatgtaaacgccgccgcgaaagatcgcgccgcgaaagtggcggcggcggcccaggcgcatctgctacagcctggcgggctggctaccacctcggttaaaagcggacagcaatgggatgcgccaaacggctgggcgccgttacaatgggtcgctgccgaaggattgcaaaattatgggcaggatgacgtggcaatggaagtcacctggcgctttttaaccaatgtgcagcacacctacgatcgcgagaaaaaactggtcgaaaaatatgacgtcagcagcaccggaaccggcggtggcggcggcgaatatccacttcaggacggctttggctggaccaacggcgtgacgctgaaaatgctcgatctgatttgtccgcaggaaaaaccgtgcgatagcgtaccgtctactcgtccggcatcgttaagcgcaacgccgacaaaaacgccgtctgcagcgacgcagtaa

SEQ ID NO: 368344 - DNA, 1275 bp, Salmonella enterica
atggataagttatcttacgcttcagatagcagcacatctgcctggaatacctacctgcaacaaatcgagcgtgtggccccttatctgggcgagttatccccctgggtggatactctgcgccacccaaaacgcgctctgatcgtcgatattccggtacaaatggatgatggcactattcgtcatttcgaaggatatcgcgtgcagcacaacctctcccgaggtccgggtaaaggcggtgttcgctaccatcctgacgttgatctcaatgaagtgatggccctgtcagcatggatgaccatcaaatgtgccgcgctgaacctgccatacggcggcgctaaaggcggtatccgcgtcgatccgttctcgctgtcggaaggtgaactggagcgtttgacccgccgctataccagcgagatcggcattatcatcgggccgcagaaagatattcctgcgccggatgtcggcaccaacggtaaagtgatggcctggatgatggatacgtattccatgaatcatggcacgacggtcactggcgtcgtcaccggtaagcctatccatcttggcggttcgctgggccgtgaaaaagcgacggggcgcggcgtttttgtcagcgggctggaagccgcacgtcgggcgaatattgctgttgaaggcgctcgcgttgcggttcagggttttggtaacgtcggcagcgaagccgcgcgtctgtttgcaggcgctggcgcccgtgtcgtggcgattcaggatcataccgcgaccctgtttaacgccaccggtattgacatgaaggcgctcacggcatggcagacagaacacaaacagatagccggtttcccgggcgcggaaactatcgccagcgatgcgttctggcgtctggagatggatattctgatcccggcggcgcttgaaggtcagataactcgtcagcgcgcggaagccctgacgtgtaagctggtgctggaaggggctaacggcccgacctatccggatgctgatgatgttctggccagccgtggtatccttgtggtgcctgacgtggtctgtaacgcaggcggcgtaaccgtcagctacttcgaatgggtacaagatatggccagcttcttctggagcgaagaagagatcaacgcgcgcatggacaaaatcatgaccgacgcgatcgtccatgtctgggagaaagcggctgagaaatcctgttctctgcgcaccgcagcctatattgtcgcctgtgagcgcattctgttggcccgtaaagatcgcggtatctatccgggttaa

SEQ ID NO: 368345 - DNA, 1137 bp, Salmonella enterica
atgttggattatgaaacgttgcggttcatttggtggctgctgatcggcgtcatcctggtggcatttatggtaactgacgggtttgatatgggtgtcggttgcctgctcccgctgatagcgcgcaacgatgacgaacgccgggtattgatcaatagcgtgggcgcccactgggaaggaaaccaggtatggttgattctcgcgggcggggcattattcgccgcctggccacgggtctatgccgccgcgttttccggtttttatgtggcgatgatcctggtgctgtgtgccctcttctttcgcccgctggcctttgattatcggggtaaaatcgccaatgcccgctggcgcgcgctgtgggataccggtctggttatcggcagcctggttcccccagtcgtattcggcatcgcgttcggcaacctgtttttaggcgtgccgtttgccttcacgccgcagcttcatgttgactattttggcaccttctggcagttactctcgccctttgccctactgtgtggattattgagcctgtcgttggtgattatgcaaggaggcgtctggttacagttgaaaacggagggcgttattcgtcaacgggctctgtcggccacccgccacagcgcgctgctgatcgtgatctgcttcctgctggccggttactggctgtgggccggcgttgatggctttgtcttgctcacgcaggatgccaacggcccttccaatccgctcttaaaaggcgtggcgatactccctggcgcatggatgaaccactttatacgctcgccgctactgctcatcatcccgttgctcggtatgatcctgccgattctggctttctatgcctgccttcgcggtcagactattcgtggatttctgttcgcttccctgacccaggcctgcgtcatctttaccgccggcataacgctatttccttttgtgatgccgtcgagtgttagtcctctctccagcctgacggtgtgggacagcacctccagccagatgacgctcgaaatcatgctggtgattgtgctgatttttctgccaatcgtactgctctatacgctgtggagctattacaaaatgttggggcgtatcaacctggagaccctccgccgcaacgatcatgaactttattag

SEQ ID NO: 368346 - DNA, 1545 bp, Salmonella enterica
atgtgggatgtcattgacttatcgcgctggcagtttgcgctgaccgcgctgtatcactttttatttgttcctcttacgcttgggctgatttttttgctggccgtcatggagacgatctatgtggtgacggggaaaaccgtctaccgcgatatgacgcgtttctggggcaagctcttcgggatcaattttgctctcggtgtggctaccggcctgaccatggagtttcagttcgggactaactggtcgctctattcgaactatgtgggcgatattttcggcgcgccgctggcgatggaagcgttactggccttctttctcgaatccacttttgtcggcctgttctttttcggctggcagcggctgaataaataccaacacctgctggtcacctggctggtggccttcggctccaatatttcagcattatggattctgaatgccaatggctggatgcagtatcctaccggcgctcatttcaacatcgatacgttacggatggaaatgagcagcttcagcgatctggtctttaacccggtgagccaggtgaaattcgtccataccgtcatgtccggttatgtcaccggcgccatgtttattatgtctatcagcgcctggtatctgctacgtggccgcgagcgtgaggtggccttgcgctcgtttgctatcggctcagtattcggcaccctggccattctgggaaccctgcaactgggcgacagttcggcctacgaggtcgcccaaattcagccggtgaaactggcggcgatggaaggcgaatggcaaaccgaacccgcgcccgcgccgtttcatctgattgcctggccgcagcaggaacaggagcgtaatgcatttgccgtgaagatccctgctctgctgggtattctggccacccattcgctggatacgccagttccggggttaaaaaacctgatggacgacgctctgccgcgcctgaagcgtggccgggaggcctggctgctcatgcaggagatagcgcaaggcaatcgctcgccacaggtactgaatgcgtttcacgccgttgagggcgatctggggtacggcattctgctggcgaaatatgccccggatatgaaccatgtgacgccggagcagtatcgtgcggcccagcgtggcgctattcctcaggtggcgccggtgttctggagtttccgtattatggtcggctgcggttcgctgctgttagtggtgatgttgattgcgttgatacagacgctgcgaatgcgtatcgaccagcatcgctgggtattgcgtatgacgctgtggagcctgccgttaccgtggattgccattgaagccggttggtttatgacggagtttggccgtcagccctgggcgattcaggacattctgccgacctggtacgctcactccgcgctgacgccgggccagttggccttctcaatggggcttatcctcggactttacaccctgtttttaatcgcggaagtctatctgatgcagaagtacgcgcgtcttgggccgagcgccatgcaacatcaacaacaagcgcaacaacagggataa

SEQ ID NO: 368347 - DNA, 849 bp, Salmonella enterica
atgagcaacgccttttttcatctgctggggccaggtacgcagcctgatgacgctagtttctcgatgaatcccttaccgctcacctgtcaggtcaatggcgacccaagtatggcggcgctggagcgctgcgctcacagcccggcggtgatggcattgttgaccgatctgcgaggtcagcttgcccggcgcatcccggaagtcggcgacgtgctgggatgggagttatctcccctgaatgccgatgatctctcattcctcaatacgctattgggcgaaggcgaagtctcggtacgcattcagcatccggacgggagtgaaagcgagatccaggagaccatcttctgcggcctgtggcgggtacgccatctgcataaccgacgtctgctgacggatcgtctggaagcgggtagcgcgcccctgacattatggcaagcggctaccgccgatacgctgcctgacgactctctactgcctccgcctgtcgctggcctgatgaatggactgccgctggcccatgaattattggcgcacgtacgcgatccggcgttgcaacctcacagcatcaatttgacccaactgccgctcagcgaggccgatcgcctttttctggcgcgtttatgcggacacgggaacatccagattcgcatctccgggtatggcgaaagccaaatcaacgccacagcattgcgccatctctggcatgtgcgctgtctggacgcccttaaagggccattgctcgatagctatgagatttgtcttttgccggagctggtactggcggccccggaagatctggccgattcgcgccagcgcctggatgaagtctgccgatggctggagacgcgctaa

SEQ ID NO: 368348 - DNA, 405 bp, Salmonella enterica
gtggcgaatgacaccccgttctctgcgctatggcaacgcctgttaacccgtggatggcaaccggtagaggcttctacggtagacgactggatcaaacgggttggagatggcgtcatcctgttaagtagcgatccgcggcgtacgccggaagtcagcgataacccggtgatgattgccgaactcctgcgtgagttcccgcagtttgactggcaggtggcggtggccgaccttgaacaaagcgaagctatcggcgatcgctttaatgtacgtcggtttccggcgacgttggtttttacagacggcgagctacgcggcgcgctcagcggcattcatccctgggctgaactgctcacgctgatgcgttcgatggttgacactcccgcagcgcaggagacagtacaatga

SEQ ID NO: 368349 - DNA, 597 bp, Salmonella enterica
atgaatgcgcaacgcgtagtggtgatggggttaggaaacctgctgtgggccgatgaaggattcggtatccgggtcgcggagcgtttgtatgcccgatatcactggcctgaagaggtagaaattgtggacggcggtacgcaagggctaaacctgttaggttatgttgagcaagccagccatctcctgctccttgacgcgatcgattacggcctggcgccgggcagcctgcgaacctatgccggcgagaaaatccccgcgtatctcagcgccaaaaaaatgagcctgcatcaaaacagtttttccgaagttctggcgctggccgacatccgcgggcatctgccctgtcacattgcgctggtcggtctgcaaccggcgcacctggacgactacggcggtagcctgagcgaaatagctcgcggccagctaccggcggcggaacaggccgccctggcgcaactggccgcctgggggatcgtaccgcaggcaaacgaggtcgcacgctgcctgaactataaatgcctgtcgatggaaaattatgagggagtgcgcatacgtcagtatcagacacgtctggagggcaaaagaagtggcgaatga

SEQ ID NO: 368350 - DNA, 732 bp, Salmonella enterica
atgactggaaagctatctccacgcgtcggggaggcgcgtgatactgccgtcaaccactatgtgtttgaagcgccggtacgcctgtggcactggctaacggtggcctgcatgttggtactgatggtaacaggctacttcattggccggcccttgccgtcggtgagtggcgaggcgacctatctgttttacatgggctatatccggctgatccactttgccgccgcgatgatctttaccgtgttactgctggggcgaatttattgggcctgtgtcggcaaccgctattcgcgagagctgtttatcgtcccggtctggcgtcgcagttggtggcaaggcgctttctccgtggtccgctggtatctgtttctggagaaaaaaccgggaagcgacatcggacataaccctgtcgcgcaggccgcgatgttcggctatttcctgttgtcggtatttatgatcctcaccggtttcgctctgtttggcgagcatagccagtacgccatctttgcgccgttccgctatgtggttgaatttttctactggaccggcggcaactccatcgatattcacagctggcaccgactgggtatgtggctgatcgccgccttcatcgtcgggcacgtttacctcgctatccgggaagacattatgtccgacgatacggtgatctccaccatgatcaatggctatcgcagccacaaattccccaaaccgcacgacaaggagccctcatga

SEQ ID NO: 368351 - DNA, 1794 bp, Salmonella enterica
atgagtaaccagtatcaaacccagggttataccgttaacgacgccggccgtcgtctgatcgtggacccgattacccgcatcgaagggcatatgcgctgcgaagtgaacattgatgagcaaaacgtcattaccaatgccgtttcctgcggcacaatgttccgcgggctggagatcattctgcaaggccgtgacccgcgtgacgcctgggcgtttgttgaacgtatttgtggtgtatgtaccggggtacatgctctggcatcggtgtacgctatcgaagatgcgattggtatccaggtgccggataacgccaatattatacgtaacatcatgctggctacgttgtggtgtcacgatcatctggtccatttttatcagttagccggtatggactggattgatgttctgaatgcgctgaaagccgatccgcgcgccacctcgcagttggcgcaaagcctttccgcctggccgatgtcatcgccgggctacttctttgacgtacaaaatcgattaaagaaatttgtcgatggcggccagcttgggatattccgtaacggctattggggacatccacagtacaaactgtcgccagaggctaatctgatgggctttgcccactatcttgaagccctcgacttccagcgcgagatcgtcaaaatccataccatatttggcggtaagaacccccatcctaactggatcgtcggcggaatgccgtgcgcgatcaatctcgatcaaagcggcgcggtcggggctatcaatatggagcgcctcaacctggtgcagtcgatcatcacccgcaccgccgacttcattaacaacgtgatggttccggacgcgctggctatcggccagttcaataaagcatggagtcaaattggcaccggtctgtcggataaatgcgtgctgagctacggcgcatttccggacattgccaacgacttcagccagcaaagcctgttaatgccgggcggcgcggtggtcaatggcgattttaaaaatgtcatgccggtagatttggccgatccgcagcagatacaggagtttgtggatcacgcctggtaccgctatccggacgatcggctggggcgtcatccttttgacggcattaccgatccctggtacaacccgggtgatgtcaaaggcagcgatacgcatatccagcagctcaacgagcaggaacgttactcctggattaaagcgccgcgctggcggggtcatgccatggaagtcggcccgcttgcccgaacgcttatcgcgtaccacaaaggggatgccgccaccatagagtcggtagatcgcatgatgtctgcccttaaactgccgctctccggtatccagtctacgcttggccgtattttatgccgcgcgcacgaagcgcaatgggccgtcggtaagctgcagtattttttcgacaggcttatgaccaacctgaaaaacggcgacctggccaccgccaataccgagaaatgggaaccggccagttggccgcagcactgccgcggcatcggttttaccgaagcgcctcgtggagcgttgggacactgggcgtcaatacgcgatcagaagattgaactctatcagtgcgtggtccccaccacctggaacgccagcccgcgcgatcctaaaaaacagatcggcgcctatgaagcggcattgatgggaacgcaaatggcgattcccgaccaaccgttagaaatcctgaggacgctgcacagcttcgacccctgcctcgcctgttcaacccacgtgctcggcgacgacggcagcgaactgattgccgtccaggtacgctaa

SEQ ID NO: 368352 - DNA, 1119 bp, Salmonella enterica
atgaataacgaggagaccttttatcaagccatgcgtcgtaagggagtgacccgacgcagctttctcaaattctgtagccttgctgccacatcgctggggctgggcgccggaatgacgccaaagatcgcctgggcgctggagaataaaccgcggattccggtggtctggattcatggactggaatgcacctgctgtaccgaatcctttatccgttcctcgcacccgctagccaaagatgtgatcctctcgctgatttccctcgattatgacgacaccctgatggccgccgccggcgcacaggccgaagaagtctttgacgatattaccactcgctacgccgggaaatacattctggcggtggaaggcaatccgccgttaggagagcaaggaatgttctgtatcagcggcggccgcccgtttattgaaaaactgaagaaagccgccgcgggcgccagcgctattatcgcctggggaaactgcgcctcctggggttgcgtccaggccgcccgccccaatccgacccaggcaacgcctatcgataaagtgatcaccgacaagccgatcgtgaaagtccctggatgtccgccaatcccggatgtcatgagcgccattatcacctatatggtgacgtttgatcgtctgccggaactcgatcgcatgggccgtccactgatgttctacggtcagcgtatccacgataaatgctaccgccgcgcccattttgacgccggtgaatttgtcgagagctgggatgacgccgccgcccgcaagggatactgtctgtacaagatgggctgtaaagggccaaccacctataacgcctgctcctccacacgctggaatgacggcgtctcctttcctatccagtccggtcacggatgtctgggatgttcagaaaatggtttctgggatcgcggctcgttttatagccgcgtggtggatattccccagatgggtacccattcaaccgccgatacggtggggctgaccgcgctgggcgtggtcgcggcgggcgttggcggtcacgctgtcgccagcgcgctcaaccaacgtaaacgccacaaacaacagttagcgcaagccgaacaacagccggacaatgaggataaacaggcatga

SEQ ID NO: 368353 - DNA, 453 bp, Salmonella enterica
atgtttcagaattcaggcgaagtgattatgtacttcggttgttttttattttccttaccatttattcttgttttaattagaaaagtgttttttgttgggctacaatataattttcttcatagccacaaagcaggtgtcgcttttggattgctacttatatatggacttatcatcgcatacatagggcagtcgtataaagacaggatctgcaatgatgtgatgctttcttattatgaacaaggtataaattattctgagctaacgccatcgcagaggataaatatattatatgcgagtattcatatgcctatagatttcaaaaaaggtaacgacgtctctaagtacttacctgcgttagaaaaatacacataccaatcaaaaatatataaacataaatcaatagaaaaggccaaagaagagacaaatcaatttatgaaaacattcacgcaataa

SEQ ID NO: 368354 - DNA, 621 bp, Salmonella enterica
gtggatagttttatttataatttaatcattttcttatttattgcctttttgataacgttttttatattcacacaaaggataaaagctaaagcaatagataaaattgacaatagtttgacgctttacagcattatctttaacaagggcgttcaggaccatgtcacatctcctcagaatatcatatcacatttaaaaatcgatcgtttttacccgttggtcacttacctccctgcaatcccactcttttttcttgttttatattgccaggaaggcttgtcattagcaatattaacaatttccatcatagcattactttcatttgctgcattgagtcttacaatgtcacttgatatatatgaaaatgctattgttcataatactttgctaaggaaaagagtctttttatttagccaacttgactctattgatgaaaaaatagactatgacggtgttccaaacacaaaagaagaagcactaatgtatccaagatattatgccatagtaaaaaatgggcgagtcatcttttgcataccgaaaacacttagcaattactccagtttcaaaaaaaatttcaatgaatcgtctatttttataaaagaaataatagacaacgaatattaa

SEQ ID NO: 368355 - DNA, 1092 bp, Salmonella enterica
atgggattcaaatgcggtatcgtcggtctgcccaacgtcgggaaatccaccctgttcaacgcgctgacaaaagccggtattgaagcggcaaactttccgttctgcactatcgaaccgaataccggtgtcgtgccgatgcccgatccgcgtctggaccagttggctgagattgttaaaccgcaacgcattctaccaaccacgatggagttcgtggatatcgccggtctggtaaaaggcgcgtccaaaggcgaagggttgggtaaccagttcctgaccaatatccgtgaaactgaagctatcggtcacgtggttcgctgctttgagaacgacaatatcatccatgtggcgggtaaagtaaacccggcagaagatattgatgttatcaataccgaactggcgctggctgacctcgatacctgcgagcgcgctatccatcgcgtacagaagaaagccaaaggcggcgataaagacgccaaagcggaactggccgcgctggaaaaatgcctgccgcacctggccgaagcggggatgctgcgttcgctggacctgacggacgaagataaagcggctatccgttatttaagcttcctgacgctgaagccgacaatgtatatcgctaacgtcaatgaagacggttttgaaaataacccgtatctggaccaggttcgcgaaatcgccgcgaaagaaggttcggtcgtggttccggtgtgtgccgccgtcgaagctgatattgctgagctggatgatgacgagcgcgacgaatttatggctgaactgggtctggaagagccggggctgaaccgcgttattcgcgcaggttatcgcctgctgaacctccagacctactttaccgccggagtgaaagaagttcgcgcatggaccattccggttggcgcaaccgcgccgcaggcagcaggtaaaatccataccgacttcgaaaaaggctttatccgcgcccaaactatcgcctttgacgactttattacctataaaggtgaacaaggcgcgaaagaagccggtaagatgcgagcggaaggcaaagattacatcgttaaagatggcgatataatgaacttcctgttcaacgtctaa

SEQ ID NO: 368356 - DNA, 585 bp, Salmonella enterica
gtggcaattaaattgattgttggtctggcgaatcccggcgcggaatatgccgcgacgcgacacaatgcaggcgcatggtacgtcgatttactggcggagcgcctgcgcgcgccgttgcgtgaagagcctaaattctttggctatacctcacgcatcacgctggaaggggaagatgttcgcctgctggtacccaccacgttcatgaacctcagtggtaaagcagttggcgcaatggccagtttttaccgtattcagccggacgaaattctggtcgctcacgacgagctggatctcccgccgggcgtcgcgaaatttaaacttggcggcggccacggcggccacaatggtctgaaagacatcatcagcaagctgggcaataatcccaactttcaccgcttacgcgttggaattggtcatccaggcgataaaaataaagttgttggtttcgtgctgggtaaaccccctgtttctgaacaaaaattaattgatgaggccattgacgaagcggcacgctgtacggaattgtggttcaaagagggtctggccaaagcaacaagccgtttgcatacctttaaggcgcaataa

SEQ ID NO: 368357 - DNA, 279 bp, Salmonella enterica
atgaaacgcaaaaacgcttcgttattcggtaacgtgctgatggggttggggctggtcgtgatggttgtcggcgtgggttactctattttaaaccaactgccgcagtttaatttgccgcaattttttgcgcatggcgcaatactgagtatttttgtcggggcggttctttggctggcaggggctcgtgtaggggggcatgagcaggtgagcgacaaatattggtgggtacgtcactatgacaaacgttgccgccgtaacgacaatcgtcgtcatagctaa

SEQ ID NO: 368358 - DNA, 1659 bp, Salmonella enterica
atgcctttccgcgctctcatcgatgcttgctggaaagaaaaatataccgcctcccggttcacccgcgatgtgatagccgggatcaccgtcgggattattgctatcccgctggcgatggcgctggcaattggcagtggcgttgcgccgcagtatggcctctatacctccgctgtcgccgggatcgtgatcgcgctaaccggcggctcgcgctttagcgtttccggccctaccgccgcgtttgtggtgattttgtatccggtatcgcaacagtttggtctggcgggcctactggtcgccacgctgatgtcgggcttcttcctgatccttttcggcctggcgagactggggcgattgattgaatatatcccggtgtcggtcacgttgggttttacctcagggattggtattaccatcggtaccatgcagattaaagattttcttggtctgcagatggcccatgtgccagagcactatttgcagaaagtcggcgcgctgtttatggcgttgcccaccgtcaatattggcgatgccgccattggcgtggtaacgctgggaacgttgattttctggccgcgtctcggtattcgtctgccaggacatcttcccgcgctgctggccggttgcgccgtaatggggattgttaatctgctgggcggcaatgtggcgactatcggctcacagttccattacgttctggctgacggcactcagggcaacggcatcccgcagctcctgccgcaactgatgctgccgtggagtcttcctggctccgatttcacgctaagctgggattcactgcgcgcgctgctgccagcggccttctcgatggcaatgctgggggcaatcgaatcattgctctgcgccgtcgtgctggacggcatgaccggcaccaaacataaagctaacagcgaacttatcggccaggggctggggaatatggtcgcgccgttctttggcggcatcaccgccaccgccgcgattgcccgctctgccgccaacgtccgcgctggcgcgacctctcccatctcggcggtaattcacgctatcctggtcattctggctctactggtcttggccccgctactctcctggctgccgctttccgcgatggcggcgctactgctgatggtggcatggaatatgagtgaagcccataaagtggtggatctgttacgccatgcgccgaaagacgacattatcgttatgctgctgtgcatgtcattaacggttctgtttgatatggtcatcgccatcagcgtggggattgtccttgcttccctgctgtttatgcgccgtattgcgcgaatgactcgacttgcgccggtcaatgttgatgtacctgaagatgtgctggtgctgcgtgttatcggtccgctctttttcgccgcggcggaagggctgtttaccgaccttgagtcacgtattaagggcaaacgtatcgtcgttctgaaatgggacgcagtaccagtgctggatgcaggcgggcttgatgcttttcagcgttttgtgaagcgtctgccggagggttgcgaattgcgtatcagtaatctggagttccaaccgctgcgcacaatggcgcgtgccggtatcaaacctattcctgggcgtctgaccttcttcccaaacaggacggaggcgttagcggatttactaagttaa

SEQ ID NO: 368359 - DNA, 948 bp, Salmonella enterica
gtgcctgatatgaagctttttgctggtaacgccaccccggaactagcacaacgtattgccaaccgcctgtacacttctctcggcgacgccgccgtaggtcgctttagcgacggcgaagtcagcgtacaaatcaacgaaaatgtacgcggtggtgatattttcatcatccagtccacttgtgccccaaccaacgacaacctgatggaattggtcgttatggttgatgccctgcgtcgtgcttccgcaggtcgtatcaccgccgttatcccctactttggctatgcacgtcaggaccgtcgcgtacgttccgcccgtgtgccgattaccgcaaaagttgtcgctgacttcctgtccagcgtcggcgttgaccgcgttctcaccgtagatctgcatgctgaacagatccagggcttctttgacgttccggttgataacgtgttcggtagcccaatcctgctcgaagatatgctgcaactgaatctggataacccgatcgtggtttccccggatattggcggcgtggttcgtgcccgcgctatcgctaagctgctgaacgataccgatatggctatcattgataaacgtcgtccgcgcgcgaacgtttctcaggtgatgcacatcatcggcgacgtcgctggccgtgactgcgtgctggttgatgatatgatcgataccggcggtactctgtgcaaagcagcagaagcattgaaagaacgtggcgctaaacgcgtgtttgcctacgcgacgcacccgatcttctcaggcaatgcggcaaacaacctgcgcaactccgtcattgatgaagtcgttgtctgcgacaccattccgctgaccgacgaaatcaaagcgctgccgaacgtgcgtaccttgaccctgtcaggtatgctggccgaagcgattcgccgtatcagcaacgaagaatcgatttccgccatgttcgagcattga

SEQ ID NO: 368360 - DNA, 852 bp, Salmonella enterica
atgatgacccattggccttctccggcaaaattaaatctgtttttatatatcaccggacagcgtgcagacggctaccacacgctgcagacgctgtttcagtttctggattatggcgacacactccacatcgaaccgcgtcgcgatggcgaaatccatttattaacgccggtaaccggcgttgaaaatgaagacaacctgatcgtccgcgccgcgcggctgttgatgaaagtcgcctcggagagtggacgcctgcccgccggaagcggcgcggatatcagcattgagaagcgccttcccatgggcggcggtctgggcggcggctcgtctaacgccgcgaccgttctggtggcgctcaatcatctttggcaatgcgggctttccattgatgaactggcgacgctcggcctgacgctcggcgccgacgtcccggtctttgttcgtggccacgccgcgtttgccgaaggcgtaggcgaaatattaacgccggtgaatccgccggaaaaatggtatctggtcgcgcaccctggcgtaagcattccgacgccggttatctttaaagatcctcaattgccgcgtaatacgccaaaaaggtcaatagatacgttactaaaatgtgaattcagcaatgattgcgaggttatcgcaagaaaacgttttcgcgaggttgatgcggcgctttcctggctgttagaatacgcgccgtcgcgcctgactgggacaggggcctgtgtctttgctgaattcgatacagagtcttgtgctcgccaggtgcttgagcaagccccggaatggctcaatgcttttgtggcgaagggtgtcaacctttccccattgcatcgagagttactctaa

SEQ ID NO: 368361 - DNA, 624 bp, Salmonella enterica
atgaccctgcccgattttcgcctgattcgtctactgccgttagcaagcctggttctcaccgcctgtacgcttcctgggcataaaggcccgggcaagagcccggattcccctcagtggcgccagcatcagcaagaggtgcgtcatctgaatcaataccagacgcgcggcgcctttgcttacatctcagatgatcagaaagtctatgcgcgcttcttctggcaacagaccggacaggatcgctaccgcctgctgcttaccaacccgctgggcagcaccgagctggagcttaacgcccagccgggcaacgtccagttggtggataacaaaggccagcgttataccgccgatgacgccgaagagatgatcggcaaactcaccgggatgccgattccgttaaacagcctgcggcagtggatcctcggtctgcctggcgatgccactgactacaaactggacgaccagtaccgcctgagcgaagtgaactatcgccaggatggtaaaaactggaaagtggtttacggtggctatgacagcaaaacgcagcctgccatgcctgccaatatggagctttccgacggcagtcagcgcattaagctgaaaatggataactggattgtgaaatga

SEQ ID NO: 368362 - DNA, 1257 bp, Salmonella enterica
atgacccttttagcgctcggtattaaccataaaacggcacctgtatcgctgcgagaacgcgtaacgttttcgccggacacgcttgatcaggcgctggacagcctgcttgcgcagccaatggtgcagggcggggtcgtgctgtcaacctgtaaccgtacagagctgtatctgagcgtggaagagcaggataacctgcaagaagcgctgatccgctggttatgcgattaccataacctgaacgaggacgatctgcgcaacagtctgtactggcatcaggacaatgacgccgtcagccacctgatgcgcgtcgccagcggtctggattcactggtgctgggcgaaccgcaaatcctcggtcaggtgaaaaaagcgtttgcggattcgcaaaaaggccaccttaacgccagcgcgctggagcgaatgtttcagaagtctttttccgtcgccaagcgagtgcggactgaaaccgatatcggcgccagcgccgtctccgtcgcgtttgccgcctgtacgctcgcccgccaaatctttgaatcgctgtcgacggtcaccgtactgttagttggcgcgggcgaaaccattgaactggtggcgcgtcacctgcgcgagcataaagtacaaaagatgattatcgccaaccgaacccgcgagcgcgcgcaagccctggcggatgaggtaggcgctgaggttatctcgctcagcgatatcgacgcccgcttgcaggatgccgatattatcatcagttcgaccgccagcccgctgccgattatcggtaaaggcatggtggagcgcgcattaaaaagccgtcgcaaccagccgatgctgctggtggatatcgccgtaccgcgcgacgttgagccggaagtcggcaaactggcgaacgcttatctttatagcgtcgatgatttacagagcatcatttcgcataatctggcgcagcgtcaggctgcggcggtggaagcggaaacgattgttgagcaggaagccagcgagtttatggcctggctacgcgcccaaggggccagcgagaccattcgggaataccgtagtcagtcggagcagattcgtgacgaactgactaccaaagcgctgtcggcccttcaacagggcggtgatgcgcaagccatcttgcaggatctggcatggaaactgaccaaccgcctgattcatgcgccaacgaaatcacttcaacaggctgcccgtgacggggatgacgaacgcctgaatattctgcgcgacagcctcgggctggagtag

SEQ ID NO: 368363 - DNA, 1083 bp, Salmonella enterica
atgaagccttctatcgttgccaaactggaagccctgcacgaacgccatgaggaagttcaggcgttgctgggcgatgcgggaattattgccgaccaggaccgctttcgcgcattgtcgcgcgaatatgcgcaattaagcgacgtttctcgctgttttacggactggcaacaggttcaggacgatatcgagacggctcagatgatgctcgacgatcctgaaatgcgagaaatggcgcaggaagaactgcgcgaagcgaaagaaaaaagcgaacaactggagcaacagttacaggtactgctgctgccgaaagatccggacgatgaacgaaacgcgttccttgaggttcgcgccggtaccggcggcgacgaagccgcgctgtttgccggcgatctgttccgcatgtacagccgttatgccgaagcgcgccgctggcgcgtggagatcatgagcatgagcgaaggcgagcatggcggttataaagagatcatcgccaaaatcagcggcgacggggtgtatggccgactgaagtttgagtccggcggacaccgcgtacagcgtgttccggcgaccgagtcgcaggggcgtatccatacctccgcctgtaccgtcgccgtgatgccggagctgccggaagccgagctgccggatattaacccggcggatctgcgcattgatacgtttcgttcttccggcgcgggcggtcagcacgttaacaccaccgactccgctatccgtattacccacttgccgaccggcatcgtggtggaatgccaggacgagcgttcgcagcataaaaacaaagcgaaagcgctctcggtgctcggggcgcgcattcacgccgccgaaacggcaaaacgccagcaggccgaggcgtcaacgcgccgcaacctgcttggcagcggcgatcgcagcgatcgtaaccggacctataatttcccgcaggggcgcgtgaccgatcatcgtattaatctgacgttatatcgccttgatgaaacgatggaaggtaagctggatatgctgattgagccgattgttcaggaacaccaggctgacctgttagccgccttatccgagcaggaataa

SEQ ID NO: 368364 - DNA, 834 bp, Salmonella enterica
atggattttcagcactggctgcatgaggcggtaaaccagctccgggacagcgacagcccccggcgcgacgccgagatcctgctagagtacgttacgggcaaggggcggacgtatatcatggcctttggcgaaacgccgcttaccgacgtccagcaacaacagctcgcggacctgctgcagcggcgtaaacagggcgaacctattgcgtacctgacgggcttacgcgaattctggtcgctgccgctcttcgtttctcccgccacgctaatcccgcgcccggataccgaatgtctggttgaacaggcgttggcgcgattgccggtaaaaacctgtcgtattctggatttaggcaccggaaccggcgcgattgcgctggcgctggcctgcgagcgaccggattgcgaggtgactgcggtcgatcgtatgcctgatgcggttgcgctggcgatacgcaacgcggaacatttggctatccggaatgtgcgtatactgcaaagttgttggttcagcgcgctatcggggcagcagttcgacatgattgtcagcaatccgccctacattgacgcgcaggacccgcaccttagcgaaggcgatgtacgctttgaaccgcgctcggcgttggtggcggacgaaaacggtatggcggatcttacgcatattatcgataacgcccgccagatgttaacgcccggcggcttcctgctgctggaacacggttggcagcagggcgaagcggtaagagcggttttcaggcggtctggttactcggatgtagaaacgtgtcgtgattatggcggtaatgaacgcgtgacctgcggacgttttacgccatga

SEQ ID NO: 368365 - DNA, 390 bp, Salmonella enterica
atgacaattgcaatgttgctcacgcttcatcttatctgtgttgcgctctccgtcagtttgtttgtcgctcgttactggtggcgctattgcggccatgcgttggccgccgcgcgctggacacgaatcgtgcctcccgtcatagataccctgttactgcttagcggtattgggttaatcgttaaaacgcacatcctgccattcacggagtcgggctcatggctgactggaaaactgtttggcgttatcatctacatcgttttgggttttattgcgcttgattatcgtcaggcgcgcagccagcaggcgcgttttatcgctttcccgctggcgctggtggtgctgtacatcatcattaaactcgccaccacaaaaataccgttactggggtaa

SEQ ID NO: 368366 - DNA, 810 bp, Salmonella enterica
atgaggtcgttagctgatttcgaatttaacaatgcgccgctgtgtgatggcatgatcctggcatcagagatgattcgcctggattttcccacgcagtttgtctacgacgaactggaacgtctggtcagtctggcgcaggaagaaattagccagctcctgtctcaggatgagcaactggaaaaattgctggcacttttttacggcgagtgggggttcacggactcccgcggcgtctaccgtctttctgatgctttatggctcgataaagtcctgaaaaaacgccagggtagcgcggtatcgttgggcgctattttattatggatagcaaaccgtcttgatttgccgttggtgcccgttatcttcccaacgcagttgattttgcgtattgaatcgctggaaggggaaatgtggctgattaacccgttcaacggtgaaacgcttgatgaacataccctcgaagtctggttaaaaggcaatattagtccggtcgccgagttgtttaacgaagatttggacgaggcggataacgccgaagtgattcgtaagctactggatacgctgaaatcctcgctgatggaggaacggcaaatggagctggcgctacgcgttagcgaagcattgttgcaatttaacccggaagatccttacgaaatccgtgaccgcgggttgatctacgcgcagcttgagtgtgaacacgttgcgctgactgatttaagctacttcgttgaacagtgtccggaagacccgatcagcgaaatgattcgtgcgcagatcaacaccattgcgcacaagcaaattgttctacattaa

SEQ ID NO: 368367 - DNA, 855 bp, Salmonella enterica
atgaaacaaaaagtggttaacattggtgacattaaggtggcaaatgacctgccgtttgtgctgtttggcggtatgaacgtgctggagtcacgcgatctggcaatgcgcatttgtgagcactacgtaaccgttacccagaagctgggtattccttacgtgttcaaggcctcttttgataaagccaaccgttcctctattcactcttaccgtgggccgggcctggaagaagggatgaaaatcttccaggaactcaaacagacatttggcgtaaaagtgatcactgacgtccatgaagccagccaggcgcagcctgtggctgatgtggttgacgtgattcagctcccggcgtttctggcgcgccagaccgacctggtggaagcgatggcgaaaaccggcgctgtgattaacgtgaaaaagccgcagttcgtaagcccgggtcagatgggcaatatcgtggataagttccatgagggcggtaacgataaggtgattctgtgcgaccgcggcgcgaacttcggttatgacaacctggtggtggatatgctgggctttagcgtgatgaaaaaggtctccggcaactcgccggtgattttcgacgttacccatgcgctgcaatgccgcgacccatttggcgctgcctcgggcggtcgtcgtggtcaggtgaccgagctggcgcgcgccggtatggctgtcggtctggcgggcctgttcctggagtcgcatccggacccggctaacgcgaagtgcgacggtccttccgcgctgccgctggcgaaactggagcagttcctgacccagataaaagcgattgatgatttggtgaaaagcttcgacgagctggataccgagaactga

SEQ ID NO: 368368 - DNA, 1101 bp, Salmonella enterica
atgacacatgcctgtgaggcggtgaaaacccgccataaggagacttcgcttattttcccggttcttgcgctggtagtgctgttcctttggggaagcagccagtcactaccagtggttattggcatcaatatccttgcacttattggtattttaagcagcgcatttagcgtggtccgtcatgccgatgtattagcgcaccgactcggcgaaccctatggatcgcttattttaagcttgtccgtcgttattcttgaggtgagtttaatttccgcgctgatggctaccggcgatgctgcgccaacgcttatgcgcgatacgctctactctattattatgattgtcaccgggggactggtcggtttctcgttgttgttgggcgggcgtaaattcgcaacgcaatatatgaatttatttgggattaagcagtatcttattgcgctatttccgctggcgattattgtgctggtttttcccatggcattgccgcaagccaatttctctaccagtcaggcattattggtcgcgttaatttccgccgcgatgtacggcgtatttttgttgattcaaaccaaaacgcaccagagcttatttatctatgaacatgaagatgaaggcgatgatgacaatccacaccacggtaaaccctccgcgcacagtagcggctggcatacggtctggttactcattcatttaattgcggtcattgccgttaccaaaatgaatgccagcccgctggaggcgttgctgaccagcatgaacgccccggtcgcctttaccggtttcctggtcgcgctgttaattctctcgccggaaggactgggcgcgctgaaggcggtactgaataatcaggttcagcgggcaatgaatctgttcttcggatcggtgttggcgacgatttcattaaccgtgccggtcgtcacgctcatcgcctgggcgacaggtaatgatctggtgtttggtttaggcgcgccggaaatggtagtgatggtggcctcgttagtgctgtgccatatttcgttctctaccggacgcaccaacgtgctaaacggcgcggcgcatctggctttatttgccgcctatctgatgacgatttttgcctga

SEQ ID NO: 368369 - DNA, 231 bp, Salmonella enterica
atgccgtataaagccaaaagtgatttacccgataatgtgcggaatgttcttccaacccatgcccaggacatttacaaagaagcctttaatagcgcctgggagcaatataaagataaagccgatcgtcgtgatgacgccagccgcgaggaaaccgcacacaaagtcgcctgggcggcggttaaaaacgattatgaaaaaggcgagaatgataaatggcataagaaaaaataa

SEQ ID NO: 368370 - DNA, 354 bp, Salmonella enterica
atgcaaaatatcgtcattatcgctaacggcgccgcctacggcagcgaatcattatttaatagcctgcgtctggccattgcgctgcgcgagcaggaaagccatctcgatttacgcctgtttttgatgtcagatgccgtaaccgcagggttacgcggtcaaaaaccagccgaaggctacaatattcagcaaatgctggaaattctgaccgcgcaaaacgtaccggtaaaattatgcaaaacctgtgcggacggacgtggtatcactcccctgccgctgattgacggtgtggaaatcggaacgctggtcgagctggcgcaatggacgctggcggcggacaaagtgctgacattttga

SEQ ID NO: 368371 - DNA, 1425 bp, Salmonella enterica
atgccattcctcttatcttttgttgtagaagttgccgacacgttgagccgtattgtttttcgttcattctcactctcgcttctcttgctggctgccagcggtacgatccgtgcgcaggcgcaagaccctttcacgcaaaaccgtctgccggatttaggcatgatgccggaatcccacgaaggggaaaagcattttgccgagatggccaaagcgtttggcgaagccagcatgaaaaataacgatctggatactggtgaacaggcgcggcaattcgctttcggacaggtacgcgatgtggtcagcgagcaggttaaccagcagcttgaaagctggctatcagcctggggcagcgccagcgtggatattaacgtcgataacgaaggtcattttaacggcagtcacggaagctggtttatccctttacaggataaacagcgctatctgacctggagccagcttggtcttacgcaacagactgatggactggtaagcaacgttggcataggacagcgctgggcgcaggatggctggcttcttggctataataccttttacgataatctgctggatgaaaatctgcagcgcgccggctttggcgcggaggcgtggggagaatatttgcgtttatccgccaactattatcagccttttgccgactggcagacgcatacggcgaccttagaacagcgaatggcgcgcgggtatgatatcaacgcgcaaatgcggctgccgttttaccagcatatcaataccagcgttagtctggagcagtactttggcgatagcgtggatctgtttgactccggaacggggtatcacaatcctgtcgcgttaaaactgggtctcaactatacgccagtacctttgcttaccatgaccgcccagcacaaacagggcgagagcggggtcagtcaaaataacctggggctgacgcttaactaccgcttcggcgtgccgctcaaaaagcagcttgccgccagtgaagtggcgcaaagccagtcattacgcggtagccgctatgatacgccgcaacgtaactcgctgccgacaatggagtatcggcagcgtaaaacgttaacggtttttctggcgacgccgccctgggatcttacgcctggtgagacggttgcgttaaaattgcaggtgcgcagcgtgcacggtattcgtcatttgagctggcagggcgatacacaggcattaagtttgacggcaggaacggacacccgcagtaccgagggctggacaatcattatgccggcctgggatcaccgcgaaggcgcggcaaatcgctggcgtttatcggtggtggttgaggatgaaaaagatcagcgtgtctcttccaatgagatcacgctcgcgctgactgaaccgtttatcacgatgccggacgataatccgcattggcaaccgttccaggagcaataa

SEQ ID NO: 368372 - DNA, 651 bp, Salmonella enterica
atgaataatcaggaaccggcaaccatcctgttaatcgacgaccatccgatgctacgcacgggtgtaaagcagcttgtgagtatggcgcccgatatcagcgtggtcggagaagccagcaacggtgagcagggtattgacctggcggaatcgctcgatcccgatctgatcctccttgatttgaatatgccgggaatgaatggcctcgaaacgctggataaattacgcgaaaaagcgctgtcaggacgtattgtcgttttcagcgtatccaaccatgaagaagatgtcgtcacggcgctaaagcgcggcgcggacggttacctgttgaaagacatggagccggaggacttgctcaaagcgttacaacaggccgccgccggcgaaatggtattaagtgaagcgttaacgccggtactggcggccagcctgcgggccaaccgcgccaccaccgatcgcgatgtaacgcaactcaccccgcgtgagcgcgatattctgaagctcatcgcgcagggattgccgaataagatgattgcccggcgtctggatatcaccgaaagtacggtcaaagtgcacgtgaaacatatgctcaagaaaatgaagctgaaatcgcgcgtggaggccgccgtctgggtacatcaggaacgcatcttttaa

SEQ ID NO: 368373 - DNA, 1797 bp, Salmonella enterica
atgtttaaacggtgtttctctcctcttacgctggttaaccaactggcgctgattgtcatgctctctaccgctatcggcgtggcggggatggcggtttccggctggctggttcagggcgtgcagggtagcgctcatgcgattaataaagcgggctcattgcgtatgcaaagctatcgactactggccgctgtcccgctggatgctaaagatcaaaagctgctggatgagatggagcaaacggcattcagcccggaactgacccgcgccgctgagcgagacgggcagcaaaagcagcttaaagcgttgcaggattactggcataacgaactctcgccagggctacagcacgcgcaaaacgcgcacgcggtcgcagaagatgtcacgcgctttgtggcgggcctggatcgcctggtgacgtcgttcgaccatactactgaattgcgtatcgaacgcgtggtattagttcaccgggtaatggcgatctttatggcgctattgctggtatttacgattatctggctacgtgttcgccttttgcagccctggaaacagttgttatcaatggcgcgcgccgtcagtcagcgcgactttacccaacgtgccaatatcagtggacgcaatgagatggccgcgttgggttctgcgctcaataatatgtctgaagaactggccgaaagttatgcggtactggaacagcgcgtacaggaaaaaacagccggtctggaacataaaaaccagattctctcgtttttgtggcaagccaaccgccgactgcattcacaggctccgctatgtgagcgtctttctccggtactgaatggcctgcaaaatttaacccagttgcatgatattgagctgcgagtctatgacctggaagatgaagataatcaccaggaatttacctgtcagtcggacatcagttgcgatgataaaggctgccacctttgcccacgtagcgccctgccgatgattaacggcggcaccaccttaaaatggcggctcaccgactctcacacccaatacggtattttgctggcgacgctgccctatggacgccatctcagccacgatcagcaacagttggtggacacgctggttgaacagcttaccgcgactctggcgctcgacaggcatcaggagcgccagcagcagttgattgtcatggaagagcgtgccaccattgcccgcgaactgcatgattctattgcccagtcgctctcttgtatgaagatgcaggtgagctgcctgcaaatgcagggcgacgtgttaccggaaagcagccgtgagttactcagccaaattcgcaatgagctgaactgctcctgggcgcaactgcgcgaactgttaaccactttccgcttacagttgacggaacccgggctacgtccggcgctggaagcaagctgccaggagttcagcgcccggtttggctttacggtaaaactggattatcagcttcccccccgcctggtgccttcacaccaggcgatacacctgttgcaaattgccagggaagccctcagcaacgcccttaaacactctcatgccgacgatgtggtggtgacagtgacgcaatgtggcaaacaggtcaaactaaaagtacaggataatggctgcggcgtcccggaaaacgccgaacgcagtaatcactacggcatgattatcatgcgcgatcgggcgcaaagtttgcgcggcgattgccaggtacgccgacgcgagactggcggaacagaggtcactgttacttttattccagaaacaaacttcacagaaacccagggagatacccatgaataa

SEQ ID NO: 368374 - DNA, 1398 bp, Salmonella enterica
atgagtcactcatccgccccggaaagggcaactggcgctgttatcacggaatggcgtccggaagatccggcattctggcagcagcacggccatcgtgtcgccagccgtaatttgtggatttctgtcccgtgtttactgctggcgttttgcgtctggatgctattcagcgcagtggcggtgaacctgccgaaagtgggatttaattttacgaccgatcagctctttatgttgactgcgctgccatctgtttccggcgcgctgctacgggtgccttactcctttatggtgccgctatttggcggacgtcgctggacagcgttcagtaccggtatcctcatcgtgccctgcgtatggttaggctttgccgttcaggataccagtacgccatttagcactttcattattatttccttgctgtgtggttttgccggcgcgaactttgcctccagtatggcgaacatcagctttttctttcctaaacaaaagcagggcggcgcgctgggtctgaacggtggtctgggcaatatgggcgtgagtgtgatgcagctggttgcgccgctggtggtttcgctctctatctttgccgcctttggcagccacggtgtagagcagccggacggttctcagctctatctggcgaacgcagcctggatttgggtgcctttcctggccatttttacgctggcggcgtggttcggcatgaacgaactggcgacgtctaaggcctcgctaaaagagcaactgccggtgctcaaacgtggtcatctgtggatcatgagtctgctgtatctggcgaccttcggatcgtttatcggtttctccgcggggttcgctatgctgtctaaaacacaattcccggatgtgcagatcctgcattatgcgtttttcggtccgtttatcggcgcgctggcgcgttcggcaggcggcgcaatttctgaccgtctgggggggactcgcgtcacgcttatcaactttgtcctgatggcgattttcagcggtctgctgttcctgacattacctactggcggcgttggaggtagctttatcgcgttctacggggtatttctggcgctatttctgacggcggggttggggagtggttctaccttccagatgatctccgttatcttccgtaaactgacgatggaccgggttaaagcggaaggcgggtcggacgaaagagccatgcgtgaagcggcgaccgatacggcggcggcgctgggctttatttccgcgattggcgcgattggcggcttttttattccgaaagcgtttggttcatctttagcattaactggttctccagtcggcgcgatgaaagtctttcttattttctatatcgcctgcgtcgttattacctgggcggtatatggacgtcattctaaaaataaaaagtaa

SEQ ID NO: 368375 - DNA, 3744 bp, Salmonella enterica
atgagtaaattcctggaccggtttcgctacttcaagcagaagggcgaaacctttgccgatgggcacggccagcttctcgaaacaaaccgggactgggaggacggataccgccaacgttggcagcatgacaaaattgtgcgctcaacccatggggtgaactgcaccggttcttgtagctggaaaatttatgtcaaaaatggtctggtgacctgggaaacacagcaaaccgattacccacgcacccgtcccgatatgccaaaccatgaacctcgcggctgcccgcgcggcgcaagctactcctggtatctctacagcgctaaccgactgaaatatccgctgatgcgcaaacgtctgatgaagatgtggcgcgaggcgaaaaaactgcatcgcgatccggtagaggcatgggcctccatcattgaagatgccgataaagccaaaagcttcaaacaggcgcgtggtcgtggcggctttgttcgctcctcatggcaggaagtgaacgaactgatcgccgcttccaacgtgtacaccgtgaaaacctatggccctgaccgcgtcgcgggcttctcacccatcccggcgatgtcgatggtttcctacgcttccggcgcacgttatctttcactgattggcggtacctgcctgagcttctacgactggtactgcgatctgccgccagcctccccgcaaacctggggcgagcagaccgacgtgccggaatccgctgactggtacaactccagctatattatcgcctggggctctaacgtgccgcaaacccgtacgccggatgcccacttctttaccgaagtacgttacaaaggcactaaaaccgtcgcggtgacgccggactatgctgaaatcgccaaactgtgcgatctgtggctggcgccgaagcaggggaccgatgcggcgatggcgctggcgatgggccacgtcatgctgcgcgagttccacctcgacaacccgcgccagtacttcaccgattatgtccgtcgctataccgacatgccaatgctggtgatgcttgaagagcgtgatggttattatgccgcaggtcgtatgctgcgcgctgccgatctcgttgattcgctggggcaggaaaataacccggaatggaaaaccgtcgctatcaacagcaacggtgaaatggtggcgccaaacggttcaattggtttccgctggggcgaaaaaggcaaatggaacctcgaacagcgcgacgggactaccggtgcagaaactgaattgcagctcagcttgctgggcagccaggatgagattgctgacgtgggcttcccgtatttcggcggcgagggttcagagtactttaatcatgtggcgctggataacgtcctgctgcataaactgccggcaaaacgtctgcaactggccgatggttcttcagcgttagtcaccaccgtgtatgacctgaccatggcgaactatggtctggaacgcggcctgaacgatgaaaattgtgccgccagttatgatgataccaaagcgtatacgccagcatgggccgagcagatcaccggcgtgccgcgggcgcagatcatccgtatcgcacgggagttcgccgataacgcggacaaaacgcacgggcgttcaatgattatcgttggcgccggtctgaaccactggtatcacctcgatatgaactatcgcgggctgatcaatatgttggtgttctgtggttgcgttggtcagagcggcggcggttgggcgcactacgtcggccaggaaaaactgcgtccgcagaccggctggcagccgctggcgtttgcccttgactggcagcgtccggcgcgtcacatgaatagcacctcttacttctataaccactccagccagtggcgctacgagacggtgaccgccgaggaattactgtcgccgatggcggacaaatcccgctatagcggccatctgattgacttcaatgtgcgcgccgagcgtatgggctggttgccgtcggcaccgcagttaggtaccaacccgctgtatattgcgcgtgaagcggaaaaagccggtatgacgccggtagattataccgtcaaatccctgaaagagggttcgattcgctttgccgccgagcagccggaaaacggtaaaaaccacccgcgtaacctgttcatctggcgttcaaacctgcttgggtcttccggtaaaggtcacgagtatatgctgaaatatctgctgggtactgagcatggtattcaggggctggatctgggtaaacagggcggtgtgaagccggaagaagtggagtggcgtgacaatggcctggacggcaaactggatctggtggtgacgctggacttccgcctgtcgagcacctgcctgtactccgatatcgtactgccgaccgccacctggtatgaaaaagacgatatgaatacctcggatatgcatccgtttattcatccgctgtctgccgccgtagatccggcctgggaatcgaaaagcgactgggaaatctacaaaggcattgcgaagaaattctccgaagtctgtgtaggtcacctgggtaaagagactgacgtcgtgacgctgccgatccagcacgattctgccgctgaactggcgcagccgctggacgtgaaagactggaaaaaaggcgaatgcgatctgattccagggaaaaccgcgccgcacatcatgaccgttgagcgcgattacccggcgacttacgaacgctttacctctatcggcccgctgatggagaaaatcggcaacggcgggaaagggattgcctggaacacgcagagcgaaatggacttgctgcgtaagctcaattacaccaaagcggacggtccggcgaaaggccagccgatgctcaacacggcgattgacgcggcagagatgatcctgacgttagcgccggaaaccaacggtcaggtggcggtgaaagcctgggcggcgctgagcgagtttaccggtcgcgaccatacgcatctggcaaccaataaagaagaagagaaaatccgcttccgcgatattcaggcccagccgcgcaaaattatctccagcccgacctggtctggtctggaagatgagcatgtttcttataacgccggttataccaacgttcacgagctgatcccgtggcgtacgctgtctggtcgtcaacagttgtatcaggatcaccagtggatgcgcgacttcggcgaaagtctgctggtgtatcgcccaccgatcgacacccgctcggtgaaagcggtgatggggcgtaaatccaacggtaatccggagaaggcgctcaacttcctgacgccgcaccagaaatggggtatccactcgacctacagcgataacctgttgatgctgaccttgtcgcgtggcggcccgattgtatggatgagcgaaaccgacgccaaagatctgggcattgaagataacgactggatcgaagtcttcaacagcaacggcgcattgaccgcacgcgcagtggtcagccagcgtgtaccgacgggcatgaccatgatgtaccacgcgcaggaacgtatcgtaaacctgccggggtcggaaattacccagcagcgcggcggtattcataactcggtgacgcgcattacgccgaaaccgacccatatgatcggcggctatgcgcagttagcctacggctttaactactacggtaccgtcggctccaaccgcgatgagtttgtggtggtacgtaagatgaagaacattaactggttggatggcgaaggcaatgaccaggtacaggagagcgtaaaatga

SEQ ID NO: 368376 - DNA, 1539 bp, Salmonella enterica
atgaaaattcgttcacaagtcggcatggtgctgaatctcgataagtgcatcggctgtcatacctgttcagtcacctgtaaaaacgtctggaccagtcgcgaaggtatggaatacgcgtggttcaacaacgtagaaagtaagcctggcgttggttttccgaatgactgggaaaatcaggaaaaatggaaaggcggctggatccgcaaaatcaacggcaaactacagccgcgcatgggcaaccgggcgctgctgctgggtaaaatcttcgctaacccgcatctgccgggcatcgacgactactacgagccgtttgattacgactaccagaacctgcataccgcgccggaaggcagcaaacatcagccgatcgcgcgtccgcgctcgctgattaccggccagcggatggacaaaattactagcgggccaaactgggaagagattctgggcggcgagttcgaaaaacgcgccaaagaccagaacttcgaaaacatgcagaaggcgatgtacggccagttcgaaaacaccttcatgatgtacttgccgcgcctgtgcgagcactgcctcaatccggcgtgcgtggcgacctgcccaagcggtgccatctacaagcgtgaagaagacggcattgtgctgatcgaccaggacaagtgccgcggctggcggatgtgtattaccggctgcccgtacaagaagatctacttcaactggaagagcggcaaatctgaaaaatgcatcttctgctatccgcgtattgaagcgggtcagccgactgtttgctcggaaacctgcgtgggccgtatccgttatcttggcgtactgctgtatgacgccgatgccattgaaagcgccgccagtacggaaaacgaaaaagatctgtaccagcgtcaactggacgtgttcctcgatccgaacgatccggctgtcattgagcaggcgttgaaggacggcgtgccgcagagcgtgatcgatgcggcgcagcaatcgccagtatacaaaatggcgatggactggaagctggcgctgccgctgcatccggaataccgcacgctgccgatggtctggtacgtgccgcctttgtcaccgattcagtctgccgccgacgcgggtgaactgggcagcaacggtattctgccggatgtagacagtctgcgtatcccggtgcagtacctggcgaatttgttgaccgctggcgacactcagccggtactgttggcgctgaaacggatgctggcgatgcgtcactacaaacgtgcggaaaccgtagacggtaaagtggatacccgcgcgctggaagaggtgggtttaagcgaagcccaggcgcaggaaatgtatcgttacctggcaattgctaattatgaagatcgctttgtggtgccgagcagccatcgtgaactggcgcgtgacgcattcccggagaaaagcggttgtggctttaccttcggcgatggttgccacgggtctgataccaaattcaatctgttcaacagccgccgcatcgacgctgttgatgtgaccagcaaaacggagccgcacgcatga

SEQ ID NO: 368377 - DNA, 711 bp, Salmonella enterica
atgattgaactcgtcattgtttcgcgtctgctcgagtacccggatgctgccctgtggcagcatcagcaggagttgttcgatgcgctcgcgtcatctgagaacctggagaaagaggatgcccagactctgggcgttttcctgcgcgatttaaccgcgcaggacctgctggatgtacaggccgcttatagcgaactgtttgaccgtggtcgcgccacatcgctgctgctgtttgaacatgtacacggggaatcccgcgatcgcggtcaggcgatggttgacctgatggcacagtatgagcagcacggtttgcagctcgacagtcgcgaacttcccgatcatctgccgctgtatctggaataccttgcgcaattgccgaaaagcgaagcgttagggggtttacaggatatcgcgccgattctggcgctgctcagcgcacgtttgcaacagcgtgacagccgttatgcggtgctgttcgatctgctgttaaaactggcgaataccgttatcgacagcgataaagtggctgaaaaaattgcgaatgaagcacgtgatgataccccgcaggcgttggatgcggtctgggaagaagagcaggtgaaattcttcgccgatcaagggtgtggtgagtcggaaatctccgctcaccagcgtcgttttgccggggccgtggcaccgcaatatctgaatatcaccaccggaggacagcactaa

SEQ ID NO: 368378 - DNA, 678 bp, Salmonella enterica
atgcacttcctgaatatgttcttctttgatatctacccgtacattgccggatcggtatttctgatcggtagctggttacgttacgactacggccagtacacctggcgggcggcttccagtcagatgctggatcgcaaaggaatgaacctggcgtcaaacctgttccacattgggattctgggtattttcgccggtcacttcctgggcatgttaacgccgcactggatgtatgaagcttttctgccggtcgacgtgaagcagaagatggcgatgattgccggcggcgcctgcggcgtgctgacactggttggcggtattttactgctcaagcgtcgtctgtttagcccacgtgtccgcgccaccactaccggcgcagatattttgattctctcgctgctggtgattcagtgcgcgctgggcctgctgaccattccgttttccgcccagcatatggacgggagtgaaatgatgaagctggtcgggtgggcgcagtcagttgtgaccttccacggtggcgcatccgcacatctggacggtgtggcctttatcttccgtatgcacctggtactggggatgacgctgttcctgttattcccattctcgcgcctggtgcatatctggagcgtgccggtcgagtacctgacccgcaaataccagattgttcgtgcacgtcactga

SEQ ID NO: 368379 - DNA, 1530 bp, Salmonella enterica
atgcgtttttcatcaattttcaaaataataatattaaatatatttatttcaaaaatggctcactctgctgtctgcgaggagcgctatccccccgactcagaagaatgccagtacgttcaggaattagagcaaaaagcggaacaaggagatgaaagcgcgcagttcgcgcttggaagctggtatgcggaggggcgatatgttaagcctgattataaactagccataaaatggctggagaaagcgggtaaacaaggttctgatttttcctatttcatccttggctatcattacaactatggtgaaaattttccacttagtcgacaaaaagcgctggagtggtatcgcaaggcggcagagctaggggatagtagtacgcaagaaatcctcggtgacgcctatatgtatggcgatgggtttccccaaaatacccagctagcgctggagtggtatcgaaaagccgcctctccaaccaatgatgcgggcgttgtccgcggccagggttcagcttcgtcagcacaatttaagcttggagtaatgtacgcccacggtcagggcgtccctcaggattatcagcaaacggcgatcttgatgcgtaaagcggcggaaaatatgtactaccccgcgcaactttatctcggtgttgcctatttttatggtgaaggcgtgcctcaggattatcgtcaggcagtttactggcttaatgaaggtataccaagcagctatacgccaggccacattccgctgaatgcgctctatgataaagcgcatcccgctgaccaggttcactctcagacgtggtatcgaaaaacagcgcaacgcgtgatggcaaaggtacagtacaattttggcgtatggtattacaacggttatcacttattgaaagatcacaacctggcgctggagtggtatcgcagagccgcagcgcaaggattggccgaggcgcaggatgcgatcggcgtgatgtttatgcagggtgagggcgtatctcaggactaccaacaggcgctggcgtggtatcgcaaagccgcacgccagggactgcctgctgcgcaaacgcatctgggcatcatgtctgcttttggtcgcggcgtcgcgcaaagcgacagacaggctatcgcatggtatcgaaaagcagcaaaacaggattttgcgaaagcgcaatatcagcttggcgtagcatatagcacgggaagaggcgtgcctgaaaatagccggaatgcgctgaagtggtaccttaaagcggcagagcaggggtttactccggcacaattagcgcttggggaaatttatgctcatgggcgccagggggtgcctaaagataataagcaggcctatatttggtattacatggcaagtatatatacggaaaaatctaaggatgattgttcagcgctcattgccgaaagaaaccgactcaagggaacgcttaccccagatcaacttagcgagacatatgccgcctttgatctcatcaggcgaaaaatcaaccagtcaaaggaggcgaaaaagattgccaggaagaagtattga

SEQ ID NO: 368380 - DNA, 843 bp, Salmonella enterica
atgcaatcactacaacgtaaagttctgcgtactatttgtcccgatcaaaaaggccttatcgcgcggattaccaacatttgctataagcacgagcttaatattgtgcaaaacaatgaatttgtggaccatcgcaccggacgcttttttatgcggaccgagctggaaggcatcttcaatgattccactctcctggccgatctggatagcgccttaccggaaggctctgttcgtgaactcaatcccgccggacgccgtcgggtagtgattctggttaccaaagaggcgcattgtctgggcgacctgctgatgaaagccaactatggcgggctggatgttgaaatcgccgcggtcattggcaaccatgaaacgttacgctcgctggttgaacgttttgagatccctttcgaactggtcagccatgagggattaacgcgtgaagagcatgacacgaagatggcggacgccattgatgcccatcaaccggactatgtagtgctggccaagtatatgcgtgttttgacgccaggttttgtggcgcgcttcccgaacaaaattatcaatatccaccactcattcctgccggcgtttatcggcgcgcgtccttatcatcaggcctatgagcgcggcgtgaaaatcatcggcgctaccgcgcactatgtgaatgataatctggatgaaggcccaatcattatgcaggacgtgattcacgtcgatcacacctacaccgcagaagatatgatgcgtgccgggcgcgacgttgagaaaaacgtattaagccgcgcgctgtatcaggttctggcacagcgagtctttgtttacggcaatcggacgattattctttaa

SEQ ID NO: 368381 - DNA, 459 bp, Salmonella enterica
gtgtctcagccttgtccctgtggtagcgctgacgagtatagcctatgttgtggtcgtattgtgtccggagaacgagtagcacccgatccgtcacatctcatgcgctctcgttactgcgcttttgtgatgaaagacgcagattacttaattaagagctggcatccaacctgcaatgcggccgcgtttcgtgatgatatcatcgccggatttgccaataccaggtggctcggcctgactatttttgaacatacctggtcagaagcagaaaatacagggtatgttagttttatcgcgcgtttttccgaacaagggaaaaccggggcgattatcgaacgttctcgttttatcaaagaaaacggtcagtggtattatattgacggtacccgcccgcagttgggtcgaaatgatccctgcccgtgcggttcaggcaaaaaatttaaaaagtgctgcggccagtga

SEQ ID NO: 368382 - DNA, 897 bp, Salmonella enterica
atgaaaatagggctggcgctgggatctggcgcagcgagaggatggtctcatattggggtcatcaaagccctcaagcaaacaggcattgatattgatatcgttgcaggatgctcaataggttcgctggtcggcgccgcgtatgcctgtaataaattatcggcgcttgaacagtgggtatgttcattccgctactgggatgttttacgcctgatggatgtatcctggggcagaggagggttgcttcgcggcgaacgcgtatttaatcactatcgggatattatgcccgtcacggattttgaccactgttcaagacgttttggcgcggtcgcgacgaatcttagcacgggacgagagctatggtttactgaaggcgatctacaccttgctgtacgcgcgtcgtgcagtatgccagggctgatgtctccggttgagcataacggttactggctggtagatggcgcagtcgttaatccggtacctgtttcgttaaccagggcgctgggggctgatatcgttattgcggtagacctgcaacatgatgcccacctcatgcagcaagatttgctctctgtaaatgtcgggaatatcaatgaagagagcgatgatgcgctgccctggcataagcgtttaaaagaacgtttcagtagcctgacttcacgccgtggcgtgagttcgcctggggcaatggaaatcatgacaacctccatccaggtgttggaaaatcgtcttaaacgtaaccgtatggctggcgatccgcctgatattctcattcaaccattctgtccgcaaatctcaacgctggattttcatcgcgcccatgccgctattgcggcgggtcagttagccgtagagaaaaagatggacgaacttatacccttggtgcgtaccgacgtttaa

SEQ ID NO: 368383 - DNA, 1014 bp, Salmonella enterica
atgacgcagccattggtcggaaaacagattcttattgttgaagacgagcctgtatttcgctcgcttctggattcgtggttttcctctttgggagcgacaacggcattggcaggcgacggggtagatgccctggagttgatggggcgttttacccctgatctcatgatatgtgatatcgctatgccgagaatgaacggtctcaaactggtagaaaacttacgtaatcgcggagaccagacgcctattctggttatttccgcaacagaaaatatggcggatatcgccaaagcgttacgccttggggttgaagatgtcttgctgaagccggtaaaagatctcaaccgcttgcgggaaaccgtattcgcttgcttgtaccctaatatgtttaactcgcgggttgaagaagaagaacgcctgtttcgtgactgggatgcaatggtgagtaatccgaccgccgcagcgcaattgttgcaggaattgcagcccccggtacagcaggtgatttctcattgccgcattaattaccggcagctcgtctccgccgatcagcctggactggtgctggatattgcgccgctatctgataacgaactggcattttattgcctggatgtcacccgggcgggcgataacggcgtgttagccgcattgttgctgcgggcgctatttaacggcttattgcaggatcagctcggccaacaaaagcaccgtttaccggagttaggcgcgctattaaaacaggtaaatcatctgctcagacaagccaatttacctgggcaattcccgctatttgtcggctactatcacagtgagctcaaaaatttgattctcgtctccgccggattgaacgccaccttaaatacgggcgctcatcaggttcaaattagcagcggcgtgccgctaggaacattgggtaacgcctaccttaaccaattaagccagcgttgcgactcgtggcagtgtcaaatatggggcgcaggagggcgtctgcgattgatgttgtctgcggaatga

SEQ ID NO: 368384 - DNA, 909 bp, Salmonella enterica
atggctgcccttaattcgaaagtcaaaaaagccgttatcccggtcgcgggattgggaaccaggatgctgccagcgaccaaagctatcccgaaagagatgctgccgctggttgataagccattaattcagtacgtcgtgaacgaatgtatcgctgctggcattactgaaatcgtgcttgttacgcactcgtctaaaaactctattgaaaaccactttgataccagttttgagctggaagcgatgctggaaaaacgcgttaagcgtcagcttctggaggaggttcagtctatttgccctccgcatgtcactattatgcaggtacgtcaagggctggcaaaaggcctgggccatgccgtattgtgcgcgcatcccgttgtcggaaacgaacctgtcgctgttattctgccagacgttattcttgacgaatatgagtccgacctgtctcaggataacctggctgaaatgatccgccgtttcgatgaaaccggcaatagccagattatggttgagccagtagaagatgtgactgcatacggcgtggtcgattgtaaaggcgttgagctggcaccgggcgaaagtgtgccgatggttggcgtggttgaaaaaccaaaagcggatgtcgcgccgtctaaccttgcgattgtcgggcgttatgtgttgagcgcggatatctgggcgttgctggcgaaaacccctccgggcgccggggatgaaattcagttgaccgatgctatcgatatgctgatcgaaaaagaaacggttgaagcctaccacatgaagggtaaaagccatgactgtggtaataagttaggatatatgcaggcattcgttgaatatggcatccgtcataattcgctgggtgctgaatttaaagcctggcttgaagaagaaatgggtattaagaagtaa

SEQ ID NO: 368385 - DNA, 414 bp, Salmonella enterica
atgagcgaagcacttaaaattctgaacaacatccgtactcttcgtgcgcaggcaagagaatgtactctggaaacgcttgaagaaatgctggaaaaattagaagttgtcgttaatgagcgtcgtgaagaagaaagcgctgctgctgctgaagtggaagaacgcactcgtaaactgcaacagtatcgtgaaatgttaattgccgacggcattgacccgaatgaactgctgaatagcatggctgccgctaaatccggtaccaaagctaaacgcgcagctcgtccggctaaatatagctatgttgacgaaaacggtgaaactaaaacctggactggccagggtcgtacaccggctgtaatcaaaaaagcaatggaagaacaaggtaagcaactggaagatttcctgatcaaggaataa

SEQ ID NO: 368386 - DNA, 618 bp, Salmonella enterica
atggcacagctatatttctactattcggcaatgaatgcgggtaagtcgactgcactgctgcaatcttcatacaattatcaggaacgcgggatgcgtaccgtcgtatatacggcggaaatcgacgatcgtttcggcgcaggcaaagtcagctctcgtatcggtttgtcgtcgccggcaaaattgtttaaccaaaatacatccttgtttgaagagattcgtgccgagagcgcgcggcagacaatacattgcgtgttagtcgacgaaagccagtttttgactcgccagcaggtttatcaattatccgaggttgtcgacaaattagatattccagtactttgctatgggctacgaacagactttcgtggggagctctttgtcggcagccaatacttgctggcatggtcagataagctggtggaattaaaaactatctgtttctgcggtcgtaaagccagtatggttctgcgccttgatcaggacggcaggccttataacgaaggcgaacaggtggttattggcgggaatgaacgctacgtttcagtttgccgtaagcattataaggacgcgctggaggaggactcactgacggcgattcaggagcgtcatcggcacatatga

SEQ ID NO: 368387 - DNA, 2679 bp, Salmonella enterica
atggctgttactaatgtcgctgaacttaacgcactcgtagagcgtgtaaaaaaagcccagcgtgaatatgccagtttcactcaagaacaggtcgacaaaatcttccgcgccgccgctctggcagccgctgatgcccgcattccgctggccaaaatggccgtcgccgaatccggtatgggcatcgtggaagacaaagtgattaaaaaccacttcgcttctgaatatatttacaatgcttataaagatgaaaaaacctgcggtgtgctgtctgaagacgacaccttcgggaccatcaccattgccgaacctatcggcattatttgcggtatcgttccaaccactaacccgacctctaccgcgatcttcaaatcgctgattagcctgaagacccgtaacgccatcatcttttctccgcatccgcgtgctaaagaagcaaccaacaaagcggcagacatcgttctgcaagcggctatcgctgccggcgcgccgaaagatctgattggctggatcgatcaaccttccgtagaactgtctaacgcgttgatgcaccacccggatattaacctgatcctcgccactggcggtccaggcatggttaaagctgcatacagctccggtaaaccggctatcggcgtaggcgcaggcaacactccggttgtcattgatgaaactgcggatatcaaacgcgctgtggcgtctgttctgatgtctaaaacctttgataacggcgtaatctgtgcttctgaacagtctgttgtcgttgttgattccgtctatgatgccgttcgcgaacgtttcgccagccacggcggctacatgctgcagggccaggagctgaaagcggttcaaaacgttatcctgaaaaatggcgctctgaacgccgctatcgtcggtcagccagcctacaaaattgctgaactggcaggcttctccgtaccagaaaccaccaagattctgatcggtgaagttacggtcgttgatgaaagcgaaccgttcgcacacgaaaaactgtctccgactctggcgatgtaccgtgcgaaagatttcgaagaagcggtagaaaaagcagaaaaactggtcgctatgggcggtatcggtcacacctcctgcctgtacactgaccaggataaccagccagaacgcgttgcttacttcggtcagatgatgaaaaccgcgcgtatcctgatcaacaccccggcctctcagggtggtatcggtgacctgtacaacttcaaactcgcaccttccctgacgttgggttgtggttcctggggtggtaactccatctctgaaaacgttggtccgaaacacctgatcaacaagaaaaccgttgctaagcgagctgaaaacatgttgtggcacaaacttccgaaatctatctacttccgccgtggctctctgcccatcgcgctggatgaagtgattactgatggccacaaacgtgcgctcatcgtgactgaccgcttcctgttcaacaacggctatgcagaccagatcacctctgtgctgaaagcggctggcgttgaaaccgaagtcttcttcgaagttgaagccgacccgactctgagcgttgtgcgcaaaggcgctgagctggcgaactccttcaaaccagacgtgatcatcgcgctgggcggcggttccccgatggacgccgcgaaaatcatgtgggtcatgtacgaacatccggaaactcacttcgaagagctggcgctgcgctttatggacatccgtaaacgtatctacaagttcccgaaaatgggcgtgaaagcgaaaatgatcgccgtcaccaccacttccggtaccggttctgaagtcacaccgtttgcggttgtgaccgacgatgcaaccggtcagaaatatccgctggctgactacgccctgaccccggatatggcgattgtcgacgccaacctggtgatggatatgccgaagtccctgtgtgcgttcggtggtctggatgcggtaactcacgccctggaagcttacgtttccgtactggcttctgagttctctgacggtcaggctcttcaggctctgaaactgctgaaagaaaacctgccggcgtcttaccacgaagggtctaaaaacccggttgcgcgtgaacgtgttcacagtgcagcgactatcgccggtatcgcgtttgccaacgccttcctcggtgtatgtcactccatggcgcacaaactgggctctcagttccacattccgcacggtctggcgaacgccctgctgatttgtaacgttatccgctacaacgcgaatgacaacccgaccaagcagaccgctttcagccagtacgatcgtccgcaggcacgccgtcgttacgctgaaattgctgaccacctgggcctgagcgcgccgggcgaccgtaccgccgctaagattgaaaaactgctggcatggctggaaagcattaaagctgagctgggtattcctaagtctatccgtgaagcaggcgtgcaggaagctgacttcctggcacacgttgacaaactgtctgaagatgccttcgatgaccagtgcaccggcgctaacccgcgttatccactgatctccgaactgaaacagattctgctggatacctactacggtcgtgatttcaccgaaggtgaagttgcagcgaagaaagacgtcgttgccgcaccgaaagcagagaaaaaagcgaaaaaatccgcttaa

SEQ ID NO: 368388 - DNA, 648 bp, Salmonella enterica
gtgattcaaccgctttttgattttcctgtttactttaagttctttatcgggctctttgcgctggttaacccggtggggattatccccgttttcatcagcatgaccagctaccagacggccacggcgcgtaataaaactaacctcaccgcgaatctgtcggttgcgattatcttgtggagttccttattcctcggcgatggcatcctgcagctgtttggtatttctattgactcgttcagaattgcgggcggtatcctggttgtcaccattgcaatgtcgatgatcagcgggaagctgggggaagataaacaaaacaagcaagaaaagtcagagacggccatacgcgagagcattggcgttgtgccgttagcgctgccgttaatggcggggccaggggcgatcagctccactatcgtctgggggacgcgttatcacagcatcgcgcatttgcttggtttttcagttgccattgcgctttttgcgctttgctgctggggcgtgttccgtatggcgccgtggctggttcgtttgctggggcaaaccggtatcaacgttattacccgaatcatggggttgttgttaatggcgctcggcatcgaatttattgtcacaggaataaaaggcattttccccggcttgctcaactaa

SEQ ID NO: 368389 - DNA, 1632 bp, Salmonella enterica
atgtctaacatcacgaaaaaaagtttaattgcagtgggaatactcactgcgctcatcgccgccagcgccgcgactgcggcagacgtgcccgccggtgttcagttagccgacaagcaaacgttggtacgtaataatggatcagaagtgcagtctctcgacccgcataaaattgaaggcgtgccggaatcgaacgttagccgtgatctctttgaaggcttattaattagtgatgtcgaggggcatccttcaccgggcgtcgcggaaaaatgggagaataaagattttaaagtctggacattccatctacgtgaaaatgcgaaatggtcagatggtacgcccgtcactgcccatgatttcgtttatagctggcaacgcctggccgatcctaatacggcatcgccgtacgccagctatctgcaatacggtcatatcgctaatatcgatgacattatcgccggtaaaaaacccgccaccgatctgggggtaaaagcgcttgatgatcacacctttgaagtgaccttaagtgagccggtgccttatttctacaaattgttggtccacccttcagtgtctcctgtaccgaaatcagcggtcgaaaaatttggcgataagtggacacaaccggccaatattgtcactaacggcgcttataagttaaaaaactgggtggtgaacgaacgtatcgtgctggagcgtaacccgcaatactgggataacgacaaaaccgtcatcaatcaggtaacttatttgcctatctcttcggaggtgacggatgtcaaccgctaccgcagcggcgagatcgatatgacttataacaatatgccgatcgaattattccagaaactgaaaaaagagatcccgaatgaagtccgcgtagacccttatttgtgtacctattattacgaaattaataatcaaaaagcgccgtttaacgatgtccgcgtgcgtaccgcgctgaaactggcgttagatcgcgacattattgttaataaggttaaaaatcagggcgatttacccgcttatagctacacgccgccgtataccgatggcgcaaaactggtagagcctgagtggttcaaatggtcccagcaaaagcgtaatgaagaagcgaagaaattgttggctgaagccggctttacggcggataagcccttaacattcgacctgctgtataacacctccgatctgcataaaaaactggccattgccgtggcgtctatctggaagaaaaatctgggcgtcaatgtgaatctggagaatcaggaatggaaaaccttcctggatacccgtcatcagggcacctttgatgttgccagagccgggtggtgcgcagattataatgaaccgacctcattcctgaatactatgttgtccgacagttcaaataacaccgcgcattataatagcccggcgtttgataagctgattgctgacacgctgaaagtggcggacgatacgcagcgcagcgaactctacgctaaagcggagcagcagttagataaagactcggctattgtgccggtgtattactacgttaacgcgcgcctggtgaaaccttgggtgggcgggtataccggtaaagacccgctggataatatttatgtgaaaaacttatatattatcaaacattaa

SEQ ID NO: 368390 - DNA, 921 bp, Salmonella enterica
atgttgaaatttattttacgccgctgtctggaagcgattccgacgctgtttattcttattaccatctctttctttatgatgcgcctcgcgccgggtagcccttttactggcgagcgcgcattgccgccggaagtgctggccaatattgaagcaaaatatcatctgaacgatcccatcatgacgcagtacttcagctacctgaagcagctggcgcatggcgattttggaccatcgtttaaatacaaagattacacggtcaacgatctggttgccgccagcttccccgtttcggcgaaacttggcgctgccgcttttttgctggcggtcattattggtgtcagtgctggcgtgattgccgcgctaaagcaaaatacgcgatgggattatacggtgatgggatttgccatgaccggcgtcgttatccccagttttgtggtagcgccgctactggtgatggtctttgcaataaccttgcaatggctgcctggcggcggctggaacggcggggcgttaaaatttatgatcctgccgatggtcgcgctttcactggcctatattgccagcatcgctcgtattacgcgcggctcaatgattgaagttctgcattcgaactttattcgtaccgcgcgggcaaaaggattaccgatgcgcagaatcatcttccgccatgcgttaaaacctgcgctgctgccggttttatcctatatggggccagcctttgtcggcattattaccggctcaatggtgattgaaactatttatggcttaccgggcattgggcagcttttcgttaatggcgcgctcaaccgcgattactcgctggtgttaagtttgaccattctggtcggggcgctgaccatattatttaacgccattgtcgatgtgctctatgccgttatcgacccgaaaattcgctattga

SEQ ID NO: 368391 - DNA, 909 bp, Salmonella enterica
atgatgttaagtaagaaaaacagcgagacgctggaaaatttcagtgaaaagctggaggtggaaggtcgcagcctttggcaagatgcccgtcggcgctttatgcataaccgtgcggcggtggccagtcttattgtcctgtttctgatagccctgttcgtgacagtggcgcctatgctgtcgcaatttacctatttcgataccgactggggcatgatgtccagtgcgccggatatggcgtccggtcactatttcggcactgactcttccgggcgcgatctgttggtgcgcgttgccatcggcgggcgtatctcattaatggtcgggattgccgccgcgctggtggcggtcattgtcggaacgctgtatggctcgctgtccggctatctgggcggcaaaattgattctgtgatgatgcgtttgttggagatcctcaactcgttcccgtttatgttctttgtgattttgctggtgacgttttttgggcagaacattctgttgattttcgtcgccatcggcatggtctcctggcttgatatggcgcgtatcgtgcgtggccaaaccctaagtcttaaacgtaaagaattcatcgaagccgcgcaggtgggtggtgtgtcgactgccagcattgtgatccgccatattgtgcctaacgtcctgggcgtagtggtagtgtatgcatcgttgctggtgcccagcatgattctgtttgagtctttcctcagtttcctggggcttgggacgcaggaaccgttaagcagttggggagcgttattgagcgatggcgcaaattcaatggaagtctcaccgtggctgctgctgtttccggctggctttctcgtggtgacgttattctgttttaactttattggcgatggcctgcgtgatgccctcgacccgaaagatcgttaa

SEQ ID NO: 368392 - DNA, 1008 bp, Salmonella enterica
atgagcttatcagaaaccgcaactcaggcgccgcaaccggcgaatgtactgctggaggtaaacgatcttcgtgttacgttcgctacgcctgatggcgatgtgacggcggtcaacgatctgaactttacgcttcgcgctggagaaacgttaggtattgttggcgagtctggatcggggaaatcgcaaacggcgttcgcattaatgggactgctggcgacgaatggtcgaatcggcggttctgcgaccttcaacggacgtgaaattcttaatctacctgagcgcgaactgaatacgctgcgcgcagaacagatttcgatgatttttcaggacccgatgacctcgctaaatccttatatgcgcgttggggagcagttaatggaagtcctgatgctgcataaagggatgagcaaagcggaagcttttgaagagtccgtcagaatgctggatgccgtaaaaatgccggaagcgcgcaaacggatgaaaatgtacccgcacgaattttccggcggaatgcgtcaacgtgtgatgattgcgatggcgctgttgtgcaggccgaaactgcttattgccgatgagcctaccaccgcgcttgatgttaccgtgcaggcgcagattatgaccttgcttaatgagctaaagcgcgaatttaataccgccattatcatgattacccacgatctgggcgtggtcgcgggtatttgcgataaggtcctggtaatgtatgccgggcgtaccatggaatacggtaaggcgcgcgatgtcttttatcagcccgttcatccgtattcgataggcttgcttaatgcggtgccgcgtctggatagcgagggggcggaaatgttgacgattccgggcaatcctcccaatttattgcgtttgcctaaaggttgtccgttccagccgcgttgtcctcatgcgatggagatctgcaataatgcgccgccacttgaagcgtttagtcctggtcgcttgcgcgcctgttttaaaccggtggaggaactgctatga

SEQ ID NO: 368393 - DNA, 1005 bp, Salmonella enterica
atgaatgctgtgattgaacaacgtaaagttctcctcgaaatcgccgatctgaaagtacattttgatatcaaagaagggaagcagtggttctggcaaccgccgaaaactctgaaagcggtggacggcgttacgctacgcctgtatgaaggcgaaacgcttggcgtggtgggtgaatccggctgcggcaagtcgacgtttgcgcgcgccattattggtctggtgaaggcgacagacggtaaagtcgcctggctgggaaaagatctgttgggcatgaaagcggatgagtggcgcgaagtgcgcagcgatatccagatgattttccaggacccgctggcgtcactcaacccgcgaatgacgattggcgaaattatcgcggaaccgctgcgcacttatcatcctaaactttcgcgccaggacgtgcgtgaccgcgtgaaagccatgatgctgaaagtggggctgctgccgaatctcatcaaccgttatcctcatgaattttccggggggcagtgccagcgcatcggtatcgcccgggcgttgatcctggaacctaagctcattatttgcgatgagccggtgtcggcgctggacgtttctattcaggcgcaggtggtgaatttgctccagcagttacagcgagagatggggctgtcgttgatttttattgcgcacgacctggcggtcgtaaagcacatatccgatcgtgtcctggtgatgtatctcggtcatgcagtagaattgggcacctatgatgaggtgtaccataatccactgcatccttataccaaagcgctgatgtcggcggtaccgattcccgatcccgatctggagcgaaataagaagatacaattgctggagggcgaattaccttcgcccattaacccgccttccggctgcgtgttccgtacacgctgtccgctagccgggccagaatgcgcgcaaacgcgaccggtgctggaaggaagttttcgccatgccgtttcctgccttaaagtagacccgttataa

SEQ ID NO: 368394 - DNA, 837 bp, Salmonella enterica
gtgtcactttctttgtcgtcggttcgccgtcgtctttatcataatctgttcgatttgactacgcgctcaggtcgccgttttgaagggttatgcgcgctgtttgcgctgcttagcgtactggtcatttttgttgaatcaggcgtgggaacggaatatcacctgacatttgatgaatggcatatttttgtctggctggagctctgcgttaccctgatatttaccggtgaatacttgctcagactgtttagctggcccgaaccggcaaaatacgtttttagtttctggggatttattgatctggtgacgattttgccgctgtacgtcatgtggctgtggccggaaattagcctgaactatatgtttgcctggcgtgctatgcgagcgattcgcgtgctgcgtattcttaaactgctacgctttatgccatccctgcgcgtattctggagcgccattattagcgcgcgtcatcagcttattctgttctattcatttattgcgatcgtgatgattattttcggtgccctgatgtatcttattgaaggaccgaaatatggcttcacgacgcttaatgcctcggtgtattgggcgatagtgacagtcacaaccgtggggtatggtgatattacgccgcatacgccgctgggacgtattgtcgcgtcggtgcttattttgattggttattcggtgattgcgattcctacaggactgattaccacgcacatgagcagcgcgtttcaaaaacgtcactggcagcgaaaatgtccgcagtgccagcaaagccagcatgaacatagcgcgcaatattgtaaccgatgcggcagtaagctaccggattaa

SEQ ID NO: 368395 - DNA, 330 bp, Salmonella enterica
atggaaatggatctgaacaatcgcctgactgaagacgaaacgcttgagcaggcttacgatatttttcttgagctggcggcggataatcttgatccggctgatatcattctgttcaatttgcaattcgaggagcgcggcggcgcggagttgtttgatcccgctgaagactggcaagagcacgtcgattttgacctgaatccagacttttttgccgaggtagtgattggcctagcggataccgaagacggcgaaattaacgacattttcgcccgcgttctgctgtgccgggaaaaggaccacaagctgtgccatattctctggcgcgaataa

SEQ ID NO: 368396 - DNA, 1461 bp, Salmonella enterica
atgacaaccttctacaccgtggtgagttggctggtcattttgggatactgggttctcattgccggcgtcacattacgtattctaatgaaacggcgcgcagttccctccgcaatggcctggttgttaatcatctatatccttccgctggtcgggatcatcgcctatttgtccgtgggcgaattgcatttaggcaaacgtcgcgccgagcgtgcccgcgccatgtggccatctactgccaaatggttgaatgacctcaaagcctgcaaacacattttcgcgcaagaaaacagtagcgtcgcatcgtccttgtttaagctgtgcgaacgacgtcaggggattgcgggcgtcaaaggcaaccagttgcaattacttaccgactccgatgatgtcatgcaggcgcttattcgcgatatccaactggcgcggcataatatcgaaatggtgttttacatctggcagccaggcggcatggcggatcaggtcgctgaatcgctaatggccgccgcccgccgcggcatccattgccggcttatgctggattccgcgggtagcgtcgctttcttccgcagcccctgggcggccatgatgcgtaacgctggcattgaagtcgtagaggcgctgaaggtgaatctgatgcgcgtctttttacgccgtatggatcttcgccagcaccgtaaaatggtgatgattgacaattacatcgcctataccggcagtatgaatatggtggacccgcgttttttcaaacaggatgccggcgttggacaatgggtcgatttgatggcgcggatggaaggccccgtggcgacagcaatggggattgtttactcctgcgattgggaaatcgagacgggtaaacgcattctgcctcccccgccggatgtgaatattatgccgtttgagcaggccagcgggcataccattcataccattgcttccggtcctggttttccggaagatctcattcaccaggcactattaaccgccacctatgctgcgcgcgaatatttaattatgaccacgccatatttcgtccccagcgacgatctgctgcacgccatttgtaccgctgcgcagcgcggcgtggatgtcagtattatcctgccccgtaaaaatgattcactgctcgtcggctgggccagtcgcgcctttttcagcgagttactggcggcgggcgtgaaaatctatcagttcgaaggcgggctgttgcatactaaaagcgtgctggtcgatggcgaactgagcctggtcggtaccgtgaatctcgacatgcgtagcctgtggcttaatttcgagattacgctggtcattgatgatacgggtttcggcgccgatctggctgcggtacaggacgattatatttcgcgctcccgtctcttagatgcgcgtttgtgggtaaaacgtccgttatggcagcgtattaccgagcgattgttttacttctttagtccattgctgtaa

SEQ ID NO: 368397 - DNA, 174 bp, Salmonella enterica
atgaagcgtagtagaacggaagtggggcgctggcgaatgctacgtcaggcgagccgccgtaaagcgcgttggcttgaagggcaatcacgccgtaatatgcgtatccatactatcaggaaatgcatctttaatcgtcagcgtaattcattactctttgcgattcacggtgtgtga

SEQ ID NO: 368398 - DNA, 297 bp, Salmonella enterica
gtgctgtatgttatttacgctcaggataatgccaactcgcttgaaaaacgcctctcggtacggcccgcgcatctggcgcgcctgcaacttctgcatgatgaagggcgattattaactgccgggccgatgcccgcagtggacagtaacgatcctggggtagccggatttaccgggtcaacggtgattgctgaatttgaatctttagaagcagcgcaatcctgggctgatgcggatccctacgtcgcagcgggcgtctatgcgcaggtttcggtcaaaccgtataagaagatcttttga

SEQ ID NO: 368399 - DNA, 729 bp, Salmonella enterica
atgacccttgatttacctcgtcgctttccctggccgacactcctttccgtaggcattcatggtgctgtagtggcaggtttgctctatacctcggtacatcaggttattgaattgcctgcgccagcgcagcctatcacggtgacaatggtttcacccgctgacctggagccgccccaggcggttcagccgccgccggagccagtggttgaacccgaaccggagccagagccgatccctgaaccgcctaaagaagcgcccgtggtgattgagaaacccaaacctaagccaaaacccaagccaaaaccgaaaccggaaccggtgaaaaaggttgaagagcagccgaagcgcgaagtcaaaccagccgcgcctcgtcctgcctcaccgtttgaaaatagcgccccggcgcggccaacaagcagcaccgcctcggcgaccagcaagccggcggtgagcgtacccactggacctcgcgctctgagccgtaaccagccgcagtatccggcgcgagcacaggcgttacgtattgaaggccgcgtaaaggttaagtttgatgtgacctctgctgggcgagtggaaaatgtacagattctgtccgcgcagccagccaatatgtttgagcgtgaagttaagaatgcgatgcgtaaatggcgctatgaagcaggcaagccgggttccgggctggtggtcaatattatcttccgtctgaacggtacggcgcagattgagtaa

SEQ ID NO: 368400 - DNA, 402 bp, Salmonella enterica
atgacaacaatggataatactcctcagggcgagctggttttacgtacattggccatgcctgccgataccaatgcgaacggcgatatttttggcggctggctgatgtcgcaaatggatattggcggcgcgatactggccaaagagatcgcgcacggtcgggttgtaaccgtacgcgtggaaggaatgacatttctgcgccccgtcgcggttggcgatgtcgtatgctgctacgcgcgctgcgttaaacgcggtacgacgtctattagcatcaatattgaagtctgggtgaaaaaagtcgcgtcagaaccgattggacagcgctacaaggccaccgaggcgctgtttatttatgttgccgtcgatccggacggtaaacctcgcccgctcccggttcagggttaa

SEQ ID NO: 368401 - DNA, 540 bp, Salmonella enterica
atgaagcagtttctggattttttaccgctggttgtcttttttgcgttttataaactttatgacatctatgcggcgacctccgcactgattgtcgcgacggcaatcgtgctgatttatagctgggtgcgctatcggaaaatagagaagatggcgctgattacctttgttctggttgccgtcttcggcggtctgacgctcttcttccataacgatgaatttattaaatggaaggtgacggttatttatgcgctgttcgccggcgcgctgttaataagccagtgggtgatgaaaaaaccgttaatccaacgtatgttaggtaaagaactggcgttgccgcagcaggtctggtcaaagctgaacctggcgtgggcgctgttttttattgcgtgcggtctggctaacatttatatcgccttctggttgccgcaaaatatctgggtcaactttaaggtctttggactcacggcgctgacgctcatttttaccctgctgagcggcgtctatatctaccggcatctgccacaggaagataaatcataa

SEQ ID NO: 368402 - DNA, 744 bp, Salmonella enterica
atgtctatcacggcgaagtccgtttaccgtgacgccggaaattttttccgaaatcaatttattactatcttgctggtttcgttgctgtgcgcatttatcacggtggtcttaggtcatgccttttcacccagcgatgcgcaaatcgcgcaactcagtgaaggagaacatctggcaggcagcgctggcctgtttgagctggtacaaaatatgacgccggagcagcagcagatcctgttgcgcgcctctgccgcctcgacgttttccgggcttatcggcaacgctattctggccggcggtatcatcctgatgattcagttagtttcagcgggacatcgggttagcgcgctgcgcgctatcggcgccagcgcccctgcattgcctaaactgtttattctcatttttctgactaccctgttagtgcaaatcggtataatgctgattgtcgttccggggattattatggccattgtgctggcgcttgcgccagtgatgttggttgaagagaaaatgggcgtgtttgccgcaatgcgcagcagtatgcgtttagcctgggctaacatgagactggtcgcgcctgcggtgataggctggttactggctaaaacattgctattgctgttcgcgcccagcttcgctgtactgaccccaaatgtaggcgctgtactggcgaatacgttgagcaatctgatttccgcagtattgcttatctacttattccgcctgtatatgttgattcgccaataa

SEQ ID NO: 368403 - DNA, 405 bp, Salmonella enterica
atgagcgttcttaacccatgcatgacatgcggtgcctgttgtgcctattttcgtgtctccttttattgggctgaaggcgacgatgccagcggacgcgttccggcgtcattaaccgagcctgttaccccttttttacgttgtatggccggtaccaaccaaaaacagccgcactgtaaagcgctaattggcacgccgggtgaaaacgtcagttgcgctatttatgaaaaccgcccttcaacctgtcgcgaattttcgatatcgggcgaaggaggcgaagtgaatgaggcgtgtaatcgcgcccgcgcgcgatacggattaccgccgctttacaaagatatgcttttccatacaactgctgatgctgccactgtagagttatccagggtacaattgcccgcaaattaa

SEQ ID NO: 368404 - DNA, 639 bp, Salmonella enterica
atgaaaaaatttacagtggcggcactggcgttaacaactcttctctcaggcagcgctttcgcgcacgaagccggagaattctttatgcgtgcaggtccggcaaccgtcagacctacagaaggggcgggtggtacgctggggcatttaaacgggtttgatgtgagtaataacacgcaactcggcctgacattcacttacatggcgacggacaatatcggggttgaattgctggcggccacgccgttccgccataaggtgggtacgggcgcgacgggagatatcgccacggttcacctgttaccgccaacgttaatggcgcagtggtacttcggcgattccagcagcaaagtgcgtccttatgtcggcgtgggggtgaactacaccaccttcttcgataacgactttaacgataatggtaaaaatgccgggctgtccgatctgagctttaaggattcctggggcgcggcagggcaagttggggtagattacctgattaaccgcgactggttaattggcgcctctgtctggtacatggatattgatactaccgccaattataaaatgggcggcgttcagcatcatgacagcgtgcgtctggacccatgggtatttatgttctcggcaggctatcgtttctaa

SEQ ID NO: 368405 - DNA, 879 bp, Salmonella enterica
atgtttcgacacgtaaaacaacttcaatatactgtgcgagtgagcgaacctaatcctggattagcgaacctgctgctggaacagtttggcggcccgcagggcgaactggcggccgcctgccgctacttcacgcaaggtttaagcgatgatgatgccggtcgtagagaaatgttaatggacatcgccaccgaggagctgagtcatctggaaattatcggctcactggtaggaatgcttaataaaggcgctaaaggcgagctggcggaaggtaccgaaaacgaagcggaactttatcgctcgctgacgcagaatggtaatgacagccatatcacctctctgctgtatggcggcggcccggcgttgacgaactccggcggcgtaccgtggaccgcggcttatattgatactatcggcgaagtcacagccgatctacgctcaaacatcgcggcagaggcgcgagcgaagatcatttatgaacgcctgattaatctgaccgacgatcccggcgtaaaagacacgctcagtttcttaatgacccgtgaagtcgcgcaccagctctcttttgaaaaggcgctgtattcgattcgtaacaacttcccgccgggtaaattaccgccggtagaacagtataccgacgtgtactacaacatgtcgcaaggcgacgatccgcgaggtagctggaatagcgatgagaacttcaactatgtcgcagaaccgatgcctgctgttgatggcggcgatggcctggcgacagtgaaattgccgcgcgagcagatggcgctgctcaaagcgatggcagaaagaacgaaatcggaccccaccgttgatcctctcactggcgcagaactaggctgcggcgaaccgaaagaagacaagtga

SEQ ID NO: 368406 - DNA, 507 bp, Salmonella enterica
atgaattatactgaacattatcatgactggcttcgtgacgcccatgccatggaaaaacaggcagaatcgatgcttgaatctatggccagccgtattgaaaattatcctgatataaaagccagaattgaacaacatattagtgaaaccaaacatcaaattaccatgctcgaagaagtattggaccgtaatggcatttctcgttcggtgttgaaagactccatgagtaaaatggcagcaatggggcaatctatcggtggcatgttcccttccgatgaaattgtcaaaggctcaattagcggttatgttttcgagcagttcgaaattgcttgttatacctccctgctggcggcggcaaaaaaagctggcgacactgcctcaattccgacgattgaagccattctgaaagaagaaatgcaaatggctgactggctgatcaaacatattccgcagacaacggaacaatttttactgcgatctgaagcagatggcgttgaagccaaaaaataa

SEQ ID NO: 368407 - DNA, 504 bp, Salmonella enterica
atgaatatcaaaaccgttgaagacctttttatccatctactttcagatacctatagtgcagaaaaacaattaaccaaggctctttctaaactagccagagccacgtccaatgaaaaattaagccaggcctttcaatctcatcttgaagaaacccagggtcagattgaacgtattgatcagatcgtcgaatctgaatctggcattaaactgaaaagaatgaaatgcgtcgctatggaagggctgatcgaagaagccaatgaagtcatcgaaagtacggagaaaaacgaagtacgcgatgcagcgcttatcgccgcggcgcaaaaagtcgagcattacgaaatcgccagctacggcacgctagccaccctggccgagcagctcggctatagcaaggcattaaaactgctcaaagaaaccctcgacgaggaaaaacaaactgatttaaaacttaccgatttagcagtcagcaatgttaataaaagtgctgaacgcaaatcgaaataa

SEQ ID NO: 368408 - DNA, 183 bp, Salmonella enterica
atggccgaacatcgtggtggttcaggaaatttcgccgagaatcgtgaaaaagcatctgaagcgggccgcaaaggcggtcagcatagcggcgggaatttcaaaaacgatccgcaacgagcttctgaagccggtaaaaaaggtggtcagaatagtcacggcggacgtaaatccgataattcctga

SEQ ID NO: 368409 - DNA, 807 bp, Salmonella enterica
atggaacgctacgaaaatttatttgcacagctcaacgatcgccgggaaggcgcttttgtccccttcgtgaccctgggcgaccctggcattgaacagtcactgaaaattatcgacacactgattgacgctggcgccgacgctctggaactgggggttcccttctccgatccgctggccgatggccctaccatccagaatgcgaacttacgcgccttcgccgctggcgtcacgccggctcagtgttttgaaatgctggcgctgattcgtgaaaaacacccgaccattccgattggcctgctaatgtacgcgaatctggtgttcaataacggcatagatgcgttctatgcccgttgtgaacaggttggcgtagattccgtgctggtcgcagatgtcccggttgaagagtcggcccccttccgccaggcggcgttacggcataatatcgcgccgatcttcatctgcccgccaaatgcggatgacgatcttctgcgccaggtcgcatcttacggccgcggttacacctacctgctttcgcgttcgggcgtcaccggcgcggaaaaccgtggcgcattgccgttgcatcatctcattgagaagcttaaagagtaccatgccgcgcctgcgttacagggcttcggtatctcctcgccggaacaggtgtctgcggccgtgcgtgccggggcggctggcgctatctccggctcagccattgtcaagattatcgagaaaaacctcgcgtctcccgaacagatgttggcggagctcaggtcctttgtctcagccatgaaagccgccagccgcgcataa

SEQ ID NO: 368410 - DNA, 1194 bp, Salmonella enterica
atgacaacacttctcaacccctactttggtgaattcggcggcatgtatgtgccgcagatcctgatgcctgcgctgaaccagcttgaagaggccttcgtcagcgcgcaaaaagatcctgaatttcaggcgcaattcgccgatctgctaaaaaactacgcgggacgccccaccgcgctgacgaaatgccagaacattaccgccggtacgcgtaccacgttgtatttaaagcgcgaagatttactgcacggcggcgcacacaaaaccaatcaggtactgggtcaggcgctgctggccaaacggatgggtaaaagcgagattatcgctgaaaccggcgccggtcagcacggcgtcgcctctgcgctcgccagcgccctgctgggtctgaaatgccgtatctatatgggtgccaaagacgttgagcgccagtcgccgaacgtcttccgtatgcgtctgatgggcgctgaggttatcccggttcatagcggctccgctacgctaaaagatgcctgtaacgaggcgctgcgcgactggtccggtagttacgaaaccgcgcactatatgctcggcacggcggcaggaccgcatccctatcccaccatcgttcgcgagttccaacgcatgattggcgaagagacgaaagcgcaaatcctcgacaaagagggccgtctgccagatgccgttatcgcttgcgtcggcggcggctcaaacgctatcgggatgtttgcggattttattaatgataccagcgtcgggctaataggcgttgaacctggcggtcacggtattgaaaccggcgagcatggcgcgccgcttaaacatggtcgcgttggcatctatttcgggatgaaagcgccgatgatgcaaacagcggacgggcaaattgaagagtcctattccatttccgccgggctcgatttcccatccgttgggccgcaacatgcgtacctgaacagcatcggacgcgcggattatgtctccattaccgatgatgaggcgctggaagccttcaaaacgttgtgccgccatgagggaattatcccggcgctggaatcctcccacgcgttggcgcacgctctgaaaatgatgcgcgagcagccggaaaaagagcaactgctggtggtcaatctctctggccgcggagataaagacatctttaccgtacacgatatcctgaaagcgcgaggggaaatctga

SEQ ID NO: 368411 - DNA, 1359 bp, Salmonella enterica
atgcaaaccgttttagcgaaaatcgtcgcagacaaggcgatttgggtagaagcccgcaaacagcaacagccgctggccagctttcaaaatgagatccagccaagtacacgccatttttatgatgcgctccagggcgcgcgtaccgcctttattctggagtgtaagaaagcatcgccatcaaaaggcgtgattcgcgatgatttcgatccggcgcgtattgccaatatttatcaacattacgcctcggcaatctcggtgctcaccgacgaaaaatattttcagggtagcttcgattttctgccggtcgttagccaaagcgcaccgcagccgattctgtgtaaggattttattatcgatccctatcagatctaccttgcccgttactatcaggccgatgcctgtttactgatgctctcggttctggatgacgaacagtatcgccaactctccgccgtcgcgcacagtctgaaaatgggcgtgctcacggaagtcagtaatgacgaagaacgggagcgcgcgatagcgttaggcgcaaaagtggtaggtatcaacaatcgcgatctgcgcgatctgtcgattgatttgaatcgcacccgccagctggcgccaaaactgggccacggcgtgactgtcatcagcgagtccgggattaacacctatggtcaggtacgcgaactgagccacttcgccaacggttttttaattggctcggcgttaatggcgcatgacgatcttaacgccgccgtccgtcgcgtgctgcttggcgaaaataaagtctgcggcctgacccgcgcccaggacgctaaagcggcctgtgacgctggcgcaatatatggcgggttgatttttgtgccctcatctccacgcgcggtgagcgttgagcaggcgcgagaagtgataagcggcgcgccattgcagtatgtcggcgttttccagaacgctgatatcgccgatgtttgccagaaagccgccgtcctgtcgctttctgccgtacagctacatggcagcgaagaccaggcgtatgtcaacgcgctgcgcgaggcgttgccgcgcaatgtgcaaatctggaaggcgctgagcgttagcaatgcccttcccgcacgcgattatcaccatgtcgataaatacattttcgacaatgggcaaggcggcagcgggcagcgcttcgactggtcactgctacaggggcaaccgctggatgatgtgttactggcgggcgggctggcggccgataactgcgtccaggcggcgcaagtcggctgtgccggtctcgattttaattcaggtgtggagtcacagccgggcatcaaagatgctcgtcttctggcctcggtttttcagacactgcgcgcatattaa

SEQ ID NO: 368412 - DNA, 1596 bp, Salmonella enterica
atggctgatattctgctgctcgataacatcgactcgtttacctggaacctggcagatcagctacggaccaacggtcataacgtggtgatttaccgtaaccatattccggcgcagacgcttatcgatcgcctggcaacaatgaaaaatccggtgctaatgctctcccccggtccgggcgttcccagcgaggcaggctgtatgccggagctgctgacccgactacgcggcaagttaccgatcatcggcatttgtctggggcatcaggcgattgtcgaagcttacggcggttatgtcggtcaggcgggagaaatcctgcatggcaaagcctccagcattgagcatgacggtcaggcgatgttcgccgggctggcgaatccgctaccggtcgcgcgttatcattcgctggtcggcagtaatgttcctgccgggctaaccattaacgcccatttcaacggcatggtgatggcggtacgtcatgatgcggatcgcgtttgcggttttcaatttcatcctgagtccatcctgacgacacagggtgcgcgtctactggagcaaacattagcctgggcgcagcaaaagctggaaccgaccaacaccctacagccaattctggagaaactctatcaggcgcaaactctgacgcaacaagagagccatcagttgttttcggcggtcgtccgcggcgaacttaaacctgaacagctcgccgccgcgctggtgagcatgaaaattcgcggcgagcatcccaatgaaattgccggcgccgccactgcgttgctggaaaatgccgccccgttcccgcgcccggactacctgtttgcggatatcgttggtaccggcggcgatggcagtaacagtatcaatatctctaccgccagcgcctttgtcgcagcggcctgtggactgaaagtggcgaaacacggcaaccgtagcgtgtccagcaaatcggggtcatccgatctgctggcggcgttcggtattaatctggatatgaacgccgataaatcacgtcaggcgttagatgaactgggcgtctgtttcctgttcgcgccgaaatatcacgccggattccgtcacgcgatgccggttcgccaacagttaaaaacgcgaaccctgttcaacgtactcggcccgctgatcaacccggcgcatccgccgctggcattgattggcgtctatagcccggaactggtgctgccgattgcggaaaccttacgggtactgggctatcagcgcgcggcggtggtacatagcggcggcatggatgaggtttcgctccatgcgccgacgattgtcgcggagctgcatgacggcgaaattaaaagctatcaacttacggcggaggattttggcctgacgccttaccatcaggatcagttggctggcggcacgccggaagaaaaccgtgacattctgacgcggttattacaaggtaaaggcgatgccgcgcatgaggccgccgtcgccgccaacgtggcgatgctgatgcgtctgcatggtcaggaagatctcaaagccaacgcgcaaaccgtgcttgatgttctgcgcaacggcaccgcatatgacagagtcaccgcactggcggcaagagggtaa

SEQ ID NO: 368413 - DNA, 1563 bp, Salmonella enterica
atgcaaacaccaaaacccacgctcgaactgttgacctgcgatgccgcctatcgggaaaacccaacggcgctttttcaccaggtctgcggcgatcgcccggcaacgctgctgctggaatccgcggatatcgacagtaaagatgatttaaaaagcctgctgctggtagatagcgcgctgcgcattaccgctttaggtgacactgtcaccattcaggcgttatctgataatggcgcctcgttattgccgctactggataccgccctgcccgctggcgtggagaacgaagtcctgcctgccggtcgcgttctacgcttcccgcccgtcagcccattattagatgaagacgcccgtttatgctctctgtcggtatttgatgcgttccgtctgttacagggagtggtgaacataccgacgcaagagcgggaggctatgtttttcggcggtctgtttgcctacgacctggtcgctggctttgaagcgctgccacaccttgaggctggcaataactgcccggactactgcttttatttagcggaaacgctgatggtcatagatcatcagaaaaaaagcacccgtattcaggccagtctgttcaccgcaagcgaccgggaaaaacagcgcctgaacgcccgcctggcttaccttagccaacagttaacccagcctgcgccgccgttgccggtcacgccggtgccggacatgcgctgcgaatgcaatcagagcgatgacgcgttcggcgcggtggtacgccagttgcaaaaagccatccgcgcgggggagatatttcaggtggtgccgtcgcgccgcttttcactgccctgcccgtcgccgttggctgcctactacgtgctgaaaaagagcaaccccagcccgtatatgttctttatgcaggataatgatttcacgcttttcggcgcgtcgccggaaagctcgctgaaatatgacgccgccagtcgtcagattgagatttaccccatcgcgggtacccgtccacgcggtcgccgcgccgatggtacgctggacagagatctcgacagccgtattgagctggacatgcgtaccgaccataaagagctttccgaacatctgatgctggtcgatctggcgcgcaatgacctggcgcgcatctgtacgccgggcagtcgctacgttgccgatctgaccaaagttgaccgctattcgtacgtgatgcatctggtttcccgggtagtgggcgaactgcgtcacgatctcgacgcgctgcacgcctatcgcgcctgcatgaacatgggcaccctgagcggcgcgccgaaagtacgcgccatgcagttgattgccgatgcggaaggacagcgccgcggcagctatggcggcgcggtcggttacttcaccgcccacggcgatctggacacctgtattgttatccgctccgcgctggtggagaacggtatcgccaccgtacaggcgggcgccggaatcgtgctggactctgttccgcagtctgaagccgatgaaacccgtaataaagcgcgcgccgtattgcgtgctatcgccaccgcgcatcatgcacaggagaccttctga

SEQ ID NO: 368414 - DNA, 870 bp, Salmonella enterica
ttgagcgacacgaattacgcagtgatttacgatctgcacagtcataccacggcgtccgatggactgttgacgccagaaacattagtacaccgtgcggtagagatgcgagtcggcacgctggcgattaccgatcatgacaccacagccgcgattcctgcggcaagagaagaaatttcacgttccgggctggccctgaatcttattcccggcgtggagatttcaacggtctgggagaatcatgagattcacattgtgggtctgaatattgatattgcgcatccggcaatgcgcgattttctggcgcagcagacacagcggcgtcaggcgcgtggtcggctcattgcggagcgtctggaaaaagcccatattcccggcgcgtgggaaggggcattgagactggccaatggcggcgcggtgacgcgcggccacttcgcccgctttctggtggagtgcggcaaagccgcgaccatggcggatgtttttaaaaaatatctcgcgcgtgggaaaaccggttacgttccgccgcagtggtgtacaatagaacaagctattgatgtcattcatcattctggcggtaaggcggtgttggcccacccgggacgctacgaccttagcgctaagtggctgaaaagattagtggcgcattttgccgaccatcacggcgacgcgatggaagtggcgcagtgccaacaatcacccaatgaacgcacccaactggcgacgcttgcgtgtcagcatcatttatgggcatcgcttggatctgatttccatcagccctgcccgtggattgagttggggcgtaaactctggctgcccgctggcgttgaaggcgtatggcaggcatgggaacagccgcaaatatcacagtga

SEQ ID NO: 368415 - DNA, 621 bp, Salmonella enterica
atgagccagtttttttatatccatccggataacccacagcaacggctgattaatcaggccgtcgacattgtgcgtaaaggcggtgttattgtttatccaaccgattccggctatgcccttggttgtaaaattgaagacaaaggcgcaatggagcgcatttgccgcatccgtcatctgccggacggccacaacttcacgctgatgtgccgcgatttgtccgagttgtcgacctactcctacgtcgacaacgtggcatttcgtctgatgaaaaacaatacgccgggtaattacacctttatcctgaaggggacaaaagaggtgccgcgccgtctgttgcaggaaaagcgtaaaactatcggcctgcgcgtaccgtcaaacccgattgcgctggcgttattggatacgctgggcgaaccgatgctctcgacgtcgttgatgctgcctggcagcgattttaccgagtcggacccggaggagattaaagatcggctggagaagcaggtggatctgatcatccacggtggttacctcggtcaacagcctaccacggtaatcgatttgaccaatgactccccggtggtgctgcgcgaaggcgtcggcgacgttacacctttcttataa

SEQ ID NO: 368416 - DNA, 876 bp, Salmonella enterica
atgagcgaaaagttacaaaaagtgctggcgcgcgctggccacggctctcgccgtgaaatcgaatccattattgaagcgggacgtgtcagcgttgacggtaaaatcgccacgcttggcgatcgtgttgaagtcactcccggtttgaaaatccgtatcgacggtcacctgatttcggtgaaagagtcggcggaacaaatttgccgcgttctggcctattacaaaccagaaggtgaactgtgtacccgcaatgaccctgaagggcggccaaccgtttttgatcgcttaccgaaattgcgcggcgcgcggtggattgcggtaggacgtctggatgtcaacacctgcgggctattgttgtttaccaccgacggtgaactggcgaaccgcctgatgcaccctagtcgtgaagttgaacgtgaatatgccgtgcgcgtgttcggtcaggtggatgaatcgaaactgcgtgatttaagccgtggcgtacagttggaagatggtccggcggcatttaagaccattaaattcagcggcggcgaaggcattaaccagtggtacaacgtgacgctgacggaagggcgcaaccgcgaagttcgccgactgtgggaagcggtaggcgttcaggtcagccgtctgatccgcgttcgttacggcgatatcccgctgccgaaaggcctgccgcgcggcggctggactgagctcgacctcgcgcaaacgaactatctgcgtggtctggtagagctcccgccggaaacctcgtcgaaggttgccgtcgaaaaagaccgccgtcgtatgaaagcgaaccagatccgtcgggcggtaaaacgccacagccagatcgctggcggacgccgctccggtgggcgtaataacaacgggtaa

SEQ ID NO: 368417 - DNA, 591 bp, Salmonella enterica
atgagtgatgaacgttatcagcagcgccagcagaaggtaaaagatcgggttgacgcccgtgtcgcccaggcacaggaagagcgcggtattattatcgtgtttactggcaatggtaagggcaaaaccacggcggctttcggaactgccgcccgcgccgtaggacacggtaaaaacgtaggcgtggtgcaatttattaaaggcacctggcccaacggcgagcgtaatctgctggaaccgcatggcgtcgaatttcaggtgatggcaacgggatttacctgggagacgcaaaatcgcgaggcagacaccgcagcatgtatggccgtttggcagcatgggaaacggatgctggccgatccgctgcttgatatggtggtcctggatgagctgacctatatggtggcgtatgactatttgccgctggaagaggtcataagcgcgctaaacgcgcgccctggtcaccagacggtgattattacaggtcgcggctgtcaccgggatattcttgatcttgcggataccgtcagcgaactgcgtccggttaaacatgcttttgacgcgggcgtaaaagcccagatgggaattgattattaa

SEQ ID NO: 368418 - DNA, 762 bp, Salmonella enterica
atgcattaccaaccgaaacaagatctattgcaaaaccgcattattctggtcactggcgccagcgatggcattgggcgggaagccgcgcttacgtatgcgcgttacggcgcaacggtgattctgctgggacgcaacgaagagaaactgcgtcgggtcgcgcagcacattgctgacgagcaacatgttcaaccacagtggtttacgctcgatctgctgacctgcaccgctgaagagtgccggcaagtggccgaccgcatcgccgcgcactatccccgcctggatggcgtcctgcacaatgccgggttactgggggaaatcggtccaatgagcgaacaagatccgcagatctggcaggatgtcatgcaggtaaacgttaacgccacctttatgctcacccaggcgctgttaccgttattgctgaagtccgatgccggctcgctggtctttacgtcatcaagcgttggccgtcagggacgcgccaactggggcgcctatgccacctcgaagtttgctactgaaggaatgatgcaggtgctggcggacgaataccagaatcgttctctgcgtgttaactgcattaacccgggcggcacgcgcaccagtatgcgcgccagcgcctttccgacggaagatccacagaaattaaaaacgcctgccgatattatgccgctttacctgtggcttatgggcgacgacagtcgccgtaaaaccggtatgacctttgacgcccaaccgggccgtaaaccaggaatcgcccaatga

SEQ ID NO: 368419 - DNA, 1041 bp, Salmonella enterica
ttgttgtctgaatatggcttatttttggcaaaaatcctcaccgttgtggtggccattgccgtcattgtgctgctgatcgtgaatgctacgcaacgcaaacgtcagcgcggcgagctgcgcgtgaccaatttgagcgagcagtatcaggagatgaaggatgaccttgctgcggcgttgatggatggccatcagcaaaaactgtggcataaagcgcagaaaaaaaagcataagcaggaggcgaaagccgccaaagcgaaagcgaagctgggggacattgcgacatcggacaaaccgcgcgtatgggtgatagatttcaaaggcagtatggacgctcacgaagttaatgcgttacgcgaagaggtcacggcggtgctggcagtggcgaaacccggcgatcgggcggttgtgcgtctggaaagccccggtggcgttgtgcacggctatggcctggcggcatcgcaattgcagcgcctgcgcgataaaaatattccgctgaccgtgacggtggataaagtcgcggcaagcggaggctacatgatggcctgcgtggcggaaaaaattatcgcggcgccgttcgctattgtggggtcaattggtgttgtcgcgcaaatcccgaactttaaccgctttctcaaaagtaaagacattgatattgaactgcataccgcagggcagtacaaacgtaccctgactttgttaggcgagaatacggaagaagggcggcagaagtttcgtgaagatctcaacgaaacgcaccatctgttcaaagagtttgtgcagcggatgcgtccggctctggacattgaacaggtcgccacgggcgaacactggtacggtcagcaggcgctggagaagggactggttgatgagattaacaccagcgatgaggttatcctcggcctgatggaagggcgcgaggtgctgaatgtgcgctatatgcagcgtaaaaaactgatcgatcgtgttaccggcagcgcggcggaaagcgcggatcggctgctgctgcgctggtggcagcgtggacaaaagccgttgatgtaa

SEQ ID NO: 368420 - DNA, 252 bp, Salmonella enterica
atgcataaagagacgcaacctatcgatcgcgaaacactgttgcttgaagccaacaaaattattcgggaacatgaagacacgatggcaggtattgtcgccaccggcgtaacgcagagaaatggcgtgctggttttcagcggcgattactttttagacgagcaagggttaccgacccctaaaagcaccgcggtgtttaacatgtttaaacacctggcgcatgtgctgtctgagaagtatcacctggttgattaa

SEQ ID NO: 368421 - DNA, 2598 bp, Salmonella enterica
atgggtaaagctcttgtcatcgttgagtccccggcaaaagccaaaacgatcaacaagtatctgggtaatgactacgtggtgaaatccagcgtgggtcatatccgtgatttgccgaccagtggctcagcagctaaaaagagcgccgactctacctccaccaaaacggctaaaaagcccaaaaaggatgaacgtggcgctctcgtcaaccgtatgggggttgacccgtggcacaactgggatgcgcactatgaagtgctgcccggtaaagagaaggtcgtctctgaactgaaacagttggcggaaaaagccgaccacatctatctcgcaaccgaccttgaccgcgaaggggaagccattgcatggcacctgcgggaagtgatcggcggcgatgacgcgcgctacagtcgcgtagtctttaacgaaataaccaaaaatgccattcgccaggcgtttgaacagccgggcgagctgaacattaacagggtcaacgcccagcaagcgcgccgctttatggatcgcgtggtaggctatatggtctcgccgctgctgtggaaaaagatcgcccgtggtttgtcggcaggtcgcgttcagtctgtcgcggtccgtctggtcgttgaacgcgagcgcgagattaaagcgtttgttccggaagagttctgggaaattgacgctaatacgacgacgccgtctggcgaggcgctaccgctacaggtcacgcatcagaacgacaagccattccggccggtaaatcgcgagcagacgcttgctgcggtgagcctgctggaaaaagccagctatagcgtgctggagcgagaagacaagccgaccagcagcaagccaggcgcgccgtttatcacctccacgctacaacaggcggccagcacccggctgggctttggcgtgaagaaaaccatgatgatggcgcagcgtctgtatgaggcgggctacatcacctatatgcgtacagactccaccaacctgagtcaggatgcggtcaacatggtgcgcggctatattggcgataatttcggcaagaaatacctgccggataacccgaaccagtacgccagcaaagaaaactctcaggaagcgcacgaagcgatccgtccttccgacgttgcggtcatggcggagtcgctgaaagacatggaggctgacgcgcagaagttgtatcagctaatttggcgtcagtttgtcgcctgtcagatgacgccagcacaatatgactccactacgcttaccgttggtgcaggcgagttccgtctgaaagcgcgtgggcgtattttgcgctttgacggctggacaaaagtgatgccggcgctgcgtaaaggcgatgaagatcgcacattgcctgccgtgaataagggcgatgcgctgacgctacttgaattgacgcctgctcagcactttactaaaccgccagcccgtttcagcgaggcttctctggttaaagagcttgagaagcgcggtattggtcgtccgtctacctatgcgtcgattatctcgaccattcaggatcgcggctatgttcgcgttgaaaaccgtcgcttctatgcggaaaaaatgggtgaaatcgtcaccgatcggctggaagaaaacttccgcgaattgatgaactacgattttactgcgcagatggaagatagtctggatcaggttgcgaatcaccaggccgagtggaaagcggtactggataacttcttcagcgattttactcagcagctcgataaagccgagaaagatccggaagaaggggggatgcgtcctaaccagatggtgctgaccagcatcgactgtccaacctgtggccgtaaaatgggaattcgtactgccagtacgggcgttttccttggatgttcaggttatgcgctttcgccgaaagagcgttgtaaaacgaccattaacctggtgccggaaaatgaagttctgaacgtgctggaaggcgacgacgccgaaaccaacgccctgcgcgccaagcgtcgctgccagaagtgcggtacggcgatggacagctatctgatcgatccgaagcgtaaattgcatgtgtgtggtaataacccgacctgtgacggctacgagattgaagaaggcgagttccgcatcaaagggtatgacggcccgatcgttgagtgtgagaaatgtggttccgaaatgcaccttaaaatggggcgttttggtaagtacatggcctgtactaacgacgaatgtaaaaatacccgtaagatcttgcgtaacggcgaagttgcgccgccgaaggaagatcctgttccattaccggaactgccgtgtgaaaaatcggacgcgtactttgtgctgcgcgatggcgccgcagggatattcctggcggccaatacgttcccgaaatcacgcgaaacgcgcgcgccattagtcgaggagctttaccggttccgcgatcgcctgccggaaaaactgcggtatctggcggatgcgccgcagcaggatccggaaggtaataaaaccgttgttcgctttagccgcaaaacaaaacagcagtacgttgcggcggaaaaagacgggaaggcgacgggatggtcagcgttcttcgtcgacggcaagtgggttgaaggtaagaaataa

SEQ ID NO: 368422 - DNA, 153 bp, Salmonella enterica
atgggccgagtaatccgtagccaacacataagccacttgaagtatgaaggggatataaaaaagggccgcttacgcggcccgcttgactacagtggcgacaggccggggttatttcttaccttcaacccacttgccgtcgacgaagaacgctga

SEQ ID NO: 368423 - DNA, 975 bp, Salmonella enterica
atgaaattgcagcagcttcgttacattgttgaagtggttaatcataaccttaacgtctcctctaccgctgaggggttgtatacttcccagccggggatcagcaagcaggttaggatgctggaagatgagcttggcatccagattttcgcccgcagtggtaagcatctgactcaggtgacgcccgcaggtcaggagattattcgtattgcgcgtgaggtgctttccaaagtcgatgccattaagtcggtcgccggcgagcacacctggccggataaaggctcgctctatattgccactacccatactcaggcgcgttacgcattgccaggcgtgattaaaggcttcatcgagcgttacccgcgcgtttcgctgcatatgcaccaggggtcgccaacgcagattgcggaagcggtatcgaaagggaacgccgatttcgcgattgccacggaagcgctgcatttatatgacgatctggtgatgttgccatgctatcactggaaccgttcgatagtggtgacgccggatcatccattggcggcaacgtcttccgtaacgatcgaagcgctggcgcagtatccgctggtgacgtataccttcggctttaccgggcgttccgaactggataccgcttttaatcgcgcaggattaacgccgcggatcgtctttactgcaaccgatgcggatgtgattaaaacgtatgtcaggttgggactgggcgttggcgtcattgccagcatggcggtcgatccgcttgccgatcctgatttagtgcggattgacgcgcacgatatttttagccacagcaccacaaaaattggttttcgccgtagtacttttttacgcagctatatgtatgattttatccagcgttttgcgccacatctgacgcgtgatgtggtggatacggcggtggcgttgcgttctaatgaagaaattgaagcgatgtttcaggatataaagctgcctgaaaagtaa

SEQ ID NO: 368424 - DNA, 129 bp, Salmonella enterica
atgccttctgaaaaccaggaaccgcgccgcgaccctgagctcaaacgtaaagcatggctggcggtttttgtgagttctgcgttgttctgggtagtggtagcgcttgttatctggcattggtggggctaa

SEQ ID NO: 368425 - DNA, 2676 bp, Salmonella enterica
atgtcgtcaaccctacgagaagccagtaaggatacattgcaggccaaagataaaacgtatcattactacagtctgccgctggctgccaaatccctgggcgatatcgcccgtttgcccaaatcacttaaagtgttactggaaaacctgttgcgctggcaggacggcgaatctgtgactgatgaagatattcaggcgctggccggttggcttaaaaatgcccatgccgatcgtgaaattgcctggcggcccgcccgtgtcctgatgcaggactttaccggcgtgcctgccgttgtcgacctggcggcgatgcgtgaagccgttaaacgcctcggcggcgatacgtcgaaagtgaacccgttatcgccggttgatctggttattgaccactctgtgacggtcgatcatttcggcgatgacgatgcgtttgaagaaaacgtgcggctggaaatggaacgtaaccatgagcgttatatgttcctgaaatggggaaagcaggcattcagccgtttcagcgtggtgccgcccggcaccggcatttgccatcaggttaacctggaatacctgggtaaagccgtctggagcgaattacaggacggggagtggattgcttacccggactcgctggtggggactgactcccatacgaccatgattaatggtctgggcgtattggggtggggcgtgggcggtatcgaagcggaagcggcgatgcttggtcagcccgtgtcgatgcttatcccggatgttgtcggctttaagttaaccggtaagcttcgggaggggatcaccgctactgacctggtgctaaccgtcacgcaaatgctgcgtaagcatggcgtcgtgggtaaatttgttgaattttatggtgatggtctggattcgctgccgttggcggatcgcgcgaccatcgctaatatgtcgccggaatatggcgccacctgtggtttcttccctattgacgccatcaccctggaatatatgcgattaagcggacgtagcgacgatctggtcgagctggttgaagcctacgcgaaggcgcagggaatgtggcgtaatcccggagacgaaccggtatttaccagtacgctggaactggatatgggcgatgtcgaggccagcctggccgggccgaaacgcccgcaggatcgcgtggcgttaggcgatgtgccgaaagcctttgccgccagcgccgagctggagctgaataccgcgcaaagagatcgccagccggttgactatacgatgaacggacagccatatcagcttccggatggcgctgtcgtcattgccgccatcacctcctgcacgaatacctcgaatcccagcgtgctgatggcggcgggattactggcgaaaaaagcagtaacgctggggttgaagcgtcaaccgtgggtcaaggcttctctggcgccggggtcaaaagtggtatctgactatctggcgcaggccaaacttacgccttatctggatgagctcggttttaacctggtcggttatggctgtacgacctgtatcgggaactctggtccgttgccggagcctattgagaccgcgattaaaaaaggcgatctgacggtaggggccgtgctttccggtaaccgaaattttgaagggcgtatccatccgctggtgaaaacgaactggctggcgtcgccgccgctggtggtcgcgtatgcgttggccggaaacatgaatattaacctcgcgacagacccgctggggtacgatcgtaaaggcgatccggtatacctgaaggatatctggccttcggcgcaggaaattgcccgcgccgttgaactggtatcatcagatatgttccgtaaagagtatgcggaagtgtttgagggcacggaagaatggaaatcgattcaggttgaatcgtccgatacctacggctggcagtcggattcaacctatattcgcctgtcgcctttctttgatgaaatgcaggcccagcctgcgccagtcaaagatatccacggcgcgcgtatcctggcgatgctgggggattcggtaacgaccgaccatatttctccggccggcagtatcaagccggacagtcccgccggacgctatctgcaaaaccacggcgttgagcggaaggattttaactcctatggatcacggcgcggcaaccatgaagtgatgatgcgcggtacgttcgccaatattcgtattcgcaacgaaatgctgcccggcgtcgaaggtgggatgacgcggcatttgccgggtacggaagcgatgtcgatttatgatgctgcgatgctctaccagcaggaaaaaacgccgctggcggtaattgccgggaaagagtatgggtcgggatcgagccgtgactgggcggcaaaaggtccgcggctgttaggtatccgcgtggtgatcgccgagtcgttcgaacgtatccaccgctcaaacctgattgggatggggatcctgccgctggagtttccacagggcgtaacgcgtaaaacgctgggactgaccggggaagaggtgattgatatcgcggatctgcaaaacctgcgccctggcgcgaccattccggtgacgttaacgagatcggacggcagcaaagaaacggtgccttgccgctgtcgcattgataccgccaccgagctgacttactaccagaatgacggcatattgcactatgtcattagaaatatgctgaactaa

SEQ ID NO: 368426 - DNA, 591 bp, Salmonella enterica
atgcagcttaaacgtgtggcagaagccaaactgccaaccccattgggtgactttctgatggtgggatttgaagaactggcaaccggacacgaccatgccgcgctggtttttggcgatatttcaggtaaaacgccggtcttggctcgcgttcattccgaatgtcttaccggggacgcgctttttagtctgcgctgtgattgtggttttcaactggaagccgcgctgacgcatattgcggaagaaggacgcggtattctgatttaccaccgtcaggaaggccgcaatatcggcctgcttaataaaattcgcgcttatgcgttacaggatcaaggctatgacacggtggaggccaatcatcagctcggctttgccgccgatgagcgtgatttcaccctgtgcgcggatatgttcaaattactgggcgtagatgaagttcgcctgctgaccaataatccgaagaaagtcgaaatactgaccgaggcgggaattaatatcgtcgaacgcgttccgctcattgtgggtcgtaatccaaataatgagcattatctcgatactaaagcggccaaaatgggccacctactaagcaagtaa

SEQ ID NO: 368427 - DNA, 765 bp, Salmonella enterica
atgctttcaattgcgaggcgcaccgcggcaggcgccgccctgttgcttatcatgccgcttgccgtatgggtatcaggctggcagtggcagccaggacatcaggtctggtggctaaaaacgctattctggataacggaaaccgtgaccaaaccctggggcgttatcacgcatgtgattctttgtggatggttcttatggtgcctgcgatttcgcctgcgcgccgccattatgctgtttgcgatcctcggcggggcgattatcgtcgggcagggtgtgaagtcatgggtaaaggagcgcgtacaggagccgcggccatttgtggtctggcttgaaaaaacgcaccatattcccgtcgatgagttctacactttaaagcgtacagaacgcggacatttagtgaaagagcagttggccgggcaacagaacatccccgttttcctgcgtcagcactggcaaaaagagacgggctttgcgtttccctccggacacaccatgtttgcagcgagctgggcgcttttggccgtgggtctgttatggccgcgcagacggactttcaccatcgcgtttttgttagtctgggcgaccggcgtaatgggcagccgtttgcttctgggaatgcactggccgcgagatttagtggtcgccacgctcatctcctggctattagttaccctggcgacctggctggcgcagcgaatttgcgggccgcttatgccgcctcgcgaagaagcgcaagaaattgctgaacgcgagcaggaaagctga

SEQ ID NO: 368428 - DNA, 309 bp, Salmonella enterica
gtgaaatatttactcattttcttactggtattggcgatttttgttatttcggtgacgctgggcgcgcagaatgatcaacaggtgacgtttaactacctgctggcgcaaggggagtatcgtatctccacgttgcttgctgtgttgttcgccgtcggttttgcgattggctggctgatttgcggcctgttctggctgcgggtccgcgtttcccttgcccgtgctgaacgtaaaattaaacgactggaaaacaagctctcgccagcaaccgacgttgcggtccctgccgactcgtcggttgtaaaggaataa

SEQ ID NO: 368429 - DNA, 1170 bp, Salmonella enterica
atgttggagttgttatttctgctgttgcctgtagccgctgcctatgggtggtatatgggtcgcagaagtgcgcaacaaacaaaacaggatgaagctaaccgcctgtcgcgcgattatgtcgcaggggttaacttcctgctgagtaaccaacaagataaagcggtggatctgttcctcgatatgcttaaagaggatacgggcaccgttgaggctcatctcactctcggtaatctgtttcgctctcgcggcgaagtcgatcgcgccattcgtattcatcaaacgctcatggaaagcgcttcattgacctatgaacagcgtttactggctgttcagcaactggggcgcgactatatggccgccggtttatatgaccgcgcggaagatatgtttaaccaacttaccgacgaaacggaatttcgcgtaggcgcgttacagcagctcttgcaaatctatcagctaaccagcgactggcaaaaggcgatcgaagtagcagaacggctggtgaagctgggcaaagataaacaacgtatcgaaatcgcccatttttactgtgagttagcgttacagcagatgggcaacgacgacatggatcgcgcgatggcgttgctgaaaaaaggtgccgccgcagataaaaatagcgcccgggtgtctatcatgatggggcgcgtttatatggcgagaggggattacgccaaagcggtcgaaagcctgcaacgtgtgatcgttcaggataaagagctggtcagcgaaacgctggagatgctgcaaacctgttatcaacagctcggtaaaaatgccgagtgggcggagtttttacgtcgcgccgttgaggagaataccggtgctggcgctgagttaatgcttgccgatattctggaagcgcgtgaaggtagtgacgcagctcaagtctatatcacgcgtcagctacagcgacatcctaccatgcgggtgttccataagctgatggattaccatctcaacgaggcggaagaagggcgagcgaaagaaagcctgatggtactgcgtgatatggttggcgagcaggtgcgcagtaaaccgcggtatcgttgtcagaaatgcggttttaccgcctataccttgtactggcactgtccgtcctgccgggcatggtcgaccattaaacctattcgcggacttgatgggcagtag

SEQ ID NO: 368430 - DNA, 738 bp, Salmonella enterica
atgacgtttactgcttcatcttcttcctgcgctattactgaatcgcctgtcgttgtggcgttggattaccatgaacgcgataaagccctggcgtttgtcgacaaaatcgatcctcgcgattgtcgcttaaaagtgggcaaagagatgttcacgctgtttggtccacaactcgttcgggatctccagcaacgtgggtttgatgtctttcttgatctaaaatttcatgatattcccaacaccacggcccgggcagtcgccgcagcggcagacctgggcgtctggatggtaaacgttcacgcgtctggtggggcgagaatgatggccgcagcgcgcgacgcgctggcgccattcggtaaagatgcgccgttgctcattgccgtgaccgtgttgaccagtatggaaaccagcgatctacacgatctgggcgtgacgttgtcaccggcggaacatgcggagcggctggcgcgcctgacgcagcaatgcgggctggatggcgtggtctgttccgctcaggaagctgtcagatttaaacaggcctttggcgctgcatttaagctggtgacgccgggcattcggcccgcaggcagcgaggcaggcgaccagcgacgcattatgacgcccgaacaggcattatccgctggcgtcgactatatggtgattggccgcccggttacgcaatcggtagatccggcgcaaacgctgaaggatattaacgcgtcactgaaacgggaggcataa

SEQ ID NO: 368431 - DNA, 327 bp, Salmonella enterica
atgagcgattccaatagtcgtctggtttattcaacacagacggggcgcattgaagaacctaaaacggcgccggttcgtcccaaaggggatggtatcgttcgcattcagcgtcaaaccagtggccgtaagggtaaaggcgtatgtttgattaccggtatcgagatgaatgatgcggaattaaccaaactggcggctgaactgaagaaaaaatgcggctgtggcggggcagtaaaagaagggattattgaaattcagggtgataaacgcgacttgataaaatcattgctggaagctaaaggaatgaaagtaaaattagctggcggctaa

SEQ ID NO: 368432 - DNA, 219 bp, Salmonella enterica
atgtttatgacgagcaaaaaaatggccgctgctgtgctggcaatcaccgtagcaatgtctctgagcgcctgctcaaactggtccaagcgcgatcgcaacacggctattggcgcaggtgcgggggcgttaggcggcgcagtgttaacggacggcagtacattaggcaccctgggcggcgcggcggtcggcggcgtgattggtcaccaggttggaaaataa

SEQ ID NO: 368433 - DNA, 723 bp, Salmonella enterica
atggtggttgataaaggccagatgagcgttgctgaactggcgaaaattaccggcgtatctgaagtcacgattcgtcaggatctgaataccctggaaaagcagagctatttacgccgtgcgcacggtttcgccgtttcgcttgagagcgatgacgtagagactcgcatgatgacgaactacacgctaaaacgccgactggcggagttcgccgcctcgctggtcagtccaggggaatccgtttttattgaaaatggcagcagcaatgcgctattggcccggacgctggcggaacaaaaagatgtcacgatcatcaccgtgagcagttatatcgcgcacctgctcaaagagaccccttgcgaagtcattctcctcggtggaatctatcagaaaaaaagtgaaagcatggtagggccgttgacgcgacagtttatccatcaagtgcatttcagcaaagcatttatcggtattgatggctggcaggctgataccggttttaccggacgcgacatgatgcgatcggatgtggttaacgctgttctggaaaaaggctcagaagcgattgtcctcaccgacagctccaaatttggctgtgtgcatccctatcccctgggcccgctctctcgcttccatcgtgtcattacggattccaaaatttccgccagcgatcaaatgcagttagaacatgcggggctgctagtcaatgttattggctcatccgtttaa

SEQ ID NO: 368434 - DNA, 180 bp, Salmonella enterica
atgtctgatatcgaagcacaacgaattgccgcacgcattgataccgtgctggatatccttgttgctggcgattaccactcggccatcaataaccttgaaatattgagagcagagctgttagatcaggttaaagacggtatctcgccatcccaggctcccgggtcgccctgggaaatctga

SEQ ID NO: 368435 - DNA, 1983 bp, Salmonella enterica
atgatgaaacagattcaggaacaaacggcgctaaatccccttcactctcactggcgtctggctgatgaccgcaacgtgctgtatctctccccgacaggtgaaacggatacagaaaaaacggtcgagctatcgccggagcaagccgggcgtatccgggaaataacggcgattacgtccagtctgctgataacgttgttgatagaaaaacaggttaccgctgtgcacctggtaggccgtaagattaataaccgtgaatgggctggcagcctggcaacctggcctgatacgcctgccgtcgcgccaacgcaggcgcaggagctctcttttgccgagcaaatcgtatcagaagccaactcagtcattgcgatactggatagtcggggaaaaatctgtcgatttaatcggttatgcgaagagtacacgggcttaaaagagcgagatgtaattggtcaaagcgtctttaaattatttatgagtcgccgggaggcggttgcctcccggcactacattgagaatttttttcgcaatggcaatgcctatgaaatcgaacgctggataaagacccgtaaaggccaacgcctgttcttatttcgtaataaatttgtccataacggtagcggaaaaaacgaaattttcctgatctgcgcaggcacggatatcaccgaagaaaggcgggctcaggagcgtttacgcatactggcgaatacagacaccgtcaccggcctgcccaatcgcaatgcgatccatgaatttattaatcatgctattgcctcggctggcgagtcgcaagtgggtatcgtttatctcgatctggataacttcaagaaaattaatgacgcctatgggcatatgtttggcgatcagctcttacaggccgtttcgctggcgctgttgagttgtctggaggaagatcaattgctggccagactggggggagatgaattcattgtcctcgctgcccatacgtctcaggccgcgctggaagcagtagcctcacgaatccttacccgtctgcggcaaccgtttcgtattggactcattgaagtttacacgggatgcgccattggcatttcgttggccccccggcacggacaggacagcgacagtctcattcgcactgccgacaccgcaatgtataacgccaaagaaggcggccgcggtcagttctgcgttttttcgccggaaatgaatcagcgcgtatttgactatcactggctggatacaaacctgcgaaaagcgctggaaaacgaccagttacttattcactatcagcccaaaattacctggcgcggcgaagtacgtagcctggaagcgctggtacgctggcaatcgccggaacgcggattaattccgccgctggagttcatctcatacgccgaagagtcaggactcatcgtcccgctgggccgctgggtgattctggatgtggttcgccagattgcgagatggcgcgataaggggattaacttgcgcgtagccgttaacttttcggcgcgacaactggccgaccagacgctttttactgcgcttaaacaggctttgtacgatctgaattttgagtattgcccgatcgatgtcgagctaacggaaagctgcctgatcgaaaacgacacgctggcgctatcggttatccagcaatttagtcagctcggcgcccagattcatctggatgattttggcaccgggtattcttcgctttctcaactcgcccggttccctattgatgccgttaaactggatcaggctttcgtcagagatatccataagcaaccgctgtcgcaatctctggttcgggcgattgtcgcggtggctcaggcgctaaatttacaagtgattgccgaaggcgtagaaaatgctaaagaagatgccttcctgacaaaaaacggcgtcaatgaacgacagggctttttattcgccaaacctatgcccgccgtttcttttgaacgctggtacaaacgttatcagacgaaaaaaatgcgttaa

SEQ ID NO: 368436 - DNA, 1935 bp, Salmonella enterica
atgtttcaggacaacccgctgctagcgcagcttaaacagcaactgcattcccagacgccgcgcgctgaaggggtcgtaaaagccacggaaaaaggctttggcttccttgaggttgacgcgcaaaaaagctatttcattcctccgccgcagatgaaaaaagtgatgcatggcgatcgtatcgtcgcggtcatccacacggaaaaagaacgtgagtctgccgagccggaagaactgatcgaaccgttcctgacgcgttttgtgggaaaagttcagggtaaaaatgaccgcctgtccatcgtgccggatcatccgttgctgaaagacgcgattccctgccgcgccgcgcgcggcgttcagcatgagttcaaagaaggtgactgggcggttgccgaaatgcgccgccatccgcttaaaggcgaccgttcgttttacgccgatttaacgcagtacatcacctttgccgacgatcactttgttccctggtgggttacgcttgcccgccataacctggaaaaagaagcgccgaacggcgtagcgacggagatgctggacgaagggctggagcgtcaggatctgaccgcgctgaatttcgtcactatcgatagcgccagcactgaagatatggatgacgcgctatatgctgaggaattagcggacggcagactccagcttacggtggctatcgccgatcctaccgcctggattgccgaaggcagtaagctggataacgccgcgaaaattcgcgccttcaccaactacctgccgggcttcaatattcctatgctgccacgtgagctgtctgacgatctgtgctcactgcgcgccaacgaagtgcgtccggcgctcgcctgtcgcatgataatctccgcggacggcaccattgacgatgatatcgccttttttgcggccaccatcgaatcgaaggccaagctggcgtacgacaatgtctccgactggctggaaaataacggcacctggcagccggataacgaaggcattgcccaccagattcgtctgttgcaccgtatttgcctaagccgcagtgagtggcgtcatcatcatgcgttagtctttaaagaccgcccggattaccgctttgtgcttggcgaaaaaggcgaagtactggatattgtggcggaaccgcgccgtatcgctaaccgtatcgtagaagagtcgatgatcgccgctaacctttgcgccgcgcgcgtactgcgcgataagctcggtttcggtatttacaacgtacatacgggcttcgatcccgcgaatgccgacgcgctggccgcgctgctgaaaacgcatggtctgcatgtcgatgccgaagaggtgctgacgctggaaggcttctgtaaactgcgtcgcgaactggatgcgcagccctccggtttccttgacagccgcattcgtcgcttccagtcttttgcggaaatcagcaccgagccggggccgcatttcggtcttggtcttgaggcttacgccacctggacctctcctatccgtaagtatggcgatatgattaaccatcgcctgctgaaagcggtcatcaagggggaggctattgcgcgtccgcaggaagatatcacccagcaaatggcggaacgccgtcgcctgaaccgcatggcggagcgcgatgtcggcgactggttatatgcacgcttccttaacgataaggcggggacaaatacccgtttcgcggcagaaattattgacgtcagccgcggtggtatgcgtgtgcgactggtcgataacggcgctatcgcctttatccctgccccgttcctgcacgccgttcgcgatgaactggtatgcagccaggaaaacggtacggtacagattaaaggtgagacggtttataaagtgacggatgtcattgatgtcactattgcggaagttcgcatggaaacccgcagcattattgcccgaccggcagcgtaa

SEQ ID NO: 368437 - DNA, 1134 bp, Salmonella enterica
atggaacaatgccgaaaagcgggtaaaagccactggtatcatgaaacacaatccactatgtcgtcacaacccccgctttcgctgatgccggaagccgcgtatgttaacgatcgttttttactggatttaacggtatcagaaaccgcgttgacgccttttgagtcatggttaaagcccgctcaccagttggcggatgtcttatttccccgcacggttctcaacgaccggcttcatacgtttagcacctatgaacgtatgagcaccgcgctgaccgccgctcaggtatttggggttcagcgtttgtgccgctattatgccgcgcgtctggcgccgctacctggccctgatgcctcaagagagagcaatcaacggctggcgcaaattacgcaatacgctcgtcagcttgccggctccccctccgttatcaatacgcgagcccgcgaacagcttgcagaggtgggattaaccgcccgggataccgtactcatcaatcagatcattgggtttatcggttttcaggcgcgggtagcggcgatatttcaggcgttttgccgtctgcccgtgcgcgaactgcccggccaggagatgcagcgctttgccagggccgcgcggtttcaaaacccccagacgatatggcggcccgccgccagtctggtagaatatcctccagcccataccaaagttcggcggcaatattcgtcttcacaatgccaaatgatggcgccggtactcatgcgcgatccgtcttcattcgcgttactcgaacgcatactgaccagcacattacacactgcatcgcccccttctttacttccacttatcacgctcctcacatcacgtatcaacggcagcgccgcctgctttaacgaacaggcaacccaacctggcgcgtggcgtcgcgctgtcatcacgttacgccaggaagacgacgacatcgctcgttgggaacttgagcctgcgctgacacaggcgatacaatggctcaccagagcgcccgatcgctttagcgccgcgcattttttcccgctactcaccaggggagtttcatcggagcaggccattaatatgttaggctggtgcggcgtgtgcggatggttaaatcgtttaaaaatcgcgttgggcgaaacctattaa

SEQ ID NO: 368438 - DNA, 789 bp, Salmonella enterica
atgggttttctttccggtaagcgcattctggtcactggcgtggccagtaaactgtccatcgcctacggtatcgcacaggcgatgcaccgcgaaggagctgaactggcgttcacctaccagaacgacaaactgaaaggccgcgtagaagaatttgctgcccagctgggttccagcatcgttttaccgtgtgatgtcgctgaagatgccagcattgacgctatgtttgcggagctgggtaacgtttggccgaaatttgacggttttgtacactcgatcggtttcgcgcctggcgatcagctggacggcgattatgttaatgcggttacccgcgaaggctttaaaatcgctcacgatattagctcttacagctttgttgccatggcgaaagcctgccgcaccatgctgaatccgggttctgcgctgttgaccttgtcttatctgggagcggagcgcgccatcccgaactacaatgtcatgggtctggcgaaagcctctctggaagccaacgtgcgttatatggcaaatgcaatggggccggaaggcgttcgcgtcaacgccatctctgcgggtccaatccgcacgctggcggcgtccggtattaaagacttccgtaaaatgctggcgcattgtgaagccgttacgccaattcgtcgcaccgtgaccattgaagatgtgggtaactcagcggcgtttctgtgttccgatctctcggcaggcatttctggcgaagtcgtccatgttgacggcgggttcagcattgcggcaatgaatgaactggaactgaagtaa

SEQ ID NO: 368439 - DNA, 1374 bp, Salmonella enterica
atgccgtttacatttcatatcggaaatcatagttgccagatatcagaaaggtatttaagagatatcatcgataataaaagagaacatgttttttcaacgtgtgagaaatttatagattttttcaggaatatatttaccaggcgaagtttaatttctgattatagagaaatctataatctactgtgccaaaaaaaagagcatcccgatattaaagggcctttctctccaggaccattttcgaagcgagatgaagactgtacacgatggcgcccccttcttggatatattaaacttattgatgcctccagacctgaaacaatagataaatacactgtagaggtattagcacatcaagaaaatatgttactactacagatgttttacgatggagtattagtgaccgagacggagtgttctgaacgttgcgtcgattttttaaaagaaacgatgtttaattataataacggggaaattacgcttgccgctttgggtaatgataatctaccgccgagcgaggcaggtagtaatggaatctatgaggcttttgagcaacgtttgataggcttcctgaccacgcccgccacggcgtctggtgatgagagcggcgctattgatcagacggatgcatcacaaccagcggcaatagaggcgtttattaactcgccggagtttcagaaaaatattcgcatgcgtgatattgaaaaaaataaaataggtagcggaagttatgggacagtctatcggttacatgatgactttgttgttaagattccaattaatgagcggggaataaaagtggatgttaactctcaggaacatcgtaattgtcatcctgagcgtgtcagtaagtatttgaatatggccaatggcgacaagaatttttctcgttcggccatcatgaatattaatggtaaagacgttacggttttagtttcaaaatatattcaaggtcaggagttcgatgttgaagatgaagataactatcgaatggcggaggcgcttcttaaatcccggggggtttatatgcatgatataaatatcttaggtaatattctggttaaagagggggttcttttctttgtggatggcgatcaaatcgtgttatcacaagaatcacggcaacagcgaagcgtttctcttgcaacaaggcaactggaagagcaaattaaggcccatcacatgataaaattaaagcgggccgagaccgaaggaaatactgaagatgttgaatattataagtcacttattacggatcttgatgcgttaatcggagaggaagaacagacacctgcgccaggaagacgttttaaactagccgcgccggaggaagggactcttgtggctaaggtattaaaggatgaattaaaaaaatag

SEQ ID NO: 368440 - DNA, 708 bp, Salmonella enterica
atgcgctatttttttatggcagagccgataagggcaatggagggggatttactgggtgtcgaaatcactacccattttgcatcgtcgcccgctcgtccgctacaccctgagtttgttatctcgtcatgggacaattcgcagaagcgccgttttctgcttgatctgttgcggacaatcgcggccaaacatggctggtttctacgccacggcctattctgtatcgtaaatattgatcggggtatggcgcagcttgtccttcaggataaagatattcgcgcattactacacgccatgctatttgtggagctgcaggtcgctgaacatttttcatgtcaagataacgccttaatcgatcctttaatacacgcgcttcataagcaacctaatccattatggctgggcgacctgggcgtagggaatgcaactgctgtgccattagtttgcgggtgttttagcggcgtaaaacttgatcgcagcttttttgtctcacaaattgaaaaaatgacgtttccgctgcttgtcaaacatatccggcgttattgtgacaagatcgtggtggggggccaggaaaacacacgctatttgccggtgttaaaaacggcaggcatttgggcaacccagggcacgttatttccttccgttgcgttagaagaggttgaaacattgctgttgggcagtcgcatgaacaccctcagagaatcgaactga

SEQ ID NO: 368441 - DNA, 807 bp, Salmonella enterica
atggtggaaactctgcttgaagtgcgcaacctgagtaaaacctttcgctaccggacaggatggtttcgccgccagaccgtcgacgccgtgaaaccattaagctttacgcttcgtgagcgtcagaccctggccattatcggcgaaaacggttccggcaaatccacgctggcaaagatgctggccggcatgattgaacccaccagcggcgagcttcttattgacgatcatcccctgcattacggcgactattcgtttcgaagccaacgtattcgaatgatttttcaggacccctcaacgtcactgaatccacgtcaacgtatttcgcagatccttgacttccccctgcgccttaataccgatctggagccggaacagcggcgcaaacagattgtcgagacgatgcgtatggtggggctattgcccgatcacgtgagctactacccgcatatgctggcgccggggcagaaacagcgtctgggcctggcccgcgcgctgattttacgccctaaagtcattatcgcggacgaagcgctggcttcgcttgatatgtccatgcgctcgcagctcatcaatctgatgcttgaattgcaggaaaagcaaggcatctcctatatctatgtcacgcagcatatcggcatgatgaagcatattagcgatcaggtattagtgatgcatcagggggaagtggttgaacgcggcagcaccgccgatgtgctcgcctctccgctacatgagcttacccgccgtttaatcgcaggccattttggcgaggcgctgaccgctgacgcatggcgaaaggatcgctaa

SEQ ID NO: 368442 - DNA, 993 bp, Salmonella enterica
atgccgttactggatatccgcaatctcaccattgaatttaaaaccagcgaaggttgggtaaaagcggtcgatcgcgtcagtatgacattaagcgaaggtgaaattcgcggcctggtaggtgaatcgggttccggaaagagcttgattgctaaagctatttgcggcgtcgcgaaagacaactggcgagtcactgccgaccgtatgcgttttgatgatatcgatctgctgcgcctctcctcacgtgaacggcgtaagctggtcggacataatgtgtcgatgatcttccaggagccgcagtcgtgccttgatccttccgaacgcgtcggccgccagttaatgcaaaatattcccgcctggacctataaaggccgctggtggcagcgtttaggctggcgtaaacggcgtgcaattgaattactgcaccgggtgggaattaaagatcataaagacgcgatgcgcagttttccctatgaactgaccgatggcgagtgtcagaaagttatgatcgctatcgcgctggcgaatcaaccgcgactcctgatcgctgatgaacccaccaactcaatggaaccgacgacgcaggcgcaaatttttcgcctgttgacgcgactgaatcaaaacagtaataccaccattctgttgattagccacgacctgcaaatgctgagtcagtgggctgacaaaatcaacgttttatactgcggccagacggtagaaaccgcgccaagtaaagatctggtgacgacgccacatcatccttatacgcaggcgcttatccgtgcgattccggattttggcagcgcgatgccgcataaaagccgtctcaatacgctgccgggcgcgatcccgctactggagcagttaccgataggttgtcgtctggggccgcgctgcccttacgcgcaacgagaatgcattatcacgccacgcttaaccggcgcgaaaaatcatctctatgcctgtcattttccgctgaatatggagagagagtga

SEQ ID NO: 368443 - DNA, 891 bp, Salmonella enterica
atgccttacgatagcgtatacagcgaaaagcgcccgccaggcaccctgcgcactgcctggcgtaaattttatagcgacgcgcctgcgatggtgggtctgtatggatgcgccggtctggcgttgctgtgtatttttggcggctggatcgcgccctatggtatcgatcagcaatttctgggctatcagctactgccaccctcctggtcacgctatggcgaagtctccttttttctggggactgacgatctggggcgcgatgtgctgagccgcctgttaagcggcgcggcgcccacggtcggcggcgcgtttatcgtaacgctggcggctacgctatgtggattagtcctcggcgtagtggcaggcgcgacgcacggtttacgctctgccgtgctgaaccatattctggacacgctgctttccatcccttcgctcttgctggcgattatcgtcgtggcatttgccggcccacatctgtcacacgcgatgtttgccgtctggctggccctgttgccgcgaatggtacgttccgtctacagcatggtgcatgatgaactggaaaaagagtacgtcattgccgcccgtctggatggagcgacaacgctgaatattctgtggttcgccattttaccgaatattaccgccggtctggtcaccgaaattacccgggcgctgtcgatggcgattctggacatcgccgcgctgggatttttagatctcggcgcgcagcttccctctcctgaatggggcgccatgttgggggatgcgctggagctaatctatgtcgcgccgtggaccgttatgctacccggcgcggcgataacgctcagtgttttactggtaaacctgctcggagatgggattcgtcgtgcgattattgcgggggtggaataa

SEQ ID NO: 368444 - DNA, 966 bp, Salmonella enterica
atgattatcttcaccctgcgtcggttattgctgttgctggtgacgctattcttcctgacctttatcggctttagcctgagctattttacgccgcacgcgccgctacaaggcgcatcattatggaatgcctgggttttctggttcaacggtctgctgcactgggactttggcgtgtccagcattaacggccagctgatctccgaacagcttaaagaggtgtttcccgccacgatggagctgtgcattctcgcctttggttttgcgctgatggtcggcatcccggtcgggatgctggctggcgtgacgcgtagcaaatggccggatcgttttatcagcgcgctggcgctattaggtttctcaattccggttttctggctggcgcttctgctcacactgttcttttcgctcacgctggggtggctgccggtatccgggcgatttgacctgctttatgaagttaaaccggttaccggtttcgccatcattgacgcctggatttcagattcgccatggcgtgatgaaatggtgatgagcgccatacggcatatggttttaccggtgctcacgctctccgtcgcgccgaccacagaagtgatccgcctgatgcgaatcagcactattgaggtctacgatcagaactacgttaaagcggcggccacgcgcggcttatcgcgctttacgattttacgccgtcacgtgttgcataatgcgctgccgccggtcattccccgtcttggtctgcagttttcaaccatgttaacgctggcgatgattaccgaaatggttttcagctggcctgggctgggacgatggttaattcacgccattcgtcagcaggactatgccgctatttccgctggcgtgatggtcattgggtcgctggttattgtggtcaatgtgatttccgatattttgggtgctatggctaaccatctgaaacataaggaatggtatgccttacgatag

SEQ ID NO: 368445 - DNA, 1650 bp, Salmonella enterica
atgcgcctggttttatcgtctctgatcgtgatagcgggtctactgagtagtcaggctacggctgcggctgcgcccgaacaaactgcgagtgcagatattcgcgatagcggctttgtgtattgtgtcagcgggcaggtcaacacctttaatccgcaaaaagcgagcagcggcctcatcgtcgataccctggcagcccagttatatgaccgcctgttggatgtcgatccctatacttatcgtttagtcccagagctggcagaaagctgggaagtgctggataacggggcaacgtaccgttttcacctgcgccgcgacgtttcctttcaaaaaaccgcctggtttacgccgacccgaaaactcaatgctgatgatgtcgtctttacctttcagcggatttttgatcgtcggcatccgtggcataacatcaacggcagtagcttcccctactttgatagcctacagttcgccgacaatgtaaaaagcgtgcgtaagctggacaataacaccgttgagtttcgcctgacgcagccagacgcctcctttttatggcatctggctacacactacgcttccgtcatgtccgctgagtacgccgcgcagcttagccgaaaagatcgtcaggaactgctagaccgccaaccggtcggcaccgggcctttccagctttcggagtaccgtgccggacagtttattcgtctccagcgccacgatgggttttggcgcggcaaaccgctgatgccgcaagtggtagtggatttaggctccggcggtaccgggcgtttatcgaaattactgaccggtgaatgcgatgttctggcctggcccgccgccagccagctaactattttacgcgacgatccgcgtttacgtctgacgttgcgcccggggatgaatatcgcctatctggcctttaacaccgataagccgccgttgaataatcccgcagtgcgccatgcgctggccttatcgatcaacaaccagcgtctgatgcagtcgatttattacggcacggcggaaaccgcagcctccattttaccgagagcctcatgggcttacgataacgatgccaaaattacggagtacaatccggaaaaatcgcgcgaacagctaaaagcgctgggcattgagaatcttacgctgcatctctgggtgccgaccagttctcaggcctggaacccaagtccgctaaaaacggcggagcttattcaggcggatatggcgcaggttggcgtaaaagtggtcattgtgccggttgaaggtcgttttcaggaggcgcgcctgatggatatgaatcacgatctgaccttatccggctgggccacggacagcaacgatccggatagctttttcagaccactgttaagctgtgcggccatcaattcgcaaaccaatttcgcccactggtgtaaccctgaatttgacagcgtgctgcgtaaagcactgtcgtcgcagcagttggcttcgcgcatagaagcatatgaggaagcgcagaatatcctggagaaagagctgccgatactgccgctggcatcatcactacgcctgcaggcttaccgctacgatattaaagggctggtgttaagcccgttcggcaatgcgtcttttgccggcgtctcccgcgaaaaacacgaagaggtgaaaaaaccatga

SEQ ID NO: 368446 - DNA, 981 bp, Salmonella enterica
atggctgaatttaaagataacctgctcggcgaggcaaaccgttttcttgaagtactggaacaagtctcccggctcgcgccgctggataagccagtgctgattattggcgaacgcggtacgggtaaagaacttatcgccaatcgcctgcactatctctcttcacgctggcaggggccgcttatctcgcttaactgcgcagcgcttaacgaaaatctgctggactccgaactgtttggtcatgaagcgggtgcttttaccggggcgcaaaaacgccatcccggtcgctttgaacgcgccgatggcggcacgctgtttttggatgaactggcgacagcgccaatgctggtacaggaaaagctactgcgggtgattgaatatggcgagctagagcgcgtcggcggcagccagccgttacaggttaatgtgcgattagtatgcgccaccaatgccgatttacccgccatggtaaaggaaggaacatttcgtgccgatctgctcgacaggctggcttttgacgttgtacaactgccgccgctgcgcgaacgtcaaagcgatattatgctgatagccgagcattttgctattcagatgtgtcgtgagctacgtctgcccttatttcccggttttaccgatcgggcaaaagaaacgttgttgcattacgcctggccgggtaatgtccgcgagctgaaaaacgtagtcgaacgttcagtgtatcgccacggcagcagtgaacatcctttggatgaaattgttatcgatccttttcaacgccattccgccgaaccgcccacgcccgccctgccagcggcatccgccacgcctgacctgccgctcaagttgcgggagtttcaactgcaacaggaaaaagcgctgctgcaacgtagcttacaacaggcgaaatttaaccagaaacgagccgccgatttgctggcactcacctaccaccagtttcgcgccttgcttaaaaagcatcagctttag

SEQ ID NO: 368447 - DNA, 663 bp, Salmonella enterica
atgggtattttttctcgttttgccgacatcgtgaacgccaatatcaatgcgttgttggaaaaagcggaagatccgcagaagctggtgcgcctgatgattcaggagatggaagatacgctggtggaggttcgctcgaactccgcgcgtgctttagcggaaaagaaacagttatcccgtcgcattgaacaggctacggttcagcagaccgagtggcaggaaaaagcggaactggctctgcgcaaagataaagacgatctggcgcgcgccgcattgattgaaaaacaaaagctgaccgatttaattgctacgcttgaacaggaagtcacgctggtggatgacacgctggcgcgcatgaagaaagagattggcgagctggaaaacaaactcagcgaaacacgcgctcgccagcaggcgctgatgctgcgtcatcaggcggcgagttcttcccgcgatgtccgtcgtcagcttgacagcggcaaactggatgaagccatggcgcggtttgaatcctttgaacgtcgtatcgatcaaatggaagcggaaagccatcgttttggtaagcagcaatcgctggaccaacagtttgccaacctgaaagccgatgatgaaatcagcgagcagctggcgcagttgaaagccaaaatgaagcaagataatcaataa

SEQ ID NO: 368448 - DNA, 225 bp, Salmonella enterica
atgagcgcgctatttttggccatcccgttaaccatttttgtgttgtttgtgttaccgatttggctgtggctgcattacagcaaccgcgccggtcggggagaactgtcgcaaagcgagcagcaacgcttactgcaactcacagacgatgcgcaacgtatgcgcgagcgcattcaggcgctggaagacattcttgatgcagagcatccgaactggagagagcgctaa

SEQ ID NO: 368449 - DNA, 360 bp, Salmonella enterica
atgggtggaatcaatctgaataaaaaactatggcgtatgccgcaaaagggcatggtgcgtggcgtttgcgccgggatcgccgactaccttgatgtaccggtaaaactggtgcgtattctggtcgtgctgtcgattttctttgggctggcgttttttaccgtagtggcctatatcgttctgtcttttgtactggaccctatgccggataatctggccgcaggcaaaccgcagccgaccagcggcgaactgctggataccgtagacagagagcttgccgcaggcgaaaagcgtttgcgagaaatggaacgctacgtcacgtcagatacgttcacactgcgtagtcgtttccgtcaactttaa

SEQ ID NO: 368450 - DNA, 219 bp, Salmonella enterica
atgaatactcgctggcaacgcgtcgggcagaaggtgaagcccggcttcaaaatagcaggtaagctggttctgttgaccgcgttacgctacgggcctgccggcgtggcgggatgggcggtaaaatccgtcgcccgtcgtccgctaaaaatgttgctggcgtttgcgctggagccagtacttcgtaaggcggcgaataaaatttcgcagcgttacaaatag

SEQ ID NO: 368451 - DNA, 315 bp, Salmonella enterica
atgttgaaaaaaggaatatttgcgttagcgttattcgtagccatgccgctttatgccgcagaatactggatagatgtccgcattccggaacaatatcagcgtgagcatattcagggcgcgattaatatcccattgaaggagattaaatctcatatcgaaacggtagttccagacaggaacgatacggtaaagttatattgcaactccggacgacagtcgggcatggcaaaacaaatgttgcttgatatggggtatacgcacgcgatgaatatgggcggcatcagtcgtcttgatatgccgaaagtaaaaaaatag

SEQ ID NO: 368452 - DNA, 1398 bp, Salmonella enterica
atgaagcgacttaaaactgaactcaacgcgctggtcaatcgtggggtagacaggcatttgcgtcttgccgtaaccgggttgagccgcagcggtaaaacagcgtttatcacggcgatggttaaccagttgcttaatgtccacgcgggcgcgcgcttaccgttgctcagcgcggtacgcgaagaacgcctgcttggcgtaaagcgcgtgcctcaacgtgattttggtattccccgttttacctacgatgaggggatacttcagctttatggcaatcctcccgcatggcccacaccgacgcgcggcgtcagtgagattcggctggcgttgcgctatcgctccaacgactcgctgctgcgccattttaaagatacctcgacattgtatctggagattgtggactatccaggggaatggttactcgatctgcccatgctggctcaggattatttaagctggtcccgtcagatgaacggcttgttacaaggacaacgcgctgagtgggccgcaaaatggcggcaactttgcgacgggctcgatccgctggcacccgccgatgaaaaccggctggcggagattgccgccgcctggacggattatttgcatcagtgtaaatcgcagggattgcattttattcaacctggacggtttgttttgccgggcgatatggcgggtgcgccagcgttgcagtttttcccgtggccggatgtggacgccttcggcgagtcaaaactggcgcaggcggataaacagaccaacgctggaatgctgcgcgaacgctttaactactattgcgaaaaagtggtcaaagggttctataaaaatcattttctacgctttgatcgccagattgtactggtcgactgtctgcaaccgcttaatagcgggccgcaggcgtttaatgatatgcgtctcgccttaacgcagttgatgcaaagttttcactatggccagcggactctgtttcgccgcttgttttcgccggtgattgataaattgctgttcgccgcgacgaaagccgaccatgtcaccctcgaccaacatgccaatatggtggccttgctccagcagcttattcaggatgcctggcaaaatgccgcgtttgaaggcattagtatggattgcctagggctggcgtcggtacaggcgaccaccagcggcgtgattgaggtcaacggtgaaaaaatcccggctttacgtggaaaccgtttgagtgacggcgcgccgttaaccgtgtaccccggcgaagtgccttcgcgtttgccgggacaagcgttttgggatagtcagggttttcagttcgaagcctttcgtccgcaggtgatggatgttgataaaccgttaccacatattcgtctggacgctgcgctggagtttttaataggagataagctgcgatga

SEQ ID NO: 368453 - DNA, 1062 bp, Salmonella enterica
atgagcgaaccgttaaaaccgcgtattgattttgcagaaccgctaaaggaggaacctacgtcggccttcaaagcgcagcaaacttttagcgaagcggagtcgcgtacatttgcgcctgcagctatcgatgagcgcccggaagacgaaggcgtggcagaagcggcggtcgatgccgcgctgcgccccaaacgcagtctgtggcgtaaaatggtgatgggagggctggcgctgtttggcgcgagcgtggtcgggcaaggcgtacagtggacaatgaatgcctggcaaactcaggactgggtcgctttaggcggctgtgccgcaggcgcgctgatcattggcgctggcgtgggatcggtggtcacggagtggcggcgattatggcgcttgcgccagcgggcgcatgagcgcgatgaggcgcgtgaactgttacatagccatagcgtcgggaaaggtcgcgcattttgcgaaaaactggcgcagcaggcggggattgatcaatcacatccggcattacaacgttggtatgccgctattcacgaaacgcaaaacgacagggaaatcgtcggcttgtatgcgcatctggtacagccggtacttgacgcgcaggcgcgacgtgagattagccgtttcgccgcggaatcgactctgatgatcgccgtcagctcgttagcgttggtggatatggcgtttattgcctggcgtaatttacgcctgattaaccgcatcgcaacgctgtatggcattgaacttggttattacagccgccttcgtctgttccgtctggtgttgctgaatatcgcgttcgcgggggccagtgagctggtgcgtgaagtcggtatggactggatgtctcaggatctggccgcacgcctgtctacgcgcgcggcgcaggggattggcgcaggtctccttaccgctcgactgggaataaaagcgatggagctatgtcgaccattgccgtggatcgataacgataaaccacgtctcggtgattttcgtcgtcagcttatcggtcagctaaaagagacgctgcaaaagagtaagtcgtcgcctgagaaatga

SEQ ID NO: 368454 - DNA, 1542 bp, Salmonella enterica
atgcgtctggaagtcttttgtgaagaccgacttggtctgacccgcgaattacttgatttactggtgttacgtagcattgatttacgcggaatcgagattgatcccattgggcgaatttatcttaattttgctgagctggaattcaccgacttcagcagcctgatggcagaaatccgccgtatttccggcgtaacggatgtccgtaccgttccctggatgccgtccgaacgtgaacatctggccctgagcgcgctgcttgaggcgttgccggagccggtgctctcattggatatgaagagtaaagtggagatggcgaacccggcgagttgtcaactttttgcccagagccaggagcgaatgcggcaccataccgccgcacaattaatcaacggcttcaattttcagcgctggctggacggtaacccgcaaagctcccataacgaacatgtcgtgatcaacgggcaaaacttcctgatggagattacgccggtacatttacaaaacgaaaatgacgaatacgtgttgaccggggcggtcgtgatgttgcgttccacgattcgtatgggacagcagctacagaatttgtccacgcaggatctgagcgcgtttagtcagattattgccgtgagcgcaaagatgaagcacgtcgttgagcaggcgcgcaaactggcgatgctcagcgcgccgctgctgattaccggcgatacgggaaccggcaaagatcttttcgcctatgcctgtcaccaggcaagccctcgttcagcgaaaccgtatctggcgctcaactgcgcttcaatcccggaagatgcggtagaaagcgaactatttggccatgcgccggaaggtaaaaaaggtttctttgaacaggcgaatggcggttcggtgctgctggatgaaattggcgaaatgtcgccgcgtatgcaggcgaagctgctgcgttttctcaacgatggtacgttccgtcgcgtcggcgaagatcacgaaattcatgttgatgtccgcgttatctgcgccacgcagaaaaatctggtggagctggtgcaaaaaggactgttccgcgaagatctctattatcgacttaacgttctgacgcttaatttgccgccgttgcgcgattgtccgcaggatattatgccgttgaccgaactgttcgtggcgcgttttgccgacgaacagggcgttccgcgaccgaaactgtctgccgatctgagtacggtcctcactcgttacggctggccgggtaacgttcgccagcttaaaaatgcgatttaccgggcgctgacgcaactggaagggtatgagctgcgtccgcaggatatcctgctgcctgactacgatgccgcgacggtggcagtcggcgaggatgcgatggaaggctcgctggatgacattaccagtcgttttgaacgttctgtcctgacccagctttatcgtagctatccgagtacgcgtaaactggcgaaacggttgggggtatcgcataccgcgattgccaataagctgcgtgaatatggtctgagccagaagaagggtgaagagtag

SEQ ID NO: 368455 - DNA, 507 bp, Salmonella enterica
atgtcacagactgtacatttccagggtaacccggtcaccgttgccaacgttattccgcaggctggtagcaaagcacaggcttttactcttgtcgcaaaagatttgtctgacgtttccctcagccaatatgcaggcaaacgcaaagtgctgaatattttcccaagcattgatactggcgtatgcgccgcatcagttcgtaagtttaatcaactggccacagaagtggagaataccgtcgtattgtgcgtttctgctgacctgccttttgcacagtcgcgtttttgcggcgcggaaggcctgagcaacgttattacgctttccactctgcgtaataacgagtttctgaaaaactacggcgtcgaaatcgttgacggcccgctgaaaggtttggcggcgcgcgcagtcatcgtgcttgacgaaaacgacaacgttattttcagccagttggtggatgaaatcacccacgagccggattacgacgccgcgcttaatgtcctgaaggcataa

SEQ ID NO: 368456 - DNA, 966 bp, Salmonella enterica
atgagatctgttaaggtatatgaggaaacctggccgttacatacgccttttgttattgcgcgtggtagccgaagcgaagcgcatgttgtcgttgtcgaactggaagaagaggacgtaaaaggcatcggggaatgtacgccatatccacgttatggtgaaagtgatgcctcggtcatggcgcaaatcatgagtattgtgcctcagttggaaaacgggctgactcgcgaagcattgcagaaactgttgccggcaggcgcggcgcgcaacgcggtggatagcgccttatgggatttgcaggcccgccagcggcagcaaagccttgccgggctgctcggcgtgacgctgtccccggtttttactaccgcgcaaacggtagtgataggtacgccggaacagatggcagccagtgcggcggcactatgggaaaaaggggcgacgttgctgaaaattaaactcgatgctcgtctgattagcgaacgtatggtggcgatccgctcggcggtgccggaggcgacgctcattgtggacgccaatgaatcgtggcgtccggaggggctggcggcgcgttgccagttactggcggatctgaatgtcgcgatgctggagcaaccgctgcccgcgcaggatgacgccgccctggaaaattttattcatccgttgcccatctgtgcagatgagagctgccatactcgcagtagtctgaaagccctgacggggcgctacgatatgatcaacattaagctggataaaaccggcggtctgactgaggcgctggcgctggcaacggaggcgcgggagcaaggattcggcctgatgctgggctgtatgctctgtacatcaagagcgattagcgccgcgctgccgcttatgccgcaggtgagcttcgccgatcttgatggcccaacatggctggcggttgatgttgagcccgcgctacgctttacgacgggtcaactccatctttag

SEQ ID NO: 368457 - DNA, 729 bp, Salmonella enterica
atgactgtcacccgcccccgtgccgagcgcggcgcatttccgccaggcactgaacattatggacgttcgctactaggcgcgccgctaatctggtttccggcacctgcagccaatcgcgaaagcggtctgatactggctggcacccacggggatgaaacctcatccgtggtgacgctctcctgtgcgttacgcaccttaaatccaacccttcgccgtcatcatgtcgtacttgccgttaatcctgatggctgtcaactggggttaagggcaaatgcgaatggcgttgatctaaaccgtaactttcccgccgccaactggaaagcgggtgagacagtttatcgctggaatagccgcgcgcaagagcgtgatgtcgtgctgctaaccggcgaccatcccggctcagaaccggaaacccaggcgctttgccagttaattcatcgactccaacccgcctgggtcgtctcttttcacgatccgctagcctgcattgaagatccacgtcgcagcgagctaggcgagtggctggccgatgcgtttgcgttgccgctggtgaccagcgtaggttacgaaacgcccggttcgtttggcagctggtgcgccgacctcaacctgcactgcattaccgccgagtttccccctgtttctgccgatgaagccagcgaaaaatacttgctggctatgtcgaatctgctccgctggcatcctaaagatggagttgacccgtcgtaa

SEQ ID NO: 368458 - DNA, 1614 bp, Salmonella enterica
atgagacattctgtttcagtaacctgttgtgcgctgttggttagcagcttttccctggcatatgctgcggatgttcccggcggaacggtactggcagaaaaacaagaactggtgcgtcatatcaaagatgagcccgcttcgttagatccagcgaaagccgttgggctgcctgaaattcaggtgatccgcgatctgtttgaagggctggttaaccagaacgaaaagggtgaaattatccctggcgtcgccagccagtggaagagcaatgataatcgtatctggacgtttacgttgcgggataatgcgcaatgggccgatggaacgccggtgaccgcccaggattttgtctatagctggcaacgtctcgttgatcccaaaacgctttcccccttcgcctggtttgccgcgctggctggcatcactaatgcgcaagccattatcgacggtaaagtcacgccggatcagcttggcgtcagtgccgtggacgcgcacactttgcgtgttcagcttgacaagccgttgccctggtttgccagtctgaccgccagttttgccttttatccggtccaaaaagcgaatgtcgaaagcggcaaagactggatgaagccgggaaaactgattggcaatggcgcgtatgtgcttaaagagcgcgtggtaaatgaaaaactggtggtcgtgcctaatacgcattactgggataacgcgaaaacggtactgcaaaaagtaacatttttacccattaaccaagaatcggctgcgacgaaacgttaccttgccggtgatattgatatcaccgaatctttccctaaaaatatgtaccagaaattattgaaggatattccagggcaagtttatacgccgccgcaattagggacttattattatgcgtttaatacgcagaaagggccgacggcggattcccgcgttcgtctggcgctaagtatgaccattgatcgccgtttgatggcggaaaaagtcttaggtaccggtgaaaaaccggcctggcattttacaccggatgtcacggcaggatttaagcccgatccttcaccgtttgaacaaatgagccaggaagaacttaacgcccaggcgaaaacattgctgcgtgcagcaggctacggatcgcagaagccgcttaaattaactctgctttacaatacctcagaaaaccatcagaaaatcgcgattgcggtggcgtcaatgtggaagaaaaatctgggggtggatgtgaaattgcaaaaccaggagtggaaaacgtatatcgacagccggaatacaggtaattttgatgttattcgcgcctcctgggtgggtgattacaacgaaccgtcgactttcttatccttattaacgtccacgcatacggggaatatttcacgctttactaatccgacttatgacaaaatcctgacgcaagcgacgatggaaaataccgccgaagcgcgtaacgcggattacaatgcagcggagaaaattttaacggaacaagcgcctatagcgcctatttatcagtataccaatggccggttaattaaaccgtgggtaaagggataccccattactaacccggaagatgtggcctatagccgtacaatgtatatcgtgaagcactga

SEQ ID NO: 368459 - DNA, 930 bp, Salmonella enterica
atgaaacaatccaataatcaggtgggtgaaaaagtattggtgctgggcgcgggacaactgggggcgtcagtgctggcgtcgttggttccggcggtcacacagcgtaatggttccgtttgcgttattgtgtcagggcgatccagggataaacagagcaaacgacgttccagcattcatcaacaactggcggatgccggtgcgcggtttatcccggtcgacatcgcaggcagttcggttgcagcgttaaaagatcaattccacggttttgatacgatcatcaattgtatggggtttgtcgccggtgcgggtacccagataaaaatcacccgcgcggtactggaggcgggcgttaagcgctatttcccctggcagtttggcgtgaattacgatgtggtcggcaaaggtagtggccagccggtgtgggacgaacagtatgacgtcaggacgcttttgcgcgagcaaaacgtcacggagtgggtgattgtttcaaccggtatatttacctcttttctcttcgaaccggcctttggtgtggtcaacttagcccaaaaaaccatcaatgccctcggcggatgggaaatgcaggtcaccgtcacgtcgcctacggatattggtcgcctgaccactgaaatttatctgcatcagccgcgtatcactaacgaagtcgtctttgtcgcgggggaaacgacctcttatgcaaaactggcggaaacggtcgaacgcgtgacgcagcaaacttttacccgaggcgtattgacgctacctgacttacaggagcagctccgtttacatccgcatgacccaatgctgcgctatcgcgtcgccttcgcgcgtggtgacggtatgtggtggccgatgagtgacacctggaatgcacaacatcatctgccgacacaggatattgccgcctggctgaaaacacagcaatga

SEQ ID NO: 368460 - DNA, 906 bp, Salmonella enterica
atggacaagctggaagcgatgcaggtctatgtttgcgtagtggatacccatagttttatcagagccgccgaagtgcttggcgtgccgcgctcaacggtatcgcgagtggttaaagaactggaatcctggcttaagattcaacttttgcaacgtacaacccgcaaacttagcgtgaccgcagaggggcggcgttactacgaagagtgcaaaagagtgctggcagatatcgcggccatggagtcgtcatttcccggccgggcggcacaacccaaagggcgttttaaagtggggatgccgcaatctctcgcccggcattgcattattcctacgctcccggcctttttgtgccagtatccggagctggagctgatactttgttccagcgatagcgtggaggatattatccttcaagggtatgactgcgtgattcgggccggcagaatcgatgattccaccacgctggttgcccgtccacttgccagctttaactgggtgatagcagcatcgcccacttacattgagcgttacggtagccctgaaaatttagatgatctgcaaaaacaccatgcggtcggctacctgaaccaccgcaccgggcgtaccaccgactggttttttacgcgtgagggggaggattacgcgatgcgggtgcaggagacgctggttgtcgatgatacggacgcttatattcaggccggaatacaggggctggggttaattcgcgtcgccagctatctggttgcgccgtatctgcacagcggggcgctggtgacctgcatggacaaccatttttatgatttgccgcttgcgctggtctatccgcaaaacaggtttctgccgcctgcggtacgcgctttttatgactggtgcaaaacggcgctgaaccagccggagcctcttcgctaa

SEQ ID NO: 368461 - DNA, 837 bp, Salmonella enterica
atgcctatggtgggttttggcgtttttaaggtaaccgacaaagaagaatgtcagcagtcagtgttaagcgctattcgcagcggttatcgtcttatcgataccgctgcggtatacggcaatgaagatgccgttggtgacgctgttcgtaaagctatcgcgacaggtctgtgtacccgtgaggagttatttattacttctaaactgtgggtgcaagatatggctaactacgatctggccaaagcaggtattgaagcgtcgctgaaaaaatccgggttagattattttgatctctatttattgcatcaggcaatgggcgattattttagtgcgtggcgcgcgctggaagacgcttatgaagccggtaaactaaaagccattggcgtgtccaacttctatgcgcatgtgttagccaacttctgtgaaaccgtcagaattacgccaatggtaaaccaggtcgaattgcatccatactttgcacaacccgccgcgctggaaaccatgaagcattataacgttcagcctgaagcgtgggcgccgttaggcggcgggagacataaaccgtatgaaaatgtcatgcttcaaaggattgccgatgcccatcaaaaaaccatcgcgcaggttgtcctgcgttggaacgtgcagcgtggtgtcacggttattcctaaatccactcgacaggaacgcattgaagagaactttgccatctgggatttctcactaacggataatgaaatggctcaaatcaacgcccttgatttaggctacgttggcgaagcggtgaagcattttaatcctgaatttgttcgcggttgtcttggcgttaaaatctacgattga

SEQ ID NO: 368462 - DNA, 714 bp, Salmonella enterica
atgatgctatttcgcaacaaatctgtactggttttagggggaagtcgtggtatcggcgcggctattgtacgacgctttagcgctgacggcgcatcggtcgttttcagctacgccggatcgcgtgaagccgccgaaaaactggcagcggaaaccggaagcaccgccatccagacggatagcgccgatcgggatgccgtcatcagcctcgtgcgtgagtacggaccactggatattctggtcgtcaatgcgggcgtggctctcttcggcgatgcgctggaacaagatagcgatgcgatagatcgtttgttccgtattaatatccatgcgccttaccatgcgtcagtcgaagcagcccgcaacatgccggaaggtggacgcattattattatcggttccgtgaatggcgatcggatgcccgtaccgggaatggccgcgtacgccgccagtaaatcagccctgcaagggctggcgcgcggcctggcccgtgattttggcccccgcgggattacgataaatgtggtgcagccaggccccattgataccgacatcaatccggaagatggccccatgaaagagctgatgcacagtttcatggcaatcaaacgacacggaagacctgaagaagtggctggaatggtggcatggcttgccggcccggaagcctctttcgtcaccggcgcgatgcacaccatcgatggtgccttcggcgcctga

SEQ ID NO: 368463 - DNA, 591 bp, Salmonella enterica
atgactacaaaacatagccgaacgccgggtcgccctcgccagttcgatccggagcaagccattgaaaccgctcaacacttatttcattcgcgcggatacgacgcggtgagcgtagcggatctgacaaaagcgttcgggatcaatcctcccagtttctatgcggcgtttggcagcaagctggggctgtatactcgcgtattaaagcgttacaggatgaccgacgcgattccgctcggggcgcttctgcgtcacgatcgcccgaccgcgaagtgccttatcgatgtgctgatggaagcggcaagacgttacgctgccgatcctgatgccactggatgtctggttctggagggcgctcattgtaacgataaaccggcacgagaggccgcctgcgagttttacatcgctgctgaaaacctgattcgcacttatgtcgccatgcggtatccgcaagaggctgaccggacgacggactttatggggacgctaatggcggggctttccgccaaggcgcgagcggggtatagcctggagcgtcttcaggagagcgtgcttctggctggggatgtgctggagcgattactgccggattaa

SEQ ID NO: 368464 - DNA, 237 bp, Salmonella enterica
atgcaaaagtgtagtcttattacggtacttagcttatcagtgttgatgctagccggatgtacaacgacctataccatgacgacccggacgggagagattattgaaacgcagggtaagccggaggttgactccgcaaccggaatgacgaaatacgctgatgtttatggttatcatcgcgttattaaaaccagtgaaatagtgcagacaacagaaggcgcatcgaagctggactggtaa

SEQ ID NO: 368465 - DNA, 1056 bp, Salmonella enterica
atgtatacaaccatcagaaacacaacgctagcaatggtagcgtgtttttcgtatatcgcacatgccagtacccaccctcctcttattatcaccaggggagccggaggagacgcctccggagccacagtcattcatgataattggcggcatggcactcctgacctggtcaatcttaccgatatccccatagataaaatcagaccagaaaaataccgttgcgtactgattattgggcaaggagctataaaagagatgcttcttgcgaacaatgcctcagcaatactttccggaaaaactgttggtctttacactcatctgatcgatcagaacacgctcagattacttcggcaattgcagaacaaagtgagattcaatctcttttttacccgctcacagataactctactaaaactaaggaacatttcagaatataattttttgagttctaaagtaaataatgtctggggacaagactcactagcaattgaaacagtggcacctgacaggggtaatataccggaaaaaacgcttcccctcaaaacaacagattatgtgatctggctgggtggaaactatactacctcctctggtacgcagcgtatcttcacaaacgatcagattgttgtagccctgaaaccactacataatgttatttcatcaaatgcatcgattgctattatgctttcaccacgtttttttgataatagcatgagtaaagaagcaaaagttaaacgactgaaggcagtgcttaacaccttttcgcgaaacagggtcacattttatatgagtaaggagatgcttgctaatctgaaagaatttgatttgcctgttcaactatcccctccttacgcagagctgatgcgaatgccctgggccagcgctacccagcattttgcctctgtggatcaatataacctctttgctgatctcatacctaaagtcacgccgtttcttcttgaaccgaatgatgccgatcaagctctctatgcgacggattatcttaatacccggcgtgtaagtctgacccaaaatattcttaaccacggttgtgactaa

SEQ ID NO: 368466 - DNA, 852 bp, Salmonella enterica
atgaaaaaagccataataatctcagtattagagcaaatagaaaaaaatcttgaagagaggattgatattgaaaagctggttgttataacaggttattcgcgaaggagtttgcaggatttttttaaagaaaagtgtggcgtctcaatcggaaaatatatcagacaacgcaagttgagcagaagcgccactctgctaaagctgacctctcagtcggtcacagatatcgcgttcagaatggggtttgattcagtgcagtcctatagtcgagagttcaaaaaaacatttggcgtcaatcccaataactatcgcaaggctgatttctgggatctcagaaacctacggcctccctactggcttgactgtgatgagcattatcagttcgaaatttgtcagcttacgtcaaaagaaattttcggatttcaaacgtctcatcagatcgcaacaaatgaccttcctaaaaaagcgtcgcctataaaatggaaaatcattcatgagacgctcagaacgtggggcgaaaatgtgtattgtctctcgtcttttaagccggataataccaaagaccaggtcatcgccgtaagcagtttttttggtatggaacataattccgtcgatggaggcaaaatacccatgtcgagggtaataaaatgtggtaaatatgcaaaattccatttcgttggtcataaagaacaatatcaacaattttccaatacaatatatatgtgtatattgccaaaactgaatcttatcaggagagaaggagaagatattgaatacttccatttggcatccgtccaaaagcaacagagtaatgaatccattgtcgatctttattattacatccctgtactgtaa

SEQ ID NO: 368467 - DNA, 759 bp, Salmonella enterica
atggcttcttctgctacacctgcttctgttggtcaccgtcctgtggcaactactaatgcaaaaaaaatagaagtgtctggggaactgacgaccggttcaaccctccagatagcggatgtttttattagggatgaggatggggatcccttatcgctggataaaatgaataatgccgacgatattaaatggtatctggtggataatgaggccgccgatccttctggaaccccggcggcaaccgggacggcttttaccattcctgctgatgcaggcggtaaaaaaattaaaatcgtttaccggattaagacggcaacggggacgccggatagtgcattcttgcctgccactgtcttattaacttctgcatcttctggggtgagcggcgactccgccgcagacggtacaatttctaataagctacgttctgtcactatcaatgtggtgaatgaaagtggtaaaccgactgatgaactcaacggtaccaatgacgccaacactccagtggtaggcggcacccttgaagcggtactggaatgtgccgccacagcggcggctgagtgtgaggtcagtaattataactttacctggcagatggcggatgccgggacaccagataagttcaccgatctgaataataccaacgctgaaaagcataaatatattattaagggaactgagcagaataaactgttccgtgtccacgttacgcctaaaacgacgaaagccacgccggagaataaacgcgctatccgtcgctga

SEQ ID NO: 368468 - DNA, 1983 bp, Salmonella enterica
gtggttttttctaaaaaacccattactaaatatataacctgggccattgttaccagtcagattccactgccggtcattgctgatagcgataatgaaattcagtcgtggattgcggggacggcatcgtctatttctccgcatctgcaggaggggacgctggaggattatgccaaaggaaaaataaaggcgttaccagggcaggccgctaatcatctggtgaacgaggggataaagagcgcttttccggagattattttccgtggtggcgtcaatcttgaagatggcgcgaaatatcgctcatcagagttcgatatgtttattcccgtccaggaaacaacatcgtctttactctttggtcagcttggctttcgcgaccacgacaacagcagtttcgatggccgcacctatgttaacgttggtatgggttaccgccaggaggtcaatggatggctgctcggcgtcaatacgtttctggatgccgacatccgttattcccacttacgtggcggcattggcggggaagtttataaagacagtctggccttttccggcaactattatttccctctcaccggctggaaaacgtcagcagcgcatgaattacatgatgagcgtccggcatatggctttgatctgcgaacaaaaggcacgcttcccgattttccctggttcagtggcgagctcacatatgaacagtattacggggataaagttgatctattgggtaacggtacattaagccggaatccccgcgccgcaggtgcggatctggtctggaatcctgtccccttgcttgaggtcagagcaggatatcgggacgccggtaacggcggctcgcaggcagagggcggtctgagagtcaactattccttcggtacgccgttacatgaacagcttgattaccgcaacgttggtgcgccgtcaaatacgactaatcggcgtgcctttgtcgatcgtaattacgatatcgtcatggcgtatcgggagcaggccagtaaaatccgcattacggcaatgccggtttcaggcctgtccgggacgctggtgacattaatggcgacggtagatagccgttacccgattgagaaggttgagtggtcgggtgatgcggaacttctcgccggactccagcttcaggggagtttgggcagcggccttatccttccacaacttccgctgacggtgaccgacggtcaggagtatagcctttatttaacggtgactgacagccggggtactcgcgtgacctccgagcgtatcccggtaagggtgacacaggatgagaccagtttccgttcatggataaatgttatcaatgacgatgttcaggttgaggacggcaactttgttatcagtacgccgcttcctgccggcgaagaggggaaggttattgagtggcactacgtgcgcgagcgctctgaagaggagtgggcgtcgctcaaaccacgtcatattaagtatcaatcagatatgccgggtctggcatttaaagcgctcggtggcacagagcgtgacggccattgggttgaacgggttctggtgacccatatcggcgatgatacccgctcgctcaaattacatattgaagcaagcggaccagacgataaacatccggtgaaggggaccgtactgctgcaagcgcagccagacagcattgcgcagaaggtcacttctgtggaggtgctttttacgccgggtactgaagaagccaacggaagcgttactgcgccagtcgtcggaacagaaatgcgagccagaacgctttgtgtaaataacacggactgtactgatgcgtttaattatcagtgggaaatctcggatgaaatgaaatcctggcaatccgtaccgggggcgacaaaggccacctggcttatcccttatagccttaatggggaatcgctacagaataaatatatccgcgtcagaattatttctgataaagaaaatgccaagagttctaccgcagcatctgatgcgaattaa

SEQ ID NO: 368469 - DNA, 825 bp, Salmonella enterica
atgtcgaaacataatcttattatctatagcctgcttctggcggctgcgccgataagcgtcttggcggattcgtcgacaacttccgcggcaaccgtcgggatgttttctcctcctacggcgccgagcgttgggcacaggcctggaacacctcgcgatggctacgaattgaagtttaatggacttgacttttctattgaaaagtatacaccttttccgggaatgactattgagaggtatgccagaaatgtaggcatcagagatccggataataactatcagtctgcggaaacttttactacagtatgtacgtattatcagataaataaagataactctcagcatatacttaaacgtgaaaatccatgtgagcataaatttaatatccaaaaggaacatcggggttcaaagattaaactagaaatttataatgaaacggatatggcttcagcgtcagggtacacgcctgcgccatcggtatctgaatttcagtatattgaaacagaaactatatctaatacgccaagtcgagatttaacagttatgagtatagataagtctgtattatcgccgggtgaaagtgccaccatcacaactattgttaaggatatcgacgggaatcctataaatgaagtttacattaataagtctgtagcgtgtgaaattttagagtgcttatgggattatggtcctcttaagaaagaaaatgctccaggtaaatatacacaagttataacctatcgtgggcatagtaatgagcgtattgacatatcttttaaatattcagcggcttttacgaaaacaatttccatcagaggaagaccataa

SEQ ID NO: 368470 - DNA, 519 bp, Salmonella enterica
atgacaccagcaacaacacaagattatatttcattgggtcaggaacacgctgtcacctttggcaaaacgcaactgaccctcaaacccggtatactggctgaaggcgaaccattaccctgcacaaaggggctggtgagccataatttattaccgggttactgtatcccggggataaaaaagcggattattgtcgtcccgtcactggatacgccggtttgtgaatggcaggtaaaagactatagtaaccgccttaaatcagcgggtagccactcaaaccgggcggtatatgtgctgagtatggatacgccatttgctcaggcccgttttattctggaacatgatattcatcccggcataacctttgtttctgactacgcttgccgccagtttttggataattccgggctgaaaattaatgagctcagtatttttgccagagcgttgatagagtgcgatgaaaataatgtggttacgcgtgttattgtaccacgagatatcactcatcttcctgtttactaa

SEQ ID NO: 368471 - DNA, 339 bp, Salmonella enterica
atgtcgctgtttctgacaagttttattttcgaaaaaaaagagtacgacgaagagttttatcaactggatggctggattgagcgctatacacagactattgatggctatattgggatggaaagctataccgatgccgccagcggaagaatggttaataattattactggcagacccgcgaatcaatggagctattgataaataatttacagcaccagcaggccaaatcacaaagtcataagtggctttccggttaccagacgattattgcagaaattcaggggtgccataacgttaacctgccccatccgctggcatcattttcagttccttatgcgtga

SEQ ID NO: 368472 - DNA, 687 bp, Salmonella enterica
atgtcttctatgttaccgtcaatcagcccggaactggcccgtatcgctcccggctttcgtgcattaagtattaatgttattgccgctccgattcgcgatgcgcaggtcggagaaatcgcgctaaaagaggcctgtcaggccgtaattaacggccaaccgacgtgggcacaggcgcatatagacgcctggaatgcggtgtttaaagcattcggcgcaaaaccgaagcgcaccccctgctcggctgaagcgctacgaaaacgcgtgttgaaggatggaacaatggcggcgctggacccggtcgttgatctttataacgccgtgagcctgcgctatgccgtaccggtaggcggcgaaaatagcgcggcttattgtggatcgccgcggctggttttcgcagacggaagtgaaacatttgataccctgaaagaaggacaacccgtcaccgagtcgccagaaccgggcgaagttatctggcgcgatgacagaggcgtcacctgtcggcgctggaactggcgtcagggagtacgtacccgactaagcgcttcagataaagcgatgtggtttatccttgaaagcttgccggaaatgccggttgatgaattgtacgcggcaggaaacatgctgactgacggccttgaaaaaatgatgccaggtttacgttttgaatccacgttgatgggtgtttga

SEQ ID NO: 368473 - DNA, 603 bp, Salmonella enterica
atgaccaaaaaagtcaacttatcgaccacgacgggcgccgacgtcagcacaataaatgaagctgtttcccaacgtatcaaacaatttcgtagccaaaaaaagatgtcgctggatgagcttgcgcggcgttccggcgtcagtaaaggaatgctggtggaaattgaaggctgtaaagccaatccaagcattgcgctgttatgtaagatcgcggcggcaatgggagtgtccgtggcggattttgtcaacgtcgccagcgagccgatggttcatcttatcgaccgggatgctattccggtgttgtggcgcggcgagaaaggcggcagtgcaaaactaatggcgggaaccagcgggccggatatgctggaactctggcaatggataatgcatcctggtgaacagtttgaatcggcagggcatccggcagacacctgtgaattactgtttgttaatcagggaacactgacattaacagtcaatggtagacgctttattattcgggagggctgctccgctgtagccagaaccgacatgcctcatgcctacgttaacgacactaatgaggtgcttgaatttaccatgacggtgaatgaaaagagccgttga

SEQ ID NO: 368474 - DNA, 1032 bp, Salmonella enterica
atgttcactgaattttttctcaaaaacgcatttaatctggcgatacttttcagttgcggtatggcgttgctggtcgtgagattttggctcagccgtaacgtacagtggaagaaaggattcacgttccatgcggcacagttttttatttacgcgattattattggaaccatcgggagcatcctgaataatgctattgaagattataatttgcgttttatctcttccggggtcattgattttatctgcacctcgctcattgcgcttattctgacgataaaacttttcctgattattaaccaatttgaaaaagcacaggtcaataaaggtagagatgtcaccagtacccgtattctggcacgggtcataaaaataaccattattgtcgcgattgtcttactgtatggcgaacattttggcatgagtctgtccggtctgctgacctttggcggtatcggcggtatcgctgttggtatggcgggcaaagatgtcctgagcaattttttctccggtattatgctctatttcgatcgccccttcagtatcggagactggattcgttctcctgacagaaatatcgaaggtacggtcgccgaaatcggctggcgaattacgcgaattaacacattcgaccaccgcccgttgtacgtgcctaattccgtcttttcatccattagcgttgagaatccgggacggatgaccaaccgtcgaataaaaacggttattggattacgttacgaagatgccgacaaaattggcctcattgttgacgctatcagaaacatgctgcaggcgcacagagatatcgatcagaaacagacgctgttggtctattttaatgaattcgccgactcttcgctgaatattatggtgtattgctttaccaaaacaacagtatggcaggaatggcttgccgtacagcaggatgtttacctgaaaattattgcgattgtccaggaaaacggcgctgacttcgccttcccaagccagacgctctatatcgatgacccggaggccgcgcctgcgacaaaataa

SEQ ID NO: 368475 - DNA, 255 bp, Salmonella enterica
atgatcatgatgaagctgaaatcggcgaaggggaaaaaatttctgttatgcctgctggcagtgtttatcgttgcggcatcggtggtaacgcgcgcgactatcggcggtgtgattgagcagtatcatattccactgtccgagtggacaagctctatgtatgccattcagtcggcaatgattttcgtttacagtctggtgttcactattctgctggcgattcctttggggatctatttcctcggcggagatgagtaa

SEQ ID NO: 368476 - DNA, 948 bp, Salmonella enterica
atggctatgtatcaaaatatgctggtggtcatcgatcccaatcaggacgaccaacccgcattacggcgagcagtttatttgcatcaacggattggcggcaaaattaaagctttcctgcctatttacgatttctcgtatgagatgaccaccctgctttctcctgacgaacgcaccgcaatgcgtcagggcgtaataagccaacgcacagcctggatacgtgagcaggcgaaatattatcttgaagccggtgtccccattgaaattaaagtggtctggcacaatcgtccctttgaggccatcatccaggaggttatcgccggcagtcacgatctggtgttgaaaatggcgcatcagcacgatcgactggaagcggtcatttttacccctaccgactggcatttgctgcgtaaatgcccaagccccgtgtggatggtcaaggatcagccgtggccagagggcggcaaagccctggtcgccgtgaacctggcaagcgaagagccttatcacaatgctctcaacgaaaagctggtaaaagagaccttacaattggcggagcaggttaatcataccgaagtgcacctggtcggcgcctaccccgttacgccaatcaatatcgccattgagctgccggaatttgatcccagcgtgtataacgacgccatcagaggccagcatttactggcgatgaaagcgctgcgccagaaattcagcatcgatgaaaaagttacgcatgtagaaaaaggcttgccggaagaagttatcccggatcttgctgaacatctccaggcggggatcgttgtgcttggcactgttggacgtaccggactctcggccgcgtttttggggaacacggccgaacaggtcattgaccatctgcgctgcgacctgttagtcattaagcctgatgagtatcagacaccggttgaactggacgacgaggacgattaa

SEQ ID NO: 368477 - DNA, 753 bp, Salmonella enterica
atgatcccggaaaagcgaattatacggcgcattcagtctggcggttgtgctatccattgccaggattgcagtatcagccagctttgcatcccgttcacacttaacgagcatgagcttgatcagcttgataatatcatcgagcgcaaaaagcccattcagaaagggcaaactctgtttaaagcaggtgatgaattgaaatcgctctatgctatccgctccggaacgattaagagctacaccattaccgagcaaggcgatgagcagattactggattccatttagcaggcgacctggtgggttttgacgccattggcagcggtcatcatccgagctttgcacaggcgctggaaacctcaatggtatgtgaaataccctttgagacactggatgacctgtccggcaaaatgcctaacctgcgtcagcaaatgatgcgtctgatgagcggtgaaattaaaggcgatcaggatatgattctgttattgtcgaagaaaaacgccgaagaacgtctggctgcgtttatttacaacctgtcccgccgctttgcgcagcgtggtttttcaccgcgtgaattccgcctgacgatgacccgtggcgatatcggcaactatctgggcttaacggtcgaaaccattagccgtctgctggggcgtttccagaaaagcggcatgctggcggtgaaaggtaagtatattactattgaaaacagcgatgcgctggcggccctcgccggtcatacccgcaacgtcgcttaa

SEQ ID NO: 368478 - DNA, 516 bp, Salmonella enterica
atgctgagattacttgaagagaagatagccacgccattaggtccgttatgggtggtttgcgatgagcagtttcgactgcgggccattgagtgggaacagtaccgcgatcgtatggaacaactgctaaatatccactaccgtcacgaaggctatgaacgcgtttctgcaactaaccccggtggactcagcgataagcttacagattattttgcaggcaatctcgccgtaattgataccctggaaaccgccacggggggcacaccttttcaacgggaagtatggcaggcgttgcgcgctatcccctgcgggcaggtgatgcactatggtcagctggcggcgcaattgggacgaccgggcgccgcacgcgcagtcggtgctgcgaatggcgctaaccccatcagtattgttgttccctgccatcgcgtcattgggcgtaacggcactctgaccggatacgccggtggcgtgcagcgaaaagagtggctattacgccatgaaggctatcttttattatga

SEQ ID NO: 368479 - DNA, 564 bp, Salmonella enterica
atgaaccttgacgataaagcgctgtttcttgacgccatggaggatgtccagccgctgaaacgccatactgatgtacactggcagccaacgcgtaatcttaaaacgccccagcgtatcgacacgcttcagcttgataatttcctgacgacgggctttctggatattctgccgctgaatgaaccgctggaatttcgtcgggaaggattgcagcagggtgtcatcgacaagttacgcagtgggaaataccctcagcaggccagcctcaatttgttacgccagccggtcgaaacgtgccgaaaaatgctatttcgttttatcctggaggcgcagaaagaggggttgcgtaatgtcctgatcattcatggtaaagggcgagaggcgaagtcgcatgccaatatcgtccgaagctatgtggcccgctggttgacagagtttgaggatgtacaggcttattgttcggcgctgccgcatcatggcggcggcggggcatgttatgtcgcgttacgtaaaacggtgcaggctaaacaggataactgggagcgccatgcgaagcgtagtcggtaa

SEQ ID NO: 368480 - DNA, 1155 bp, Salmonella enterica
atgttgagaaatatcagcgtcagaacatgcattattctattcatggtatgtacgtttcttttggtggatactttacaaataacctttctgcacgatctccctattttaattacgtgtaatatcatttatctgatctcgacattactgctttggtggtatatgacctgctatctggtagtgccgattaataccgtgaagaaaagtattgaagaggtcgcagcaggaaacttgtctattcatatctccgaatttggcaataattgcgccgggcgactcatccccggaattaatagcctgtcggagaatatttccgcgctggtacgcgaaatcagatcctcttcgcaaacggcaatgaccctttccgaacaactggcggcgcgcagtatgtcgctatccgtaaagacggaacagcagtcggcctcgttaattcaaactgccgccagtatggatgaaatggcggcgagtaccaaaaacaatgcggataatacccgaatggcgagcatacaggcggattgtgcaacccaatgcgcccgtaaaggcggtgaattaatggtgcgggttacagaaaatatgcgttctattaccgactgtgcctcgcagatgacggagattatttcattgattgacggtatcgcattccagactaatattctggcgcttaacgcggcggtagaggctgcgcgggcgggcgatcatggaaaaggtttctccgtggtggccggggaagtgcgtaacctggcgcatcgtagcgccgaggcggcaaaaagtatcaaggcgctgatcgacgttacgcatgagaatgtgcggcagggggccgccatagtgcaggaggctgaaaaaaatatgcaggagattgttggcggctccgggcaattaaacgtgctgatgagtgaaatttccaccaccacgcgggagcaggaaaaaggcattaaccagataacactggcgttgagcgatctggaaagcgcaacccatagcaatgttttaatggttgaagcgttatctgcttcttcggatgttttaaaggcgcaggtgatcgagttacagactaaaaccgacaaatttcgtttaagccagccgggttacagtgaacatgcgctgtcgcgctctcatgtatcacctctttcgaccatcaccaggcgcggccaggcctga

SEQ ID NO: 368481 - DNA, 984 bp, Salmonella enterica
gtggaagccattaagggatcggatgtgaacgtgccggatgccgttttcgcatggctactggatggtcgtggtggagtaaaaccgctcgaagataatgatgtgatcgatagtcagcatccctgttggctacatcttaattatacccacccggacagcgcccgctggttggcttcaacgcctttactccccaataacgtgcgtgatgcgctggctggtgaaagctcgcgcccgcgcgtaagtcgtatgggggaagggacgctcattacgctgcgctgtattaatggcagtactgacgaacgcccggatcaattagtggcaatgcgtttatatatggacgagcgattcattgtgtctacccgtcagcgaaaggttctggcgctggacgatgtggtcagtgatttgcaggagggcaccgggcccgtagattgcggcagctggttagtagatgtgtgcgatgcgttaaccgatcacgccagtgaatttattgaagagctacacgataaaattatcgatctggaagataatcttctcgaccagcaaatcccaccacgcggtttcctcgcattgctacgtaaacagctaattgttatgcgccgctatatggcgccgcagcgcgacgtctatgcccggcttgcgagtgaacggctgccgtggatgagcgacgatcaccggcgcagaatgcaggatatcgccgacaggctgggaagggggttggatgaaattgacgcttgtatcgcgcgtactggcatcatggcggatgaaattgcccaggtgatgcaggagtctctggcgcgcagaacttataccatgtcgcttatggcgatggtttttctgcccagcaccttcttaacaggattatttggcgttaacctgggcggtattcctggcggcggatggcggttcggcttttctctgttttgtattctgttagttgtcctgatcggtggtgttactttatggttgcatcgcagtaaatggttgtaa

SEQ ID NO: 368482 - DNA, 1374 bp, Salmonella enterica
gtgaccgctttttcaaccctgaatgttttgcccgccgcccagctcaataaccttactgagctgggctatcttgagatgacgcctgttcaggccgcagcattacccgtcattctggcgggtaatgatgtgcgtgtgcaggccaggaccggtagcggcaaaacggcggcgtttggtcttgggctcttgcatcgaattgacgtcactctgttccagacacaggcattagtgctgtgcccgacgcgggagctggcggatcaggttgccggagagttacgtcgcctggcccgttttctgccaaataccaaaattctgaccttgtgtggcgggcaaccctttggcgcacagcgcgactcgcttcagcacgctccgcatatcattgtcgcgacgccggggcgcctgctggatcatttacaaaaagaaaccgtatcgctggatgcgctgcatattctggtaatggatgaagcagaccgaatgctggacatgggattcagtgacgccattgatgaggtgatccgctttgcgcctgcgacgcgccagacgttattgttttcagcaacctggcctgaggccatcgcggcgattagcggtcgtgtacagcagcagccaatacgtattgaaatcgatacggtagatgcgctaccggctatcgaacaacagttcttcgaaacgtctgcgcatgaaaaaatttcgctgctacaaacgttgcttagccagcatcagccagcgtcctgcgtggtattttgcaataccaaaaaagattgtcaggccgtttgtgatgcgcttaatgcggtaggacaaagcgcgttggcgctccacggcgatctggaacaacgcgaccgcgaccagacgttggtgcgttttgcaaacggtagcgcgcgcattctggttgccaccgacgttgccgcgcgaggattagacattaaatcgctcgaactggtggttaactatgaactggcctgggacccggaggtgcatgtccatcgtattggccgtacggcgcgcgcgggaagcagcggcctggcgatcagtttctgcgcgccggaagaggcgcagcgggcgaatattctttcagaaatgctgcaactcaagctgaactggctgaatgcgcccgcccggcagccgtcactccctctggccgcagagatggctaccctatgcattgacggcggcaaaaaagcgaaaatgcgtccgggagatattttgggcgcgctgaccggcgatattggattagacggggcggatattggcaaaattaacgtgcatccaatgcacgtttacgtcgccgtacgtcaagcagtagcgcaaaaagcctggaagcagttgcaaaacgggaagatcaaaggcaagtcatgccgggtacggctattaaaatga

SEQ ID NO: 368483 - DNA, 936 bp, Salmonella enterica
atgcaagaaattcaaaagaatacaaagaaagaacaatacaacctcaacaagttgcaaaagcgcctgcgccgtaacgttggcgaagcgattgccgattttaatatgattgaagaaggcgatcgcattatggtttgcctttctggcggcaaagatagctatacgatgctggaaattttacgtaatttgcagcaaagcgccccgatcaatttttcactggtcgccgtcaacctcgatcaaaagcagccaggttttccggaacatatcctgccagcctaccttgagcagctgggcgtagaatataaaatcgtcgaagaaaacacctacggcattgtgaaagaaaagattccggaaggaaaaaccacctgctcgctgtgctcgcgtttgcgtcggggtatcctgtatcgtacggcgactgaactgggcgcgaccaaaatcgccctgggccaccatcgcgacgatattctgcaaaccctgtttctgaatatgttctatggcggaaaaatgaaagggatgccgccgaaactgatgagcgatgacggcaaacatatcgtgatccgcccgctggcttactgccgcgagaaagatattgtccgttttgctgaggccaaagccttccctatcattccttgtaatctgtgcggttcgcaaccaaacctgcaacgccaggtgattgccgacatgctacgcgactgggataagcgctatcctggacggatcgagacgatgtttagcgccatgcagaatgtcgtgccgtctcacctttgtgacactaacctgttcgatttcaaaggaatcactcacggttccgaggtcgtcgacggcggcgatttagcgttcgatcgtgaagagattcccttgcagcccgctggctggcagccggaagaagatgacaccgccttagaggcgttgcggcttgatgttatcgaagtgaaataa

SEQ ID NO: 368484 - DNA, 273 bp, Salmonella enterica
atgagtaaaggaaaacagaaaccttattactcggtaagcagtttaggggcaaggtggaatgcggcagtaaaacgtgctggtattcgccgccgtaatccgtaccatacgcgacatacttttgcctgctggctgttgacggcaggagcgaacccggcatttatcgccagccaaatggggcatgaaactgcgcagatggtgtatgaaatttacggtatgtggattgatgacatgaacgacgaacaagtagcgatgttgaatgcacggttatcgtag

SEQ ID NO: 368485 - DNA, 618 bp, Salmonella enterica
atgagcgacaataaaacagaatactcatattatattaaggttaaaaatgaaagcgcccggaaacgtctcggcttcccttttgctttctggtggaaaactgaaagcagcgaagccgctgccacagcacgccttgccgtatcaatgcttgacgccggattcgaaccgacagattttgcaaaaccggttcgcgttaattcccccgctgttaacgaacttccgccggagggaagttttgataccaccttctgtcagaaatatgagctgggcggcgaagatggcaaaacatttatgctcatccccggcacgcccgctactgacgcccacgacgaaaaaacggaggaatgcgccgacgacgctggcaccgaagaaagcgggacagacaccagtgacaacgacgaatgtcaggactgcgaagtttccgtcgccaccctgccgttcccccagcgcgtgttgcacatttttacttacgctgccacagacaaaaaatatttgcatcacgccacccgcgctcaacgcaggcatattaccgttctcgaaatggaacaggaaaacagctatatccagaacctgttaatggtattgcggaagtctgaacaggttcatgcccaggatgagtaa

SEQ ID NO: 368486 - DNA, 318 bp, Salmonella enterica
atgaaaaatgtacctgaatcagtaattgcagagctccgccagctttcaggaaaaattcgtacgttatgtatcgaaaacaatatgccctgtgttgtttcttatgcccgggactgtgacgatgaaagtgtttccagaactcttgttgcatatacagacagtgaaacaggcgcatatgacaggtcaataacagccgcaataatgctgttaaaaatgaacgaagctcctcccgaaaattttatttcattgttgaaactgatggagtgtaaagagctcgtcacgaacgcattctgctcaatgaaaaatgaaagtcttcattaa

SEQ ID NO: 368487 - DNA, 222 bp, Salmonella enterica
atgattgctcatcacttcggaacggatgaaataccgcgtcagtgtattacgccgggagattatgttatccatgatggtcgtacttatatcgcctcagcgaataacattaaaaaacgccgtttatatatccgtgatttaacaacgcaaagatgtattaccgattgcatggtaaaagtctggctgaacagaaatggtctgcctgccaaagctgaatcatggtaa

SEQ ID NO: 368488 - DNA, 522 bp, Salmonella enterica
atgtcagaaaccgctctggttatcgtaaaattcctaattggtaaatccgtcggacaatttatgctcacagtggctttatttttcttaattatcatcttcattcctagagatattacggagcttattgaggcgcgtagcgatttaccatatgccgttcagatttttagttttgctgtggcttaccttatagtgctgatcctcaaagtcactggttattttttcgtgtcggcgctgccgttgtgccagcgtaggggcagggcaaaacgcatgttaaaaacgcttaattcattgagtactgaacagctgtttttacttgaaccctttcttaaaactcattctcccactttccgggcgtcctgggataaccctgatgcagatgctctggttaaggcaggtatcgttcgtccggctggttcgtgtatcgacggtgtttctgtgatgttcaaaatcgaacccgagtatgagtcgttaatgctttccacctggaatccctgcacaaaacggttcgatattagccgttag

SEQ ID NO: 368489 - DNA, 141 bp, Salmonella enterica
atgggaaggaatgaagtgattcagtatttgatggatagttgcaacgtcagctttagcgcagctctccaagcattgcgcgacaatggatgggatatgtttttggctcaatgcgagctacaggaacagtattatccggggtga

SEQ ID NO: 368490 - DNA, 468 bp, Salmonella enterica
atgagaaaaaaacgtgaagaaatagctccaccagaagctacccagcgcttacgcgccatctgggacgccaaaaagcgagacctcaaacttactcaggagatcgccgctgatcttatgggctttgagacacaatctaccgtcagtcactatttgaacggtaaggcacctctcaacactgatgcggccttaaaattttctgttctattgagagttaaacccgaagagttacgaccggatttggccgatctaatgaactacgttcgttcttctggtacttacgatgacaacttcgaaggtggtggctggcgaatggtgagcagacaacaggctgatttactaaacctttttgatatactccctgaatctgagaaagaaaaactcattgaccggcttaaaggtcagaatgagctatataaagaggctttccagaacatgctcgctgcacaaaagcgcctaaaaaatcagtga

SEQ ID NO: 368491 - DNA, 330 bp, Salmonella enterica
atgaactccggcctgataacacttacggagctgaggaggatgacggggttaaccatttattcgacccgccactacctggacaaggcagaacgttgtggggatgtgtaccaggcgggcagaagaggggggattttcccgtcagaagaggcttatcgtgcctggaagaaacaggcgaaagtggacgctgacctgatttggaagctgcctgacggtgaggtacgtcgttacgacaggcaccacaacgtaatttgtcgtgagtgtcgtaaaagcgagtacatgcagcgggtactggcgttttatcggggaaactttcaggaggtgctgttgtga

SEQ ID NO: 368492 - DNA, 555 bp, Salmonella enterica
atgaataaaataaatgtgctgggtgtaataataaaacactacaaaacaatgtcagatcagcgtggaacaatgttgatgagcgacattaccgtacattttatagttcctctatctctttctttcgttctgtgctggacatacggaataatgaaaccggcaattgcttccgtcttcgttaacttcggggctattacaacagcactattaatgagtgcagtaataatgatttatgaacaaaaacaaaaaaccattactaagatatcagatataattgaaggaaacaaatcaagagacaaattgatatcattaaacactaacaaaaccatatatgagcagttatgccacaacgtcgcttatgcaatattaacttcaatagtattggttatattttcagtaataatatatttcctgcctgacaatgcagtggatttaatgaaatggtattttcgcgcacccgcatatatcgttagctttttagcctatacatccttttttatcactgtcataactttcttaatggtaataaaaagatttagcacgattttagacaattaa

SEQ ID NO: 368493 - DNA, 933 bp, Salmonella enterica
atgcacagcgttaatttctattcattccgcgtattgacccataaaggcagtcgagccagcaaaaaacttaatgacttaggtttaagtaataaaaaaacggcatatgaactttttgttgattattttactctttataaaaacacccccatcgagttcggcgtttcaaaaactaaaatatctctggaacaacatactaaacttcactttgataacacaaaaaaaatcatatatggttatataaaagttggaaaatatggagaaagcagtgaaataaaagatgtaaaactcaaaaaagtccattacagaacaactgcttatgatgtaacactcaaagagcgttatattttaatatatctaccagataatcttgaagaaggaattattgcattccattcatgcgataatatttctgctcgaggtgttctttctgattctatcactgaatatctaaaaaaacaatttcaactagaagcaagaatcaatccattacatcataagaaaatccctcaatacattctcaattctgaattgaaacaaattaaagctcaaggatataaagcaccagaagatattgctgattcctttggtaaaaacaaaacaaacatcaagacagacttaataataaaagcaaacgatggcatattcggaagtttcagggatttaagaaacaagaatataggaaacatcattgagattattgaagataaatgtgatgcaataaaagtaagcttacagctcggcagtcggactgtcgttttcaattatgataccatactaaaaaaaggaatttcagcagagttagatgataatgatctaaaaatcaacccattaacaggtatacctgatctaacagcacttcatgacacgataaaaaacctttccaatgatatattggaagaactgcactgtggaaataaaggggtgattatatga

SEQ ID NO: 368494 - DNA, 213 bp, Salmonella enterica
atgctttgcacatgtaggttagcctcttacgtgccgaaaggcaaggagaagcaggctatgaagcagcaaaaggcgatgttaatcgccctgatcgtcatctgtttaaccgtcatagtgacggcactggtaacgaggaaagacctctgcgaggtacgaatccgaaccggccagacggaggtcgctgtcttcacagcttacgaacctgaggagtaa

SEQ ID NO: 368495 - DNA, 171 bp, Salmonella enterica
gtgaaaaaactcaaggatttattagagttagatgaagacgggctttatgcagtacgtgtaaaaaatggtgaaatctcattctgtacgctaattcctgacgaccatctgattctgtctgttgaagcgtttattgattatctgataagactgggtttcactgtcagttattaa

SEQ ID NO: 368496 - DNA, 600 bp, Salmonella enterica
atggcgcatctacaacttgttaaacaaacctcatcagggcttctgctcccggcaacgccggagagtgaggacttcctgcgctcagtaaaaatcggtgcgtggatacacgccgattttaagcgagtacgtaactacgcgttccacaaacgttttttcaagctccttcagcttggtttcgattactggactccgatcggcggggcgatcctgcctcaggaacaggagctgattaccggctttgtcgatttcctgtgtgagtcagcagcgcagggccacagtcccgcactcagtgacgcggcggaacagtacctgcataaggttgctgtcaaccgaacgctcgatgttgcgctgctcaagtccttcgacgctttccgcgagtgggtaaccattcaggccgggttttatactgagcattattatccggatggcagccgtgggcgccgggcgaaatccatcgcttttgcgaatatggacgaaaccgagtttcagcaggtttataaggccgtactgaacgtcctgtggaactggattctgtttcgtaaattctcctctccggaagaggtcgaaaatgtcgcagcgcaactgctggagtttgcgtaa

SEQ ID NO: 368497 - DNA, 291 bp, Salmonella enterica
atggcggatttacgtaaagcggcgcggggcctgatgtgtacggtaagaattcccggccattgcaaccataatcctgaaacgtccgtactggcacattaccggctggcgggtacgtgcggaacggcgacaaaaccaaacgatatgcaggcagcaattgcctgtagctcgtgccacgatattgtcgatgggcgggtaaaaatcgacgacttcacgaaaacagaaattcgcctgatgcacgcagagggcgttttccgcacgcaggaaatctggagagagaaaggcattttatga

SEQ ID NO: 368498 - DNA, 537 bp, Salmonella enterica
atgatttacccaacaaacaccggaaaaagcggagaacaccttcgtctcagcacgctggaaagtgtgtggattcaggggaaattgcgtatgtgggggcgctggtcatacattggtggcggcaaaacagggaatatgtttaaccagttgctggcgtccaaaaaactgacgaagacggccattaacgatgctttgcgccgtatgaaaaaagcggggctggagaaacctgaactggaagtgttcctgagagagatgatcaacggaaagcaaaaaagctggctggcacactgtacggatacggaagcgctgattatcgatcgggttgtaggcgaggtactgacggatcatccggggctgcttggtatcctgaaccagcgttacgtggggcgggggatgagtaagagaaggatggccgagttactaaacgaacagtacccagagtgggcgttgattacatgccgacgccgtgttgagcagtggttgagtatcgctgagttcattttgtattcacctatgagaaaagcgttcgattatgcttaa

SEQ ID NO: 368499 - DNA, 396 bp, Salmonella enterica
atgttaggtattttcagaaagaaaacccgcaaggctattgttgaagtgaagaagatggagaaccgggatgcggtggaggcgaccgtctggggcgcatattccattgcatacgccgatggcacctgtgacgcgaaagaaattgcagtgctggagaaaaccatcgcggcacttcctgcctttgcgccgttctccggcgagattgcccagatgagtgccaatatccgcgcccgctatgaggcgtcaccgcgtagcgcgaatgctcaggcactgcgtgagctggctgacgtggcaggaacagcagaagcggttgatgtgctgtgcctgtactggcctcgttcctgtcccgccttgctgactacaacggtaaaccgctggatgcgctgtgtgcagtggtga

SEQ ID NO: 368500 - DNA, 282 bp, Salmonella enterica
atggaaagtaatctgaccggcacactgaatgcgggcctgtgcctggtgacagtgctggccctttttctctaccgccggaacggcgccagatacaaaccgggaatagcctggctgtcgtacctgctgatgctgggctatgcgctggttccgttccgttttctggccggacattacccgtcttcatcctggcctgtggtgctgatgaacgcgctgttctgcgggctggtgctgtgggcgcggggtaatgtgtcgaaaatactttcactgctgaggctgcgatga

SEQ ID NO: 368501 - DNA, 546 bp, Salmonella enterica
atgaaaccgaaggacgaaatttttgatgaaattctgggtaaggaaggcggctacgtcaaccatccggacgataaaggcgggccgacaaaatggggtattacggaaaaagttgcccgcgcccacggataccgtggtgatatgcgcaatttaacccgtggacaggcgctggaaattctggagaccgactactggtacggtccccgctttgaccgggtggcgaaggcctcgccggatgttgctgccgaactgtgtgacacgggcgtgaacatggggccgtcggtggcagcgaaaatgttgcagcgctggctgaacgtgttcaaccagggcgggaggctgtatccggatatggatacggacgggcgcatcgggccgcgaacccttaacgcgttacgtgtttatctggaaaagcgcggtaaggatggcgagcgtgtactgctggtggcgctgaactgcacgcagggggagcgctatctggagctggcggaaaagcgggaggctgacgagtcgtttgtctatggctggatgaaagagcgcgtattgatatga

SEQ ID NO: 368502 - DNA, 183 bp, Salmonella enterica
atgccgcgaatggcggcgaaatgggcactggtagcgatactggtgccttttttactggtggggtgcgccagcctggataaggcgcgccagatattcgaagctgccgggcagagtcgtagtgaacgtcttttgggcctgaaaagtaaatccccagttgttgctgacaactggggatttttataa

SEQ ID NO: 368503 - DNA, 339 bp, Salmonella enterica
atgactaaagaagctgtaatctttctatttatcgccatcgtggtagaagttatcgccacgatctcattaaaattatcagatagttttacgcgtctggtaccgagcctcgttactatcatcggatattgtattgcgttctggtgtcttaccatcccaatgcgaaccatccctgcgggtatcatttatgctatttggtctggggtagggattgttcttattggattgataggatggttatttctcggccaaaaactggatatgccggctattattggcatgttgcttatcatctgcggcgtaatcgtaatcaatctgttttcaaaaagtgtcagtcactag

SEQ ID NO: 368504 - DNA, 435 bp, Salmonella enterica
atgaacagaacgattcttgtacccatcgatatttcagattcagaattaactcaacgcgtaatttcgcatgttgaagctgaagcaaagattgacgacgctaaagtgcactttttgactgtaatcccgtctttgccctattacgcttcactgggactggcttattcagcagagcttcccgcaatggacgatttgaaagccgaagccaaatctcaactggaagcgattatcaagaaattcaaccttcctgcggaccgcgtgcaggctcacgttgcagaaggctctcctaaagataagattctggaaatggcaaaaaaattaccggccgatatggtgattatcgcctcgcatcgcccggatattactacctatctgttgggttccaacgccgcagccgttgtgcgtcatgcggaatgctccgtactggtggtacgctaa

SEQ ID NO: 368505 - DNA, 939 bp, Salmonella enterica
atggagataattttttatcacccgacatttaacaccgcctggtgggtaaatgcgctggagaaggctctcccacatgcgcgcgttcgtgaatggaaggtcggtgataacaaccccgcagactatgcgcttgtatggcagcccccggttgaaatgctggccggaagacgcttaaaagccgtctttgcgctgggcgcgggggtggatgcaattctgagtaaattaaatgcgcatccggaaatgctggacgcctccattcctctattccgtctggaagataccggaatgggcctgcaaatgcaggaatatgccgtaagtcaggtattacactggttccgtcgtttcgatgattatcaggcgctgaaaaatcaggcgctatggaaaccgttgccggaatatacccgcgaagagtttagcgtcggtatcatgggcgcaggggtactgggcgcaaaagtggcagaaagtctacaggcgtgggggttcccgttacgttgctggagtcgtagccgcaaatcctggcctggcgtggaaagttatgttgggcgtgaagagctgcacgctttcctgaaccagacgcgggtgctgattaatctgctgccgaatacggcccaaacggtaggaattattaatagcgaattgttggatcaattgccggatggcgcttacgtgttgaatctcgcgcgcggcgtgcatgttcaggaggcggatctgctggctgcgcttgatagcggtaagctaaaaggcgcgatgttggatgtctttagccaggaaccgttaccgcaggaaagtccattatggcgccatccgcgagtcgccatgacgccgcacattgcggcagtcacccgtccagcggaagccatcgattatattagccgcaccattacccagctggagaagggagagccggtgacggggcaggtggatcgggcgagaggatattga

SEQ ID NO: 368506 - DNA, 579 bp, Salmonella enterica
atgtatcccgttgacctgcatatgcataccgtcgccagcactcatgcctacagtactctgagcgattatatcgcggaagccaaacgcaaaggcattaaactttttgcgattaccgatcatggtccggacatggaagatgcgccgcatcactggcattttattaacatgcgcatctggccgcgtctggttgacggcgtggggatactgcgtggcattgaggcgaatatcaagaacattaacggtgaaattgattgttccggaaagatgttcgactcgctggatctgattatcgcaggcttccatgagcccgtttttgcgccacatgataaagaaaccaatacccaggcgatgatcgcgaccatcgccagcggcaaggtgcatataattagtcaccccggaaatccaaagtatccagtggaggttaaagccatcgcgcaggcggcggcgaaacaccatgtagcgctggaaatcaacaactcttcttttctgcattcgcgtaaaggaagcgaagataattgccgcgcggtcgctgccgccgtacgcgatgcgggaggctggctgggtagcgttaggctctga

SEQ ID NO: 368507 - DNA, 555 bp, Salmonella enterica
atgaatgagttttcaatcctgtgccgtgtgctgggatcgttgttttaccgccaaccgcaagatcctttactggttccgctgtttacgttaatccgtgaaggtaaactggcggcaaactggccgctggagcaggatgacatgctggcgcgtttacagaaaagctgcgatatcacgcagatttccactgattacaatgcgttatttgttggggaagagtgcgcggtagcgccataccgcagtgcgtgggtcgaaggcgcggaagagtctgaggtgcgcgcttttttaacgtcgcgagggatgccgctggccgatacgcctgccgatcacattggcactttattgctcgcggcctcctggctggaagatcagtctgccgaagatgaaagtgaagcgctggaaaccttatttgccgattatctgcttccctggtgcaataccttcctcggtaaagttgaagcccatgccgttacgccattctggcgcactctggcgccgctaacgcgtgatgcgataggggccatgtgggatgaacttcaggaagaagatgaagaataa

SEQ ID NO: 368508 - DNA, 495 bp, Salmonella enterica
atgatgcgcgccatgaacatacttctttctattgctatcacgacgggcatcctttctggaatatggggatgggtggccgtctccctggggttactaagctgggccggttttttaggttgtacggcttatttcgcctgtccgcagggcggctttaagggattgttaatttccgtctgtacgctgttaagcggtatggtgtgggcgctggtcattattcacggtagcgcgttggcgccgcatctggaaattgtcagttacgtgttgacggggatcgtggcattcctgatgtgtatccaggcaaagcagctattgctttcttttgttccgggaacatttatcggcgcctgcgcgacatttgcagggcagggtgactggcggttggtattaccgtcgctggcgctggggctaatctttggctatgccatgaaaaatagtgggctatggctggcatcacgccgcgagcaacattcagcgaatacggcggtcacaaaataa

SEQ ID NO: 368509 - DNA, 834 bp, Salmonella enterica
atgccgcgcttacttattttggttgccgttttattgttgagcggatgcttaactgccccgccgaaacaagctgcgaaaccgacattaatgccccgcgcacaaagttacaaagatttgacgcacttacctgctcccaccggtaagatctttgtttcggtatataacattcaggatgaaacgggccaatttaaaccttacccggcaagtaacttttctacggctgtgccgcagagcgccaccgctatgttggtcactgcgctgaaagattcgcgctggtttatcccgctggaacgacaaggcttacagaatcttttgaatgaacggaaaattattcgcgcagcccaggaaaacggcaccgtggcgatgaataaccgtatcccgcttcagtcgctgacggcggcaaatattatggtggaaggttctattattggttatgaaagtaacgtcaaatccggcggggtcggcgcaagatatttcggtattggcgccgatacgcagtatcagctggatcagattgctgtcaacctgcgcgtggttaacgtcagtacaggcgagatcctttcttcggtgaacaccagtaaaacaatcctttcctatgaagtacaggcaggcgtgttccgttttattgattaccagcgcttactggaaggcgaaatcggctatacctcgaacgaaccggtgatgctgtgtctgatgtcagccattgaaaccggcgttatcttcctcattaatgatggtatcgatcgcggactgtgggatttgcagaataaagcggacaggcaaaatgatattctggtgaaataccgtgagctgtcagtaccgccagaatcctga

SEQ ID NO: 368510 - DNA, 417 bp, Salmonella enterica
atgcgtgttaaacatgcagtagtgctgctcatgcttttttcgccattaacctgggctggaaatatgacgttccagttccgtaatcctaactttggtggaaaccccaataacggttcctttttattgaatagcgcccaggcgcaaaattcatataaagaccccgcttatgataacgattttggtatcgaaaccccctcagcgttggataactttacgcaggctattcaatcgcaaattctgggcggcttgttgaccaatattaataccgggaaaccaggacgtatggtgaccaacgattttattatcgatatcgctaatcgcgacggacagctccagctcaacgtcacggacagaaaaacgggaagaacctcgaccatcgaagtgtcaggtttacaaactcagtcaaccgatttttaa

SEQ ID NO: 368511 - DNA, 396 bp, Salmonella enterica
atgaaacgctatctgacctggattgtagcagcagagttactgttcgctaccggaaacctgcatgccaatgaagttgaagtcgaggttcccggattgttaaccgaccataccgtctcttcgataggacatgaattctatcgtgcattcagcgacaaatgggaaagcgaatacaccggcaatctgaccattaatgaaagacccagtgcgcgttggggaagctggatcaccataacggtaaatcaggacgttattttccagacctttttatttccaatgaaaagagacttcgagaaaaccgtcgtcttcgcattagcgcaaacagaggaagcattaaatcgccgacaaatagatcaaacgctattaagtacgagtgatttagcgcgtgatgaattctaa

SEQ ID NO: 368512 - DNA, 651 bp, Salmonella enterica
atgtttaatgaagtccatagtagtcatggtcacacactattgttgatcacaaagccatctctgcaagctacggcattattgcaacatttaaagcaatcgctggccataaccggaaaactgcataatattcaacgttctctggaagatatctcagccggttgcattgttttaatggatatgatggaagcggataagaagcttatccactattggcaggataatttaagccgcaaaaacaataatataaaaacattattgttaaatacccctgacgattatccctaccgtgaaattgaaaactggcctcatattaacggcgtgttttacgccactgaagaccaggaacacgtggtcagcggattacagggtattctgcgtggcgaatgctatttttcacaaaaattagccagttacctgattacgcactcaggaaattaccgctacaacagcaccgagtccgcattactcactcatcgcgaaaaagagatcctcaataagttacgtattggtgcctctaataatgaaatcgcgaggtcgctatttatcagcgagaatacggttaagacacatctttataatcttttcaaaaagatagctgtcaaaaatcgcacccaggcagtttcatgggcaaacgataatctcaggcggtaa

SEQ ID NO: 368513 - DNA, 456 bp, Salmonella enterica
atgaaaaacaaattgttatttatgatgttgacaatactgggtgcgcctgggattgcaaccgcgacaaattatgatctggctcgttcagaatataattttgcggtaaatgaattaagcaagtcttcatttaatcaggcggccattattggtcaagtcggcacggataatagtgccagagtacgccaggaaggatcaaaactattgtccgttatttcacaagaaggaggaaataatcgggcgaaagtcgaccaggcagggaattataactttgcgtatattgagcaaacgggcaatgccaacgatgccagtatatcgcaaagcgcttacggtaatagtgcagctattatccagaaaggttctggaaataaggccaatattacccagtacggtacgcagaaaacagcagttgtagtgcagaaacagtcgcatatggctattcgcgtcacccaacgctaa

SEQ ID NO: 368514 - DNA, 456 bp, Salmonella enterica
atgaaacttttaaaagtggcagcattcgcagcaatcgtagtttctggcagtgctctggctggcgtcgttccacaatggggcggcggcggtaatcataacggcggcggcaatagttccggcccggactcaacgttgagcatttatcagtacggttccgctaacgctgcgcttgctctgcaaagcgatgcccgtaaatctgaaacgaccattacccagagcggttatggtaacggcgccgatgtaggccagggtgcggataatagtactattgaactgactcagaatggtttcagaaataatgccaccatcgaccagtggaacgctaaaaactccgatattactgtcggccaatacggcggtaataacgccgcgctggttaatcagaccgcatctgattccagcgtaatggtgcgtcaggttggttttggcaacaacgccacggctaaccagtattaa

SEQ ID NO: 368515 - DNA, 327 bp, Salmonella enterica
atgcatactttattgctccttgccgcactttcaaatcagattacgtttaccacgactcagcaaggcgatatttacacggtgatccctcaggtcacattaaacgaaccctgcgtctgtcaggtgcaaattctctctgtgcgcgacggcgtcgggggacaaagccatacacagcaaaaacaaacgctatctttacctgctaatcaaccgattgagttgtctcgtcttagtgtaaatatatcttcagaggactcggttaaaattattgttactgtttcggacggacaatcactgcatttatcacaacaatggccgccttctgcacagtag

SEQ ID NO: 368516 - DNA, 321 bp, Salmonella enterica
atgtccgtaatcaagaaaaatatccctggcataggcctgtgtatctgcgctttttttatccattctgcggtagggcaacaaacggtacagggcggcgttatccattttcgcggcgcgattgttgagccactgtgcgatatttctactcatgccgaaaatattgatttaacctgcctgcgcgaaggtaaaaagcaaatgcaccggattgaccttcggcaggcatctggattaccgcaggatattcagtccattgcgacggtgaggctgcattatctcgatgcgcaaaaaagcctggcggtgatgaatattgagtaccgttaa

SEQ ID NO: 368517 - DNA, 540 bp, Salmonella enterica
atgacatcacgtcttcaggtcatacagggtgatatcactcaacttagcgtcgatgcgattgtgaatgccgctaacgcatcattaatgggcggcggtggcgtagacggcgcgattcatcgcgcggcggggccggcattgctggacgcctgtaaactcatccgtcagcaacagggcgaatgtcagacgggacatgcggttatcacgcctgctggcaagctttcggcaaaggcggttattcacacagtggggcccgtctggcgaggcggcgaacaccaggaagctgagctactcgaagaggcataccggaattgtttgctgcttgccgaggcgaatcactttcgttccatcgcttttccggcaatcagtaccggcgtttatggctatccacgcgcccaggccgctgaagtcgccgtcaggacggtttcagattttattacccgttacgctctgcctgaacaggtatactttgtctgttatgatgaagaaactgcccggctttacgcaagattacttactcagcaaggcgacgaccctgcctga

SEQ ID NO: 368518 - DNA, 1485 bp, Salmonella enterica
atgaagaaactgcccggctttacgcaagattacttactcagcaaggcgacgaccctgcctgataaaacacgcctggagcgtgccgttgaaccgctatgcgcgcgccatcccggagagtgcggcattctcgcgctggataacagtctggacgcttttgccgcccgctaccgcctgaccgaaatggcggcgcggacgctggatgtgcagtattatatttgggaagacgatatgtccgggcgactgctcttttcggtactgctgtcggcggcgaagcgcggcgttcatgttcgtctgctgctggatgataacaatacgcctggtctggatgatacgttgcgcttgctggatagccatcctaatatcgaagttcgtctgtttaatcctttctcttttcgtacgctacgcgcgctgggatatttgacggattttgcgcggctgaatcggcggatgcacaataaaagttacactgccgacggcgtagtgacgctggtcggtgggcgcaacatcggcgatgcctatttcggcgctggcgaggagccgctattttccgatctggacgtgatggccattggcccggtggtcaatgatgtcgccaatgattttgaacgttactggcgctgtagttcagtgtcgacattgcagcaagtattatccctttctgagcaggaactgacgcagcgtatcgaacttcccgaatcctggtataacgatgagatcacccgccgttatctgcataagctggaaaccagccagtttatggcggatctcgatcgcggaacgttgccgctgatttgggcaaaaacacgcttgcttagcgatgacccttctaaaggcgaggggaaggcgcagcgccattcgcttcttccgcagcgattatttgacgtgatggggtcgccgacggagcgtatcgacattatttccgcttactttgtccctacgcgcgcaggcgtggcgcagttgcttaatctggtcaggaaaggcgtgaagatcgccatcttaactaactctctggcggccaacgatgtggcggtcgttcacgcagggtacgcgcgctggcgcaagaaattactgcgctatggcgtggagctctacgaactgaaaccgacccgcgaacatgaaaccgccgtacatgatcgcggactcaccgggaactcaggttccagcttacatgctaaaacgttcagtattgatggtagtaaggtgtttatcgggtcgcttaattttgatccccgttcaacgcttttaaataccgaaatgggctttgtcattgaaagtgaaacgctggcgacgcttattcataagcgttttacgcagagccaacgcgatgcggcctggcaactgcggctggatcgctggggacgaattaactggatcgatcgtcagcaagaagaggaaaaggtgttaaagaaagaacccgctacgcgtttctggcagcgagttctggtacggttggcggcaattttacctgtggaatggttgctgtga

SEQ ID NO: 368519 - DNA, 1155 bp, Salmonella enterica
atgagctctgtacccgcgccgcgtgaatattttcttgactctatccgcgcatggctgatgttgttagggattccctttcatatctcgttgatctattccactcacagttggcatgtcaatagcgccacgccatcgtggtggctaactctgtttaacgattttatccacgcttttcgtatgcaggtgttttttgttatttctggttatttttcgtacatgttgtttttacgttatccgttaaaacgctggtggaaagtacgggtagaacgtgtgggtattcccatgcttaccgcaatccctttgcttaccttgccgcaatttatcctgttgcaatatgtcaaagagaaaacagagaactggcctacactctctgcctatgaaaaatataatacgttagcgtgggaactcatttcacatctgtggtttttactggtgctggtgatattaaccaccgtcagcatcgggatttttacctggttccaaaaaaggcaggaaacaagcaagcctcgtcccgccgctatttcactggtcaggctttcgcttatttttttcctgctggggatggcttacgccgctatcaggcgcattattttcatcgtatatccagcaatcctcagtgacggcatgttcaattttattgtgatgcaaacgctattttatgtgccgttttttattctcggtgcgttggccttcattcaccccgatctgaaagcgcgcttcaccacgccctcacgcggatgcactttaggcgctgccgttgcttttatcgcgtatctgctgaatcaacgttatgggagcggcgacgcctggatgtacgaaaccgaatccgtgattacgatggtaatggggctgtggatggtgaacgtggtattctcactggggcatcgcttgttaaacttccagtccgcgcgtgtcacctatttcgtgaatgcttcgctgtttatctatctggtgcatcatcccttaacgcttttctttggcgcgtatattacgccgcatatctcctccaacctgatcgggttcttgtgtgggctgatatttgtcatgggtattgcgttaattctgtatgaaattcatttacgcatcccgctcctgaaatttctcttttcaggtaaaccgccggtaaaacaagaaagccgcgccgcgatcgggtag

SEQ ID NO: 368520 - DNA, 1554 bp, Salmonella enterica
atgaaacataaacgacaaatgatgaaaatgcgttggttgggcgcagctattatgttaacgctctacgcatcatcgagctgggcgttcagtattgatgacgtggcaaaacaagctcaatctttagccgggaaaggctatgaggcgcctaaaagcaacttgccctccgttttccgcgacatgaaatatgcggattatcagcagatccagtttaacagcgataaagcctactggaacaacttaaagaccccttttaagctcgaattttaccatcaggggatgtacttcgatacgccggtcaagattaacgaagtgacggcgacgacggtcaaaagaatcaaatacagcccggattacttcaattttggcaatgttcagcacgataaagacacggtaaaagatttaggcttcgccgggttcaaagttctgtaccccatcaacagtaaagataagaacgacgaaatcgtcagtatgcttggcgccagctatttccgcgttatcggcgcaggccaggtatatggcttatctgcgcgcggcctggcgattgataccgccttaccatctggtgaagagtttccccgctttcgcgagttctggattgagcgtccaaaacccaccgataagcgtttgaccgtctatgcattactggattctccgcgcgcgaccggcgcttaccgttttgtgatcattcctggccgcgataccgtggtggacgtgcagtcaaaagtctatctgcgcgataaagtgggcaagctgggcgttgcgccattaaccagtatgttcctgtttgggccaaaccagccgtcgccgacgaccaactatcgtccggaactgcatgactcgaacggcttatccattcatgcgggtaatggcgagtggatttggcgtccgctgaacaatccaaaacacctcgctgtgagcagctatgcaatggaaaaccctcagggattcggcctgttgcagcgtggtcgcgagttctcgcgctttgaagatttagacgatcgctacgacctgcgtccaagcgcctggattaccccgaaaggcgactggggcaaaggtaaggttgaactggttgaaattccgaccaatgatgaaaccaacgataacatcgtcgcttactggactccggatcaactgccggaaccgggtaaagagatgaacttcaagtacactctgaccttcagccgcgatgaagataaacttcatgcgccggataatgcctgggtgctgcaaacacgccgctcaacgggcgacgttaaacagtcgaatctgattcgccagcccgacggcactattgcctttgtggtggatttcgttggcgccgacatgaaaaaactgccgccggatacgcctgtcgctgcgcaaaccagcattggcgataacggtgaaatcgttgacagtaatgtacgctataacccagtcactaaaggctggcgtttaatgctgcgcgtgaaagtcaaagacgcgaagaaaaccacggaaatgcgtgccgcattggtgaatgccgatcagacgctaagtgaaacctggagctaccagttacctgccaatgaataa

SEQ ID NO: 368521 - DNA, 2544 bp, Salmonella enterica
atgaataaaacaactgagtatattgacgcactgctgctttctgaacgtgagaaagcggcattgccgaaaactgacatccgcgccgtgcatcaggcgctggatgccgagcatcggacttactcgcgagaagacgattcaccgcagggttccgtaaaagcccgccttgaacacgcctggccggattcattggcgaaggggcagttaattaaagatgatgaagggcgcgatcagttgcaggctatgccaaaagcgacgcgctcttcgatgtttcccgatccctggcgaaccaacccggttggccgtttctgggatcgtctgcgtgggcgggatgtaacgccgcgctatgtttctcgtctgacaaaagaagagcaggcgagcgagcaaaaatggcgtaccgtcggcactatacgccgctatattttgttaattttgactctggcgcaaaccgtcgtcgcgacctggtatatgaagaccattctgccttatcagggatgggcgctcatcaatcctatggatatggtggggcaggatatttgggtctcttttatgcagctcctgccctacatgctgcaaaccggtatcctgattctgtttgccgtgctgttctgctgggtgtcagccggattctggacggcgctgatgggcttcctgcaactgcttatcgggcgcgataagtacagcatctccgcgtctacggttggcgatgagcccctcaatccggaacaccggacggcgctgatcatgcctatctgtaatgaagacgttagtcgcgttttcgccggtctgcgcgcgacctgggagtccgttaaagccacaggcaacgccgcgcatttcgacgtctatatccttagcgacagttataacccggatatctgcgtggcggagcaaaaggcgtggatggagcttatcgcggaagtgcagggcgaaggccaaattttttaccgtcgccgccgccgccgtatgaaacgcaaaagcggcaatattgacgatttttgccgccgctggggcaatcagtacagctatatggtggtgctggacgcggactcagtgatgagcggcgagtgtctgagcggcttggtgcgcctgatggaagcgaatccaaacgccgggattatccagtcttcgccgaaagcgtcggggatggatactctgtatgcccgctgccaacagttcgcgacccgcgtctatgggccgctgtttaccgccgggctgcacttctggcagttgggggagtcgcactactgggggcacaatgccattatccgcgtgaagccgtttatcgagcactgcgctctggcgccgctgccgggagaaggttcgttcgccggatcgattctttcccacgactttgtggaggcggcgctaatgcgtcgggcagggtggggcgtctggattgcctacgatctccccggctcctatgaagagctgccgccaaacctgctggatgagcttaaacgcgaccgccgctggtgtcacggcaacctgatgaactttcgtctgttcctggtgaaaggaatgcacccggtgcatcgcgccgtgttcctgacgggggtaatgtcatatctgtccgcgccgttatggtttatgttcctcgcgctttctaccgcgctgcaggtcgttcatgcgttaacagagccgcaatatttccttcagccgcgccagctttttccggtctggccgcagtggcgtccggaactggcaatcgcgctgtttgcatcaacgatggtgctgctgttcctgccgaagctgctcagtattatgctgatctggtgtaaaggcaccaaagagtatggcggtttctggcgcgttacgttgtcgctgttgctggaagtgctgttctccgtgttgctggcgccggtgcgtatgctgtttcataccgtgtttgtggtcagcgcgttcctcggctgggaagtggtctggaactcaccgcaacgcgacgatgattctacgccgtggggagaagcctttatgcgtcacggctctcaactgctgctggggctggtctgggcggtgggtatggcgtggctggatttacgctttctgttctggctggcgccgattgtcttttcgctgattctgtcgccatttgtttcggtgatctccagtcgttcaacggtaggattacgcaccaaacgctggaagctgttcctgatcccggaagagtattcgccgcctcaggtgttggtcgataccgataaatatctggagatgaatcgccgccgtattctggacgatggctttatgcatgcggtatttaacccgtcgcttaatgcgctggcgaccgcgatggccactgcgcgtcaccgcgccagtaaggtgctggaaatagcccgcgatcgtcatgtggagcaggcgctaaacgaaacgccggagaaactgaaccgcgatcggcgtctggttttgctcagcgatccggtgacaatggcgcgtttacactatcgggtctggaatgcgccagagagatactcttcctgggtaaaccattatcagtctctcgtcctgaatccgcaggcgttgcagggacgaacatcgtcagcgagataa

SEQ ID NO: 368522 - DNA, 228 bp, Salmonella enterica
gtgcgtatattcgcggtgagcataatggtgattaccctgagcggctgcggcagtattatcagcagaacgatccccggacaaggacacggcaaccagtattaccctggcgtgcagtgggatatgcgtgattccgcatggcgctatatcactatcctcgatctgcccttctcactgatcttcgatacactgctactgccgctcgatattcaccacgggccttatgagtaa

SEQ ID NO: 368523 - DNA, 375 bp, Salmonella enterica
atgaccatgtatgccacgctggaagaagctatcgatgcagcccgggaagaatttctggctgaccatccaggcctcgaacaagatgaagcgaatgtgcagcagttcaacgttcagaaatatgtactgcaggatggggacatcatgtggcaggtcgaatttttcgccgatgaaggtgaagatggcgaatgtctgccgatgctgagtggtgaagccgcgcagagcgtgtttgacggcgattatgatgagatagagatccgccaggaatggcaggaagagaatactttgcatgaatgggatgaaggggaattccagcttgaacccccgcttgataccgaggaaggccgtactgcggcagacgaatgggatgagcgttaa

SEQ ID NO: 368524 - DNA, 1215 bp, Salmonella enterica
atgtcaccctctgatgtccccataaactggaaacgcaatctaaccgttacctggctgggctgttttttaaccggcgcagcattcagtctggtcatgccttttctccctctctacgttgagcaactcggcgtaacaggccatagcgcgctcaacatgtggtccgggctggtctttagtattacgttcctcttttcagctatcgcttcccctttttggggcggtctggcggatcgtaaagggcgtaagatcatgctgttgcgttccgctctcggcatggccattgtgatgctgttaatgggcatggcgcaaaatatctggcaatttctgatcctccgcgcgttattaggcctgctgggcggatttattcccaacgccaatgcgctcatcgccactcaggtgccgcgccacaaaagcggctgggcgttagggacgctctctactggcggcgtcagcggcgctctgcttggcccacttgcgggcggtctgctcgccgaccattacggccttcgtccggtcttttttattaccgccagcgttttgtttatctgttttctgctcaccttctttttcattcacgagaatttcctgccggtgagcaaaaaagagatgcttcacgttcgggaagtggtcgcctcgttaaaaaatccccgcctggtgttaagcctgtttgtcaccacgctgattattcaggtggcgacggggtctattgcgcccatcctgacgctctatgtgcgcgaactcgcgggaaatgtcagtaatattgcgttcattagcgggatgatagcgtccgttcccggcgtggcggcattacttagcgccccccggctcggcaagcttggcgacagaattggcccggaaaagatccttatcgtcgcgctgattatttccgtactgctgctgattccaatgtcttttgtgcaaacgccgtggcagctcgcgctattgcggtttctgcttggcgcggcggatggcgcgctgctgccagccgttcaaactctgctggtttacaactctaccaaccagatagccgggcgcatattcagttacaaccaatctttccgcgatatcggcaacgtcaccggccctctcatgggtgccgcaatttccgcgagctatggcttccgcgccgtattctgcgtcacggcaggcgtggtgttgttcaatgctatctattcatggaacagcttacgacggcgcagactggcaatagaataa

SEQ ID NO: 368525 - DNA, 921 bp, Salmonella enterica
atgacgaagttgcctaaattctccgtggccttactgcacccgcgctattggttaacctggttgggtataggcgcgctttggttggtcgtgcaactcccctacccggtcatctataaattgggttgcgcattgggccacctggcgcgacgcgtaatgaaacgccgcgcaaaaatcgcctatcgcaaccttgaattatgctttccggaaatgaccgcgcaggaacgccacactatggtggtcaaaaactttgaatccgtcggtatgggcgtgatggaaaccggcatggcctggttctggcccgatcggcgagtgaaccgctggatggaagcgagcggtctggagcatatccgtgaagttaaggcgcaggggctggggttcattctggtaggaatacattttcttacccttgagtttggcgcccgcatgtttggtatgcataacccggggatcggagtttatcgcccgaatgataatccgttgctcgactggttacagacctggggacgcttacgctccaataaatcgatgttggatcgcaaagatctgaaaggcatggttaaggcattgaaaagcggcgaattgatctggtatgcgccggatcacgattacggcccgcgcgccagcgtctttgtaccgttattcgccgtcgaccaggccgctacgacctccggtacctggatgctcgcgcgcatgtctaaagcctgtattatccccttcgtgcctcgccgtaaacccgatgggaaaggctacgaactgatcattcttcctgcggaatattcgcctccgctggagagcgcagaagcgactgccgcatggatgaataagattgttgagcagtgcattatgatggcgccagagcagtatatgtggctgcatcgccgctttaaaactcgccctgaaggcgtaccgtcgcgctattga

SEQ ID NO: 368526 - DNA, 1053 bp, Salmonella enterica
atgccagtgttacacaaccgcatctctaatgacgagctgaaagccaaaatgctggcggaaagcgagccgcgtacgacaatttctttttataaatatttcactatcgcctcgccgcagcagacgcgggacgcgttgtatcaggtgtttacggcgttggacgtttttggtcgtgtttacctggcgcatgaaggcatcaatgcgcaaatcagcgtgccgcaaagcaaggtcgagacctttcgtcaacagctttatacgttcgaccccgcgctggacgggctgcgtttaaatatcgcgctggaggatgacggaaagtcattttgggtgctgcgtatgaaagttcgcgaccgtatcgtcgctgacggaattgacgatccgacttttgacgccagtaatgtcggcgattatctgaaggcggcagatgtgaatgcgatgctggacgatcctgatgcggtctttattgatatgcgcaaccactatgagtatgaagtcggccatttcgaaaatgctctggaaatcccggcggatacgtttcgtgaacagttgccaaaagcggttgaaatgctgcgggaacatgcagataaaaagatagtgatgtactgtaccggcggtattcgttgtgagaaagccagcgcctggatgaaacacaacggtttcaataaagtctggcatattgagggtggcatcattgagtacgcccgtcgcgcgcgcgagcaggggcttcccgttcgctttatcggcaaaaactttgtatttgatgagcgaatgggcgaacgaatctcggatgaggttatcgcgcattgccatcagtgcggcgcgccctgcgatagccataccaactgcaaaaatgacggttgccatctgctgtttatccagtgtccgcagtgcgccagtaaatttaacggctgctgtagtgaacaatgctgtgaagagttggccttgccggaggaagaacagcgccgacgtcgcgcgggtcgcgagaacggcaataaaatttttaataaatcgcgtggtcggcttaatagcaaactgagcattcccgatccggctgagtaa

SEQ ID NO: 368527 - DNA, 576 bp, Salmonella enterica
atgaaaaaaaacctgctgggattcaccctcgcatccttgttattcacgaccggttccgccgtggcggcggagtataaaattgataaagaaggccaacatgcgttcgtcaatttccgcattcagcatctaggctacagctggctatacggcacctttaaagatttcgacggcacgttcacttttgacgaaaaaaatccgtcggcagacaaagtgaacgtgaccattaacaccaatagcgtcgacactaaccatgccgaacgtgacaaacacctgcgtagcgcggagtttcttaatgttgcgaaattcccgcaggcaaccttcacctctaccagcgtgaaaaaagagggcgatgaactggatattaccggcaatctgacgctcaatggcgtgactaaaccggtgacgctggaagcgaagctgatgggccagggcgacgatccgtggggcggtaagcgcgcgggctttgaggccgaaggaaaaattaagctgaaggatttcaatataactaccgatctcggcccggcctcacaagaggttgagcttatcatctcagtagaaggcgttcagcagaagtaa

SEQ ID NO: 368528 - DNA, 573 bp, Salmonella enterica
atgcaatttaaaaatactccacagcgttatggcgtggtttccgccgcgctccactggctgaccgccctggtggtctatggcatgtttgcgttgggtttatggatggtcacgctcagttattacgacggctggtatcaccaggcaccggaaatacataaaagtattggcatattactgatgatggcgctgatcgtgcgtattatctggcggctttattctccgcctcccgttgcgttgaccagctattcccgcttaacgcgcgctggcgccgccgcaggtcatctcctcctgtatctcctgctctttgcgataatcattagcggctacctgatttccaccgccgacggtaaaccgattagcgtctttggctggtttgagattccggccacgcttacggacgcgggcgcgcaggctgacatcgccggaacgctgcatctgtggtttgcctggtcgctggtcattatctcgctctcgcatggggttatggcgctaaaacaccatttcatcgataaagacgacacactgaaacgtatgacaggaatgtcgtcatctgactatggagctcaaaaatga

SEQ ID NO: 368529 - DNA, 1119 bp, Salmonella enterica
atgaaatacgaccttattattatcggcagcggttcggttggcgccgccgctggttattacgccacccgcgccgggctaaaggtcctgatgaccgatgcgcatatgccgcctcatcaacagggcagccaccacggcgatacccgtcttatccgccatgcttatggtgaaggcgaaaaatatgtcccgctgatgcttcgcgcccagacgctttgggatgaactctccacacacaatgaagagcctatttttgtccgctccggcgtcgtcaacctcggcccggccgattccgctttcttagccaacgtcgcacgaagcgcgcaacagtggcaattgaacgtcgagcgcctggacgcgacggccctcatgacgcgctggccggaaattcgcgtgcccgataattatatcgggctgtttgaagctgactccggttttctgcgcagcgaattagccattaccacatggcttcgtctggcccgagaggctggctgcgcacagctattcaacagccaggtaagccatattcatcatgatgataacggtgtgacgatagagacgagtgaaggcagctaccacgccagcaaggcgctaattagcgcgggcacctgggtcaaagcgctggtaccggagctgcccgttcagcccgtacgtaaagtttttgcctggtttaaggcggatggacgttacagcactaaaaaccgctttccggcctttaccggcgaaatgcccaacggcgatcaatattacggcttcccggcggagaacgacgagttaaaaatcggcaaacacaatggcggacagctaatacaggctccggaagagcgcaagccctttgccgccgttgccagcgatggcgcggaagcatttcctttcctgcgtaacgtactgccgggtatcggcggttgtttacatggggcggcatgtacctatgataattcgccggacgagaattttattatcgatacgctgcctggccatgagaacacgcttgtcatcactggactcagcggacatggttttaaattcgccccggtgttaggagaaatcgctgcggattttgcgttgggaaaaacatcctcctttgatctgacgccgttccggctttcccgttttagccaataa

SEQ ID NO: 368530 - DNA, 255 bp, Salmonella enterica
atggaaaagaataatgaagtcattcagacccatccgcttgtaggatgggacatcagcaccgtcgatagctatgatgcgctgatgctgcgtttgcactaccagaccccaaatcgtccggaaccggaagggactgaagttggtcaaacgctctggttaacgacagatgtagccaggcaatttatttcaatattagaagccggcatcgccaaaatagaatcaggtgattaccaggaaaacgagtatcgtcgccattag

SEQ ID NO: 368531 - DNA, 246 bp, Salmonella enterica
atgcgtattgaagtcactatagccaaaacgtcacctctgcctgccggtgcgattgatgcgctggcgggcgaactctcccgtcgtattagccatcattttcctgagaacttgggtaacgtcaccgtgcgttacgctaccgccaacaacttgtccgtcattggcgcatcaaaagaggacaaagaacgcattagcgagattctccaggagacctgggagagcgctgatgactggttcatcaatgaataa

SEQ ID NO: 368532 - DNA, 1047 bp, Salmonella enterica
atgactgcaccatcccaggttttaaagatccgccgcccggacgactggcacgttcaccttcgcgatggcgacatgttaaaaacggtcgtaccctataccagcgaaatttatggtcgcgctatcgtgatgccgaacctggcgtcccccatcacgaccgttgatgcagcgatcgcctaccgccagcgtattctcgatgcggtgcccgccgggcatgatttcacgccgttaatgacctgctatttaacggattcgctcgatgccgatgaactggagcgtggtttccatgaaggcgtatttactgcggctaagctttacccggccaatgccaccactaactccagtcatggcgtaacgtcagtcgacgctatcatgccggtactggagcggatggaaaaactcggaatgccattgctggtccacggtgaggtgacccatgcggaggttgatatcttcgatcgcgaagcgcgttttatcgacaccgtaatggaaccgctacgccagcgtctgaccgcgcttaaagtggtctttgagcacatcacgaccaaagatgccgcgcagtatgtacgtgacggcaacgactacctggcggctaccattacgcctcaacatttaatgtttaaccgtaatgatatgctggtcggcggcattcgtcctcacctgtactgtctgccgattctgaaacgcaatattcaccagcaggcgttacgcgaactggttgccagtggttttacgcgcgccttcctggggacggattcagcgccgcattcacgtcatcgtaaagagactagttgcggctgcgccggttgtttcaacgctccctccgcccttggcagttatgccgccgtgtttgaggaaatgaacgcgctggcgcactttgaagcgttctgttcactgaatggcccgcaattctatggcctgccggtgaatgcggggtgggtggaactggttcgcgatgaacaacaggtaccggaaaatatcgcgctggctgatgattcgctggtgccttttttagcgggtgaaacagtacgctggtcagtaaaaaaataa

SEQ ID NO: 368533 - DNA, 561 bp, Salmonella enterica
atgaaaaagtttttttttgccgctgcgctggtagttagcggcctgttagtgggttgtaatcaacttacgcaatacaccattagcgaacaagaaatcaatcaagcgcttgaaaaacggaataatttctcaaaagatattggtctgcccggcattgccgacgcgcatatcgtattgactaaccttgtcagccagattggtcgggaagaacctaataaagtcacccttactggcgatgccaggctggatatgaattccctgtttggcagtcaaaaagcgacgatgaaactcaagctaaaagccctgccggtctttgataaagaaaaaggcgccatctatcttcaggagatggaagtagtagacgccaccgtgacgccggagaaaatgcaatcggtgctacaaacgctcctgccttatttaaatcagtctttacgtagctactttaaccagcggcccgcttacgtgttgcgtgaggacagcagtaaaggcgaagcgttagcaaagaaactcgcgaaaggcattgaagttaaacctggtgaaatcgttattcctttcaccaattga

SEQ ID NO: 368534 - DNA, 648 bp, Salmonella enterica
gtgaagctttatatttacgatcattgccctttctgcgttaaagcccgcatgattttcggcctgaagaacatccccgttgaacttaacgtgttacaaaatgacgacgaggcgacgcccacccggatgattggtcaaaagatggtgcccatcctgcaaaaagatgatagtcgctaccttcctgaaagtatggatattgtacattatgtcgacaacctcgacggcaaaccgctgttaaccgggaaacgcaatccagccattgaagagtggttgcgcaaagttaacggttacgttaatcagctactgctgccgcgatttgcaaaatccgctttcgatgaattttctacccctgcggcgcgtcagtattttatccgcaaaaaagaagcctcatctggcagttttgacaaccatcttgcgcactctgcaggactgattaaaaagatcggcgatgatttacgtttgctggataaactcatcgtacagcctaacgccgttaacggcgaattatcggaagatgatattcatctgtttccgcttctgcgtaatctgacgctggtcgccggtatccactggccgacaaaagtcgcggactatcgcgataatatggcgaagcagacgcaaattaatttactctcctcaatggctatctaa

SEQ ID NO: 368535 - DNA, 1209 bp, Salmonella enterica
atgtcgcgcgtctcgcaggcgaggaacctgggtaaatattttcttctcatcgataacatgttagtggtgctgggttttttcgtcgtcttcccgctcatctctattcgctttgtcgatcaaatggggtgggctgccgtaatggtagggatcgcgctcggcctgcgccagtttattcaacaaggtctgggcatttttggcggcgccatcgccgatcgctttggcgcgaaaccgatgattgtcaccggtatgctgatgcgcgccgccggctttgccaccatgggtatcgcgcatgagccctggctcttgtggttttcctgctttctttccggtctcggcggtacgctttttgacccgccgcgttcagcgctggtggtcaaattaattcgtccggagcaacggggccgcttcttctctctgttgatgatgcaggacagcgcgggcgcggtgattggcgcgctgctgggaagctggttgctacaatacgattttcgcctggtctgcgcgacaggcgctattttgttcatattatgcgcccttttcaacgcatggctgcttccggcctggaagctatcaacggtcagaacgccggtgcgtgaaggaatgcgccgcgtcatgagcgataaaaggtttgtcacctacgtgctgacgctggcgggctactatatgctggcggtacaggtcatgttaatgctgccgattatggtaaacgatatcgccggttcgcctgctgccgtgaaatggatgtacgctattgaggcgtgtctctcgctgacgttgctctacccgattgcccgctggagcgaaaagcgttttcggctggagcatcggctgatggccggtttgctcgtcatgtcgctgagcatgctccccatcgggatggtgggcaatttacagcagctttttacgcttatttgcgctttctacatcggctcggttatcgccgaaccggcgcgcgaaacgctcagcgcgtcgctcgcagacgcgagggcgcggggaagctatatgggctttagccgtctgggattagccattggcggcgcgattggttatatcggcggcggctggttgtttgatatggggaaagcgcttgcgcagcctgaactaccgtggatgatgctcggtattatcggctttatcacctttttggctttaggctggcaatttagtcataaacgcacgccgcgccggatgctggaacccggcgcctga

SEQ ID NO: 368536 - DNA, 585 bp, Salmonella enterica
atgtttggctatcgtagtaacgtgccaaaagtgcgcttaaccaccgatcgtctggtggtacgtttagtgcatgagcgtgatgcctggcgtctggccgattattacgcggaaaatcgtcattttttaaaaccctgggaaccggtccgtgatgaaagtcattgttatccttcaggatggcaggcgcgtctgggaatgatcggtgaatttcacaaacagggctccgccttctatttcgcgctacttgatccggaagaaaaagaaattatcggcgtggcgaatttttccaatgtggtgcgcggttcttttcatgcctgttatctgggctattccattgcgcagaagtggcaggggcaagggctgatgtttgaagccttaaccgctgcgattcgctatatgcagcgcactcagcatatccaccgtatcatggcgaactatatgccgcacaacaaacgtagcggcgcgttgctggcgcggcttggctttgaaaaagaaggctatgcgaaagattacctgttgattgatggacaatggcgcgaccatgtcctgacggcgttaaccacgccgttatggacgccggggcgttga

SEQ ID NO: 368537 - DNA, 648 bp, Salmonella enterica
atgaaatatgaattaaccgccactgaagcgcgagtgattggctgtctgctggaaaagcaggtgacaacgccggaacagtatccgctttccgtcaacggcgtggtgacagcctgtaatcagaaaaccaaccgtgaaccggtgatgaacctgacggaacaagaggtacaagaacagctcgataacctggtgaaacgccactttttgcgtacggtcagcgggtttggcaatcgcgtcaccaaatatgaacagcgcttctgtaattccgaatttggcgatctgaaacttagcgcggcggaagtggcgcttgtcactacgctgctgctgcgcggcgcgcaaacgcccggcgagttgcgtagccgggcgtcgcggatgcatgaattcagcgatatggcggaagttgaatccacgctggaacggcttgccagtcgtgaggacggcccgtatgtcgtccgtctggcgcgtgaaccgggtaagcgcgaaagccgttatatgcaccttttttgcggcgacgtcgatgaactgtctctccagacgtctgcgccggaaagtgcgtcgggcgatcttcagtcgcgcgtcgaagcgctggaaagcgaagtggcggagttaaagcagcggctggattctttgttagctcacctgggagagtaa

SEQ ID NO: 368538 - DNA, 924 bp, Salmonella enterica
gtgagaacattacggattggcattgtcggattaggcggtattgcgcagaaggcctggctgccggtattaaccaacaccgccggatggacgttacagggcgcctggtctccttcgcgggataaagccttacgtatctgcgaaagctggagcataccgtatgtggattcgctggcgaatttagcgtccggctgcgatgcggtcttcgtccactccagtaccgcaagccattatgccgtggtcagcgaacttctcaatgccggcgtccatgtttgcgtggataaaccgctggcggaaaatctacgtgatgccgaacggctggtggcgctggcggcgcaaaaaaaattgacgctgatggttggctttaatcgccgtttcgcgccgctgtaccgcgaactgaagacgcgcctcggcactgcggcgtcactgcgtatggataaacatcgtaccgatagcgtcgggccgcacgacttacgttttactttgctcgatgactatctgcatgtcgtggataccgctctgtggctggcgggcggcgaggcgcgccttgccagcggcacgttgctcaccagcgagtccggcgaaatgtgctatgcggaacatcatttttccgccgacaaactacaaattaccaccagtatgcaccggcgcgccggaagtcagcgtgaatcggtccaggccgtcaccgacggcgggctatatgacgtgacggatatgcgtgaatggcgcgaagagcgcgggcagggtattctcatcaaacccattcctagttggcaaacgacgcttgaacagcgtggttttgtcggatgcgcgcggcatttcattgactgcgtacaaaatcagacggttccggaaacggcgggggagcaggcgattttggcccagcgcgtcgtggaggcgctgtggcgggacgccatcagcgaataa

SEQ ID NO: 368539 - DNA, 1575 bp, Salmonella enterica
atgcaggagttttacgccagggtctggaatacaaaagaaatgaatttattgaaatcgctggctgccgtcagctcgatgactatgttttcacgcgtgttgggctttgcccgtgatgcgattgtcgccagaatttttggcgcagggatggcgaccgacgccttttttgtggcgtttaaactccccaatctactacgccggatctttgccgaaggcgctttttctcaggcctttgtgcctatcctggcggaatataagagcaagcagggtgaagaagcgacgcggatctttgtcgcttacgtttccggcctgttgacgctggcattggccgtcgtgacggtggccggtatgctggccgccccgtgggtgattatggtaaccgcgccgggttttgccgatactgcggataaattcgcgctgacgacgcaactgctgcggattacgtttccctatattctgctgatctcgctggcttcactggttggcgccattctcaacacctggaatcgcttctctattcccgcttttgcgccgacatttcttaatatcagcatgatcggttttgcattattcgccgcgccatactttaatccgccggtgctggcgttagcctgggcagtcaccgtcggcggcgtgctgcaactggtgtatcaacttccgtatttgaaaaagatcggtatgctggtgctgccgcgcattaactttcgcgacaccggggcgatgcgggtggtcaaacagatggggccggcgattttgggcgtatccgtcagtcagatctctcttatcatcaataccatttttgcctcgtttctggcctccggctcggtctcatggatgtactatgccgatcggttgatggagttcccgtccggcgtgctgggcgtggcgttggggaccatcctgttgccgtcattgtcgaaaagctttgccagcggcaatcatgatgagtactgccgcctgatggactgggggctgcgtttgtgctttttactggcgttgccgagcgcggtagcgttaggcattctggcgaagccgctgacggtctcgctgtttcagtacggtaaattcaccgcctttgatgcggcgatgacgcagcgggcgttaatcgcctattcggtggggctgattggcttgatcgtcgtaaaagtgttggccccgggcttctattctcgccaggatattaaaacgccggtgaaaatcgccatagtgacgttaatcatgactcagttaatgaacctggcgtttattggaccgctgaaacacgccgggctgtcgctctctattggtctggcggcatgtctcaatgcgtcgctgctgtactggcaactgcgcaaacagaatatctttacgccacaaccgggttggatgtggttcctgatgcgtctgatcatttccgtactggtgatggccgccgtattgttcggcgtgttgcatattatgccggagtggtcgcaagggtcgatgttatggcgtttgctacgtttgatggcggtagtgatcgcgggtattgcggcctatttcgccgcgcttgccgtgctgggctttaaagtgaaagagtttgttcgccggacggcgtaa

SEQ ID NO: 368540 - DNA, 423 bp, Salmonella enterica
atgactcgtttgtcagaaatacttgaccagatgaccaccgtcctgaatgacctgaagacggtgatggacgccgagcaacaacagctttccgtaggccagattaacggcagccagctacagcgtattacagaagaaaaaagctcgttgctggcgacgctggattatctggaacaacagcgccgtctggagcagaacgcgcagcgtagcgcaaacgatgacattgcagagcgctggcaggcgattaccgaaaaaacgcagcatcttcgcgacctcaaccagcacaacggctggctgctggaagggcaaatcgagcgtaatcaacaggcgctggaggtgctgaaacctcaccaggagccgaccttgtacggggctgacggtcagacttccgtctctcaccgcggcggtaaaaaaatttctatctaa

SEQ ID NO: 368541 - DNA, 294 bp, Salmonella enterica
atgagcattgaccgtacctcacctttgaaacccgttagcactgtccagacgcgcgaaaccagcgacacgccggtacaaaaaacgcgtcaggaaaaaacgtccgccgcgacgagcgccagcgtaacgttaagcgacgcgcaagcgaagctcatgcagccaggcgtcagcgacattaatatggaacgcgtcgaagcattaaaaacggctatccgtaacggtgagttaaaaatggatacgggaaaaatagcagactcgctcattcgcgaggcgcagagctacttacagagtaaataa

SEQ ID NO: 368542 - DNA, 660 bp, Salmonella enterica
atgcaaacgttaaaacgaggattcgccgtggcggctttgctgttcagccccctgacaatggcgcaggacatcaacgcccagctgaccacgtggttttcccagcgtctggctggcttcagcgacgaggtggttgtcacgctccgttcatcgcccaatctgctaccgagctgcgaacagccagccttcagcatgacgggcagcgcgaagctgtggggcaacgtcaatgtggtggcgcgctgcgccaatgaaaaacgttatttgcaggtgaatgtgcaagcgaccggcaattatgtcgccgttgccgcgcccgtcgcgcgcggcggaaaattgacgccggccaacgtcacgctaaaacgtggcaggctggatcagttaccgccgcggacggtactggatatccgtcagattcaggatgccgtcagtttgcgcgatctcgcacccgggcagccggtacagcttacgatgatacgtcaggcctggcgcgtcaaagcggggcaacgagtacaggtcatcgccaatggcgaggggttcagcgtcaatgcggaaggtcaggcgatgaataatgccgccgtcgcgcaaaatgcgcgcgtgcgcatgacatcgggtcaaatcgtgagtggaaccgtcgattctgatgggaatattcttattaacctataa

SEQ ID NO: 368543 - DNA, 417 bp, Salmonella enterica
atgctcgacaggctcgatgccgccttacgatttcagcaggaagcgcttaatctgcgcgcgcaacgtcaggaaatattagcggcgaatatcgccaatgccgatacgccggggtatcaggcgcgcgatattgattttgccagtgagttaaaaaaggtgatggtgcgtggacgggaagaaaccggcggcgtcgcgttaacgttgacttcctctcaccatattcccgcccaggcggtctcttctcccgcagtggatctgctttaccgcgtacccgatcagccttctttggatggtaacaccgtagatatggacagggaacgtacgcagtttgcggataacagtctcaaatatcagatggggcttaccgttctgggtagccaactcaaaggcatgatgaatgtgctacagggaggaaactaa

SEQ ID NO: 368544 - DNA, 405 bp, Salmonella enterica
gtggcgctgttaaacatttttgatattgccggatcggcgcttgccgcgcagtccaagcggttgaacgttgcggccagtaacctggcgaatgcggatagcgtcaccggcccggacggacagccttatcgcgccaaacaggtggtttttcaggtggacgccgcgccgggtcaagccactggcggggtaaaggtcgccagcgtgattgaaagtcaggcaccggaaaagctggtttatgagccaggcaatccgctggcggacgctaatggttacgtcaaaatgcccaacgtcgatgtggtcggcgaaatggtcaacacgatgtcagcctcgcgcagctatcaggcaaatatcgaagtcctgaataccgtaaaaagcatgatgcttaaaacgctgacattaggccagtaa

SEQ ID NO: 368545 - DNA, 699 bp, Salmonella enterica
atgtctattgccgtaaatatgaatgacccgaccaacacgggcgtcaaaacgacgaccggcagcgggtcgatgaccggaagcaacgctgccgatctgcaaagcagtttcctgaccttactggtcgcgcaattgaagaaccaggacccgactaacccattacaaaataatgagttaacgacacagttggcgcaaatcagtaccgtgagcggcattgaaaaactgaatacgacgctgggggctatttccgggcaaatcgataatagtcagtccctacaggcgaccacgctgattggacatggcgttatggtgcctggcaccacaattctggcgggtaaaggcgcggaagaaggggccgtgacgtccacgacgccgtttggcgtggaattgcaacagcctgcggacaaagtgacggcaaccattaccgataaagatggccgggtggtacggacgctggagatcggtgagttgcgagccggggtacacacctttacctgggatggtaagcaaacggacggaacaacggtaccgaatggttcttacaacattgcgattaccgccagcaatggcggaacgcaactggtggcgcagccgctgcaattcgctctggtacagggcgtgacgaagggcagtaacggcaacctgttggatctgggtacctacggcaccaccacactcgacgaagttcggcaaataatctaa

SEQ ID NO: 368546 - DNA, 1212 bp, Salmonella enterica
atgtctttttctcaagcggttagcggcctgaacgctgcggccaccaaccttgatgttatcggtaataacatcgccaactccgccacctatggctttaagtccggtacggcatcatttgccgatatgttcgccggttccaaagtggggctgggcgtaaaagtggcggggattacccaggattttaccgacggtacgacaacgaacaccgggcgcgggctggatgtcgcgattagccagaacggttttttccgcctggtagacagcaacggttccgtgttctatagccgcaacggccagttcaaactggacgagaaccgtaacctggtcaatatgcaggggatgcagttgaccggctatccggccaccggtacgccgccgaccattcagcagggggcgaatcctgcgccgatcaccattccgaacacgctgatggcggcgaaatcgaccaccaccgcgtcaatgcagatcaacctgaactcaacggaccctgtaccgtctaaaacgccctttagcgtgagtgatgcggattcgtataacaaaaaaggcaccgtcaccgtttatgacagccagggtaatgcccatgacatgaacgtctattttgtgaaaaccaaagataatgaatgggctgtgtacacccatgacagcagcgatcctgcagccactgcgccaacaacggcgtccactacgctgaaattcaatgaaaacgggattctggagtctggcggtacggtgaacatcaccaccggtacgattaatggcgcgacagcggccaccttctccctcagcttccttaactccatgcagcagaacaccggggctaataacatcgtcgccaccaatcaaaacggctataagccgggcgacctggtgagctaccagattaacaacgacggcaccgtggttggcaactactccaacgagcaggagcaggtgctggggcagattgtgctggctaacttcgccaacaacgaaggtctggcatcccagggcgataacgtctgggcggcgacgcaggcttccggggttgcgctgctggggactgccggttccggcaacttcggtaagctgacgaacggcgcgctggaagcctctaacgtggatttgagtaaagagctggtgaatatgatcgtcgcgcagcgtaactaccagtcgaatgcgcagaccatcaaaactcaggaccagatcctcaatacgctggttaacctgcgctaa

SEQ ID NO: 368547 - DNA, 756 bp, Salmonella enterica
atggatcacgcaatttataccgctatgggggcggccagccagacgcttaaccagcaggcggtaacggccagcaacctggctaatgcctcaacgccgggctttcgcgcgcagcttaacgcgctacgcgcggtgcccgttgatggcctctctttagcaacgcgcacgctggttacggcgtcgacgcccggggcggatatgaccccgggtcagttggactacacctcccgtccgctggatgtcgcgttacagcaggacggctggctggtagtgcaagcggcggatggcgctgaaggatatacccgtaacgggaatatccaggtgggtccgaccgggcagttaaccattcagggacatccggttatcggcgaaggcggcccgattaccgttcctgaagggtcggaaatcaccattgcggcagacggcacgatctccgcgctcaatcccggcgacccgccaaacacggtggcgcccgttgggcgactgaagctggtcaaagcggaaggcaatgaggtgcagcggagcgatgacggtttattccgccttaccgccgaggcacaggctgaacgcggggcggtactggccgccgacccgtcaattcgcattatgtcgggcgtgctggagggcagtaacgtcaagccggttgaagccatgaccgacatgatcgccaacgcacgtcgttttgaaatgcagatgaaggttatcaccagcgtagatgagaacgaagggcgagctaaccaactgctgtcgatgagttaa

SEQ ID NO: 368548 - DNA, 783 bp, Salmonella enterica
atgatcagttcattatggatcgccaaaaccggtctggacgcgcagcaaaccaatatggatgtgattgccaataacctggcaaacgtcagcaccaatggttttaagcgtcagcgcgcggtatttgaagatctgttgtatcagaccatccgccagccgggcgcgcagtcgtccgagcagacgacgctgccttcagggctgcaaatcggtaccggcgtgcgtccggtcgccacggagcgtctgcacagtcaggggaacctgtcgcagaccaacaacagtaaagatgtggcgattaaagggcagggctttttccaggtcatgctgccggacggtacgtctgcctatacccgcgacggctctttccaggtggatcagaatggtcaactggtgacggcgggcggttttcaggtgcagccggcaatcaccattccggccaacgcgttaagcatcacgattggccgcgacggcgtggtcagcgttacccagcaggggcaggccgcgccggttcaggtcgggcagcttaacctgaccacctttatgaacgacaccgggctggaaagcattggcgagaacctctatatcgaaacgcaatcgtccggcgcgccgaacgaaagcacgccggggctcaacggcgcggggttgttgtatcaagggtatgtcgaaacgtcgaacgttaacgtggcggaagagctggtgaacatgattcaggttcaacgcgcctatgaaattaacagtaaagcagtatcgacgaccgatcagatgctgcagaaactgacgcaactctaa

SEQ ID NO: 368549 - DNA, 666 bp, Salmonella enterica
atggccctgatggtcgcgacgctgacaggatgcgcctggatacccgctaaaccgctcgtgcagggggcgaccacggcgcagccgatacctggcccggtaccggtggcgaatggctccatatttcagtctgcgcagccgattaattatggctatcagccgctttttgaagatcgtcgaccgcgtaatatcggcgatacgctcacgattgtgttacaggaaaacgtcagcgccagtaaaagctcgtcggcaaatgccagtcgcgacggcaaaaccagttttggttttgatacggtaccgcgttatctgcagggattattcggtaattcccgcgcggatatggaggcctccggcggcaactcttttaacggcaaaggcggcgcgaatgccagcaatacctttagcggcacgctgaccgtgaccgtcgatcaggttctggccaatggcaatttacacgtcgtgggggaaaaacagatcgcgattaatcagggaacggaattcatccgcttctccggcgtggtaaatccacgcaccatcagcggcagcaactccgttccctcgacacaggtggcggatgcgcggattgaatatgtcgggaacggctatattaacgaagcgcaaaatatgggctggctgcaacgtttcttccttaatttgtcgccgatgtaa

SEQ ID NO: 368550 - DNA, 1098 bp, Salmonella enterica
gtgtttaaagctcttgcaggaatcgttctggcactggttgccactctggcgcacgccgagcgtatccgggatctgaccagtgtccagggagtacgggaaaactcgctgatcggctacgggctggtggtcgggctggacggtacgggcgaccagacgacccagacgccatttaccacccagacgctgaataacatgctgtcacaactggggattacggtccccaccggcaccaacatgcagttgaaaaacgtggcggcggtgatggtgacggcgtcgtatccgccttttgcgcgacagggacaaacgatcgatgtcgtcgtttcctcaatggggaacgctaaaagtctgcgtggcgggacgttattaatgacgccgttaaaaggggtggacagccaggtgtatgctctggcgcagggcaatattctggtcggcggcgcgggcgcttccgcaggcggcagtagcgtgcaggttaaccagcttaatggcgggcgcatcactaatggcgcgattatcgaacgcgagttgccgactcagttcggcgctggcaacaccattaatctgcaattgaacgacgaagattttacgatggcgcagcaaattaccgacgccatcaaccgcgcccgcggttacggcagcgccactgcgcttgatgcgcgaacggtacaggtacgcgtgcccagcggcaacagctcgcaggtgcgttttctggcggacattcaaaatatggaagtcaacgtgacgccgcaggatgcaaaagttgtgatcaactcgcgtaccggttcggtggtcatgaatcgggaagtcacgctggatagctgcgctgtggcgcagggcaatttgtcagtgacagtcaatcgccagctcaacgtcaaccagccgaatacgccatttggcggcgggcagaccgtggtgacgccacagactcaaatagatttgcgtcagagcggcggatcgctacagagcgtgcgttccagcgccaatctgaacagcgtagtgcgtgcgctgaatgcgcttggcgcgacgccgatggacctgatgtcgattttgcagtccatgcagagcgcgggctgtctacgcgccaaactggaaatcatctga

SEQ ID NO: 368551 - DNA, 951 bp, Salmonella enterica
atgatcggagacggtaaattgctggccagcgcggcctgggatgcgcaatctctgaacgaactgaaagcgaaagcgggccaggacccggcggcgaatatccgtcctgtggcccgtcaggtggaagggatgtttgtgcagatgatgctgaaaagtatgcgcgaggctttacccaaagatggtttattcagcagcgatcagacgcgtctgtataccagcatgtatgaccagcagatcgcccagcagatgaccgccggtaagggattggggctggcggatatgatggttaaacagatgacgggcgggcagacgatgcctgcggatgatgcgccgcaagtaccgcttaaattctccctggagacggtaaacagctatcaaaatcaggcgctgacccaactggtgcgcaaagccataccgaaaacgccggacagcagcgatgcgccgctctccggcgacagtaaagactttctggcccggctttcgctcccggcgaggctggccagcgaacaaagcggggtgccgcatcatctgattctggcgcaggcggcgctggagtccggctgggggcaacggcaaatcctgcgggagaatggcgaacccagctataacgtatttggcgtgaaagcgaccgccagttggaaagggccggtgacggaaatcaccaccactgaatacgagaatggcgaagcgaaaaaagtgaaagcgaaattccgcgtctatagctcgtatctggaggcattatcggattatgtcgcgctgttagcgcgtaacccacgctacgctgccgtgaccactgccgccacggcagagcagggcgcagtggctctgcaaaacgccggatacgccactgacccgaattacgcgcgtaaattgaccagcatgattcagcagttgaaagcgatgagtgaaaaggtcagcaaaacctacagcgcgaatctcgacaatctcttttaa

SEQ ID NO: 368552 - DNA, 1662 bp, Salmonella enterica
atgtccagcttgattaatcacgccatgagcggacttaacgccgcgcaggccgcgttaaatacggtcagtaataacatcaacaattataacgttgcgggttatacccggcagacaactattctggcgcaggcaaacagtacgttaggggctggcggctggataggtaatggcgtttacgtttcaggcgtacagcgcgaatatgatgcgtttatcactaatcagctacgcggcgcgcaaaaccagagcagcggcttgaccacgcgctatgaacagatgtcgaaaatcgacaacctgctggccgataaatccagctcactgtctggttcgttgcagagtttttttaccagcctgcaaacgttagtcagtaatgcggaagatcctgcggcgcgtcaggcgctgattggtaaagcggaagggctggtaaaccagttcaaaaccaccgatcagtatctgcgcgatcaggataaacaggtcaatatcgcgattggctccagcgtggcgcaaatcaacaattacgcgaagcagatagctaacctgaacgatcaaatctcccgtatgacgggcgtaggcgcgggcgcatcgccgaacgacctgctcgatcaacgtgatcagttggttagcgagcttaacaagatcgttggcgtcgaggtgagtgtacaggacggcggcacctataacctgacgatggccaatggctatacgctggtgcaggggtcgacggcgcgtcagttggcggcggttccctccagcgccgacccgacgcgaacgactgtcgcttatgtcgatgaggccgccggtaacatcgaaattccggaaaagttgctgaacaccggttcgctcggcgggctactgacgttccgttcccaggatctggatcagactcgtaatacgctgggccagttggcgttggcgtttgccgatgcgtttaacgcgcagcataccaaaggttatgacgccgacggcaataaagggaaagacttctttagcattggctcgccggtggtatatagcaacagtaataatgccgataaaacggtatcgctaaccgctaaggtggtcgatagcacgaaggttcaggcgacggattataagattgtttttgacggtacagactggcaggttactcgcactgcggataacaccaccttcacggcgacaaaagatgctgacggaaaactggagattgacggtctgaaagtgacggtagggaccggcgcacagaaaaacgacagttttcttctcaagccggttagcaatgctatcgtcgacatgaacgttaaagtgacgaatgaagccgagattgcgatggcgtctgagtcaaaactcgatcctgacgtggataccggcgacagcgataaccgcaatggtcaggcattgctggacttacaaaacagcaatgtagtgggcggcaacaaaacttttaacgatgcttacgccacgttggtcagcgatgtgggtaacaaaacgtcaacgctgaaaaccagcagcaccacgcaggcgaatgtggttaaacagctttataaacagcaacagtcggtttccggcgttaacctcgacgaagagtacggcaatttgcagcgttatcagcagtattatctggcgaatgcgcaagtattgcagaccgcgaatgcgctgtttgatgcgttattgaatattcgctaa

SEQ ID NO: 368553 - DNA, 954 bp, Salmonella enterica
atgcgtatcagtacccagatgatgtacgaacaaaatatgagcggcatcactaattctcaggccgaatggatgaagctgggcgagcagatgtctaccggtaagcgcgttaccaacccatctgacgatccaatcgccgcgtcgcaggcggtagtactctctcaggcgcaggcgcagaatagccagtatgccctggcgcgtacgtttgccacccaaaaagtgtcgctggaagaaagcgtactcagtcaggtgacgacggcgattcaaaccgcgcaggaaaaaatcgtctatgccggaaacggcacgttaagcgacgatgaccgcgcgtcgctggcgacggatttacaggggatccgcgatcagctgatgaacctggcaaacagcactgacggcaatggtcgctatatctttgccgggtataaaacggaagcggcgccattcgaccaggcgacaggtggttatcatggcggcgagaaaagtgttacccagcaggtggattccgcacgcacgatggtaattggccatacgggagcgcaaatttttaatagcatcaccagcaatgcggtgccggaaccggatggctcagactccgaaaagaatctgtttgtcatgctcgatacggcaattgccgcgctcaagaccccggtggaaggcaatgacgtggaaaaagaaaaagccgctgccgccattgataaaaccaatcgcggcttaaaaaattcgcttaataacgtcctgaccgttcgtgcggaactgggaacgcaactgagcgaactcagtacgctggattcactgggaagcgaccgtgcgctgggacagaaactgcagatgagcaacctggtagatgtggactggaactcggtcatttcttcctacgtcatgcaacaggcggcattacaggcgtcctataaaacgtttaccgacatgcagggaatgtcgcttttccagttgaaccggtaa

SEQ ID NO: 368554 - DNA, 3207 bp, Salmonella enterica
atgaaaagaatgttaatcaacgcgactcagcaggaagagttgcgcgtcgcccttgtagatgggcagcgtctgtacgatctggatatagaaagccccggacacgagcagaaaaaagcgaacatctataaaggcaaaattacccgtattgaaccgagcctggaagcggcttttgttgattacggcgcagaacgccacggtttcctcccgttaaaagaaattgcccgcgaatatttccccgctaactacagcgctcatggtcgcccgaacattaaagacgtgttacgcgaaggccaggaagtcattgttcaaatcgataaagaagagcgcggcaacaaaggcgcggcgttaaccacctttatcagtctggcgggcagctacctggtactgatgccgaataacccgcgcgcgggtggtatttcccgtcgcattgaaggcgacgatcgtaccgagttaaaagaagcgttggccagcctggaacttcctgaagggatggggcttatcgtgcgtaccgcgggcgtgggtaaatccgccgaagcgttgcagtgggatttaagcttccgcctgaaacactgggaggccattcagaaagccgctgaaagccgtcccgcgccgttcctgatccatcaggaaagcaacgtcatcgtacgcgcgtttcgcgactatctgcgtcaggatatcggtgaaatcctgatcgacaatccaaaagtgatggaaatggcgcgtcagcatatcgccgcgttgggccgcccggattttagcagcaaaattaagctgtacaccggtgaaatcccgttgttcagccattaccagatcgaatcgcagatcgagtcagcgttccagcgtgaagtgcgcctgccctccggcggctccatcgtcattgacagtaccgaagcgttaaccgccatcgatatcaactccgcccgcgcgactcgcggcggcgatatcgaagaaacggcgtttaataccaacctggaagcggccgatgagattgcccgccagttgcgtctgcgcgacctgggcggcctgatcgttatcgactttatcgatatgacgccggtacgtcaccagcgcgcggtagaaaaccgtctgcgtgaagcggtgcgtcaggaccgggcgcgtattcagattagccatatttcccgcttcggcctgctcgaaatgtcgcgtcagcgcctgagcccgtcgctgggcgaatccagccatcacgtgtgtccgcgctgtagcggtaccggcaccgtgcgcgataacgaatctctgtcgctgtccattctgcgcctgattgaagaagaagcgctgaaagagaatacgcaggaagtccatgccattgttccggtgccgatcgcctcttatctgcttaacgaaaaacggacggcagttaacgctattgagacgcgtcaggatggcgtccgctgtgtcatcgtcccgaacgatcagatggaaacgccgcactattccgtgctgcgcgtacgcaaaggggaagaaacgccgaccctgagctacatgctgccgaagctgcacgaagaagcgatggcgctgccttctgaagaagagtacgccgagcgtaaacgcccggaacagcctgcgctggcgacattcgctatgccagatgtgcctccggcgccgacgcctgtcgaaccggcggttagcgtcgccacggcgaaaaaggataatgttgccgccgcgcagcctgcccagccgggtctgtttagccgcttccttaacgcgctgaaacaactgttcagcggtgaagaaacgaaagccgtcgaaacagccgcgccgaaagcggaagaaaaagcggagcgtcagcaggatcgtcgcaagccacggcagaacaaccgtcgcgatcgtaacgaacgccgcgacacccgtgataaccgtgccggacgtgacggcggcgagagccgcgacgataatcgtcgtaaccgtcgccagacgcagcagcaaaatgcggaagcgcgcgatacccgccagcaggaaacggcggaaaaagtgaaaaccggcgatgaacagcaacagacgccgcgtcgcgaacgcagccgccgccgcaatgatgacaagcgccaggcgcagcaggaagtaaaagcgcttaaccgcgaagaacagcctgtccaggagaccgagcaggaagaacgcgttcagcaggttcagccgcgccgcaagcagcgtcagcttaatcagaaagtccgctttaccaacagcgcagtggttgaaacggttgacacgccggtcgtcgtcgacgaaccacgcccggttgaaaacgttgaacagcccgttccagcgccgcgtaccgagctggcgaaagttgatttacctgtcgtcgccgatatcgcgccggagcaggatgatagcgtagaacctcgcgataataccggtatgccgcgtcgctcccgccgttctccgcgccacctgcgcgtaagcggtcagcgtcgccgtcgctatcgtgacgagcgctacccgacacaatcgccgatgccgttaaccgtcgcctgcgcgtcgccggaaatggcgtccggtaaagtctggatccgctacccgattgtccgtcctcaggaaacgcaggttgttgaagagcagcgtgaagcagatctggcgctgccacaaccggttgtcgctgaaccgcaggttatcgctgcgaccgtagcgttagaaccacaagcgtcggtacaggcggtagaaaacgttgccgttgagccgcagaccgtcgccgaaccacaggcgccggaagtcgtcaaggtcgagacaacgcatccggaagtgattgccgcgccggttgatgaacagccgcaactgattgccgaaagcgatacgccggaagcgcaagaggttattgctgacgccgaaccggtagcagaaaccgccgacgcgtccattacggtggctgaaaacgtggctgatgttgtcgttgtcgagccagaagaagagacaaaagcggaagcggctgttgtggagcacacggcagaagaaaccgttatcgcaccggcccaggtggtggaaaagccgcaggacgttgtctgcgttgacgacgatcataatcacgccagcgcgccgatgacgcgtgcgccagcgccggaatatgtgccggaaaccccgcaccatagcgactggcagcgcccttccttccactttgaaggtaaaggcgcggcaggcggacacagcgctacacgtcatgccagcgccccggcgacacgcccacagccggtagaatga

SEQ ID NO: 368555 - DNA, 960 bp, Salmonella enterica
atgaaaacagaaacgccatccgtaaaaattgttgctatcgccgctgacgaagcggggcaacgcattgataactttttgcgcacccaactgaaaggggtaccaaaaagtatgatttatcgcatcttgcgtaaaggcgaggtgcgggtgaacaaaaaacgcattaaaccggaatacaaactggaagcgggcgatgaagtccgcattccgccggttcgcgttgctgaacgcgaagaagaggccgtgtcgccgcatttgcaaaaagtggcggcgttggcggacgtcattttgtatgaagacgaccatattctggtgctgaataagccttccggcaccgccgtacacggcgggagcgggttaagttttggcgtcatcgaagggctgcgggcgttgcgtccggaagcgcgattcctggaactggtgcatcgtcttgaccgcgatacctccggcgtgctgttggtggcgaaaaaacgctccgcgctgcgttcgctgcatgagcaactgcgcgaaaagggaatgcagaaagattatctggcgctggtgcgcggccagtggcaatcgcacgttaaaaccgtacaggcgccattattaaagaacattctgcaaagcggcgaacgtattgttcgcgtgagccaggaaggcaaaccgtcagaaacgcgcttcaaggtggaagagcgctatgccttcgccacgctggtgcgctgtagcccggtaacgggccgtacgcatcagattcgcgtacatacccaatatgccggtcaccctattgcgttcgacgatcgctacggcgaccgtgagtttgatcaacagcttaccgaagcgggaaccggtcttaaacgtctctttctacacgccgcggcgctgaagttcacgcatccgggaacgggcgaagtcatgcgcattgaagcgccgatggataacgccctgaagcgctgtctgcaggtgctgcgtaacgcaaaatag

SEQ ID NO: 368556 - DNA, 762 bp, Salmonella enterica
atggccaatactagctggatgcgctcatttactcagcgttggggaaaatacgttatcgtgccgctcgtgatcgcgatgctgaccggttgcgaagggaagggcgatagttcacgacgggctttcgttgagtatttgaatacgcaaatcattacgtctcccgtggtgggcgtctgtgagttgacgccagcccaacgtcaggcttttggtcattacgccgatgactacgatgtactattagctgcctacgggcaaatctttgctgtggtgtatgagaccggccaggaggataagatcaccggtgttattcagtctgagcgtgataatctggttttcctgaacgagctacgtgtggctcgtgacgtaaacaatcgatttatccttcggttgaaaaatgtgagtagtgaaaacagaaaaaaatattctgctttaaagctcccctctgatgtgaagcctgtctttgacgctgcgtggaataaaaccgtaacaccgctggatgagacgatgactcgctattattttctgcgcggaaagcggctcgaccagctggtcgcaatgggcgagtttctgcaaaaacagggaaataaagtccgctttgaaacggatggaaaagcggtttttgtcgacctggcagcaaaagaacactttcaggatcaacaatttaattttttcattacgcagaatgatataaaccatcttactcagcagatggttgaatttataaatagtcaacaagatgcggcggatgctggcggcgttaattaa

SEQ ID NO: 368557 - DNA, 225 bp, Salmonella enterica
atggggaattcattaacgcgcacgtacaccgctgttgataccctatgggataaaacgcaccgtacatcggttcgtaataccaatgctttttttctggtcggtgaatggattgaccaggaaacgggcccgcacgaagagagtgaagatcggcaggcgctaaattgttcacaacaagcgctttccagttggttagaactggaagcggtcgaaactgctccccaataa

SEQ ID NO: 368558 - DNA, 585 bp, Salmonella enterica
atgccccgtctcatccttgcgtctacctctccctggcgtcgcgcgctgctggaaaagctgacgattcctttcgaatgcgccacgccggatgttgatgaaacccccatgccgggcgaagcgccgcgtcagttggtgctgcggctggcgcaggcgaaggcgcaatcgctcgccgcgcgtttcccgaatcatttgattattggctccgaccaaatttgtgttctggacggcgaaatcaccggcaaaccgctgacggaagaaaaagcgcgtcagcaattagccaaagccagcggaaatattgtgacgttttataccggactggcactgtataactccgcctccgggcacttacaaaccgaagtggagccttttgacgttcattttcgccatttaagcgaagcggaaatagacgactatgtccgtaaagagcatccgctgcactgcgcgggaagttttaaaagcgaaggtttaggcattgcattatttgagcgcctggagggccgcgatccgaacacgctgatcggcttgccgcttattgctctgtgccagatgctgcgacgggaaggcttcaacccgctactgcagtaa

SEQ ID NO: 368559 - DNA, 522 bp, Salmonella enterica
atgcaaaaggtaaaattacccctgactcttgatccggttcgtaccgctcaaaaacgccttgattaccagggtatctatacccccgatcaggttgagcgcgttgccgaatctgtagtcagtgtggacagtgatgtggaatgctccatgtcgttcgctatcgataaccagcgtctcgccgttttaaccggcgatgcggtcgttacggtgtcgctcgaatgccagcgttgcgggaaaccgtttacccatcaggttcacacaacgtattgttttagccctgtccgttccgacgagcaggctgaagcactgccggaagcgtatgagccgattgaggtaaacgaattcggcgaaatcgatctgctggcgacggttgaagatgaaatcatcctcgccttgccggtagttccggtgcatgattctgaacactgtgaagtgtccgaggcggacatggtctttggcgaactgcctgatgaagcgcaaaagccaaacccatttgccgtattagccagcttaaagcgtaagtaa

SEQ ID NO: 368560 - DNA, 174 bp, Salmonella enterica
atggccgtacaacagaataaaccaacccgttccaaacgtggcatgcgtcgttcccatgatgctctgaccgcagtcaccagcctgtctgtagacaaaacttctggtgaaaaacacctgcgtcaccacatcactgccgacggttactaccgcggccgtaaggtcatcgctaagtaa

SEQ ID NO: 368561 - DNA, 1050 bp, Salmonella enterica
atggggggcgattttggtccttccgtgacggtgcctgcagcattgcaggcactgaacgctaattcgcagctcactcttcttttagtcgggaatcccgatattatcacgccattacttgccaaagctgactttgaacaacgttcgcgtctgcagattatccctgcacagtcagttattgccagtgatgcccggccttcgcaggcgatccgcgccagtcgcgggacatccatgcgtgtggccctggagcttgtgaaagaaggccgagccgaagcttgcgttagcgccggtaataccggggcgctgatggggctggcgaaattattgctcaagcctcttgaggggattgagcgtccggcgttggtgacggtattaccgcaccagcaaaagggcaaaacggtagtgcttgatttgggggccaacgtcgactgtgacagtaccatgctggtgcagtttgccgtgatgggcgccgttttggcggaagaggtcgtcgggatcaaaaatccccgcgtggcgctactcaatatcggggaagaagaaaccaaaggcctcgacagtattcgcgaagcctctttaatgttaaaaacagtcccaaccatcaattacatcggctaccttgaggcgaatgagttactgacgggaaaaaccgatgtactggtgtgtgacggctttacaggcaatgtcacacttaaaacgatggagggggttgtcagaatgttcctttcactgctgaaatcacagggcgaggggaaaaaacggtcgtggtggctgctgttattaaaacgttggttacaaaaaagcctgacgaggcgattcagtcacctcaaccccgaccagtataatggcgcctgtctgttaggattgcgcggcacggtgataaaaagtcatggtgcggccaatcagcgagcatttgcagtcgcgattgaacaggcagtgcaggcggtgcagcgacaagttcctcagcgaattgccgctcgcctggaatctgtatacccagccggatttgaaccgctggacgatggcaaaggcgtaaacctgcgggcgcacagataa

SEQ ID NO: 368562 - DNA, 954 bp, Salmonella enterica
atgtatacgaagattattggtactggcagctatctgcccgaacaagtgcggactaacgccgatctggaaaaaatggttgagacctctgacgagtggattgtcactcgtacaggtattcgtgaacgccatatcgccgcgcctaatgaaactgtcgcgacgatgggctttaccgctgcgaatcgcgcgattgagatggcggggatcgataaagaccaaattggcttgattgtggtggctaccacatcagcaacgcatgcatttccaagcgcggcatgtcagattcaaagtatgctcggtattaaaggttgcccggcgtttgatgtcgcggcagcgtgcgcaggtttcacctacgcgttaagcatcgccgaccagtacgttaaatccggcgcggttaaacacgcgctggtggtcggttccgatgtattagcccgcacttgcgatcctggcgatcgcggtacgatcattattttcggcgatggcgcaggcgcggccgtactgagcgcttctgaagaaccgggtattatctccactcatcttcatgccgatggccgttacggtgaattactgaccctgccgaatgccgatcgcgtaaatccggataacccgatttacctgacgatggcgggcaatgaagtctttaaagtggcggtcactgaactggcgcatattgtcgatgagacgctggcggctaataacctggatcgctcagaactcgattggctggtgccgcatcaggctaacctgcgtatcattagcgcgacagcgaaaaaactcggcatgtcgatggacaatgtcgtcgtcacgctggacaggcacggcaatacctccgcggcttctgtgccgtgcgcgctggatgaagccgtgcgtgacgggcgaattaaagccggtcagctggtattgcttgaagccttcgggggtggattcacctggggctccgcgctgattcgtttctag

SEQ ID NO: 368563 - DNA, 930 bp, Salmonella enterica
atgacgcaatttgcatttgtgttccccggtcagggttctcagagcgttgggatgttggccgagatggcggcaaattaccctatcgtagaagaaacgtttgctgaagcttctgcggctctgggatatgatctgtgggcgctcacccagcaaggtccagcggaagaactgaataaaacctggcagacgcagccggcgctattaaccgcttccgtcgcgctttggcgcgtttggcagcagcagggcggtaaaatgcctgcgttaatggcaggtcacagcctgggcgaatattccgcgctggtttgcgctggcgtcatcaactttgctgatgccgttcgtctggtggaaatgcgcggtaaattcatgcaggaagcggttccggaaggtactggcggcatgtctgcgatcatagggctggatgatgcctctattgctaaagcctgtgaagaatctgccgaagggcaggttgtttcaccggttaactttaactcgccgggacaggtggttatcgccgggcataaagaggcggtagaacgcgcaggcgcagcctgtaaagccgctggcgcgaaacgcgcgctgccgctgccggtgagcgtaccgtcgcactgcgcgctgatgaaaccagcggcagataagctggcggttgaattagccaaaattacctttaacgtgccaacggtgccggtagtaaacaacgttgacgtgaaatgtgaaaccgatgccgccgctatccgcgatgcgctggttcgccagttgtacaatccggtacagtggacgaagagcgtggaatttatcgcggcgcagggcgttgaacatctttatgaagtgggtccaggtaaagtcctcactggtctgacgaaacgtattgtcgacaccctgacagcgtcggcgctgaacgagccggcggcgctgtctgcggcacttacgcaataa

SEQ ID NO: 368564 - DNA, 735 bp, Salmonella enterica
atgagctttgaaggaaagattgcgctggtgactggtgcaagccgtggcataggccgcgcaattgcagagactctcgttgcccgcggcgcgaaagttatcgggactgcgaccagtgaaaatggtgcgaagaacattagcgactatttaggtgctaacgggaaaggtttgatgctgaatgtgaccgatcctgcatctattgaatctgttctggaaaatattcgcgcagaatttggtgaagtggatatcctggttaataatgccggtatcactcgtgataatctgttgatgcgaatgaaagatgatgagtggaacgatattatcgaaaccaatttatcatccgttttccgcctgtcaaaagcggtaatgcgcgctatgatgaaaaagcgttgtggtcgcattatcactattggttctgtggttggtaccatgggaaatgcaggtcaggcaaactacgctgcggcgaaagcgggcctgatcggtttcagtaaatcactggcgcgtgaagttgcgtcccgtggtattactgtcaatgttgtggctccgggttttattgaaacggacatgacgcgtgcgctgtctgacgatcagcgtgcgggtatcctggcgcaggtgcctgcgggtcgcctcggcggcgctcaggaaatcgccagtgcggttgcatttttagcctctgacgaagcgagttacatcactggtgagactctgcacgtcaacggcggaatgtacatggtttaa

SEQ ID NO: 368565 - DNA, 237 bp, Salmonella enterica
atgagcactatcgaagaacgcgttaagaaaattatcggcgaacagctgggcgttaagcaggaagaagtaaccaacaatgcttctttcgttgaagacctgggcgcagattctcttgacaccgttgagctggtaatggctctggaagaagagtttgatactgagattccggacgaagaagctgagaaaatcaccaccgttcaggctgccattgattacatcaacggccaccaggcgtaa

SEQ ID NO: 368566 - DNA, 1242 bp, Salmonella enterica
gtgtctaagcgtcgtgtagttgtgaccggactgggcatgttgtctcctgtcggcaataccgtagagtctacctggaaagctctccttgccggtcagagtggcatcagcctgatcgaccatttcgatactagcgcctatgcaacgaaatttgctggcttagtaaaggattttaactgtgatgacattatctcgcgcaaagaacagcgcaagatggatgccttcattcaatatggaattgtcgctggcgtacaggccatgcaggattctggccttgaagtgacggaagagaacgcaagccgtattggcgccgctatcggctccggtatcggtggtctcggtctgatcgaagaaaaccacagttcgctggtaaaaggcggaccgcgtaagattagcccgttctttgtcccgtcgacgattgttaacatggtagcaggccatctgactatcatgtatggcctgcgtgggccaagcatctctattgcgactgcctgtacttcaggcgtgcataacatcggccatgccgcgcgtatcatcgcctatggcgatgcggacgcgatggtggcaggtggcgcagaaaaagccagtacgccgctgggtgtaggcggttttggcgcagcgcgcgcgctgtcgacccgcaacgataacccacaggcggcgagccgtccgtgggataaagaacgcgatggttttgtactgggcgacggtgccggtatgttggtgcttgaagagtacgaacatgcgaaagcgcgtggtgcgaaaatctatgctgaaatcgtcggctttggtatgagcagcgatgcttaccatatgacgtcgccgccggaaaatggcgcaggcgctgcgctggcgatggttaacgcgttgcgtgatgccgcgattgagcctgctcagattggctacgtcaacgcgcacggcacgtcgacgcctgccggcgacaaagctgagacgcaggcggttaagtcagtctttggcgatgccgcaagccgagtgatggtgagctcgaccaaatcgatgaccggccatctgttgggcgccgcaggcgcagtagagtctattttctctattctggcgttacgcgatcaggccattccgccaaccattaatctggataacccggatgaaggttgcgatctggacttcgtgccgcatgaagcgcgccaggtcagcgatctggagtacgctctgtgtaactcctttggctttggcggaactaacggttccttgatttttaaaaagatctaa

SEQ ID NO: 368567 - DNA, 810 bp, Salmonella enterica
atgtttttaattaatggccatgcgcaggatcaacttgctgtaagcgaccgggcgacgcagttcggcgatggcagttttacgaccgcacgtattgttgatggcaacatttgccatctggaagcgcatcttcagcgcttgcaggttgcctgtgaaaaattacggatcgcttttagccattgggcgacccttcggcaagagatgacaatgttggccacagggcatgattcaggcgtgttgaaagtgatcattagccgtggtagcggtggccggggatacagcgccatgaattgtcaggcagctacccgaatcctctccgtttctgcttatcccgcttattattctcagtggcgtaagcaaggcatcactcttacccttagtcccataccgcttgggcgcaatccttatcttgccggattaaaacatctgaaccgcctcgaacaggtgttgattcgctctcatcttgagcagacggacgccgatgaggcgctggttcttgacagcgagggatgggttacggaatgctgtgcggctaatttgttctggcgtacaggcgacattgtttttacgccgcgtctggatcaggccggggtgaacggcattatgcgacaattttgtttacgccaactggcgcaatctcctttccaggttcttgaagtacaggcgagagaggaggcagtcaggcaggcggatgagattatcatttgcaacgcgctaatgccgattattcccatacgcgcctatcacgggacgtcgtattcttcgcgaacactgtttcaatttttagccccattttgtgagcatccgaattag

SEQ ID NO: 368568 - DNA, 1023 bp, Salmonella enterica
atgaaaaaattgtcaggcgttttccttctgctgttggttgtgctgggtattgccgcgggcgtggggatgtggaaagttcgccatctggcgaacagcacgttacttattaaaaacgagactatctttacgctcaaggcgggaacggggcggctggcgcttggcgaccagctttatgatgaaaaaatcattaatcgcccccgggtatttcagtggctgctgcgcgtggagcctgagttatcgcactttaaagcgggaacttaccgttttacgccggggatgaccgtacgggagatgcttgagttgctggagagcggcaaagaagcgcaattcccgttgcggtttgtggaagggatgcgccttagcgattacctgaaacagttacgagaggcgccgtatattcgccatacattgccggatgatgactacgccactgtcgctcaggcattaaagcttgcgcatccggaatgggtagaagggtggttctggcccgatacctggatgtataccgccaacaccagcgatgtcgctattctcaagcgagcgcaccaaaagatggtgaaagctgtcgatactgtctggaaaggccgggccgaggggctgccttataaagatcagaaccaactggtgacaatggcctcgattattgaaaaagaaacggctgtcgccagcgaacgcgatcaggtggcctcagtctttattaatcgcctgagaatcggtatgcgccttcagaccgatcccaccgtgatttacggaatggggacgagttataatggtaacttgtcgcgtgcggatctggaaaagccgacggcttataacacgtataccataaccgggctgccgccaggaccgattgcatcgcccagcgaagcgtcattgcaggcggcggcgcatccggcgaaaacgccgtatctctattttgtggccgacggtaaaggcggtcacacatttaacaccaatcttgccagccataatcggtcagtgcaggagtacctgaaagtgcttaaggaaaaaaatgggcagtaa

SEQ ID NO: 368569 - DNA, 642 bp, Salmonella enterica
atgggcagtaattatatcgtcatcgagggcctggaaggcgccggaaaaaccactgcgcgcgacgtggtggtggagacccttgagcaactgggtattcgtaatatgatttttacccgagagccgggcgggacgcaacttgccgaaaaactaagaagtctggtgctggatatccgatcggtaggcgacgaagtgattaccgataaagcggaagtgctgatgttttatgccgctcgcgtacagctcgtcgaaacggtaatcaaacccgcgctggcgcaaggcatatgggtgatcggcgatcgccacgatctctcgacccaggcgtatcaggggggagggcgcggcattgatcaaaccatgctggcgacactacgcgatgccgtgctgggcgattttcgtcctgacctgacgctgtatctggatgtcacgccggaagtcgggctaaaacgcgccagagcgcgcggcgatttggatcgcattgagcaggaatcttttgatttctttaaccggactcgcgcgcgctatctggaactggcggcgcaagactcgcgtatccgcaccattgacgcgacccagccgctggatgccgtcatgcgcgacattcgcgccacggtgacgaagtgggtgcaggagcaagcggcatga

SEQ ID NO: 368570 - DNA, 1005 bp, Salmonella enterica
atgaaatggtatccatggttacggcccgcctatgaaaaactggtagaaagttaccaggcgggacgtgggcaccatgcgctactgattcaggccttacctggcatgggcgacgaggcgctgtgctatgcgctgagccgttatctgttatgccagcagcctgagggccacaaaagctgtgggcattgccgtggttgtcagcttatgcaggctggcacgcatccggactattacacgctgacgccggataaaggcaaaagcagcctcggcgtagatgcggtacgcgaggtcagcgagaaattgtacgagcactcccgtctgggcggcgcgaaggtggtgtggattgcggatgcggcgctattaaccgacgccgccgccaatgcgttgctcaaaacgctggaagagccgccggagcaaacctggtttttccttgccagcccggagcctgctcgtctgttggcgacattacgtagccgctgtcggctgcatcatctggcggcgccgtccgaatcgtatgcgatgtcatggctgtcgcgagaagtgacggcgtcacaagaagcattgctcacggcgctacgcctgaatgcggggtcgcccggcgccgcgctggcgctgttgcagtctgaacgttgggcgcagcgtgaggcgctgtgtcaggcgttgatggacagtttacatacgggcgactggtatgcgttattaacggcgctcaatcatgagcaagccccggcgcgcctgcattggctggcgacgctgctggtagacgcgctgaaacgtcagcacggcgcgtcgtacctgacaaacgttgatgcggacgcggttgttgccgcgctggcggggccgctatccccggcgcgtattcaggcaatcctgaacgatgtttgccattgtcgtgatcaattacttcatgtgaccggattaaatcgcgaactggtattaaccgatctcattctccgcatcgagcattacctgcaaccaggcaccttgttgcctgttcctcatctttga

SEQ ID NO: 368571 - DNA, 798 bp, Salmonella enterica
atgtttttagtcgactcacactgccatcttgatggtctggattatcaatctttgcataaggacgtggacgatgtgctggcgaaagccgccgcgcgcgatgtgaagttctgtttagcggtggcgacgacgctgccggggtatcgccatatgcgcgagctggtgggcaagcgcgataatgtggtcttttcctgcggcgtgcatccgttaaatcaggatgaagcatatgacgtagaagaactgcgcctccttgctgcagaagacgatgtggtggcgatgggcgagaccgggcttgattacttttacacgcctgagaccaaaatccgccagcaggcgtcttttattcatcatatccagattggccgcgaattgcataaaccggtgattgtccatactcgcgacgcgcgtgccgatacgctggctatcctgcgcgaagaaaaagtgacggattgcggcggcgtactacactgttttacagaagacagagaaacggccggcaaattgctggatctggggttttatatctctttttccggcatcgtaacgttccgtaacgctgaacagttgcgtgatgcggcgcgctatgtgccgctggatcggttattagtcgagaccgattctccttatctggcgccggtgccgcatcgcggtaaagagaaccagcctgcgatggtacgcgacgtcgcagaatatatggcggtattgaaaggggttgccgttgaagaactggcgcagatcaccaccgataactttgctcgcctgttccatattgacgcgtctcgcctgtcatcaatccgttaa

SEQ ID NO: 368572 - DNA, 1434 bp, Salmonella enterica
atgtttaagaatgcatttgctaacctgcaaaaggtcggtaaatcgctgatgctgccggtatccgtactccctatcgcaggtatcctgctgggtgtcggttccgctaacttcagctggctgccagccgttgtatcgcacgttatggcagaagcgggcggatctgtttttgccaatatgccgctgattttcgctatcggcgtggcgttgggcttcaccaacaacgacggcgtttcggctctggcggcggtagtagcgtatggcatcatggtgaaaaccatggctgtggttgcgccgctggttctgcatttacctgctgaagagatcgccgctaaacaccttgctgatacgggtgttctcggggggattatctccggtgcgatcgcagcgtatatgtttaaccgcttctaccgtatcaaactgcctgagtatctgggcttctttgcgggcaaacgcttcgtgccgatcatttcgggtctggccgctatttttaccggtgtggtgctgtctttcgtatggccgccaatcggtacggctatccaggcgttctcgcagtgggcggcttatcagaatccggttgtcgcgtttggtatttacggttttatcgagcgttgcctggtgccgtttggtctgcatcatatctggaacgttcctttccagatgcagatcggcgaatacaccaacgcagcgggtcaggtattccacggcgacattccgcgctatatggcgggcgaccggacggcgggtatgttgtctggcggcttcctgttcaaaatgtacggtctgccggctgcggccattgctatctggcactctgctaaaccggaaaaccgcgcaaaagtgggcggtatcatgatttccgccgcgctgacctcgtttttgacgggtattaccgagcctatcgagttctccttcatgttcgtggcgccgatcctgtacatcattcacgcgattctggcaggtctggcattcccgatctgtatcctgctggggatgcgtgacggtacgtcgttctcccacggtctgatcgactttatcgtgctgtccggtaacagcagcaaattgtggctgttcccgattgttggtgccggttatgcgattgtgtactacaccgtgttccgtgtgctgatcaaagcgctggatctgaaaacgccgggtcgtgaagacactactgatgacgcaaaagcgggcgcgaccagcgaaatggcgccggctttggttgcggcgtttggcggtaaagagaacatcactaacctggatgcctgtatcacgcgtctgcgcgtgagcgtagccgatgtagcgaaagtggatcaggctggcctgaagaaactgggtgcggcaggcgttgtcgtcgcgggttccggcgttcaggctattttcggtacgaaatccgataacctgaaaacggaaatggatgagtacatccgtaacagctaa

SEQ ID NO: 368573 - DNA, 2175 bp, Salmonella enterica
atgtctttcattcaataccgccgggacaaacaccttccgtccaccgccgcaccgtcgctgttagctatgggtatggcgatggcatttatgcctgccgccttcgcggctgaggataccgttattgtcgaaggcgcgacgaccgctgacgccgtaaaccgcgaagaacaggattacagcgtgaaaacgaccgcagcgggcaccaaaatgccgatgactcagcgcgatatcccgcagtcggtcagtattgtcagccagcagcgtatggaagaccagcagttgcaaaccctgggcgaagtgatgaccaatacgctagggatcagcggaagccaggctgactccgatcgcatcagctattactcgcgcgggtttgaaattgacaactatatggttgacggtattccaacgtattttgagtcccgctggaatctgggcgatgcgctaacggataccgcgctgtatgagcgcgtggaggtggttcgcggcgcgaatgggctgatgaccgggaccggtaatccttcggcctcaattaatatgatccgtaaacacgccaccagtcgggagttcaaaggtaacgtttccacagaatacggtagctggaataagcagcgttacgtcatggatctgcaaagtccgctcaccgcggacggcaatgtccgtgggcgcatcgtggcgggttatcagaataatgattcctggctggaccgctataacagtgagaaagcgttcttttccggaattgtcgatgccgatctgggtacaaccaccaacctttcagccggttatgaatatcaaaaaattgatgtcaacagcccaacctggggcggtctgccgcgctggaacaccgatggcagcaaaaatagctatgaccgcgcgcgtagtaccgccccggactgggcttataacaacaaagagataaataaattcttcgtcacgcttaaacagcgttttgccgaaagctggcaggcgaccctgaatgcgacccatactgaggtcaaattcgacagtaaaatgatgtatatcgatgcgttagtcgataaagagacaggtacgctggtgagtccttatggcgcaagctaccccgtggtcggcggtacgggctggaacagcggcaagcgcaaagtagatgccatagatctctttgccgatggcgcttatgagctgtttggccgtcagcacaatatgatgtttggcggcagttatagtaaacagaataaccgctattttagcgcctgggcgaacgtctttccggacgacattggcaacttcagcgcctttaacggtaatttcccccaaacccactgggcgccacaaaatctggcgcaggacgataccacgcatatgaaatcgctgtatgccgctacgcgcatttcgctggccgacccgctgcatctgattctcggcgctcgttataccaactggcgtgttgatacactgacctacagcatggagaaaaaccataccacgccgtatgccgggctgatttatgatatcaacgacaactggtccgcttatgccagttatacctctatctttcagccgcagaataaacgcgacaaagcgggtcaatatctggctccgattaccggtaataactatgaagcgggtctgaagtccgactggatgaacagtcgcctcaccaccacgttgtccgtgttccgcattgagcagaataacgtcgctcaggcaaccactattcccatccctggcagtaatggggagtttgcctggaagtctactgacggaacggtgagcaaaggcgtcgaatttgaagtgaacggcgcaattaccgataactggcagatgactttcggggctacccggtatgttgccgaggacaatgaaggtaacgccgtgaaccctaatctcccgcgcaccagcgtgaagttattcacccgctatcgtctgccggcgataccggagctgacggtcggcggcggcgtgaactggcagaatcgggtttacaaagataccacgacgccgtacggcactttccgcgccgaacagggcagctatgcgctggtcgatctgtttacccgctatcaggtgacgaaaaatttctccgtacagggaaacatcaacaacctgtttgataaaacctacgacaccaatattgatggttccattgtttacggcgcgccgcgtaacgtcagcctcaccgccaattatcagttctga

SEQ ID NO: 368574 - DNA, 378 bp, Salmonella enterica
atgaaaaaggaaaacgtcgtggcagaagaaactatattcagcaaaattattcgtcgtgaaatcccttcggatatcgtttatcaggatgagctggtcaccgcctttcgtgatatttcaccgcaggcgccgacgcatatcttgattattcccaatatcctgatcccaaccgtcaatgacgtgacggcggaacatgaacaggcgttaggtcggatgatcaccgtggcggcgaaaatcgccgaacaggaaggcattgccgaagatgggtatcgtttaatcatgaataccaaccgtcatgggggccaggaggtttatcatatccatatgcacctactgggcggccgcccgctaggcccgatgctggcgcataaaggcttgtaa

SEQ ID NO: 368575 - DNA, 375 bp, Salmonella enterica
atgatcaaaggatgcatcgcggtttctctgggcttgctgctgcttaccggctgccggtcacaccctgaaattccggtaagcgacgcgcagtcgctggtgatggagtccacggttctggcggcgggcgtcaccgcagagccgcctgaactgacggcgtctgatatccagccatcagcctcttcccgcgtctataacgaaaggcaagagcccataaccgttcattatcggttttactggtatgacgcgcgggggctggagatgcatccgctggaggcgccgcgtagcgtaaccatacccgcgcgttcgtcggtaacgctatttggcagcgccaattatctgggggcgcataaggtcaggctttatctttatttgtga

SEQ ID NO: 368576 - DNA, 639 bp, Salmonella enterica
atgacaaaaatgcatcgctacgccgccattgctgcgctggcgatatttctctccgggtgtatggcgcaacgtcaacctgcgccagttgaagaggtaaaaccagcgccagaacaacccgcgcagccaccgcaacctcctgttgtgccgtctgtgccaaccattccacagcaaccggggccgatcgaacatgaagatcaaacgggccagccagcgcctaaggtgcgccactatgactggaacggcgcgatgcaaccgctggtcagcaaaatgttgcaggctgatggcgtgacggccggaagcgtattgcttgtcgacagcgtgaataaccggacgaatgggtcgttaaatgcgaacgaggcaacggaaacgttacgtaatgcgctggcgaacaacggtaaatttacgctggtctccgtacagcaactctcgatggcaaaacagcagttagggttgtctccgcaggatagtctgggaacgcgcagtaaagctattggcattgcgcgcaatgtcggggcgcaatatgtactttactccagcgcatccggtaacgttaacgcgcctgcattacagatgcagttaatgctggtgcaaacgggcgagataatctggtcaggtaaaggtgcggtccaacaacaataa

SEQ ID NO: 368577 - DNA, 825 bp, Salmonella enterica
gtgcggtccaacaacaataatcccttaacgcgcgacgagatcctgtcgcgctattttccccagtatcgtcccgccgtcgccgcatcgcaggggctaagcggcgggagctgtattattgcccacgatactcaccgtatcgtgctgcgccgtcatcacgaccccgacgctccaccagcccattttttacgtcattaccgcgccttatcccaattgccggccagtcttgcgccgcgagcgcttttttatacgccgggctggatggcggtagaatatctgcatggtgtggtaaattccgctctgccagatgccgacgaactggcggccttactgtatcatttgcatcaacagccgcgttttggctggcgtatcgcgctatcgccactattggcgcagtactggtcgtgttgcgatccggcgaggcgtacgccgttttggttgcggcggctcaaacagttgcaaaaaaacggtgaacctcgcccgctgcggctcgcgcctttgcatatggatgtccatggcgacaatatagtattaacgtccgccgggttgagactgattgactgggagtatgccggcgacggcgatattgcgttggagctggcggcagtatgggttgaggatgaacgccagcaccgacaactggcagacgcgtatgcagcgcgcgcgcgaatcgacgcccggcagctatggcgacagatacgattatggcacccctgggtcattatgctaaaagcagggtggttcgaataccgctggcgacaaaccggcgagcaacaatttatcaggctggccgatgaaacctggcgccagctacgtatgaaaggataa

SEQ ID NO: 368578 - DNA, 1026 bp, Salmonella enterica
gtgggcccagtaatgttgaatgtcgaaggatgtgagctggatgcggaggagcgcgagatactggcgcatccgctggttggcgggcttattctgttcacgcgtaattaccatgacccggaacagctgcgcgaattagtgcgccagattcgggcggcatcgcgtaaccatctggtggtggccgtcgatcaggaaggcgggcgcgtacagcgtttccgtgaagggtttacccgcctgcccgcggcgcaatctttttttgcgctgcatgggctggaagagggggggcgactggcgcaggaggctgggtggctgatggccagcgaaatgatcgcgatggatattgatatcagttttgcgccagtgctggacgtcgggcatatcagcgcggcaattggcgagcgttcttatcatgccgatcccgcaaaagcgttggcaatggcaacacgctttattgacggtatgcatgacgccgggatgaaaacgaccggtaagcatttccccggccacggcgcggtcacggcggactcccacaaagagacgccgtgcgatccacgtcctgaaacggacatccgtggcaaagatatgtcggtgttccgcacgctgattagcgagaataaactggatgcgattatgcctgcgcacgtgatctaccgcgctatcgatccgcgtccggcaagcggttcgccgtactggctgaaaacggtgctgcgtcaggagttaggctttgatggcgtcattttctccgacgatctgtcgatggagggcgcggcgattatgggcagctatgctgagcgcgctcaggcgtcgctggatgcgggttgcgatatgattctggtctgcaataatcgtaaaggcgcagtcagcgtgctggataatctgtcgccgatcaaagcagaacgtgttacacgtttgtatcataaaggttcattttcacgccgggagctcatggactcagcacgctggaaaacagccagcgcccagctcaaccagttacatgaacgctggcaggaagaaaaagcaggtcattaa

SEQ ID NO: 368579 - DNA, 543 bp, Salmonella enterica
atgattatttatttacacggttttgattcaaatagtccgggcaaccatgaaaaagtgttgcaattacagtttatcgacccggatgttcggctggtaagctacagtacgcggcatcctaagcacgatatgcagcatctgctgaaagaagtggacaaaatgttgcagttgaatgtggacgagcgccctttaatctgtggcgtggggctgggcggttactgggcggagcggattggctttttgtgcgatatccgtcaggtggtttttaacccgaacctgttcccctatgaaaacatggaggggaaaatcgatcgcccggaagaatatgcggacatcgctacaaagtgcgtgaccaactttcgcgaaaaaaatcgcgatcgttgtctggtgatcctctcgcgtcatgacgaagcgctggacagccaacgctcagcgcaagcgcttcacccgtattatgaaattgtgtgggatgaggaacagactcacaaattcaaaaatatttcgccgcatttgcaacgtatcaaagcgtttaaaacgctgggataa

SEQ ID NO: 368580 - DNA, 1305 bp, Salmonella enterica
ttgactacaccattaaaaaagatcgtgattgtcggcggcggcgctggcgggctggaaatggcgacgcagttaggccataaactggggcgcaagaaaaaagcgaaaatcacgctggtagacagaaatcacagccatctgtggaaaccattgctgcacgaagtggcgactggctctctggacgaaggcgtggatgcgctgagctatctggctcatgcgcgtaatcatggtttccagttccagctggggtcggtgatggatatcgatcgcgaagcgaagaccatcaccattgccgagttgcgtgatgaaaagggcgaactgctggtgccggagcgcaaaatcgcgtatgacacgctggtgatggcgctgggcagcacctctaatgatttcaacacgccgggcgtgaaagagcactgtatcttcctcgataacccgcatcaggcgcgccgttttcaccaggagatgctgaacctgttcctcaagtattcggctaatctgggcgcgaacggtaaggtcaatatcgccatcgttggcggcggtgcgacgggggttgagctgtcggctgaactgcataatgcggtaaaacagctgcatagctatggttataaggggctgaccaacgacgcgctgaacgtgacgttggttgaggctggcgagcgtattctgcctgcgttgccgccgcgtatctccagcgccgcgcataatgaactgaccaaactgggcgttcgcgtgctgacgcaaactatggtcaccagcgccgacgaaggcggtctgcatacgaaagaaggtgaatatattcaggccgatctgatggtgtgggcggcgggtatcaaagcgccagattttatgaaagagattggtggtctggaaacgaaccgcattaaccaactggtggtggaaccgacgctgcaaaccacgcgcgatcctgatatttatgcgattggcgactgcgcttcctgcgcacgtccggagggaggttttgtgccgcctcgcgctcaggcggcgcatcagatggctacctgcgcgatgaataacattctggcgcagatgaatggcaaaccgctgaaagcttaccagtataaagatcatggatcgctggtctctctgtccaacttctctaccgtgggtagtctgatggggaacctgacccgcggttcaatgatgattgaaggacgtatcgcccgcttcgtgtatatctcgctataccgtatgcaccagatagcgctgcatggatactttaaaaccggcctgatgatgctggtgggcagtattaaccgcgtcattcgtccgcgtctgaaactgcattaa

SEQ ID NO: 368581 - DNA, 540 bp, Salmonella enterica
gtgaataaatcaatgttggcgggtatagggattggcgtagcggctgcgctgggtgtggcggcagtggccagtctcaacgtatttgatcgtagtccgcaatatgcgcaggtgatatcggctaaaccgattaaagagacggtaaaaacgccgcgtcaggagtgccgtaatgtcacggtcacgcatcgcagaccggttcagaacgaaaaccgtattgccggctcggtgcttggcgcagtagcaggcggcgtgattggacatcaatttggcggcggtcgtggtaaagatgtggcgacggtcgtcggggcgctgggcggcggttatgctggcaatcaaatccaggggtcaatgcaggaaagtgatacttacactaccacgcagcaacgctgtaagacggtgtatgacaaatctgaaaagatgcttggctacgacgtgacctacaaaattggcgatcagcagggcaaaatccgcatggataaagaccccggaacgcaaattcccctcgacggcaatggccaactggttctgaataacaaagcataa

SEQ ID NO: 368582 - DNA, 636 bp, Salmonella enterica
atgacaacggataccacgagttgcgcgaagaaaagccgtggccgaccaaaagtgttcgacagggaagccgcgcttgataaggccatgactctcttctggcagcacggctatgaagcaacttcgcttgccgatctcgtagaggctaccggggcgaaagcgcctactctctatgcggaattcactaataaagaaggattatttcgcgctgtcctggatcgctacatcactcgctttgcctcaaagcacgaagcccagctcttttgtgaagagaaaagcgtggaatcggcgctggaagattacttcacagaaattgccgcctgctttaccagtacagacacgccggctggctgctttatgattaatacgtccgccaccctcgccgcctcctcgcgcgatatcgcccgcacggtaaaatcacgccacgccatgcaggaacagacgctcatccagtttctgcgccaacgtcaggagcgcggtgaaattccggcgcactgtaacccgcaggcgctcgcggaatatataaactgtattttacagggaatgtcgatcagcgcccgtgaaggagccaccttcgaacaactgatgcaaattacgcgtacgactctgcgcatctggcctgaactacttaagtcctga

SEQ ID NO: 368583 - DNA, 258 bp, Salmonella enterica
atgaaaaacgtaaaaaacctcatcgctgctgccgtactgagttcgctctcattcgccagcttcgccgccgttgaagttcaggcaacgccagaaggtcaacagaagttcggtaccatttccgcgaatggcggcacgaatctgggctcgctggaagatcagctggcgcaaaaagcgcaggagatgggggcgaagtctttccgtattacctctgttaccggcccgaatacccttcacggtacggcggtaatctataagtaa

SEQ ID NO: 368584 - DNA, 966 bp, Salmonella enterica
atgttcaacaatacgcgactctctcgctggtgggcgttgtttgcgcttaccgcgaccatcatgcttgcccttcccgcgcaggcgaatacgtggcctcttccgccccccggcagtcgactggtgggagaaaataaattccatgtcgttgaagacgacggcggctcgctggaggcgatcgccaaaaaatataacgtgggctttttagccctgttacaggccaaccccggcattgatccttacgtgccacgcgcaggcagcgtgctgacgattccgctgcaaacgctgctaccggacgcgccacgtgaagggattgtcattaacctcgcggaattacggctttactattatcaaccggggaaaaatacggtcacggtctaccctatcgggattggccaactgggcggcgataccctgacgccaacgatggtgacgaccatttcggataaacgcgccaatccaacctggacgccgaccgccaatattcgcgcacgttataaagcgcaaggcatcgatctccccgccgtggtgcctgccggtcccgataacccaatggggcatcacgcgattcgtttagcggcctacggcggcgtctatctgttacatggcacgaatgccgattttggcattggtatgcgcgtcagttccggctgtatccgtctgcgcgacggtgatatagagacattgttccgtcaggtcacgccgggaaccaaagtgaatattatcaatacgccgattaaagcctcggtggagccaggcggcgtgcgactggtggaagttcatcagccgctgtctaaaaatataggcgacgatccgcaggtgctgccgattgtgctgaatggcccgatgcaggcctttaaggacgcgccgcagaccgatgctgcggtgatggaacatgttatggaagtgcgttccggaatgccggtggatgtaacccgtcaagcagaggcgaaaccgcagtcgctgtaa

SEQ ID NO: 368585 - DNA, 3447 bp, Salmonella enterica
atgcctgaaaaacaacgttacacgctgccgacaaaagcgggcgatcagcgccagttgggcgaacttaccggtgccgcctgcgctacgctggtggcggagatagccgaacgccatgccggtccggtggtactcatagcgcctgacatgcaaaatgctctgcgattgcatgatgaaatccgccagtttaccgatcagatggtgatgaacctggcggactgggaaacgctaccgtatgacagcttctccccgcatcaggaaattatctcttcgcgcctgtccacgctctaccagttgccgtcgatgcagcgcggcgtcttgattgtaccggtaaacaccctgatgcagcgcgtttgtccgcatagctatctgcatggtcatgcgctggtgatgaaaaaaggccagcggctgtcccgcgacgctctgcgcgcgcagcttgacagcgccggttatcggcatgtcgatcaggtgatggagcatggcgaatacgcgacgcgcggcgcgctgttggatctctttccgatgggcagcgaacagccttatcgcctcgacttttttgatgatgaaatcgacagcctgcgtctgtttgacgcggatacccagcgtacgctggaggaggtcgaggccatcaatttgttgcccgcgcacgaatttcctaccgacaaagccgctattgagcttttccgtagccagtggcgcgatacctttgaggtaaaacgcgacgccgaacacatctatcagcaggtcagcaaaggcaccttgcccgccgggatcgaatactggcagccgctctttttcagcgaaccgttaccgccattatttagctatttccccgccaatactctggtggtgaatactggctcgctggaaaccagcgccgaacgctttcaggccgatacgctggcgcgttttgaaaatcgcggcgtcgatcctatgcgcccgcttttgccgccggaagccctctggctacgggtagatgagctcttttccgagcttaaacgctggcctcgcctccagcttaaaaccgaccatctgccggaaaaagccgccaataccaatcttggtttccagaaattaccggatttggctatccaggcacagcagaaagcgccgctggacgcgctgcgtaagttcctcgaatctttcagcggcccggtgattttttctgtggaaagcgaaggacgccgcgaagcgctgggagagctcctggctcgcataaaaatcgcgccgaagcggatattacgccaggacgaggcgcaggatgcgggacgctatctgatgattggcgccgcagaacatggctttatcgacacccaacgcaatctggcgctgatttgtgaaagcgatcttttgggtgagcgggtggcgcgtcgccgcctggattcccgccgcacgatcaacccggatacgttgattcgtaacctggcggagctccacgtcggtcagccggtagtgcatctggagcacggcgtcggacgctatgccggcatgaccactctggaggctggcggcatcaagggtgagtatctgatgctcacctacgccaatgacgccaaactgtatgtgccggtctcctcattgcatctgattagccgctatgccggcggcgcggaagaaagtgcgccgctgcataaactgggcggcgacgcctggtcgcgcgcccggcagaaagcggcggaaaaagtgcgcgatgtcgcagcggaactgttggatatttatgcgcaacgggcggcaaaagaggggtttgcctttaagcatgatcgtgagcagtatcagttattctgcgacagcttcccgtttgaaacgacgcccgatcaggcacaggcgattaacgccgtattgagcgatatgtgccaaccgctggcgatggacaggctggtgtgcggcgacgtcggcttcggcaaaaccgaagtggcgatgcgcgccgcgttcctggcagtggaaaaccataaacaagtagcggtactggtgccaaccacgctgctggcgcagcaacactatgataacttccgcgaccgtttcgccaactggccggtacgcattgagatgctgtcccgctttcgcagcgccaaagagcagacacaaatcctggcggaagccgccgagggtaagatcgatattctgatcggtacgcataaactgctacaaagcgatgtgaagctgcgcgacctgggcctgctgattgtcgatgaagagcaccgtttcggcgtgcgccacaaagagcgaattaaggcgatgcgcgccgatgtcgatattctgacgctcacggcgacgccgatcccgcggacgctgaatatggcgatgagcggtatgcgcgatctctccattatcgccactccccctgcccgtcgtctggcggtaaaaacctttgttcgcgagtatgatagcctggtagtaagggaagcgattctgcgtgaaatcctgcgcggcggtcaggtttactatttgtacaatgacgtcgaaaatattcagaaagccgcagagcggctggcggaactggtaccggaagcgcgaatcgctataggccacgggcagatgcgtgaacgtgagctggaacgggtcatgaacgatttccaccatcaacgttttaacgtgctggtgtgtactaccattatcgaaacggggatcgacattcccaccgctaacacgatcatcattgaacgcgcggatcatttcggcctcgcgcagttgcaccagctgcgtggccgcgttgggcgctcgcaccaccaggcctacgcctggctgttgacgccacatcctaaggccatgaccaccgatgcgcaaaaacggctggaggcgattgcgtcgctggaggatttaggcgccgggtttgcgctggcgacccacgacctggagatccgcggcgcgggcgaactgcttggcgaagagcaaagcggctcaatggaaaccattggcttctcactctacatggaactgctggaaaacgccgtcgatgcgctgaaagcaggccgcgaaccctcgctggaagatctcaccagtcagcaaacggaagtcgagctgcgaatgccgtcgttgctgccagatgattttattccggatgttaatacccggctgtcattctataaacgcattgccagcgcgaagaacgaaaacgagctggaggagatcaaagtggaattgatcgaccgcttcggcctgctgcccgatccggcgcgtaatctgctggatatcgcccgcctgcgccaacaggcgcaaaagctcggcatccgaaaactggagggtaacgagaaaggcggaacgattgagttcgccgagaaaaaccacgttgaccccgcctggcttatcgggttgctgcaaaaacagccgcagcatttccgtctggatggcccgacgcgcctcaagtttattcaggatttaagcgaacgtaaaacgcgtatagactgggtacgccagtttatgcagcaactggaagaaaacgctattgcataa

SEQ ID NO: 368586 - DNA, 1200 bp, Salmonella enterica
atgtatcaacctgtcgctctattcatcggcctgcgttacatgcgcgggcgtgcagcagatcgcttcggtcgcttcgtttcctggctttccactatcggcattaccctgggggtgatggcgctggtcacggtattgtcggtgatgaacggttttgagcgcgaactgcaaaataacattcttggtttgatgcctcaggccatcctctctgctgaacatggttctcttaacccgagtcagatgccggaaaaagcggtgaatctgcaaggcgttaaccgtattgcgccgctgacgacgggcgatgtcgtactgcaaagcgcgcgtagcgttgcggttggcgtgatgttgggtatcgatccggcgcaaaaagatccgttaacgccgtatctggtcaatgtgaagcaaagcgaattacagccgggtaagtataatgtcatcctcggcgagcagctcgccggacagttaggggtcaaccgtggcgatcagattcggctaatggtgccatctgccagccagtttacgccaatgggacgcctgcccagccagcgtctgtttacggtgattggcacatttgccgccaatagcgaggtcgatggctatgaaatgctggtcaatattcaggacgcgtcgcgtttaatgcgctatccggcaggcaatattaccggctggcgtctgtggctggatgaaccgctgcaagtcgataccctcagtcaacagacgctgccgcaaggcacgaagtggcaggactggcgcgaacgcaaaggcgagttgttccaggctgtgcgcatggaaaagaacatgatgggattgttgctgagtctcatcgtggcagtcgcggcttttaacattattacttcgttgggcctgatggtcatggagaagcagggcgaagtggcgattttacaaactcaagggctgacgccgcgacaaattatgatggtctttatggtgcagggcgccagcgccgggattatcggcgcgctgttgggcgccgcgctgggcgcattgcttgccagccaactgaataacctgatgccgatcatcggcgcgtttctggatggcgctgcgttgcccgtggcgatagagccgttacaggtgatcgttatcgctctggtggcaatggccatcgcgctgctttctacgctttatccttcctggcgcgctgccgccactcaacccgctgaggctttacgttatgaataa

SEQ ID NO: 368587 - DNA, 702 bp, Salmonella enterica
atgaataagatcctgttgcaatgcgacaacctgtgcaaacgctatcaggaaggcaccgtacaaaccgacgtgttgcacgatgtcagcttcagtatcggcgaaggcgaaatgatggcgatcgtcggcagttccggttcgggtaaaagtacgttgctgcatctgttaggcgggctggatacgcccacctccggcgatgtgatttttagcggccagccgatgagcaaactctcttctgcggcaaaagcggaattacgtaaccagaaactggggtttatctatcagtttcatcatctcctgccggattttacggcgctggaaaacgtggcgatgccattattgattggcaaaaagaaaccggcggagattgacgctcgggcgcgagaaatgctgcacgccgtagggctggagcatcgcgcaacccatcgaccttcggaactttccggcggtgagcgccagcgtgtcgcgatagcgcgcgcgttggtgaataacccgcgtctggtactggcggatgagccgaccggtaatctggatgcgcgtaatgccgacagtatttttgagcttctgggcgagttaaatcgtctgcagggaaccgcgtttctggtggtgactcacgatttgcaactggcgaaacgtatgagccgccagcttgagatgcgcgatggccgcctgacggcggaactgagcctgatgggggcggagtaa

SEQ ID NO: 368588 - DNA, 1245 bp, Salmonella enterica
atggcgtcgcctttatcattgttaattggcttgcgcttcagccgtgggcggcggcgcggcggtatggtttcgctcatttccgtcatttctaccatcggtatcgcgctgggcgtggcggtattgattgtcggtttaagcgcgatgaacggtttcgaacgcgagttgaataaccgtattctggcggtggttccgcacggggagattgaagcggtcaatcagccgtggaccaactggcgtgaagcgctggcaaaagtgcagaaggtgccgggcattgccgccgccgcgccgtatatcaattttaccggcctggtagagagcggggcgaatttgcgcgccattcaggttaaaggcgtcgaccctaagcaagagcagcagcttagcgcgttaccgtcatttgtgcaaaatcacgcctgggatcatttcaaagcgggcgaacagcagatcattatcggcaaaggcgtcgccgatgcgctgaacgtgaaacagggcgactgggtgtccatcatgatccccaatgcgaatgccgaccataagctgctccagcccaaacgcgtgcgtttgcatgtcatcgggattctgcaactgagcggccagctcgatcacagcttcgccatgatcccgcttgaggatgcgcagcagtatctggatatggggtccagcgtttccggtatcgcgcttaaagtccacgacgtgtttaatgcgaacaaactggtgcgtgacgcgggtgaagtgactaacagctatgtctacattaagagctggatcggcacctacggctatatgtatcgcgatatccagatgattcgcgccattatgtatctggcgatgattctggtgatcggcgtggcctgttttaatatcgtttccaccttagtgatggcggtaaaagacaaaagcggcgacattgcggtattaagaacgctgggggcgaaagatggtttgattcgtgccattttcgtctggtacgggctactggcgggcttgctgggcagcttgattggcgtggcgatcggcgttgtcgtttcgcttcagcttaccgccattattaatgggattgaaaaggagatcgggcatcagtttttgtccggcgatatctattttatcgacttcctgccatccgaattacattggctggacgttgtttacgtactggtcacggcgttgttgttaagcttactggcgagctggtatccggcgcggcgggcgagcaacattgaccctgcgcgagtattgagcgggcagtaa

SEQ ID NO: 368589 - DNA, 912 bp, Salmonella enterica
atgtattacgggtttgacattggcggaacaaagattgcgttaggcgtatttgactcaacgcggcggctgcagtgggaaaaacgggttcccacgccccataccagctatagcgcctttttagacgccgtatgcgaactggtcgcggaagccgaccagcgatttggcgtaaaagggtcggtagggattggcatacccggtatgccggaaaccgaagacggcacgctgtacgccgcgaatgtcccggcagccagcggtaagccgttgcgcgccgatctcagcgcccgactggatcgcgatgtgcgtctggacaatgacgctaactgttttgccttgtccgaagcctgggatgatgaattcacgcaatatcctttggttatggggcttatcctcggcaccggcgtcggcggtggcctggtgctaaacgggaagccgattaccggtcagagctatatcaccggcgagtttggtcatatgcgtttgccggttgacgcgctaacgttgatggggtttgattttcctctccgccgttgtggatgcggtcagatgggctgcattgagaattatctgtccgggcgcgggtttgcgtggctatatcagcattattatgatcaatcgctgcaggcgccggagattatcgcgttgtgggagcagggcgatgagcaggcgcacgcgcatgttgagcgctatctggatttactggcggtttgtctggggaatatactgacgattgtcgatcccgatttattggtgatcggcggcggactatcgaactttacggcaataacaacgcaactggcggaaagactgccgcgccatctcctccctgttgcccgcgcgccgcgcattgagcgtgcgcggcatggggatgcaggtgggatgcgcggtgctgcttttttacatcttaccgactaa

SEQ ID NO: 368590 - DNA, 822 bp, Salmonella enterica
atgcagtcgcgtcggtttcatcgattaagccgctttcgtaaaaataaacgtctgttgcgtgaacgtctgcgccagcggatctttttcagagacagagtggtgccggaaatgatggaaaacccaagagtattagtccttacaggtgcaggaatttctgcagagtctggtattcgtacgtttcgcgcggcggatggcctttgggaagagcatcgggttgaagacgtggcaacgccggaaggattcgcccgtaatccggggctggtgcagacattttataatgcccgccgtcagcagcttcaacagccggaaatacaacccaatgcggcgcatctggcgttagcgaagcttgaagaagcgcttggcgatcgctttttgctggtgacgcaaaacatcgacaatttgcatgaacgcgcgggcaatcgcaacatcattcatatgcatggcgagctgttgaaggtgcgctgttcgcaaagcggccaaattctggaatggaacggcgatgtgatgccggaagataaatgtcactgctgccagttcccggcgccgctacgtccgcacgtggtgtggtttggcgagatgccgcttggcatggatgaaatttatatggcgctgtcgatggcggatatttttatcgccattggcacatccggtcatgtctatccggctgcggggtttgtgcatgaagcaaaactgcacggcgcacatacggtggaactgaatcttgagccaagccaggtcggcagcgagtttgaagagaagcactacggcccggcaagccaggttgtgccggaatttgttgataaattcctgaaagggctgtag

SEQ ID NO: 368591 - DNA, 1047 bp, Salmonella enterica
atgaaaaaatggtcacgccacctgctcgcggcgggcgccctggcgctgggtatgagtgccgctcatgcctccgacaacgacacgctctatttctataactggactgagtatgtaccgccgggcctgctggaacagttcactaaagagacaggcattaaggtgatttattcgacctacgagtcgaacgaaaccatgtatgccaaactcaaaacctataaagatggcgcgtatgacctggttgttccttctacatactatgtcgacaaaatgcgcaaagaaggcatgatccagaagatcgataagtcgaaattaaccaatttccacaacctcgatccggaaatgctcaacaaaccgtttgaccccaacaacgattattctgttccgtatatctggggcgcaacggcgattggcgtgaacagcgatgctatcgatccaaaaaccattaccagctgggctgacttgtggaaaccggaatataaaaacagcctgcttttaaccgacgatgcgcgagaagtcttccagatggcgctgcgcaagctaggttattccggtaacactaccgatccgaaagagatcgaagcggcatatgaagagttgaaaaaactgatgccgaacgtagcggccttcaactccgataatccggcgaatccgtatatggaaggggaagtcaatctggggatggtgtggaacggttcggccttcgttgctcgtcaggctggcacgccgctggaggtcgtctggccgaaagaaggcggtattttctggatggatagcctggctattccggcaaacgcgaaaaataaagagggcgcgctgaagctaatcaacttcctgctgcgtcctgacgtcgcgaaagaggtggcagaaaccatcggctaccctacccccaacctggcggcgcgtaagctgttaagcccggaggtcgccaatgataagtcgctctatccggatgcgcaaaccatcagcaaaggcgagtggcaaaacgatgtcggcgacgccagcgccatttatgaagagtattatcagaagctaaaagcaggacgctaa

SEQ ID NO: 368592 - DNA, 780 bp, Salmonella enterica
atgatcggtcggctgctccgtggcggtttcatgactgccatctatgcgtatctgtatattcccatcattattctgatcgtgaactccttcaacagttcgcggttcggcattaactggcagggctttaccactaaatggtacgaactcctggtcaataacgacagtctgttgcaggccgctcaacattcactgacgatggcgattttttcagcgaccttcgccacgttgattggctcgttaaccgcggtggcgctttatcgctaccgctttcgcgggaagccattcgtcagcgggatgctgtttgtagtaatgatgtcgccggatatcgtgatggcgatctccctgctggtgctgtttatgttactcggcattcaactgggcttttggtcgttgctgttctcgcacatcacctttagcctgccgtttgtggtcgtcacggtctattcgcgcctgaaaggctttgatgtcagaatgctggaagccgcaaaagacctgggggccagtgaggtaacgattttacgcaaaatcattctgccgctggcgatgccggcggtggcggcgggctggttgctgagctttacgttgtcgatggacgatgtagtggtctcgtcgtttgtcaccgggccgggctatgaaattttacccttaaagatttattccatggtaaaagtcggcgtttcaccagaagtgaacgcgctggcgaccgttttattggtgctgtctctggtaatggtcattgccagccagcttattgctcgtgataaaaccaagggccgataa

SEQ ID NO: 368593 - DNA, 1011 bp, Salmonella enterica
atgccgattactatagggaatggttttttaaaaagtgaaatccttaccaactccccaaggaatacgaaagaagcatggtggaaagttttatgggaaaaaattaaagacttctttttttctactggcaaagcaaaagcggaccgttgtctacatgagatgttgtttgccgaacgcgcccccacacgagagcggcttacagagattttttttgagttgaaagagttagcctgcgcatcgcaaagagatagatttcaggttcataatcctcatgaaaatgatgccaccattattcttcgcatcatggatcaaaacgaagagaacgaattgttacgtatcactcaaaataccgatacctttagctgtgaagtcatggggaatctttattttttaatgaaagatcgcccggatattttaaaatcgcatccacaaatgacggccatgattaagagaagatatagcgaaatcgtagactaccccctcccttcgacattatgtctcaatcctgctggcgcgccgatattatcggttccattagacaacatagaggggtatttatatactgaattgagaaaaggacatttagatgggtggaaagcgcaagaaaaggcaacctacctggcagcgaaaattcagtctgggattgaaaagacaacgcgcattttacaccatgcgaatatatccgaaagtactcagcaaaacgcatttttagaaacaatggcgatgtgtggattaaaacagcttgaaataccaccaccgcatacccacatacctattgaaaaaatggtaaaagaggttttactagcggataagacgtttcaggcgttcctcgtaacggatcccagcaccagccaaagtatgttagctgagataatcgaaaccatctctgatcaggtttttcacgccatttttagaatagacccccaggctatacaaaaaatggcggaagaacagttaaccacgctacacgttcgctcagaacaacaaagcggctgtttatgttgttttttataa

SEQ ID NO: 368594 - DNA, 864 bp, Salmonella enterica
atgaagaacacaagtaaattccagaatgtagtgattgtcactatcgtcggttggcttgtgttatttgtttttctgcccaacctgatgatcattggcaccagctttctgacccgtgacgacgccagtttcgtcaagatggtctttacgctggataattacgcgcgcctgctcgatccgctctattttgaagtgctcctgcactctctgaatatggcgctgatcgccaccctctcctgcctggtgctgggctatccttttgcctggtttctggcgaagttaccggaaaagatacgtccgttattgctgtttttgctgattgttcctttctggaccaactcactgatccgcatctatgggctgaaaatattcctgagcactaaaggttatctcaatgaattcctgctgtggctgggcgtgattgatacaccgattcgcatcatgttcaccccgagcgccgttattatcggcctggtttacattttgctgccatttatggtcatgccgctctactccagcattgagaagctcgacaaaccactactggaggccgcacgcgatctcggcgccagtaaaatgcaaacgttcatccgcatcattattccattaaccatgccgggcattgtcgccggttgcttgctcgtgatgctaccggcaatgggcctgttctacgtctccgatttaatgggtggcgcgaaaaacctgctgattggtaacgtcattaaggtacagttcctgaatattcgcgactggccgtttggcgcggctaccagcattacgctgaccattgtgatgggactcatgctattgatttactggcgggcttcccgcttattgaataagaaggtgagtgatataagcgattaa

SEQ ID NO: 368595 - DNA, 1137 bp, Salmonella enterica
atgggacagagtaagaaattgaataatcaaccgcgttcgctttcaccgctggtgcttttgtctggaattagcaaaagtttcgatggcaaagaggtcatttcgcaactggatttgaccattaacaatggcgaattcctcacgctgcttggcccttccggctgcggtaaaacaaccgttcttcgcctgattgccggcctggaaaccgttgatgccgggcatatcatgttggataaccaggatatcacccacgttcccgccgaaaatcgttatgtaaataccgtatttcaaagctacgctttatttccgcatatgacggtgtttgaaaatgtcgcgtttggcttacgaatgcaaaaaacgccagccgccgagatagcgcctcgcgtgaccgatgcgctgcgtatggtgcagcttgaagagtttgcacaacgtaaaccgcaccagctttccggcggacagcagcagcgtgtggctatcgctcgcgcggtggtgaataaacctcgcctgttattactggatgaatcgctttccgcgctggactataaattgcgcaaacaaatgcagaacgagcttaaagcattacagcgtaaactcggtatcacgtttgtttttgtcactcacgatcaggaagaagcgctcaccatgtccgatcgtatcgtggtaatgcgtaatggcgtgattgagcaagacggcacgccgcgtgaaatctatgaagagccaaaaaacctgtttgtcgccggttttatcggcgaaattaaccgctttgacgcaaccgtcattgaacggcttgatgaacagcgcgtccgcgccagcgtagaaggtcgggagtgcaatatatacgtcaatttcgctgtcgaaccgggccaaaaactgaacgtcctgctgcgaccggaagatctacgcgtcgaagagatcaacgatgataaccacatcgaagggcttatcggctacgtgcgcgagcgcaattataaaggtatgacgctggagtcggtggttgaactggaaaatggcaaaatggtgatggtcagcgaattcttcaacgaagacgatcctgacttcgaccattcacttgaccaaaaaatggccattagttgggtagaaagctgggaggtcgtactggctgatgaagaacacaagtaa

SEQ ID NO: 368596 - DNA, 1230 bp, Salmonella enterica
atggataaactacttgagcgttttttacactacgtatcgctggatacccaatcaaagtcgggtgttcggcaggttcccagcactgaggggcagtggaagttactacgtttgctcaaacagcagctcgaagagatggggctggttaacattacattaagtgaaaaagggacgttgatggcgacgctcccggccaatgttgagggggatattcccgccattggttttatctcccatgtggatacctctccggatttcagcggtaaaaacgttaacccgcagattgtcgagaattatcgcggcggcgatatagcattagggattggcgatgaggtgttgtcacccgtgatgttcccggtactgcatcaattactgggacagacgctgattactaccgatggtaagacattgctgggcgcggacgataaagccggcgttgcggagatcatgaccgcgctggcggtgctgaaaggtaatcctattccccacggtgaaattaaagtggcgtttacgcctgacgaagaggtagggaaaggcgcgaagcacttcgatgttgaggcctttggcgcgcagtgggcctatacggtcgacggcggcggcgtgggcgaactggagtttgaaaacttcaatgccgcctcggtgaatatcaaaatcgtcggcaataacgtgcatcccggtacggcaaaaggcgtgatggtcaatgcgctgtcgttggcggcgaggattcacgcggaagtgccggcggatgaaacgcctgaaaccactgaaggttacgaagggttttatcatctggccagcatgaaaggcaccgttgaccgggccgaaatgcactacatcattcgcgatttcgaccgtaagcagtttgaagcgcgtaaacgcaaaatgatggagattgccaaaaaagtcggtaaggggctgcatccggactgctatatcgaactggtgattgaagacagttattacaatatgcgcgaaaaagtggttgagcatccgcatattctcgatatcgcccagcaggccatgcgtgactgtcatattacgccggagatgaaaccaattcgcggcggtacagacggggcgcaactgtcgtttatgggcctgccgtgtcctaatctctttaccggcggatataactatcatggtaaacatgagtttgtgacgctggaggggatggaaaaagcggtacaggtgattgtacgtatcgcggagctgacggcgaagcgcggccagtag

SEQ ID NO: 368597 - DNA, 1335 bp, Salmonella enterica
atgttacgcattgtggtgaagcgttttattatttatggcgggatattttccgccatcaatttttctgcctggagcgccgaatatacgccttcctggtcccagcgccagcaacaatctgcagcatgttttatgaccggcgatgaaacctgcatgacgtttattgatgatgcggtgaggctggcctcgcagcaatatggcaaacgctcaatacagcttgttcgtagcctgctattacaaagcgatatttatcaatggctgggtaaacctgaattaacgccgcaaatgctgctgcgagcgcgggcaataatgaaaacatttccggcgggcacttatccgggcgatcgggccgatatgtttgaacacctggcggccttttatgtttacagtgacgatcgccatatagagtattcatctacagagcagtggcgatacgagattaaggttgattaccgtcagcgaatagcctggcaagagcaggcattaacgtggcgtcttaaagacaaaaaggcatcgacggaggcattggtttataccttaaacaggatgcgcgacgcttattctgatgcgctggaagagcgggatgtcgaatgtgatagtgcgcgtaaagcctattatttggcgaagatagacacaacggagcggcagtggctgagcgttattttacgagataaaacctgggataatcgtgagcgcgtcgcctcttttttgcagcagaaagcggatattgcttataatgcagggcatattagcgaggcgattaatgcgctaagtcaggcgctaaaaattgagcaaacgctttatggcgccgaattcggcgaaatgacggttgacagcaataatcttgctggcttttatgcacagggccatcattataaggaagcgaaagatctctaccttaaacttatcgcgtattaccagagccgtttaacgccaatggcgacggtaatatcacgattacgcttttatttgcccgaaaacatcgacctggacagtacctccccctatctcccattgctggaagaatataaacgtcggcagtccgacgtatccatggtgttgtatggtatttcgctgctttatcagaataatcaacagcttgaacaagcaaaagactttgcggaacgcgcctttacgcttgatgccgtagcttatccagcaaagatgcagtatgaacgattacagcgactggctaatattgccgaaggtcttggcgataacgtactggcgcgacgttaccgacaattgtcatttcgccatcgaatggcccactcgatttatccgggcgatccgcaatataacgatttcgccaaacctggcggcgatcgttgtggatag

SEQ ID NO: 368598 - DNA, 1122 bp, Salmonella enterica
atggaataccaattaactcttaactggcccgactttcttgaacgccactggcaaaaacgcccggtggtcttaaaacgtgggtttagcaactttatcgatccgctctcgccggatgagctggcggggctggcgatggaaagcgaaatcgacagccgactcgttagccatcaggatggcaaatggcaggtcagccatggccctttcgaaagctacgatcatctgggtgagagcaattggtcgctgctggtacaggcggtaaaccactggcacgaacccaccgccgcgctgatgcgcccgttccgcgctctgccggactggcgtatcgacgatctgatgatctccttttccgttcccggcggcggcgttggcccgcatctggatcagtatgatgtgtttattattcagggaaccggtcgccgtcgctggcgcgtgggcgaaaagctgcaaatgcgtcagcactgcccgcatcccgacctgttacaagtcgatccgttcgaggccattattgatgaagagctggagccgggcgacattctgtatattccgccaggattcccgcatgaaggctatgcgctggaaaacgccatgaactattcggtcggttttcgcgcgcccaatagccgtgagctgatcagcggttttgccgattacgtcctgcaacgggagttgggcaatacatactacagcgatccggatatgccgtcccgcaagcatccggcggatatcctgccgcaggagatggataaactgcgtaatatgatgctcgatttgatcaatcaacccgcgcatttccaacagtggcttggcgagtttctctctcagtcacgccacgaactggatattgcgccgccggagccgccgtatcagcctgatgaaatttacgatgccttaaagcaaggcgaggtattagtacgtctcggcgggcttcgcgtgttgcgtatcggcgatgaggtctatgcgaatggcgaaaaaatagactctccgcatcgccccgctctggaggcgctcgccagtcatattgcactgaccgctgaaaacttcggcgatgcgctggaagacccgtccttcctcgcgatgctggcggcgctggtgaatagcggatactggtttttcgaaggataa

SEQ ID NO: 368599 - DNA, 1464 bp, Salmonella enterica
atgaataaatttgctcgccattttctgccgctgtcgctgcgggttcgttttttgctggcgacagccggcgtcgtgctggtgctttctctggcatatggcatagtggcgctggtcggctatagcgtaagttttgataaaaccacctttcgtttgctgcgcggcgaaagcaacctgttttataccctcgccaaatgggaaaataataaaatcagcgttgagctgcctgaaaatctggacatgcaaagcccgaccatgacgctgatttacgatgaaacgggcaaattattatggacgcagcgcaatatcccctggctgattaaaagcattcaaccggaatggttaaaaacgaacggcttccatgaaattgaaaccaacgtagacgccaccagcacgctgttgagcgaggaccattccgcgcaggaaaaactcaaagaagtacgtgaagatgacgatgatgcggagatgacccactcggtagcggtaaatatttatcctgccacggcgcggatgccgcagttaaccatcgtggtggtcgataccattccgatagaactaaaacgctcctatatggtgtggagctggttcgtatacgtgctggccgccaatttactgttagtcattcctttactgtggatcgccgcctggtggagcttacgccctatcgaggcgctggcacgggaagtccgcgagcttgaagatcatcaccgcgaaatgctcaatccggagacgacgcgtgaactgaccagccttgtgcgcaaccttaatcaactgctcaaaagcgagcgtgaacgttataacaaataccgcacgaccctgaccgacctgacacacagtttaaaaacgccgctcgcggttttgcagagtacattacgctctttacgcaacgaaaagatgagcgtcagcaaagctgaaccggtgatgctggaacagatcagccggatttcccagcagatcggctattatctgcatcgcgccagtatgcgcggtagcggcgtgttgttaagccgcgaactgcatcccgtcgcgccgttgttagataacctgatctccgcgctaaataaagtttatcagcgtaaaggggtgaatatcagtatggatatttcaccagagatcagttttgtcggcgagcaaaacgactttgtcgaagtaatgggcaacgtactggacaacgcttgtaaatattgtctggagtttgtcgagatttcggctcgccagaccgacgatcatttgcatattttcgtcgaagatgatggcccaggcattccccacagtaaacgttccctggtgtttgatcgcggtcagcgcgccgataccctacgaccaggacaaggcgtggggctggctgtcgcgcgcgagattacggaacaatacgccgggcagatcattgccagcgacagtctgctcggcggtgcccgtatggaggtcgtttttggccgacagcatcccacacagaaagaggaataa

SEQ ID NO: 368600 - DNA, 675 bp, Salmonella enterica
atgatgcgcgtactggttgtagaggataatgcattattacgccaccacctgaaggttcagctccaggattcaggtcaccaggtcgatgccgcagaagatgccagggaagctgattactaccttaatgaacaccttccggatatcgctattgtcgatttaggtctgccggatgaagacggcctttccttgatacgccgctggcgcagcagtgatgtttcactgccggttctggtgttaaccgcgcgcgaaggctggcaggataaagtcgaggttctcagctccggggccgatgactacgtgacgaagccattccacatcgaagaggtaatggcgcgtatgcaggcgttaatgcgccgtaatagcggtctggcctcccaagtgatcaacatcccgccgttccaggtggatctctcacgccgggaattatccgtcaatgaagaggtcatcaaactcacggcgttcgaatacaccattatggaaacacttatccgtaacaacggtaaagtggtcagcaaggattcgctgatgcttcagctgtatccggatgcggaactgcgggaaagtcataccattgatgttctcatggggcgtctgcggaaaaaaatacaggcccagtatccgcacgatgtcattaccaccgtacgcggacaaggatatctttttgaattgcgctaa

SEQ ID NO: 368601 - DNA, 1371 bp, Salmonella enterica
atggaattatcctcactgaccgccgtttcccctgtcgatggacgctacggcgataaagtcagcgcgctgcgcggaatttttagcgaatacggtttgctgaaatttcgtgtacaagtcgaagtacgttggctgcagaaattagccgcgcacgcagcgatcaaggaagttcctgcttttgctgccgacgcaaacggttacctggatacgcttgttgcaaacttcaatgaagaagatgccgcgcgcattaaaaccattgagcgcaccacgaatcacgatgtgaaagcggttgagtattttctgaaagaaaaagtcgccgcgatcccggcgctacatgacgtttccgaatttatccactttgcctgcacttctgaggacattaacaacctgtcgcacgcgttaatgctcaaaaccgcgcgcgatgaagtgatcctgccttactggcgtcagatgattaacgcggttaaagatctcgccacgcagtatcgcgacattcctctgctctcccgcacccacggccagccggcaacgccttccactctgggtaaagagatggcgaacgtggcgtatcggatggagcgtcagttccgccagctcaaccaggtggagatcctcggtaaaattaacggcgccgtaggcaactataacgcgcatatcgccgcctatccggaagttgactggcatcagttcagcgaagagttcgtcacctcgctgggcatccagtggaatccttacaccacccagattgaaccgcatgattatattgcggaactgtttgactgtatcgcgcgctttaacaccatcctgatcgatttcgatcgcgatgtctggggctatattgcgttgaaccatttcaaacagaaaaccatcgccggggagatcggttcttctaccatgccgcataaagttaaccccattgactttgaaaactcagaaggcaacctcggtctgtctaacgcagtgttgcaccatctggcaaacaaactgccggtttcccgctggcagcgcgatctgaccgactcaaccgtcctgcgtaacctgggtgtcggcatcggctatgcgcttatcgcttatcagtccaccctgaagggcgtcagcaagctggaagtaaaccgcgatcatctgcttgacgaactggatcacaactgggaagtattagccgaaccgatccagaccgtcatgcgccgctatggtattgaaaaaccatatgaaaaactgaaagagttgacccgtggcaagcgtgttgatgccgaaggaatgaaacagtttattgatagtctggccctgccggaagcagaaaaaacgcgccttaaagccatgacgccggcaaattatatcggtcgcgctgtgactctggtcgacgaacttaaataa

SEQ ID NO: 368602 - DNA, 642 bp, Salmonella enterica
gtggcaaagaattattatgacatcaccctcgcgctgtctggcatttgccagtcggcacgcctggtgcaacaactggcgcaccaggggcactgtgatgccgacgcgttgcacgtttcactcaacagtgtcattgatatgaatcccagttctactctgggcgtgttcggcggcagcgaagctaacctgcgtcttggtctggaaacactgctcggcgtgctgaatgccagcagccgacaaggacttaacgccgaactgacgcgttatacgcttagcctgatggtgctggagcgcaagctgtcatccgccaaaggcgcgttgaatacgttaggcgatcgcattaacggcctgcagcgccagcttgaccattttgatttacagtcagacacgttaatgagcgccatggcgggcatctacgtggatgtgattagcccattgggcccgcgcattcaggtgacgggctccccggccgttctgcaaagtccgcaggtgcaggccaaagtccgcgcctcgctactggcaggcatccgtgcagccgtgctctggcatcaggtaggcggtggtcgcctacagcttatgttttctcgtcatcgcctgacgactcaggcaaaacaaattcttgctcatttaaccccggagttatga

SEQ ID NO: 368603 - DNA, 1107 bp, Salmonella enterica
atgtcagaaagcccaaaaaaagtgatcgtcggcatgtccggcggtgtcgactcctccgtttccgcctggctgttgcaacaacagggttatcaggtagaaggcctgttcatgaagaactgggaagaggacgatggtgaggaatactgtaccgcggcagccgatctggctgacgcgcaggccgtgtgcgacaagcttggcattgaactgcataccgttaattttgccgcagaatattgggataacgtctttgaactgttccttgaagagtacaaagcgggccgtacgccgaacccggatattctgtgcaataaagagatcaaatttaaagccttccttgaatttgccgcagaagatttaggcgccgactatatcgccaccggtcactacgttcgccgcgcggatgtaaacggcaaaagccggttgttgcgcgggctcgacggcaacaaagatcagagctacttcctctatacgcttggccatgagcagattgcgcaaagtctgttcccggttggcgagctggaaaaaccgcaggtgcgtaaaatcgccgaagatctggggctggtaaccgccaagaaaaaagattctaccggtatctgctttatcggcgagcgcaaattccgcgactttttagggcgctatctgcctgcgcagccggggaaaatcattaccgttgacggcgatgaaatcggcgagcatcagggtctgatgtatcatacgctcggtcagcgtaaagggctgggaatcggcggcaccaaagacggtagcgaagacccctggtatgtggtggataaagacgttgaaaacaatgtgttaattgtcgcccaggggcatgagcacccacgtctgatgtcggtaggcctcatcgcccagcagctacattgggtcgatcgcgaaccgttcaccggcaccctgcgctgtacggtaaaaacccgctaccgccagaccgatattccgtgcacgattaacgcgctggatgacgatcgtatcgaggtcatttttgacgagccggttgccgccgttacgccgggccagtccgctgtcttttacagcggcgaagtctgcctgggcggcggcattatcgagcagcgactgccgctgacggtctga

SEQ ID NO: 368604 - DNA, 462 bp, Salmonella enterica
atgttcaagccgcacgtgaccgttgcctgcatcgtacatgccgaagataaatttctggtggtggaagagaccatcaacggtaaatcgttatggaatcaacctgccggacacctggaggcagatgaaacgctggcgcaggccgccgcgcgtgaactgtgggaagagactggcatcacggcgcaaccacagtattttatccgtatgcatcagtggattgcgccggataagaccccgttcctgcgctttttattcgctatcaagcttgatcatatttgcgcgaccgaaccccatgacaatgacatcgattgctgccgttgggtgagcgccgacgagattctgaacgcgccgaatttacgttctccgctggtggctgaaagcattcgcagttatcaaacgggacaatgttaccccttatctatagtgggcgaatttaactggccgtttacagagggtgtcaagtaa

SEQ ID NO: 368605 - DNA, 330 bp, Salmonella enterica
atgaaacggcttctcattgcttttgctttattaacaccgttatccgtcgatgcggccagcttcgactgccagaaagcgcaggctgcggatgaaaaggctatctgcgcgcacctgacgctgaatgataaaaacgtggaaatgcacaccaaatatcagtttctgaaagggttgttcgcgatgggcagtcgcggcgcgctgcaggacgcccagcagagctggcttaaacagcgtcagcagtgcaaggccgatgtcacctgcctgacaaaagcttataacgagcgtctgaaacagcttgacgcgatctatgaccacattgataaaccgctttaa

SEQ ID NO: 368606 - DNA, 738 bp, Salmonella enterica
atgttttgtaatgagcatgtcaatactaccctattgtttgccgccatgaaagacactcattattgcgctataatgcggcaattaataagttctgaaaacaccatgcaaaaaacttcttttagaaatcactacgttaagcgattcagctcacgacaagcatctaaatcacggaaagaaaaccagccaaaacgcgtggttttgttcaataaaccttacgatgtgttgccgcagttcacggatgaagcaggtcgccgcacgttaaaagattttattcctgtgcaaggcgtttatgccgcaggccgcctggaccgcgacagcgaagggcttttggtgctgactaatgacggcgcgctgcaggcgcgcctcacgcaaccgggcaaacgcaccggcaagatttactatgttcaggtagaaggtatcccggataatgcagcgctgcaggcgcttcgtactggcgtcacgctcaacgatggccctaccctgcccgccggtattgagattgtcgcggagcctgactggctgtggccgcgcaccccgccgattcgcgaacggaagaatattcccaccagttggctaaaagtcaccttatatgaaggccgcaaccgccaggtaagacgcatgacagcgcatgtcggtcatcccactctacgattaattcgttacagcatgggcgactacacgctcaacggcctcgataatggacagtggcgcgagatcgcacaggagaaagacagatga

SEQ ID NO: 368607 - DNA, 1251 bp, Salmonella enterica
atggaaagcaaagtagttgttccggtggaaggtaagaagatcaccctgcaaaacggcaaactcaacgttcctgagaatccgattatcccgtttattgaaggcgatggtatcggtgttgatgtcactccagccatgcttaaagtagtcgatgccgccgtcgagaaagcctataaaggcgagcgtaaaatttcctggatggaaatttacaccggagaaaaatccacacaggtttacggccaggatgtctggcttcccgctgaaacccttgatttaattcgtgactaccgcgtagcgattaaaggtccattgaccacgccggttggcggcggtatccgctctctgaacgttgccctgcgtcaggagcttgacctgtacgtttgtctgcgtcccgttcgttactatcagggcacgccaagtccggtgaaacatccggagctgaccgatatggtcatcttccgtgaaaactctgaagacatctacgccggaattgaatggaaagctgactctgcagacgctgagaaagtgatcaagttcctgcgcgaagagatgggcgtgaagaaaattcgcttcccggagcactgcggtatcggtatcaaaccgtgttctgaagaaggcactaaacgtctggttcgcgcggcgattgaatacgctattaccaacgatcgcgattccgtcacgctggtacataaaggcaatatcatgaagttcaccgaaggcgcgtttaaagactggggctaccagttggcgcgcgacgagttcggcggtgagcttattgacggcggtccgtggctgaaaattaagaacccgaacacgggtaaagagatcgtggttaaagacgttatcgccgatgcgttcctgcaacaaatcctgttgcgtccggcggaatacgacgttatcgcctgtatgaacctgaacggtgactatatttccgatgccctggcggctcaggttggcggtatcggtattgcaccgggtgcgaatatcggcgacgaatgcgcgttgtttgaagcgactcacgggactgcgccgaaatatgcgggccaggataaagtcaacccaggctccattattctgtctgcggagatgatgctgcgccacatgcagtggttcgaagccgcagacctgattgttaaaggtatggaaggcgcgattgccgcgaagaccgtgacctatgactttgaacgcctgatggaaggcgctaagctgctgaaatgtagtgagtttggtgacgcgattatcgcaaatatgtaa

SEQ ID NO: 368608 - DNA, 1125 bp, Salmonella enterica
atgctcaaacctatctgccatagtggaagtataaaggttccggaatatctggaaacagataaggaaaaaaatgccggacgtactccactgtcttcagacattcagcaagttagaaatgttgttgaagatgttccgccatttccagaaagcagaacggcgagaggttctgtgagcgcagcgtacaggctttcttttgacgaagtgttttgcggtctcagcaatgaagagcgtaaaaaggtgtatggtcgcctttttggaaaacaagtacttgcgcatattcattccaggtgtcagcgagacgctgacataataagagaaaaagcgctcaggcggataagccgtgagtgtggtaccgaaatagattgcactctcttgctaaataagatggtggatattttacaaaatgcccggctgacaataaattttaatgcggcaaaaattgactttgcctctctcttaaaaaataaagaatatctgaactcttatgcattaggttgcagaccaggagatttacctgcttataatgtcggacgtgattcagttgaaactaaagcatttgaactggagaggcttgcagattcaccttatgccccatatggtcagacaggcggtttttccgtagcatatactcccaacagtagaacttttagccctacaagcagaccaatttatgctgcactggactttctgaacggtgaaaatggaggtgccagcgcctatgggaaatcattttttgaattaaatgataatgtaaaaacaaattgtacattatcaccttttgatatctacggccacagatttggtctggatacgagtaaactatcaacattttggcatatggagaacctgattgcatcctgtcaaaatgatttttttggttataattgctttaagagtttggttaaaatggctaagggcgaaaaatttttagctcattctaattatggtaaaggctatgaagggaattatatagaagctcatattcatggtgatgtatgtttattcagagatataaaacacgtttatttgtctttgcaagaaaactcttactcggaaagtcaactatatgattatgcaaaacaaataaacctggtgcttaatagagactgcataatattatattga

SEQ ID NO: 368609 - DNA, 207 bp, Salmonella enterica
atgaagaattttttcaaaataattactgatttcatcgcggatatttcccttgatctatttgctatatttttatgcatgttattcgtatacaaaacaggaccatcaattggtgtgatatcattttttattgcattaattatttatatcattcttcattttgttttttactcatttcgtgaaaaaatcataaaaaaaatattcaaataa

SEQ ID NO: 368610 - DNA, 681 bp, Salmonella enterica
atgaataaaatacatgttacatataaaaatctcttacttccgattaccttcattgcagcaactctaattagcgcctgtgataacgataaagatgccatggcggaagctgaaaaaaatcaagagaaatacatgcaaaaaatccagcaaaaagagcaccagcaatcaatgttcttttacgacaaagccgaaatgcaaaaagctattgccaatatcaacgcaaaaggtggagccaatcttgcgattattgaagtccgtttcttcaagggcgggtattcattcattcgacaaagcgttaacacccctgctaaagtagagatgtttaaatttaacaacggctactgggggggaccttcgcctgtcaacttaaccatctttggcactataacagaggagcaaaaacaagaagcactaaaagaggctttattcaaattcgactcgatcaatttcagcattataccagagcgtattcaggaaacaattaaacgcgctaacgccagtggcatcatttccgttacggaagatagcgatatcgttgtacgagcagagatagctcataatggcgaattcgtctatgacattaccatcactgctaaaaatacagcacgtgcggtaatgaccttaaataaggatggttctattgccggatatgagatcaaagaacctttcgacccaaaaaaataa

SEQ ID NO: 368611 - DNA, 240 bp, Salmonella enterica
atgttcgtcgaactcgtttatgacaagcgaaatgttgaaggtttgccaggcgcacgcgaaatcatcctcaatgaactcacaaaacgcgtacatcaactttttcccgatgcgcaagtgaaagttaagccaatgcaggcgaacgcattaaacagtgactgtacaaaaaccgagaaagaacggctgcaccgtatgctggaagagatgtttgaagaggctgatatgtggctggtcgccgaataa

SEQ ID NO: 368612 - DNA, 522 bp, Salmonella enterica
atgactttgctttcaggaaaaaccacactggttctctgcctctcctctattttatgtggatgtacgacgaacggcttacccacaccttatagtattaatttgtcgttcccggtcattacacaaaaccagattaattccggtggttattacataaatgacgcggaacaaattcggacaactgatggtctgtgccttgatacaggcccagatcaacagaatcgtttgacgctgcgggagtgtaagcatgtgcaatctcagcttttctcatttcaccgagacagaatcacgcagggtgagaaatgtctggatgccgcaggacaaggtacaaaagaaggcacaccaatcattctttattcatgcacgggtaatgataaccagcgctggctcactgatgataacaaaattaaggggaaacagagccgaaaatgcctgggcacaaatagcattattgtcagaaaaggcgaccctgttgtgttggccgattgcgattttagtcgcgccctggaatttaccatcaggtag

SEQ ID NO: 368613 - DNA, 264 bp, Salmonella enterica
atgaaacatcatgcttttatgctttggtcattacttattttttcattccatgttttggccagttcaggccattgttctggtttacaacaggcatcatgggatatttttatctacgattttggtagtaaaaccccgcaaccacctacaaatactgataaaaagcaagccaggcagattagttcaccgtcctgcccgacgacaaaacccatgatgtccgcaccagtcaatgacgccaggaaagggaatactttctccagaacataa

SEQ ID NO: 368614 - DNA, 558 bp, Salmonella enterica
atgaaaaatattattttatccactttatttattactacaagcgttttggttgtaaatgttgcacaggccgatactaacgccttttccgtggggtatgcacaaagtaaagttcaggatttcaaaaatatccgaggggtaaatgtgaaataccgttatgaggatgactctccggtaagttttatttcctcgctaagttacttatatggagacagacaggcttccgggtctgttgagcctgaaggtattcattaccatgacaagtttgaggtgaagtacggttctttaatggttgggccagcctatcgattgtctgacaatttttcgttatacgcgctggcgggtgtcggcacggtaaaggcgacatttaaagaacattccactcaggatggcgattctttttctaacaaaatttcctcaaggaaaacgggatttgcctggggcgcgggtgtacagatgaatccgctggagaatatcgtcgtcgatgttgggtatgaaggaagcaacatctcctctacaaaaataaacggcttcaacgtcggggttggataccgtttctga

SEQ ID NO: 368615 - DNA, 345 bp, Salmonella enterica
atgatgaaacgtaaattgatcccatttaccctctttctcgctgcgcttagcgccagtaccacctctatagcagcttcgcaggagatttctaaatctatatacacctgtaatgataaccaggttatggaggtgatttacgtcaacaccgaggctggaaacgcctatgcgattatcagtcaggtaaacgagatgatcccgatgcggttaatgaaaatggcctccggagcaaattacgaagccatagacaaaaattatacttataaactttataccaaaggcaaaacggctgaactggtggaaggtgatgataaacctgttctcagtaactgttccttagctaactaa

SEQ ID NO: 368616 - DNA, 174 bp, Salmonella enterica
atggtcgccaaaaataaaattcacggtcgtcgtattcgtcagtctctgcaacagttacatcatcgttgtctttttcagcaactggcggtaagcccaccaggagcaaaatatgtttcagtcaccgctgaaacaaaaaactggcttattcatcttgtgacttcagagggccgttag

SEQ ID NO: 368617 - DNA, 468 bp, Salmonella enterica
atggcactcagaaccttgtcagcacttcccgtgtttgctgattctcttttctctgaccgtttcaaccgtattgatagacttttcagtcaattaacaggagatacgccagtcactgcgacgccagcttacgatctgcaaaagcgcgatgcgaataactatctgcttaccgtgagcgttcctggctggaaagaggaagagcttgaaattgaaacggttggcggcaacctgaatattacgggtaaacacactgaagagacggtagaggatcagacgcactggatttatcgtggtattcgtaaggcggatttccagttgagtttttctttgcctgaacatgctaaggtgaataatgcgaaactggaacagggcctcttgttggtcgagatttaccaggagatccctgaaagcgagaaaccgaaaaaaattgccatagaaagcaaaccaaaggcgattgaacacaaatcataa

SEQ ID NO: 368618 - DNA, 1044 bp, Salmonella enterica
atgaaattagtgctcgtcaatcggcaggtcattttaccggaaagcggaaccgagtccttccagtgccatgcctctacgcttgttcgcttaccgtgcggtacgctcgtggccgcatggttcgcggggttgcgcgaaggaagcgaagatacagccatctggctatctcgctatgaacataatatctggacaacaccgcagcgagtggcggcacgcgagggggaagcgcactggaatccggtgttattttacccgtcggataaattgtggttattttataaagtaggcagcgacgtacacgtgtggaaaacctggtttatcacctccagcgatcgaggatttacctggagtacgccagctccgttggttaacgatgatattttgccgcgcggtcccgtaaaaaataaactcctgctggcatcaaatggcgcctggattgcgccagggtcgattgaaagtcctgaacggtggagggcatttgtggatcgatcctctgacgaaggaaaacactggaatatctcttttgttccgctggagcctgataacgctatttccgggacaaacgtagcgttgtgggatggtgtaaaaaaggggatgttgtgggaatgttgtctggaaaacctcctgcgctgggatggcgttattcagcctacgctgtgggagtcttctccggggcatatccatatgttgttacgaagcacacgcggggcaatttttcgcagtgattcaatcgactatggcgctacctggtctgttgcccgcgcgacatctttaccgaataataatagtggtatcgatctggttagtatgcaggacggtacgctgattcttgcgttaaatctggtcaacggcaactggggaaagcgctatccgctttcactgattgcttcccaggataatggcgaatcatggctaccgctactggacctggaaagtgaccacggtgagtattcttatcccgctattattagcgagggcggcgtcgtacatatcacctacacgtggaaccggaaaaatatcgtatattgtcgattacaaacggtgtaa

SEQ ID NO: 368619 - DNA, 531 bp, Salmonella enterica
atggcacatttctcaagactgcaaataacgcttcactggttaacactgctcctgacaggcatcgcatatgctgctattgagttacgggggtgggcgccaaaaggctccagcgtttacctgtttatgaaagacacgcactatgatatgggcgttctggtctgggcgctgatgtttttacggttatatcttaaacacaaatacccggatccggtcattacgcctccccctcctcactggcagcacgtagccgctaaattaatgcatatcgcgctttatctcacttttctcgccttaccgctgctgggcgtcgcgatgatggcatcaggcgggaaaagctggagcttttttggttttactgtaccggtatttttgacgccagatagcgccctaaaatcggatataaagcgtattcatgaaatgctggccaatatcggctatttcctgattgccatgcatgcagcagcggcgttgtttcaccattacatacaaaaagatgatacattttcaaggatgttacccggtaaatcatga

SEQ ID NO: 368620 - DNA, 315 bp, Salmonella enterica
atgacaaataaaaaacacattttttcaattatctttattggttctcttttaacggggtgtgctacaggaccatcaccgacagggattggcttatatacggatgttaaagggccaattactgccacgagtctcccggcaaccaaaaccggtaaagcgtgtgcgcaaacggtattgggtattgtaaataccggcgacgcatctattgattcagcgaaaaaagcgggcgatatttctttagtgtcgagtgttgattatgaaactacaggttcatatccgttttatggtaaaacctgtgttgtcgtaagaggacaataa

SEQ ID NO: 368621 - DNA, 1635 bp, Salmonella enterica
atgctgcgccgggagaaacaaaaacaacgcataatctgggacaaattgatgattaaaggcaaactggcgctcgtgacgtgcgcgctgactctggtattcacttcgtcgcttttcgccgcgtcggacacggcagacggtcgtaccctgaagctggccattggccctgagccaacggaaggctttgatcctatgctgggctggagccacggcagctacttattgcttcatgcgccgttgcttaagcaaaacgccgacatgagttggggtaatttactgacggaaaaagtggataccagccccgtcggtaaaatctggacgctaaccttaaagcccgggctgaaattctccgatggctcgccattaactgccgaagatgtcgtttttacatacaataaagcggcgaagagcggcggtaaaattgacatgggcaattttagccatgcgcgagcgctggacgcacgccgaattgagatgacgctgagccatccgcagagcacctttgtgaatgtactcgggtcgttagggattgttccggccagccgttatgatgaaaaaacgttcgcccgcgaaccgataggcgccggtccgtaccgactggtcagctttcagccgggtcagcaactgatcgttgaagctaatccctggtatgcgggtaaaaagaatgactttaaccggctggtttttgtctttctggatgaagataatgcttatgccgccgcgcgcagcggacagttgggactggtgcgcattgccccttctatggcggtggccccgcagcaggataatcttaaactctgggtacgcgatagcgttgaaaaccggggcattgtcttcccgatggtgcctgccggtaaaaaggatgctaacggttatcctgtcggcaacgatgtgaccgctgatgtcgctatcagacgcgcaattaactatgccattaatcgtaagcaactggcggaacaggtgatggaaggccatgcgatacccgcctatagcgcggtgcagggattgccgtggcaaaatccttcagtgatattcagcgatggcgatattgcaaaagcgcgcgccatcctggaagaggctggctggaagataaaccgtgcgggcgtgcgtgaaaaagcgggtaaagaagcgcgtctgaccttatggtatgccagtggcgacagcacccgacgggatctggccgaggcggtgcgcgccatgttgcagcctttaggcattgtcgtctcgttgcaatcgggaagctgggaaactgtagagcgccatatgcacgctaaccctacgctgtttggctggggaagtctggacccgatggaactcttccatcactacagtgggaaagccgctggtgtggaatattataacccgggctattacagcaaccctgcggtagaagcacatctgaaacaggctatagatgcgcctgactggcaaaaggcgattcctttctggcagcaggttgagtgggatgggaagcagggcgcgggcgtccagggcgatgcggcatgggcatggctgcttaatattcagcatacctatctggccaacccctgtattgatctgggaaaaggcgcgccagaaatccacggtagctggtcggtgttaaacaatcttgatgactggacctggacctgtcggtga

SEQ ID NO: 368622 - DNA, 975 bp, Salmonella enterica
atgaaattgttcttcagtcattttttgcggctgattattctgttggtgctggtggctgccggcaccttcattttgcttagcttttcgcccgttgatcctatccgtgcttatattggcaacgatctgctccatgttccgccagaacaatatgcgcggattgcggcgcgctgggggctcgaccagccgctgtgggagcgtttcggtcactggttttggcgtctgctccagggtgacatggggtattccatgctgttcaacatgcctgtcgccagcgtgatccgggaacgttttgcgacgtcattcgcgctgctggcgggcgcctggctattgtctggtgtgctgggcgtgacattgggttttctggccggacgttttctccaccgttggccggataagatgatttgccgtatcagctacttattgtcatcgttgcccactttctggatagcaatgctgttgctggcgctatttgccgtccgctggccggtattacctgtttgttgcgcctgggaccccggaaataatgcaggaacagctcttttatcggaacgtttacgccatcttgtgttgccggtatgtgcgttaagtctattgggcatggggcaaattgcgctgcatacgcgagaaaaaatagccagcgtaatgaagagcgaatttattcgttttgcgcgcgctcagggggataaaggatggtcgctgttacgtcaccaggtgttacgtcatgcgattaccccagcactctgtttacagtttgcttctctgggcgaactgatggggggagcgttactggcagaaaaagtctttgcgtatccggggctgggacaggccactatcgatgccggtctgcgtggcgatgtcccgctactcatggggatcgttttattctgtacactattagtgtttgccggaaatacgatttcagcctggcttgtggtggtgcttaatcgatcgctggagcgtcccgatgctctataa

SEQ ID NO: 368623 - DNA, 813 bp, Salmonella enterica
atgctctataatcctgccccgacgttgtttcgtctgatcctctccgttacctgtctgctgtttattgccggatacggttatgccacgttgagccagccgccagaggttaatctgcttgcccggcatctgtcgcctgatatccagcactggtttggcaccgataatctggggcgcgatgtatggcttcgttgctttcagggggccttcaccagtttacaaattggcgttggcgccgcgctgtgcagcggcgttatcgcgctagtgatggcggcagtggcgcgcattcatccccggctggacctcctgatgcggttgataaccgatgctatgctcgccatgccgcatttacttttgctgatccttatctgttttacgctcggcggcggtaaaagcggcgtcattgcggccgtggcgttaacgcactggccccgtctggcgctgattctgcgcgccgacgcggagcgggtagcgcagagtgactacctgacattgacctatcgtctggggcatggacacctttattgctggcgatatcactattttccggcgctattgccgcaatggttgacgggaacgttattgatgtttcctcatgcggtattgcacagcgcggcattaagttttctggggtttgggctggcgccgcatgagccttcgctggggctgttgctggcggatgcgttacggtttattagccatggtaactggtggctggtgctgtttcccggcctaatgttattcacgctggtgatgctcttcgatcagtttgcgcgcgccattcagcggctgtggctaaggagtgacgtatgctaa

SEQ ID NO: 368624 - DNA, 798 bp, Salmonella enterica
atgctaagtttacaacaggttacgctggaaagcgcgcgttatcgctggtatggcacgagacgctggtcgccgttattacagaatgtctcttttgatatcgcacccggcgaaatggtggcattggttggcggcagcggggagggaaaaagtctgctgctgcaatgcctgctcgatctgctgccggaaaacttacgctttcggggggagattacgcttgatggcaaccggctggacagacataccatcaggcagcttaggggcaatacgtttagctacgtgccgcagggggtacaggcgcttaatcccatgctgaatatcagaaaacatttgaacagagcatgtcatctgaccggacgcgcctgggatgagacgcagatggtacagctattacagcaaagcgatcttgaaccgacagtcctggaacgctttccccgccagctctctggcgggatggctaaacgaattctggcgtgccacgcctcgctcagccaggctcgttatatcctcgcggatgagatcaccgcctggcttgataccgcactggcaaaccagttgcttgagcacttgcgaggtctctgcgagcggggatgcggcgtgctgtgggtgactcatgacctgctgctggcggcgcggtatgccgatcgcattgtggcgctgcatcagggttatatcacggacaatatccgctgcgagcagttacagccggaagagatgagtgagccgttaaaacggcaatggcaagcattgcctgaactaaacccgttatttatgccgaccggagagggaatagaatgctga

SEQ ID NO: 368625 - DNA, 591 bp, Salmonella enterica
atgctgagctgccgcgacctcgttattcgtcagggcgggaaagtcttatggcagaacctgacgtttaggatttctgccggtgaacgggtaggaattcatgcgccaagcggaacggggaaaacaacgttggggcgcgtcctggccggatggcaaaagccgacggcgggcgacgttctgctggacggcagcccgttacccctgcatcagtattgtccggtacagcttgtcccccagcatcctgaactgacgtttaatccctggcgaagcgccggagacgctgtacgtgatgcctggcagcctgacccggaaacgatgaggcgtttgcatgtgcagcccgagtggctgacgcgtcggccaatgcagctctcaggcggggagttggcgcgtattgcgatactgcgcgcgcttgacccacgaacgcgttttctgattgccgacgaaatgacggcgcaactcgatccgtctattcaaaaagcgatatgggtatacgtgcttgaggtgtgccgcagccgttcattagggatgttggtgattagtcatcagtctgcgctacttgatcaagtctgtacccgccatttacaggtggaatag

SEQ ID NO: 368626 - DNA, 1134 bp, Salmonella enterica
atggagtatttagcacgactaaatatcgttgcgatgctgatgtcaacgacgttctggatcaatctggcggtcgtttttttcgtcaccctcattacttactggctcatcaactggctacttaatgtggtctataaagcgctacaacgcccggataaaaagaatgatgctcatgggcggctgcggcctattgttttcgagatgctgaaaaagaccagtaagatgctaatcttttttgccgcatttctctttagcctgcgctttgtcgccctgcccgaccggttattctctaccctctctcacgcctggtttttagtggttgcgattcaaatggcgatttggcttgatcagggcgtacagtcatggatgcgtcatttactgtatgccccaggctccaataaaaacccggtgacgttagtcattcttggtatgattttgcgcgtgctcgtctggtctatgatgttgctctccatcctggcgaacgtcggcgtggatattaccgcactggtagccagcctcggcgtgggcggtattgctattgccctggcggtacaaaccgttctgagcgatgtcttcgcttcgctgtcgattggtttcgataagcccttcgagatcggcgatttcgtcgtctttaatgatgtagccggtacgattgaacatatcggtttgaaaaccactcgcatccgtagcctcagcggcgaacagatcgtttgtgcgaacgcgcaattgttgcagcaaaccatacacaactataagcggatgcaaacgcgtcgtatcgtgtttacttttggcgtcgccactgcgacaccgccggaaaagttacgcctcatcggcgatatggtgaaaaagattattaccgatgtcggcgaaacacaattcgaccgcgcccatctactggcctttggtcaggatcggctgacctatgaggtggtgcatatcgtcaataccgcggattacaataaatacatggatattcagcaagagataaatatccgtattattgaaaaactcattgagaatgatatcgaactggcgctgcctagtctggttgtcagagcccctgtacaggttgaagagaccagggactacagtaataccgctgatgcaaaaaacgcagataaacgcgtcatgcagtaa

SEQ ID NO: 368627 - DNA, 327 bp, Salmonella enterica
atgcaacaagaacatcgtgagtgtattgagcagtgttatgaatgcgcggcggcgtgtgatatctgcgcctcttcttgtctgcgtgaagataacgtcgaaatgatgaagcactgcatccagttagatatgcaatgtgcggccatttgtcgcctggcggcgcaatttatggcattggaaagcgagtactcacaaaaattatgccgcctgtgcgcggatatctgcaaagcctgcgccgaagagtgtgcaaggcacgatcacgaccattgccagaattgcgcgcgggcatgcagccaatgcgcagacgcctgccttaaaatggccgcgtaa

SEQ ID NO: 368628 - DNA, 651 bp, Salmonella enterica
ttggtgattcatttaaaaaaactgacaatgcttctgggaatgctgttggtcaatagtcctgccttcgcgcatggtcatcatgctcatggcgcgccgatgacggaggttgagcaaaaagcggcagcgggcgtgtttgatgacgcgaatgtacgcgatcgcgcgctcaccgactgggatggtatgtggcaatccgtctatccttatctggtcagcggcgagctggaccctgtcttcagacaaaaggcgaagaaagacccggagaaaacgtttgaggatattaaagcgtattatcgcaaaggatacgtgacgaatgttgagacgatcggcattgaaaatggcgttatagaattccatcgcgacaataacgttgcatcctgtaaatacaattatgccggctataaaattctgacttacgcatcgggtaaaaaaggggtgcgctacctgttcgaatgtaaagatgcgaatagcaaagcgcctaaatatgttcagtttagcgatcatatcattgccccgcgcaaatcggcgcacttccatatctttatgggaaatacctcgcagcaggcattgttgcaagagatggaaaactggcctacctattatccttatcagttaaaggcgaatgaggtcgttgacgaaatgctacatcattaa

SEQ ID NO: 368629 - DNA, 789 bp, Salmonella enterica
atgacgctgtccataccgccctcgattcaatgccaaacggaagcggcgtgtcgcctgattactcgtgtcacaggcgatacgttgcgtgctattcatttatatggttccgctgtcgcgggcggtctgaagccaaacagcgacattgatctactggtgacaatatgccagctgctgacggaggcccaacgcgcaacgctgatgcaggaattgctggcgctttcatcgccgccgggggcgtcggcagaaaaacgcgctctggaggtcactgtcgtgctttattcgcagctggttccctggtgttttccacctgcccgggaaatgcaatttggcgagtggctaagagaggacatttgtcaggggatttatgaaccagcgcagcaggactgggacattgtgttactgataacccaaattctggaaaccagtataccgctaaagggagaacgcgcggaacggctgttcacgccagcccctgcggcgcagttgctgaaggccttgcgttatcccctcgacctttggcaatccacggcagatgtgcagggagatgagtatcatatcgttttaaccctggcgcgtatctggtataccctttctaccgggagatttacctctaaggatgcggcggctgactggctgttacctcagttgccagaagattatgctgccacgttgcgtgcggcgcagcgtgaatatttaggtctggagcaacaggactggcatattttgctgcctgcggtcgtacgctttgtggattttgccaaagcgcacatccccacgcagttcacataa

SEQ ID NO: 368630 - DNA, 594 bp, Salmonella enterica
atgactggttccgcatcatctgttttaaagacagatacaagactattgagcgaaaacctgtttcttaattatggtctggagtccttatttaaggacgtcgcaataatagctggcaacgtaaattatattatttttgatatcgacgattactacaccgtacagcagtatattacttccacatttaaagcggtactcattggaattgttacccataatgaatataactttattgatgaacatcatgctatatatcgaataaaggtcgatgcctctattgctgagtggcgcgaattactaattttggccgctgctggtcaattttttcccaggtcagagaaagtcagattaacggcgaatgaaagaaatgttttggcgatgcttgttaaaggaatggatatccgacaaataagctgtgagctgaatgtacatttaaaaactatttactcagtacgctaccatgttctgactaaattaggttgtagaacagttctggactatcaaatactgtccgtttctaaagcctttacgcactggcttacaataaataatgttgataatgtaatttcccgtgtaaatagtaaggtcattgcttaa

SEQ ID NO: 368631 - DNA, 849 bp, Salmonella enterica
atggctacttttagtattagcgcaatggcggcgcagtgtggtgtcacaacagcaaatatcaggtcctgggaacgctatggcctgcttcaacctaccaaagatgaagctggcaatcgtttttattgcatagaagatgctatcagaatacagcatattatcgacgcgttaagcaaaggcttttcattaaaagagattaaacctgccctctatggtgaagaaacgcattgccgctcgggatggttattctaccaggaagagattttagcgcagtgtagaaaattcgaacccgccaaattgcgaaaattactctggcgttatggtcgggaaattccgccgtgtatcgtaattgagtcaatactgcgtcctttacggctgtggttgtccgcaggcgatgatgatgcacgccgatttgaaaaggcattactggatactgcgattattgaatacgccacgttccagctaagtagcgtacgaaaggcgccagcaggcacaatgcttattgctgcgttttcgctgaacgaccccattgagctatggctggaaacgattaaatattgtagtgaaggtatgcgagttgaagtcatcccctggcaggcgccgatgcccgatcttttatcaacgtctttcgagcatattgttctgtggcatgatgagacattaactcccgcgcaggaaaatcttattcaggctttaaaagaatcgggtaaatttagtcttcatgtgaaaaatggctcaggcttaacattactgccagccgtataccggcagcatgagatgcccgaaagcatgcagcatgttgcaccgcaaatccatgcaaacggctacgaaaaatcaggcaccgcacgttga

SEQ ID NO: 368632 - DNA, 249 bp, Salmonella enterica
atgactaccattacactagtcaacgaacaaaatagtactggcaatcctttttctgcacatatgttatgtgaacagcgagctattcaggaaattacttacgaactattgcaatcgcagcagcatgtctcaaataaggatatcatcgccaaacttattgaaaaactggaaacagaaaaagacgtagtgcagcttgatatttaccgtaatgccttagaagccgttttgtttcagacacctgacgacatctaa

SEQ ID NO: 368633 - DNA, 546 bp, Salmonella enterica
atgattcgtcatatcgccatttttctttgttctttattgatgtgcagcaccacttttgccgattcggtaacgtcggtatcgcttggcgcgctcttaaccgcgctcaatgaacgcatgttattaatgaaagatgtggctgcttataaaatgaagcaccatctgccgatagaggatttcacacgtgaacaaaatgtttttgccgaggctgaagaagaagcgaaaaataacggtctggacccgcattcgataaccccttttattcgttcgctaatggatgccagtaaagcgatacagtaccgctatttagcgcagtggcgaaccggctcggaaccctcctttccgatacaaaccttgtcggtcacccggcaacgtattcgacaacttgataatcaaatgttgatcattatcagccagcgcttgatggtcggcgctttcagccacgacgatatggtgtggctgagagcgcagtttaatgcgccgaatctgaatgagagcgatatcagtaatgtgttggcagccttatctttggtgcgacgcgcgcgttaa

SEQ ID NO: 368634 - DNA, 639 bp, Salmonella enterica
gtgttcgcggagtatggtgttctgaattattggacgtacctggtcggggcgatttttatcgttctggtaccggggccgaatacgctttttgtgcttaaaaatagcgtgggacgcggggttaaaggaggatatcttgccgcatgcggcgtgtttatcggcgatgcgatattaatgtttctggcgtatgcgggcgtggcgacgctgatcaaaacaacgccggttctgtttaacattgttcgctatctcggcgcgttttatctgctctaccttggcgcaaaaatcctttacgccactctgacctcaaaagggcgtgcggcgacggaaacggtagttccttttggcgctatttttaagcgtgctttaattcttagcctgacgaatcctaaagccatacttttttatgtttccttttttgtgcaatttattgatgttactgcgccgcatactggcgtgtcattttttattttggccaccacccttgaaattgtcagtttttgctatctgagctttttaattctttctggcgcttttgtaacccactatattggtaccaaaaagaaactggcaaaagtgggcaattctttgattggccttcttttcgtcgggtttgccgcccgcctggcaacgctccagtcttaa

SEQ ID NO: 368635 - DNA, 363 bp, Salmonella enterica
atgcggcaaattccacaaaatcatatccatacacgttccacgcccttctggaacaaagagacggcgcctgccggaattttcgaacgccaccttgataagggaacgcgacccggcgtttatcctcgtctctcggtgatgcagggggcggtcaaatatctcggatacgctgatgaacattgctctgagccggaagagatcatggtgatcaatgccggcgagtttggcgtgtttcctccggaaaagtggcacaatattgaggtcatgacggatgatacctattttaacatcgacttttttgtcgcgccggaagtactgatggaaggggcgacctcacgaaaagtcattcatgccgggagagaataa

SEQ ID NO: 368636 - DNA, 183 bp, Salmonella enterica
atgggaaaggccacttataccgtcacggtcacgaataatagcaacggcgtctctgtggactatgaaacggaagcaccgatgacgttgctggtacctgaagttgcagcagaagttgtgaaggatttggtcaataccgtgcgttcctacgataccgaaaacgaacacgacgtttgcggttggtaa

SEQ ID NO: 368637 - DNA, 642 bp, Salmonella enterica
atgaaactcgatacccgattaacttcgtcagcacttactcttgcgcttgccgctgtggtcatcccgtttacggcggactggcaattgcctttgcttaacggcgtggtggtccgatggattgaaaacggacaagcgttatggttactgtttggggcgctatttaccgcctggtatatacggccactttcccgtcccgaaggggcaaagcagttttggctatgggctgttgtctggtgggtggtgctattgggtagaagcaccagttgggggcgtgactatttccctgacgagccgcgtatgctgttcagaacgatttcagtgctattaattgctgcgttagtcttgccagtcctgttttctgccgggctccgtaaggagattgttcgtcgcctacgggacgctcctctgccattgtggctgtttaccgtgacggcatgttcatatctgatttccgacactgtcgagcatcatcggtggttgtcgccgatattcctgcataacgctcgttacacagatttgattgaagagctttatgaagtgccatttatgatcggtttgtttatggtgaccgtggtgtttatgcagcaggacaagcaggatgaatgtacggcgctggagatgaccccgtatcacgcaaaatag

SEQ ID NO: 368638 - DNA, 249 bp, Salmonella enterica
atgggcattctttcatggattatttttggacttattgcgggtattttggctaagtggatcatgccaggtaaagatggcggcggattctttatgacgatcattctggggatcgttggtgcggtagtcggaggatggatcagtacgttctttggctttggcaaagtggatggtttcaacttcggcagctttgcagtcgcggtgatcggtgcgattgtcgtgctgttaatctacagaaaaatcaaaagctaa

SEQ ID NO: 368639 - DNA, 252 bp, Salmonella enterica
atgaaatttacgtggattgcgttgccaggcgtattgctgctgagcgcttgttcatcgtcgcaacccaacgccccccggccgccgcgcattgggatgcctaatccggcagccgtctactgtgagcaacagggcggtacgctgatgccggtgcagaccccacaaggcgtgcgttccgattgcaaattgcccaatggcgaaatcattgatgagtgggcattatggcgcagagagcaccctgatacgaaaaagtga

SEQ ID NO: 368640 - DNA, 312 bp, Salmonella enterica
atgtttcagttaaagccgggcgcgttggcaatagttattggcgctaagacacccgccggacggcggaatattggtaaatcggttgagctattttgcctgtgccaacccggagatgaattcattaatccggtaaatggacacgtcaccttactgccgaaagaagcgcctcgggcgctgtggctggttacgggcgacgtagcctccgccgatggtcagcacggttttgcctgggtgcgagcagaacatttgatgccgttgtccccggacagacaaccaggccaggcggcggcacgacaatcacagctctcgtag

SEQ ID NO: 368641 - DNA, 348 bp, Salmonella enterica
atgcgaatccagtgtaagcgcgtctatttcccggcggaaaaagacgatggttatcgggtattggttgacaggctatggccacgcggcattaaaaaatcggcgctggtctatgatgaatggaataaggccattacgccctccaccgaattgcgcaaagcctttcatagcgaactgattgattttaaccacttcgcgcagcaataccgggcagaacttgcgcaacagcatcacgaaggcaaacggctggcggatattgcccgacaccagccgctaacgttgctatacgccgctaaagatactcgccagaaccatgccattgtgctggcagagtggctacgagagctgtga

SEQ ID NO: 368642 - DNA, 1185 bp, Salmonella enterica
atgacgacagccctttcaccacgcggcaaacagggcgctttactgattgccggtattttgatgatagccactacgctgcgcgtaacatttaccggcgctgcgccgttgctggagacaatccgttcggattacggtctttccaccgcccagacgggcctgctaacaaccttgccgcttctggcgtttgcactggtttcgccgctggcggccggtattgcccgccggtttgggatggaacgcagtctgtttgccgcaatgctgctgatttgcgcgggtattgctctccgctccctgccctccgctgcattgttgtttgccggaactgccattattgggtgcgggatagcgctgggtaatgtgctgctaccaggattgattaagcgcgatttttcacaacatgtcgccaggctgacgggcgcgtattcattgacgatgggcgccgccgccgcgttggggtccgcgctggtggttccgctggcgttgcacggttttggctggcgcggcgcgctgttaatgctaatgctgtttccgctgttggcgtttcttatctggttgccgcagtggcgcactacccgctcagctaacctgagtagctcccgggcattacatgaacgcggtatctggcgttcgcctttagccaggcaagttacgttgtttctgggacttaactcactgatttattatgtgattatcggctggttaccaacaatactcatcagccacggttacagcgaagcacaggcaggatcgctacatggcctgctgcaactggcgaccgcggcgcctgggttagccattccgcttattttgcctcgctttaacgatcaacgctggattgccgcgctggtctcactcttgtgcgcagtgggcgcggcggggctttggtttgtgccgggccaggcgatcatctggacgctactgttcggcttcggttcaggcgcgacgatgatcctcggcctgacgtttatcggcctgcgcgccagttcggcgcatcaggcggcggcgctttccggcatggcgcagtcggtcgggtatttactggcggcatgtgggccgcccgtcatgggaaaacttcatgatgccagcggtagctggtatctgccgctatcgggcgtaacggttctggctatcatcatggcgattttaggcctctacgccggacgcgatcgagagatagcgtcataa

SEQ ID NO: 368643 - DNA, 795 bp, Salmonella enterica
atgattggcctgagactggacggttacgatcccgaccttcaccacgatgccgctgtggccttttgtattcgcgccagggatgatgaactgtttagccctcgccatcagcatcgcaagggacagttgatcctcgctctgcacggcgcgatcacctgtgaggtggaaaatgcgatgtggatggttccgccccagtatgccgtctggctccccggctcgctgccgcacagtaatcatgtgaccgcaggggcggagctgtgctttttatttattgaacctgcggcggtcgtcatgccggagcgttgctgcacgctgaaaatttcgccgttatgccgggagttgattttgtcgctggcgcgcagaaccgatcccgaaagagcgcaaatgccaacgcagcgccttattcaggtgttgtttgatgaactgccgcagcagccgcaggaacaattgcaattaccggtatcggggcatccgaaaatccgccaaatggttgagacaatggcgcaggagcccgcgcgatggaatacgttagggcagtgggccagcgtattcgcgatgagcgagcgtaaccttgcccggctggtcgtcaaagagacggggctaagctttcgtcgctggcgtcatcagttgcaattaattctggcgctacaagcgctgatcgcgggacgtaatgtacagcagacggcgcaaatgctgggttatgattccaccacggcattcattaccatgtttaaaaaaggcctggggcagacgccaggccagtatctgacgggcgagttactgcttccccacaattaa

SEQ ID NO: 368644 - DNA, 447 bp, Salmonella enterica
atgtttgatgtcactctgctgatcctgctcggactggcagctctgggatttatcagccacaacaccactgtcgccgtctcaattctggtgctgattattgtccgcgtaaccccgttgaataccttttttccctggattgaaaaacaggggctcaccgtcgggattatcattctgaccatcggcgtgatggcccccatcgccagcggaaccctaccgccctccacattgatccactcttttgtgaactggaaatcgctggtcgcgattgccgtcggcgttttcgtctcctggctgggcggtcgcggcattacgctgatgggaaaccaaccgcagctcgtcgccgggctgctggtcggtacggtacttggcgtcgcgctgtttcgcggcgtgccggtcggcccactgattgcggcggggctggtctctttaattgtggggaagcagtaa

SEQ ID NO: 368645 - DNA, 528 bp, Salmonella enterica
atggccgaaatgactgaagtcgcaaagggtgtcgctacacaccaacgtttagtggctttattaacccaggagaacgcgcgctatcgtgtggtgaaccatgaagcggtagggaaatgcgaagcggtatctgaaatacgcggtactgcgctgggccagggcgcaaaagcgctggtctgtaaagtcaaaggcaacggcgtcaaccagcacgttcttgctattctggcggccgatcagcaagccgacctctctcagcttgcttcacatctgggcggcttacgcgcttcccttgccagcccggcggaagtcgatatgctgaccggctgcgtttttggcgcgatcccgcctttcagttttcaccccaatctgaaactggtcgccgatccgctcctgtttgagcgtttcgatgaaattgcctttaatgccggcctgctggaaaaatcagtcattatgaatacacaggactatctgcgcatcgcccgaccagaactggcagtcttccgccgctttcagtcatcgccaacggcttag

SEQ ID NO: 368646 - DNA, 1494 bp, Salmonella enterica
atgaatttgcatcataaagcgctcaggcactttatctcggcaagcgtcatcgttttgacatcgtccttcctgatttacgaacttattgccagcgacagggcaatgaatgcctatatgcgttatatcatggagagagccgattcgtcgtttttgtacgataagtaccagaatcagagcatcgccgcacatttgatgcgaacttttgaagcgccgggagaccccgtcactgcagaaaaacgccgcgcgttttgcgacgcctttgaggctattaacggtacgcacggcgtcaacctgacccggcataattatccggggctacatggcaccctgcaaaccgccgctacacagtgtaccgataatcttgatgacgcccttttactgcctgcatttgatcaggcggtaagcatcaaccgttcgcaggacgaccacagtcacgggctgggcacactggagcttaaattccgttattacgttgatttaaataaacattatgtccatttctatgatttaatcaactcacggcgcttcgccatgcatcgttggacttttttacaaaaaggcacaatgggtattaacagaaaagatatagataaactttttaccggccgtacggttatttcaagtatttacatggatgatattacccaggaaaacgtcatgagctttttaacgccagtctatctggcgggaacgttaaaaggtatcgtgatggtggatgttaaccaggataatttaaaaaatattttttatacccaggaccgtccgctggtttggcgttatcttaacgtaacactaaaggacatggactccggaaaagaaattattattaatcaaagcaaaaataatctgtttcaatatgtgaattatagccatgatatcccgggtggactgcgcgtttcgttgtcccttgatttaacctatttccttgtctcgtcctggaaagcgctggccttttacttactggcaacggcgctcctgcttaatatggtacggatgcactttcggctttatcgcaacgtcacacgcgaaaatattagcgatgccatgaccgggctttacaaccgtaaaatattaacaccggagctggaacagcgactgcaacgcctggtcaatgccgggacgccggtgacatttgtcgctattgattgcgataggttaaaactgatcaacgatacccaggggcaccaggaaggcgaccgaattattaccctgttggcgaaagcgattaaaacatcgattcgtaaaagcgattacgccattcgcctcggcggcgatgagttctgtattattcttgttgattacgcggcggatttggctatccatctgccggagcgtattattcgtaacctgcaaattattgcaccggataagacagtccatttttccgccgggatttataatatgcagcccaatgatacgattaatgatgcctaccaggcttccgatgcgcagctctatctgaacaaacagcaaaaacaacatcgttcatcatag

SEQ ID NO: 368647 - DNA, 1287 bp, Salmonella enterica
atgacctggttcatagaccgacgtcttaacggcaaaaataaaagcacggtgaatcgccagcgctttttgcgccgttataaagcacaaattaagcagtcaatttccgaagcgattaataaacgctctgtgaccgatgtcgacagcggagagtccgtctctattccaaccgatgatattagcgaaccgatgtttcatcaggggcgcggcggtctgcgccatcgcgtccatccgggtaacgatcactttatccagaatgatcgcattgagcgtccgcaaggcggtggcggcggcggttccggcagcggtcaaggtcaggccagccaggacggcgaaggccaggatgagtttgtttttcagatttcaaaagatgaatatctggatctgctctttgaagatttagcgctgcctaatctgaagaaaaaccagcatcgccagcttaacgagtataaaactcaccgcgccggtttcacctcaaacggcgtaccggccaatatcagcgtggtacgttcgctacaaaactctctggcgcgccgtacagcaatgacggcaggaaaacgccgcgaactgcacgcgctggaaacggaactggagaccatcagccatagcgaaccagcgcaactgcttgaagaggagcggttacgtcgggaaattgccgaactacgggctaaaatcgagcgagtgccgtttatcgacacctttgatttacgctataaaaattatgaaaaacggcctgagccctccagccaggcggtgatgttctgtctgatggacgtctcgggttcgatggaccaggcaaccaaagatatggccaagcgtttttacattctgctctatctgtttttgagccgaacatataagaacgtagaagtggtttatatccgccaccatacccaggcgaaggaagtggacgaacatgagttcttttattcgcaagagaccggggggacgattgtctccagcgcgcttaaactcatggatgaagtggttaaagagcgctacgacccggggcagtggaacatctatgcggcgcaagcgtcagacggtgataactgggccgacgattcaccgctgtgtcatgagattctggcgaaaaagctgctgccggtagtgcgctattacagctatatcgagattacccgccgcgcccaccagaccttatggcgcgagtatgaacatctgcaggcgacgttcgataacttcgccatgcagcatattcgcgatcaggaggatatttatccggtattccgcgaattgtttcagaaacagagcgccaatcaaagcgtataa

SEQ ID NO: 368648 - DNA, 1935 bp, Salmonella enterica
atgaatatattcgatcactatcgccagcgttacgaagctgccaaggacgaagagttcacactgcaggattttcttaccatttgtcggcaagatcgcagtgcttatgccaacgcggcagagcggctattaatggctatcggcgagcctaatatggtcgacactgcccaggaaccccgactttcccgactcttctccaaccgggttattgctcgctatcctgcgtttgaagagttttacggcatggaagacgcgattgaacagattgtctcttatctgaaacatgcggcgcaagggctggaagagaagaagcaaattctctatttgctgggacctgtggggggtggcaaatcatcgctcgctgaacggctgaaatcgctaatgcagcgcgtgccaatttatgttttaagcgccaacggcgagcgtagtccggtcaacgatcatccgttatgcctgtttaatccgcaggaagacgcgcagattctggaaaaagagtacggtattccgcgccgctatctcggtacgattatgtccccgtgggcggccaaacgcctgcatgagtttggcggcgatattactaaattccgcgtggtgaaagtctggccctccattctggagcagattgccatcgccaaaacggaacccggcgatgaaaacaaccaggatatttcggcgctggtcggcaaggtggatattcgtaaactcgaacatcacgcccagaacgatccggatgcgtatggttactctggcgcgctgtgccgcgctaaccaggggatcatggagttcgtcgagatgtttaaagcgcctattaaggtgctgcaccccttgctgaccgcaactcaggaaggtaactacaatggtacggaaggtatttccgccctgccctttaatggcatcatacttgcccactcaaacgaatctgaatgggtgactttccgtaacaataaaaataacgaagcgttcctcgaccgtgtctatatcgtgaaggtgccttattgcctgcgaatctccgaagagatcaaaatctacgagaaactgcttaatcatagcgagctggctcatgcgccctgcgcgccgggcacgttggaaacgctttcgcgcttctcgattctttcccgcctgaaagagccggaaaattccagtatttactcgaaaatgcgcgtttatgacggtgaaagcctgaaagataccgaccctaaagctaaatcgtaccaggagtatcgcgactatgcgggcgtggacgaagggatgaacggtctctccacccgattcgcctttaagatcctctcccgcgtattcaacttcgaccatgcggaagtggcggcaaacccggtacatctgttctacgttctggaacaacaaatcgagcgtgaacagttcccgcaggagcaagctgagcgttatctggagttcctgaaaggctacctgatcccgaaatacgccgaatttatcggcaaggagatccagacggcctatctcgaatcttattctgagtacgggcagaacatttttgatcgttacgtgacttatgcggatttctggattcaggatcaggagtatcgcgacccggataccggtcaactgttcgatcgcgagtcgctgaacgccgaactggaaaaaattgaaaaaccagcgggtatcagtaacccgaaagatttccgtaatgagatagtaaactttgtcctgcgcgccagagccaacaatagcggccgtaatccaaactggaccagttacgagaagctgcgcacggtgattgagaaaaaaatgttctctaatactgaagagctgttgccggtcatttcttttaacgccaaaacgtcgactgacgagcagaaaaagcatgacgactttgtcgatcggatgatggagaaaggatatacccgtaagcaggttcgtttgctgtgcgagtggtacctgcgcgtgcgtaaatcgtcgtga

SEQ ID NO: 368649 - DNA, 747 bp, Salmonella enterica
gtgaccaaacttaaacttctggctcttggcgtgtttattgcaacatccgccagcgtcgcgcacgctgaaagcaacctgacgttgggcgcaggcgttggtgtggttgaacacccttataaagattacgatagcgatgtttatccgataccggtcatcgcttatgaaagcgaaaacttctggttccgtggtctgggcggcgggtattacttgtggaatgacaatgccgataagttgtcaatcatggcatactggtccccgatgtacttcaaaccgggcgacagcgatgaccatcagttgcgtcgtctggacaggcgtaaaagtactatgatggcgggcgtttcttacgcgcatcacacccagtatggattcctgcgtacctcactggcaggggatacgttggataacagtaacggtattgtctgggatctggcctggctgtatcggtataccaatggcgggctgaccttaacgccaggtatcggggttgaatggaatagcgagaaccagaacgattactattacggcgtatcacgtaaagaatcttcgcgtagcggcctgcgcggctataacccgaacgatagctggaacccgtatcttgaacttagcgctaactataatttcgccggtaactggagcgtatatggtactgcgcgctacacccgcctgtcggatgaaattaccgacagcccgatggtggataaatcctggaccggtatcctttctactggcgtgacctatagattctga

SEQ ID NO: 368650 - DNA, 1197 bp, Salmonella enterica
atgagcatagtattcaataccgtagccaagcccagcggcagtctgtgtaacttatcctgcaagtactgtttctatcttgataaaccccgggggcagcgcgtcatttctgacgatgtgctggagacgtatatccgccgggtaattgatgatacgccatcctcagaggtctcgttttgctggcaggggggagagccgacgctatgcggtctttctttttaccaaaaagtggtgcgcttgcagcaacgctatgccaacggcaaaactatctacaacagtctgcaaaccaatggcgtattaatcaatgaagagtgggcggctttctttgcgcagcaccagttcctgattggtatatcgattgatgggccgcaagtcgttcatgataattaccggaaaacgccgtcagggcgggcgtctttttcccgagtcgttaatgctatccgccttctgcaggcaaatgatgtcgagttcaacacgctcactgtcgtgaatgatgcgtcatgccgtcatggcaacgctatttatcattttttgacgcaggaactggaaagtaaacacctgcaatttattcccattgttgagccgctcgcgcaaaaagcgcagcgttctttgacgttatctgacaatgaggattcgccttcgctgatgcccttttccgtcacgcctgaagggtggggcgcctttatgtgcgatgtttttgatcaatggatacgtcacgatgtcggacgcatattcgtacagctttttgataacttacttggcgtctggatgggggagcccgccacgctttgtacgatgcagtcgacctgcgggcaaagtttgctggtggagcagaatggcgacgtgtttagctgtgaccattttgtttttcccgcctataaactgggcaatctgcagcaacactctttagaagaaatggcggcctctccttttcagcagcagtttggcgcggctaaagcaaacctttcctcacgctgccagaactgtacgtggcgctttgcctgtcacggcggttgtccgaaacatcgaatttgtatggacggcggcgaacggcaaaattatctctgtaaaggatatctggagttctttcaacatgtgacgccctatatgaatgtgatgcgtcaattattactaaatcagcgacccgccgcgcatattacccgcatcgtcgacatgattgcggatgacgttcgtcagtga

SEQ ID NO: 368651 - DNA, 849 bp, Salmonella enterica
gtgaaaaacgtaacgttttgcgggcaggtgacgcttcctgccatcggacagggaacatggtatatgggcgagcgcgcggatcaacgtcagcgcgaggtttcggcgctgcgcgcggggctggatttggggttacgccttattgatacggcggaaatgtatgccgacggcggggcggaaaaggtcgtgggcgaggcgctggcagggcgacgcgatgaggcatttctggtgtcaaaagtgtacccgtggaacgctggcggccagaagatagttgccgcctgtgaggaaagcctgcgtcgtctgaaaacagattatctcgatctctatctattgcactgggccggaagcttttcattcgaagagaccgttgaaggtatggagcggctaatcgcgcaggggaaaattcgccgttggggagtctctaatcttgattatgacgatatgcaggcgctgtggcgcatccctgggggacagcaatgcacgacaaatcaggtgctctatcatctggcgtcacgcggtattgagtatgatttattgccgtggtgtcaacaacagcgaatgccagtgatggcctatagcccgctggcgcaggctggccggttacgtagcggtttactgaatcatccggtggtgaatgaaattgcgcaagcgcataacgcaacggcggcgcaaatcttactgacgtgggtgattgcacatccgggcgtgatggcgatcccgaaagccggaagtacagaacacgtgaagcaaaatgcggcggcgcttgagatcgccttgtcagcaaacgaacttgccttactggacaacgcctggcctgcgccaaaagggaaaaccgcgttggatatggtgtga

SEQ ID NO: 368652 - DNA, 885 bp, Salmonella enterica
atgattaataaaatttttgccctcccggttatcgaacagcttacccctgtcctttcccgtcgtcagcttgatgacctggatctgatcgtcgttgaccatccgcaggttaaagcctcttttgcattacagggcgcgcaccttctctcctggaaacccgttggcgaggaagaggtattgtggctcagtaataatacgcctttcaaaaccggcgtggcgctacgcggcggtgtaccgatctgctggccctggtttggacctgcggctcaacagggtctaccgtcacacggctttgcgcgtaatctaccgtgggcgctaaaagcgcataatgaagatgataatggcgtaatgctgacatttgagctgcaaagcagtgaggccacccggaaatactggccgcacgatttcacgctgctggcacgttttaaagtgggcaaaacctgtgaaattgaactggaagcgcatggcgagtttgcaaccacatccgcgctccacagctattttaacgttggcgacatcgccaacgttaaggtcagcggactcggcgatcggtttattgataaagttaacgacgctaaagaaggtgtcctggccggcggtatacaaacctttccggaccgtaccgatcgcgtttacctcaatcctgaagcatgtagcgtgatccacgatgcgacattaaaccgcacgattgatgtagttcaccaccatcaccttaacgtcgtaggctggaaccctggcccggcgttgtccgtcagcatgggcgacatgccggatgacggctataaaacgtttgtctgcgttgaaacggtttacgctactgcgccgcaacaagccacagaagaaaaaccctctcgtctggcgcagactatctgcgtcgctaaacgctaa

SEQ ID NO: 368653 - DNA, 996 bp, Salmonella enterica
atgactatcaaagtaggtatcaacggttttggccgtatcggtcgcattgttttccgtgctgctcagaaacgttctgacatcgagatcgttgcaatcaacgacctgttagacgcagagtacatggcatacatgctgaaatatgactccactcacggccgtttcgacggtactgttgaagtgaaagacggtcatctgatcgttaacggtaaaaaaatccgtgttaccgctgaacgcgatccggctaacctgaaatgggacgaagttggtgttgacgtagtggctgaagctaccggtatcttcctgactgacgaaaccgcgcgtaaacacatcaccgctggcgcgaaaaaagtggttctgacgggtccatctaaagacaacaccccaatgtttgttaaaggcgctaactttgacaaatacgaaggccaggacatcgtttccaacgcttcctgcaccaccaactgcctggcgccgctggctaaagttatcaacgacaacttcggcatcatcgaaggtctgatgactactgttcacgcgactaccgcaacccagaaaaccgttgacggcccgtctcacaaagactggcgcggcggccgcggcgcatctcagaacatcatcccgtcctctactggcgctgctaaagcggtaggtaaagtactgccagaactgaatggcaaactgactggtatggcgttccgcgttccgactccgaacgtatccgttgttgacctgaccgttcgtctggaaaaagcggctacctacgagcagatcaaagctgctgttaaagctgctgccgaaggcgaaatgaaaggcgttctgggttacaccgaagacgacgttgtatctaccgatttcaacggcgaagtatgcacctccgtgttcgatgctaaagcaggcatcgcgctgaacgacaacttcgtgaaactggtctcctggtacgataacgaaaccggttactccaacaaagtactggacctgattgctcacatctccaaataa

SEQ ID NO: 368654 - DNA, 414 bp, Salmonella enterica
atggctaaccaaccttcagcagaagaactcaagaaaaaattgtccgaaatgcaattctacgtgacgcaggatcgtggcacagaaccgccatttaccggacgcctgctacataataaacgcgatggggtttatcactgcctggtctgtgatacgccgctttttcactcccacaccaaatacgattcaggctgcggctggcctagcttttaccagcctgtcagcgaagaggcgattcgttacatagacgatttttctcatggcatgcagcgtgtcgaaattcgttgcggtaactgcgatgcgcatctcggacacgttttcccggacgggccgcagccaaccggtgagcgctattgcgttaactcggcctcgctggccttttctgacgagaaaaacggcgatcaactgaaaggctga

SEQ ID NO: 368655 - DNA, 279 bp, Salmonella enterica
atgaatcttgatgagatcattaacagcatgacgccggaagtgtatcaacgtttatccaccgccgttgagctgggtaaatggccggatggcgtggcgttgacgccggaacagaaagaaaacagcctgcaactggtgatgctatggcaggcgcggcacaataccgaagcgcaacatatgacgatcgatactcacggtcagatggtgatgaaaagcaagcagcagctcaaagcggatttcggtattacgtcaaagccgattgcgacattgaaaatgcagtaa

SEQ ID NO: 368656 - DNA, 1077 bp, Salmonella enterica
atgaaagcactggcgagatttggcaaggcctttggcggctacaaaatgattgatgtcccggagccggtatgcggtccggaagacgtgattatcgaaatcaaagcggcggcgatctgcggcgcggatatgaagcactataacgttgacagcgggtccgacgaatttaactccgttcgcggtcatgaattcgccggacgtatcgcgcgggtgggcgaaaaagtgaaagactggaaagtcggccagcgcgtggtttctgacaacagcggacacgtttgcggcgtttgccctgcctgtgaacaaggcgattttctgtgttgtacagaaaaagtgaatctgggtctggataacaacacctggggcggtggattttccaaatactgcctggttccgggagaaatcctgaaaatccatcgccatgccctgtgggagatcccggaaggcgtggattacgaggaagccgcagtactggaccctatctgcaacgcctataaatctatcgcccagcaatccaaatttttacccggccaggacgtggtagtcatcggcaccggtccgttaggtctgttttcggtccaaatggcccgcattatgggggcggtaaatatcgtggtggttggcctggatgaggatgttcctgtccgtttccctgtggccaaagaactcggcgcgacggcgtttgttaacggctccacggaagatgtcgtcgcacgctgccgggagatttgcggcaaagacaacctcggtctggtgatcgaatgctccggtgccaacattgcgcttaaacaggccatcgacatgctgcggccaaatggtgaagtggttcgcgtcggtatggggtttaagccgctcgatttctccattaacgacattacttcctggaacaaaagcatcattgggcatatggcctatgactccacatcctggcgcaatgcgattcgcctgcttgccagcggcgctatcaaagtaaaaccgatgatcacccatcgtatcggtctttctcagtggcgcgaagggtttgacgcaatggtcgataaaacagccattaaagtgatcatgacctacgactttgatgaataa

SEQ ID NO: 368657 - DNA, 1380 bp, Salmonella enterica
atggaacagataacaaaaccgcactgcggcgcccggctggatcgcctgccggattgccggtggcattcatcaatgtttgccgtcgtcgcctttggtctgcttgtttgctggagtaatgccgtcggcggattaattcttgcccagctcaaggagttaggctggaccgataattccacgacagccaccttctccgccattaccacggcggggatgtttctcggcgcgctggtgggcggcattatcggcgataaaaccggacgcaggaacgcctttattctttatgaagcgattcacattgcctcgatggtcgtgggcgcattttcaccgaatatgatgttcctgattgcctgtcgttttgtgatgggcgtgggattaggggcactactggtcacgctgttcgccggatttaccgagtacatgcccggcagaaaccggggaacctggtcgagtcgcgtttcgtttattggcaactggtcatatccattgtgttccctgattgcaatggggctgacgccgctaattagcgcggaatggaactggcgcgtgcagttactgatcccggctgtgctgtcgctgattgctaccgcgcttgcctggcgatacttccctgaatctccccgctggctggaatcgcgcgggcgttatcaggaagccgaaaaggttatgcaggccattgaagcaggcatcgaacgtcagacaggaaaaccgctgccgccggttgttattgaaaacagcggcaagccgccgcgttccgtaccgtattcagcgttgctcactggcgtattactgaaacgcgttattttgggttcctgcgtgctgattgccatgaacgttgtgcaatacacgttaattaactggctgcccaccatctttatgacacagggcatcaacctcaaagattcgatcgttttaaataccatgagtatgttcggcgcaccgtttggcatatttatcgctatgctggtaatggataaaattccgcgcaaaaccatgggtgtcggtttattaattctgattgccgtgctgggatatatttattcgctgcaaaccagcatgttgcttatcaccttaattggctttttcctgattacctttgtctatatgtatgtctgttatgcctcggcggtctatgtgccggagatctggccaacagaagcgaaacttcgcggttccggcctggcgaacgctgtcggcagaatcagcggtatcgctgccccctatgcggtggcggtattactcaacggttatggcgtgacgggcgttttcgtcctgctgggcgctgtctcgattatcgtcgccgtcgcaatagcgactatcggaatcgagaccaagggtgtttcggttgaaagtctgagcattgataaggtcacgagtaaataa

SEQ ID NO: 368658 - DNA, 1044 bp, Salmonella enterica
atgaaaaattcaaaagcgatactaaaaacgccgggcaccatgacaattatagcggctgatattccagtaccaaaagaaaacgaagtattgatcaaagtggaatatgtcggtatttgcggttcagatgttcacggttttgaatccgggccattcattccgccgaaggatccaaatcaggaaattggtctcggtcatgagtgtgctggtacggtcgttgcggtcggcaatcgggtaagcaaatttaagccaggcgatcgggttaatatcgagccgggcgtgccgtgcggccactgccgctattgtctggaaggaaaatacaatatttgtccggatgttgattttatggcgacgcagccgaattatcgcggggccttaacgcactatctgtgccatccggaaagttttacgtacaagcttccggacaatatggacactatggaaggtgcgctggtggaacctgctgctgttggaatgcacgcggcaatgctggcggatgttaaaccgggtaagaaaatcgtcattctcggcgcgggctgcattggtttaatgaccctgcaagcgtgtaagtgtctgggggcgaccaatatcgcggtagtggatgtgctggaaaaacggctggcaatggctgaacgactgggcgcgacaaccgttatcaatggggcgaaagaagatactgtcgcgctctgccagcagttcaccgacgatatgggcgccgatattgtgtttgaaaccgccggttccgccgtcacaactcagcaagcgccgtatctggtcatgcgcggcgggaagatcatgattgttggcactgtcgcaggagattcagcgattaatttcctcaaaattaaccgtgaagtctccatccagacggtattccgctatgccaaccgctatccggtgactattgatgccatctcctccgggcgtttcgatgtgaaatcaatggtgacgcatatttacgattacaaagacgtacaacgtgcatttgaagagtcggtgaataacaaacgcgacattattaaaggcgttattaaagtttgcgattaa

SEQ ID NO: 368659 - DNA, 837 bp, Salmonella enterica
atgttggcagatataaaatattgggaaaatgatgcacaaaataaacattacgcgattgcgcactttaatgtgtggaatgcggaaatgttgatgggagtgattgatgcggcggaagaggcaaattcgccggttattatctcctttggtaccggatttgtgggcaatacttcatttgaagacttctctcatatgatggtttccatggctaaaaaagccactgtgccggtaattacccactgggatcatggacgtagcatggacattatccataatgcctggacgcacggcatgaactcgctgatgcgtgacgcttcttcctttgattttgaagaaaatattcgcctgaccaaagaagccgtggatttcttccatccgctgggtattccggtagaggcggagttaggacacgtagggaacgaaacggtgtatgaagaggcgttggcggggtatcactataccgacccggatcaggcggcggaatttgtagcgcgcaccggttgtgactcgctggcggtcgccatcggcaaccagcatggcgtgtatacctctaaaccaaaactgaattttgaggtcgtggagcgcgtgcgccaggcagtttccgtaccgctagtgttacacggcgcttccggtattagcgacgcggatatcaaaaaagccatttcgctgggcatctcgaaaatcaatatccacaccgaactgtgtcaggccgcgatggtagcggtaaaagagaatcaggatcagccgttcctgcatctggaacgcgaagtacgcaaagcggtaaaagcccgtgcgctggaaaaaatcaaactgtttggttcagatggtaaagcggaatga

SEQ ID NO: 368660 - DNA, 948 bp, Salmonella enterica
atggacgaaattgaagttctttgcataggggcggccattgtcgacattcctttgcaaccggttagtaaaaatatctttgatgtcgattcgtatccattagaacgaattgccatgaccacagggggagatgcgattaatgaagccacgattatttcgcgtctcgggcatcgcactgcgctaatgagtcgcgttggcgacgatgcggcaggatattttattctcgaccactgtcggaaggagaatatcgatattcagagcctgaagcaggatgcggatattgatacctcaattaatgttgggctggtgactgatgatggtgagcgcacctttgtcactaaccgtaacggcagcctgtggaagctaaatattaacgatgtcgattttgaccgtttttctcaggtcaggctgttatcactggcaagtatctttaacagcccgctgctggatggcaaagcattaacggctatttttacgcaggcgaaagcgcatcaactggttatctgcgctgacatgatcaaaccgcggctgaatgaaactctggacgatattcgcgaagcgctaagttttgtcgattatctgtttcctaatattgatgaagccaaaaagctgaccgggaaagagacgctggatgatattgccgattgttttttgcaatgtggcgtaaaaacagtggtgattaaaactggcaagaaaggctgctttatcaaaagcgccgatataaaaatggaggtgcctgcggtgtcaggcattaccgccatcgacactattggcgctggtgataattttgcatcgggatttatcgccgcgctactggagggaaaaacgctgcgtgaatgcgcacggttcgccaatgcgacggccgcgatatcggtactcagcgtgggcgccacaacgggcgtgaaaaacagaatgctagtggaacaactcctgaatgaatacgaagggtaa

SEQ ID NO: 368661 - DNA, 984 bp, Salmonella enterica
atgaaaatgatacctttaggtaatacagatatagcgctttcccgtatgggactcggcacctgggctatcggcggcggtccggcatggaatggcaacctcgatatgcaggtctgcatcgatactatcgttgaggcgcaccgttgtggtattaacctgattgatacggcgccgggctataactttggcaatagcgaagtgattgtcggccaggcgctgaaaaaattaccgcgtaacgagatggtggtggagaccaaatgcgggatcgtctgggagcgggaagggagtctgttcaataaagtcggcgatcgccagctctataaaaatctttctccggactctattcgtaaagaagtcgatgccagtctccagcgactagggattgattatatcgatatctatatgacccactggcagtcggtaccgccgttttttacgccgattgcggaaaccgttggcgtgctcaatgctctgaaagcagaggggaaaatccgttctatcggggcggcgaatgtagatgtcagccatatccgcgaataccttaaacatggcgagctggacatcatacaggcgaaatacagcattcttgaccgggcgctggaaacggagctgctgccgctatgccgcgagcacggcatcgtggtacaggtttattcgccactggagcagggattgttaaccggcaccattacccgtgactatgttcccggcggggcgcgcgcgaataaactctggttccagcgtgagaatatgttgcgggttattgatatgctggagcagtggcagccattgtgcgacaaataccattgcgccgtcccgacgctggcgctggcgtggatattgcgacaaagcgagctgatttcgatactgagcggcgccacgtcgccggagcaggtacgagagaatatcgctgcgctgtccatcaccttaacggatgacgatgcgttattgatgagacaaatggcggaagcgctggacaatccataa

SEQ ID NO: 368662 - DNA, 759 bp, Salmonella enterica
gtggcggcgaaagacaggattcaggcgatcaaacaaatggtcgctaatgataaaaaagtaacagtctctaacttgagttcaatttttcaggtaaccgaagagacaattcgacgcgatctggaaaaactcgaagatgaaggctttttgactcgaacttatggcggtgcggtattaaattcggcggtgctggctgacaatatccatttttataagcgtgcaaaatcgttctatgaagagaagcaaattatagcccgtaatacgcttccgtttattaaaaacaaaacaacgatggccgccgactccagcagtacggtaatggaattgctaaaactcctgaaagaccgaaacgatcttactttgttaactaactcagcggaagctttccatgaactggcgcaatcggacattaatcttgtttctacgggcggtgagttaaataaaaatacgctatcgctgcaggggcgtatcactaaagaaataatcagccgttatcatgttgatattatggtaatgagttgtaaagggctggatatggcgagcggggcgcttgattctaacgaggcggaagctgaaatcaaaaaaacgatgattcgccaggccacagaggtggcgttattggtggaccactcaaaatttgatcgtaaagcgttcgtgcggttggtcgattttagtcatatccattacctgataacgaataaaacgccaggtgatgaatggatcgcattttgcgataaaaataatatccagcttgtctattaa

SEQ ID NO: 368663 - DNA, 1359 bp, Salmonella enterica
atggaagacaatgatcatatcggcgccagactagaccgcttaccgttatcccggtttcattttcgtatttttggaataattagttttggcctgctattaacggggtttttgagttattcaggaaatgtggttctggccaaattgataaacaatggctggtcgaataattatcttaatgccgcgttcacatcggcactgatgcttggctattttattggttcgcttaccggcggttttattggggattacctggggcgtcgaaaagcgtttcgcattaatttgttgcttgtgggcatctccgcaacggctgccgcatttgttcccaatatgtactggctgattttctttcgttgtctgatggggacaggcatgggggcattgattatggttggatatgcttcttttaccgagtttatccctcccattgtacgaggaaaatggtccgcgcgtctctcttttgtagggaactggtcaccgatgctgtctgcgggaattggcgtagtggtcattgcgtttttaagctggcggatgatgtttcttcttggtgggatagggatgctgctggcgtggtctctttcggggaagtactttatcgaatcgcccaggtggttagcaggtaaagggcggcaacgcgaggctgaacagcagcttctcatgattgaatcgcaaatagaaaaagaaaaaagtattgttttgccgccgcatcaggaaagcaataaatccacggaatcgcgctttgaaaacggtacattctggctcttattcaaaggacaaatgttgcggcgcacgttagtggcgatcactgtattgattgcgatgaacatttcgctttataccattacggtatggatcccgacaatttttgttaattcaggaattgatgttacaaaatccattttcatgaccgccatcattatgattggcgcgccggtgggcatatttatcgccgcgctcattattgatcatttccccagacggttatttggttcgctgttgcttatcgttattgcggtagtaggatatttttactcaatacagactgaggaatgggccattctggtttatggactagtcatgatttcctttctgtatatgtacgtctgcttcgcctcggcggtttacgttcccgaattatggcctacgcaccttagactacgtggatcgggttttgtgaatgcggtagggcggatcgtcgctgtctttaccccctacggcgtggcggttttactgacccggtatggatctgtcaccgtttttgttgtgctgggtatgctgctggcggcgtgcgcgctgatattattttgttttggcattgaaacgagaagagtttcgttagaagcgctctccagcctgcgttga

SEQ ID NO: 368664 - DNA, 657 bp, Salmonella enterica
atgacaaaccgggccttattactggtcgacttgcaaaatgacttttgcgccggcggcgcgctggctgtagcggaaggcgacagtaccatcgacatcgccaacgctcttattgactggtgccagccccggcagattccggtgctggccagccaggactggcatcccgcgcagcatggcagcttcgccagccagcatcaggcggaaccctatagtcagggagagctggacgggctgccgcaaacgctctggccggatcactgcgttcaacataccgacggcgcggcgttacatcccctgcttaaccaacatgcgattgacgcctgcatctataagggtgagaacccgctgattgatagctacagcgcgttttttgacaacgaacatcggcagaaaactacccttgatacctggcttcgcgagcatgacgttaccgagcttatcgtgatggggttggcgaccgattactgcgtaaaatttacggtgctggatgcgctagagttgggctatgccgttaacgttatcaccgatggctgtcgcggcgtgaatattcacccgcaggatagcgcacacgcgtttatggagatggcgtcggcaggcgcgacgctgtatacgctggcagactgggaagagacgcagggccaggctgtcgccaggtag

SEQ ID NO: 368665 - DNA, 1089 bp, Salmonella enterica
atggcggcgtctgctcatagccgccatccgataatcattaatacgtccttcgcgacacgactgaacattatcatgcaaaagaaatcaatttacgttgcctataccggcggtactatcggtatgcagcgctcagataaagggtatatcccggtgtccgggcaccttcagcgccagctggcgctgatgccggaattccaccgcccggagatgccggattttaccatccatgaatatgccccgctgatggattcatcagatatgacgccggaagactggcagcatatcgctgcagatatcaaagcgcactacgatgagtatgacggttttgttattctgcacggcaccgacacgatggcgtataccgcatcggcgctctctttcatgctggaaaatctgggtaaaccggttattgtgacagggtcacaaattccgctggctgagctgcgctccgacgggcaaattaatttgctgaatgcgctttatgtcgccgccaactaccctgttaatgaagtaacgctgttttttaataatcgtctgttccgcggcaatcgcacgaccaaagcacatgcggatggttttgacgcttttgcctctcctaatctgccgcccttgctggaagcaggaattcacattcgccgtttaaatacgcctcccgcgccctacggttctggtgaattaatcgttcaccctattacgccgcagccgataggcgtagtgacgatttatccggggatttccgccgaggtagtacgtaactttctgcgtcagccggtaaaagcgctgattctgcgctcttatggcgtaggcaacgcgccgcaaaataaagcgtttttacaggagctgaaagaggccagttcgcgcggcatcgtggtggttaacctgacgcaatgcatgtcagggagagtcaatatgggcgggtacgctaccggtaatgcgctggcgcacgctggcgtgattggcggtgccgatatgaccgtcgaagctaccttaaccaaactgcattatttgttaagccagggtctggacactcaggcgattcgtagcgcgatggcgcaaaacttgcgtggtgaattgacgccggatgattaa

SEQ ID NO: 368666 - DNA, 1857 bp, Salmonella enterica
atgcgaaccctgtggcgatttattgccggattttttaaatggacgtggcgagtgttgaacttcgtccgtgaaatggtactcaacctgttctttatttttctggtcctggtgggcgttgggatctggatgcagatcggtaacggcagcaacagtgaacaaacggcgcgcggcgctctgctgctggatatttccggcgtcattgtggataaaccctccaccaatcatcgtctgggcgcgctgggtcgccagttatttggcgccagctccgaccgtctgcaggaaaactctctgtttgacatcgtcaacgctattcgtcaggcgaaagatgaccgtaacatcacgggtatcgttctggatctgaaaaacttcaccggtgccgatcagccgtcaatgcgctatatcggtaaagcgctgcgcgaattccgcgatagcggcaaaccggttttcgccgtgggtgaaaactacagccagggtcagtattacctcgccagtttcgccaataaaatttggctttccccacagggtcaggtagatcttcacggcttcgctacgaatggcctgtactacaaaacgctgctggataaactgaaagtctctacccacgttttccgggtcggcacctataaatccgccgtcgagccgtttatccgcgacgatatgtcgcccgccgcccgcgaggccgacagccgctggataggcgaactgtggcagaactacctgcataccgtttctgccaatcgccagatttcgccgcaacaactgttccccggcgcgcaggctattatcgacgggttaaccagcgtgggcggcgacaccgccaaatatgcgctcgaccataaactggtggacgccctcgcctccagcgcagatgttgaaaaagcgctgacgaagcagtttggctggagcaaaaccgaaaataactatcgcgcgatcagctattacgattattcgctgaaaacgcctgcggataccggcggtactattgcggttattttcgccaatggcgcgattatggatggcgaagaaacgccagggaatgtcggcggcgacactacggcatcgcagatccgcgacgcacgccttgatcctaaagtgaaagcgattgtgctgcgcgtcaatagcccaggcgggagcgtcaacgcctccgaagttatccgcgccgaactggcggcagcaagagcggctggcaaaccggtggtggtctcaatgggcggcatggcggcctccggcggttactggatctctacgccggcaaactatatcgtggccagccccagcacgctgacgggttcaattggcatcttcggcgtcatcaatacggtagaaaacagcctgtcgtcgattggcgtacacagcgacggcgtttccacctcgccgctggcggatatttcgatgaccaaagcactgtcaccggaagtgcagcagatgatgcaactcagtattgagtacggctacaaacgctttatcacgctggtggcagacgcgcgtaagcgtacgccggagcaaattgataaaatcgcacaaggccatgtctggaccggagaagacgcgaaagccaatggtctggtggacagtctcggcgactttgacgacgccgtcgccaaagcggcggagctggcgaaactgaaacagtggcatcttgattactatcaggacgaaccgacggtccttgatatggtcatggacagtatgaccggatcagtacgcgccatgctgccggaggccattcaggctatgctcccggcgccgctcgtttccgccgccaacacggtgaaggccgagggggataaactggcggcatttaacgatccccaaaaccgttatgcgttctgtttgacttgcgcgaacgttcgctaa

SEQ ID NO: 368667 - DNA, 552 bp, Salmonella enterica
atggatgcactagaactgctggtcaaccgtcgtagcgcctctcgtctcgcagaaccggcgcctgtcggagagcaattacagaacattctgcgggcgggaatgcgtgttcccgatcataaatctctacagccgtggcgtttttttgtgattgaaggagaggggcgcgaccgcttcagcgccgtgcttgaacgaggcgctgtcgctgccggaggcgatgagaaagcgatcgaaaaagcgcgtaattcgccgtttcgcgcgccgctgatcattaccgtggtggcgaaatgcgaagaaaaccataaggttcccgtgtgggaacaggagatgtctgccggatgcgcggtgatggcgatgcaaatggcggcgattgcgcaagggtttaatggtatctggcgtagcggcgcattaacggagagcgctatcgtgcgggaagcctttgagtgccgcccgcaggataaaattgttggttttctctatctcggcacgccgcagctcaaagcgtcaacgacgatcagtacccccgaccccacgccgtttgtgcgttatttctga

SEQ ID NO: 368668 - DNA, 1044 bp, Salmonella enterica
atgagcgagcaagccattcgtttaacgcaatacagccacggcgctggttgcggttgtaaaatttcccctaaagtgctggagactatcctgcatagcgagcaggcgaagttcgtcgacccgaacctgctggtgggtaatgaaacccgcgatgatgcggcggtttacgatctgggtaatggcaccagtattatcagcaccaccgacttctttatgccgatagtcgacaacccgtttgattttggccgcattgcggcaacaaacgccatcagcgatatttttgcgatgggcggcaaaccgattatggcgatcgcgatccttggctggccgattaataccctgtcgcccgatattgcgcgtgaagtgaccgagggggggcgttttgcctgccgtcaggccggtatcgcgctggcgggcggacactctattgacgccccggagccgatctttggtctcgcggtcacaggcgtagtgccgaccgaacgggtgaagaaaaacagtaccgcgcaggcgggatgcaaactctttctgaccaaaccgttggggattggcgtgttgaccaccgccgagaaaaaatcgctgcttaaacctgaacatcaggggctggcgacggaagtcatgtgtcggatgaacgttgctggcgcggcgtttgccaatatcgacggcgtaaaagccatgactgacgttaccggttttggcctgctggggcacctgagcgagatgtgccagggcgcaggcgtgcaggcgctgctttgctatcaggacatccctaaactgccgggcgtggaagagtatattgctctgggcgccgtaccgggcggcacagagcgcaacttcgccagctatggtcatctgatgggcgacatgtcgcgtgaagttcgtagcctgctgtgcgatccgcaaacgtcaggcggtctgctgttggcggtaacgccggacgccgaagacgatgttaaagccaccgcggcggaatttggtatcgatctgaccgcgattggcgaactggtcgaggcccgcggcggtcgcgctatggttgagattcgttaa

SEQ ID NO: 368669 - DNA, 1950 bp, Salmonella enterica
atgcggttgtttattgccgaaaaaccgagtctggggcgcgccattgcggatgtgctgccaaaaccgcaccgtaaaggcgatggttttattgagtgcggaaacgggcaggtcgtcacctggtgtattggtcatttgctggaacaggcgcagccggatgcgtatgacagccgttatgcgcgctggaatctggctgacctgcctatcgtgccggaaaaatggcagcttcagcctcgtccttccgtcaccaaacagctcaatgtgattaagcgctttttgcatcaagccggtgaaattattcacgccggcgacccggatcgcgaaggacagcttctggttgatgaagtgctggattatctccagcttcctgccgaaaagcgccagcaggtgcggcgttgtctgataaacgaccttaacccgcaggcggtcgagcgtgctattgacaggctgcgggcgaacagcgacttcgtgccgctgtgcgtctccgctctggcgcgagcgcgagcggactggctgtatggcattaatatgacccgtgcttacacgatcctgggccgtaatgccggctatcagggcgtgttatccgtgggacgcgtgcagacgcctgtactggggctggtggtgcggcgagacgaagagattgagaacttcgtcgccaaagacttctttgaagtaaaggcgcacatcgttacgcctgccgacgagcgttttaccgctatctggcagccgagcgaggcgtgcgaaccttatcaggatgaagaggggcgcttgcttcatcgtccgctggcggagcatgtagtgaaccgaatcaacggtcagcccgcgctggtaaccagttataatgataaacgggaatcagaatccgcgccgctgccgttttcgctctcgacgctacagattgaagccgccaaacgctttggcctgagcgcgcaaaacgtgcttgatatttgtcagaagctatatgaaacccacaaactgattacctatccgcgttccgactgccgttatctgccggaagaacactttgccggacggcaggcggtcatgaacgcgattagcgtccacgccccggatttactgccgcagtctgtggttaatcctgacacgcgcaatcgctgctgggatgacaaaaaagtggatgcgcaccacgcgattatcccgacggcgcgcagttcttctgtccatttgacggaaaacgaagcgaaagtgtacaccctgattgcgcgtcagtatctgatgcagttctgcccggacgcggtgtttcgtaaatgcgttattgaactggaaatcgccaaaggaaaatttgtcgccaaagcgcgttttctggcggaggccggttggcggacgttactgggcagtaaagagcgcgacgaggaaaacgacggtacgccgctgccggttgtcgccaaaggtgatgagttgctgtgtgaaaagggggaagtggtcgagcgccaaacccagccgccgcgtcatttcaccgatgcgacattgctttccgcgatgaccggaattgcccgcttcgtgcaggataaagatctgaaaaagatcctgcgcgcgaccgatgggctggggacggaagccacgcgcgccgggattatcgagctgctgttcaaacgtagctttctgaccaaaaaagggcgctacattcattctaccgatgctggcaaagcgttaatacattcgctgccggaaatggcggcccgtccagatatgaccgcgcactgggaatctgttttgacgcaaatcagcgaaaagcagtgccgttaccaggattttatgcaaccgctggtcggcacgttatatcagctgatcgatcaggctaagcgcacgccggtgaagcgtttcagagggatagtcgcgccaggcggtggagaaaagaaaaagagcgcgccgcgtaagcgagcgggcaaaaaaagcccgcctgctgaggagacaggccgtcagaccgaataa

SEQ ID NO: 368670 - DNA, 1344 bp, Salmonella enterica
atggatcagacatgttctctggaatcgttcctcaaccatgtacaaaagcgcgacccgcatcaaaccgagttcgcgcaagccgtccgtgaagtcatgaccaccctgtggccgtttcttgaacaaaacccccgttaccgccacatgtctttactggaacgtttggttgaaccagagcgcgtaattcagtttcgcgtagtgtggctggacgacaaaaaccaggtgcaggtaaatcgcgcctggcgcgtgcagttcaactctgctatcggcccctataaaggcggtatgcgcttccatccttcggtaaacctttccatccttaagttcctcggctttgagcaaacctttaaaaatgccctcaccacgttgccgatgggcggcggtaaaggcggcagcgatttcgatccgaaagggaaaagcgaaggcgaagtgatgcgtttctgccaggcgctgatgactgaactgtatcgccatttagggccggataccgacgtgcctgccggggatatcggcgtgggcgggcgcgaagtgggctttatggcgggaatgatgcgcaagctttccaataacagcgcctgcgtcttcaccggcaaagggctttccttcggcggcagcctgattcgtccggaggcgacgggctatggcctggtctacttcaccgaagcgatgcttaaacgtcatggtctcggttttgaagggatgcgcgtcgccgtgtccggctccggcaacgtagcgcaatacgccattgagaaagcgatggcctttggcgcgcgcgtggttaccgcgtcggattcgagcgggacggtggtcgatgaaagtggcttcacgccagagaagctggcgcgtctgtgtgaaattaaagccagccgtgacggtcgcgtcgctgactacgcccgtgagtttggcttaacctatctggaaggccagcagccctggagcgtaccggtggatatcgccctgccatgcgcgacgcagaacgaactggacgttgacgccgcgcgcgtactgattgccaatggcgtgaaagccgtggcggaaggggcaaatatgccaaccacgattgaagcgaccgatctcttccttgaagcgggcgtactgtttgcgccgggtaaagccgccaacgcgggcggcgtggcgacatcagggctggaaatggcgcagaacgccgcgcggttgagctggaaagccgagaaagtggacgcccgtctgcatcacattatgctggatatccaccacgcctgtgtcgagtacggcggcgataataagcataccaactacgttcagggcgccaacatcgccggtttcgtgaaagtcgccgacgccatgctggcgcagggcgtcatttaa

SEQ ID NO: 368671 - DNA, 276 bp, Salmonella enterica
atgtgccgaagcctcgtggtcgccgtgatggcgataatgccaatggtcgggctggcaaaccagaacagtcgtcctgatattcaggtgaatgtcccgccggaagttttcagcacgcgcggtcagtcgtcccagccctgcattcagtgctgcgtttaccaggatcagaattactccgaaggcgcggtaataaaagtggaaggcgtcgtgctccagtgccagcgtgacgaaaaaaccatcagcacgaatccgttagtctggcgtcgcgtaaagccataa

SEQ ID NO: 368672 - DNA, 417 bp, Salmonella enterica
atgataaaaaaactcgatgttgttgccgccatcattgaatgcgacggcaaaattctgctggcccagcgcccagctcatgcggatcaagccggtttatgggagtttgccggcggtaaagtcgaacccggcgaaacccagccgcaggcgcttatccgcgagctacgcgaagagttagggattgacgccacgcccggcgtctatatcgccagccatcaacgcgacgtgtctggccgacggattcatttgcacgcctggcatgtgcctgcgtttaacggtctgatacgtgcgctggaacatcaggcattagcctggtgtacgccggaagaggcgctggaataccccctcgccccggcggatattccgctattgcaggcgtttatggctttacgcgacgccagactaacggattcgtgctga

SEQ ID NO: 368673 - DNA, 879 bp, Salmonella enterica
atgagtggcagtcacccggtaaaatttctgttaccatcccaacacgattcaccttgcaaagtggcagtgactatgaaatttgtctcttttaatatcaacggcctgcgcgcccgtccccatcagcttgaagcgattgtcgaaaaacaccagcccgatgtgatcggtctacaggagacaaaagtccacgacgaaatgttcccgctcgaagaggtcgcgaagctgggctataacgttttctatcatggacaaaagggccattacggcgtcgcgctgctaacaaaagccacgcccatttccgtcagacgcggtttcccggatgatggcgaagaggcgcaacgccgcattatcatggcggaaatcccctcgccgctgggtaatatcaccgtcattaacggctatttcccgcagggggaaaaccgggatcatccgttgaagttccccgcgaaagcgcagttttaccagaacttgcaaaactatcttgaaacggaactcaagtgcgataatccggtattaattatgggcgacatgaatatcagcccgaccgatctggatattggcatcggcgaagagaaccgcaaacgctggctgcgtaccggtaaatgctccttcctgccggaggagcgtgaatggatgtcacggttactgaagtggggattagtggacacgttccgtcaggcgaatccgcaaacgatggataaattttcgtggtttgattaccgctcaaaaggtttcgtggataatcgcggactgcgcattgacctcttgctggcaagcgctccgctggcggaacgttgcgcagaaaccggtatagactacgacattcgcagtatggaaaaaccctccgaccatgcgccggtctgggcgacgtttcgtgtttga

SEQ ID NO: 368674 - DNA, 1227 bp, Salmonella enterica
atgtctctgtcagttacgcgcgaaaactttgatgaatggatggtgccggtatatgttcccgcgccttttattcctgtacgcggagaaggctcacgcctgtgggatcagcaggggaaagagtacattgattttgctggcgggatcgcggtcaacgcattgggacatgcgcatccggcgctgcgcgaggcgttaaatgaacaggcgaatcgcttctggcataccgggaacggttacaccaatgaaccggcgctgcgactggcgaaaaaactgatcgacgcgaccttcgccgaacgcgttttcttttgtaattcaggcgctgaagcaaatgaagcagcattaaaactggcgcgcaaatatgcccacgatcgtgtcggcaatcataaaagcggcattgtagcctttaaaaacgcgttccatggtcgcacgctctttaccgtcagcgctggcggtcaacccacctattcacaggactttgcgccgctgccgccggatattcgtcatgcagcctataacgatctgaactccgccagcgcgctcattgatgacaatacctgcgccgtaatcgtagagcctgtgcagggcgagggcggcgtgatccccgccacgaaagcttttttgcaggggctgcgtgaattgtgcgaccggcatcaggcgttactgatttttgatgaggtgcagacgggcgtcggacgtaccggcgaactgtatgcatatatgcattatggcgttacgcccgatatcctgacgactgctaaagcgttgggtgggggcttcccgatcggcgcgatgctgaccacgcaagactatgccagcgttatgacgccaggcacgcatggcaccacctacggcggtaatccgctggcgacggcagttgccggaaaagtactggatatcatcaatacgccggagatgcaaaacggcgtcagacagcgccacgatgcgtttattgagcgcctaaataccattaatgcacgttttggcatgttcagtgaaattcgcggtctggggctactgcttggttgtgtgctacagacggagtttgccggaaaagccaaactcatcgcccaggaagcggcaaaagcaggcgtgatggtgctcatcgccggcggcgacgtggtgcgttttgcgccagcgttaaatgttagcgacgaggagatagccaccgggcttgatcgttttgccctggcgtgcgaacgccttcagacgggaggcgcatcatgcgggtga

SEQ ID NO: 368675 - DNA, 1035 bp, Salmonella enterica
atgcgggtgattcgtcctgtcgaacatgcggatatcgccgcgctgatgcagcttgcaggcaaaacgggcggcggcttaacctcgctaccggcaaatgaagcgacgctggcggcccgcattgaacgcgcgctaaaaacctggtccggcgagctgccaaaaggcgaacaaggatatgtattcgttctcgaggatagtgaaacgggtgaggtcggcgggatctgcgccattgaggtcgcggtcggccttaacgacccctggtataactatcgtgtcggtacgctggttcatgcctccaaagagctgaatgtatataacgcgttgccaacattattcctgagtaatgatcataccggcagcagtgagctttgcacgctgtttctcgatcccgaatggcgtaaagagggtaacggctacctgttgtcaaaatcgcgctttatgtttatggccgcgtttcgcgataaattcaatgagaaagtggtggcggaaatgcgcggcgtcattgacgagcacggttattctcccttctggcaaagtctcggcaaacgctttttttctatggatttcagccgggcggattttttatgcggtaccgggcaaaaagcgtttatcgccgagctgatgcccaaacatcctatttatacccacttcttatctgaagaggcacaggccgtgattggcgaagtccacccgcaaacggcgccagcccgcgcggtgctggaaaaggaaggttttcgctatcgccactatatcgacatcttcgacggtgggccgacgctggagtgtgatattgaccgcgtgcgggccattcgtaaaagccgactggtggaagtcgcggaagggcaacccgcgcctggcgactatccggcatgtctggtcgccaatgaaaactatcaccactttcgggccgcgctggtgcgtgccgatccgcagacttcacggcttgtacttaccgccgcgcagttggatgcgctgaaatgtcgcgcgggcgaccacgttcggctggtacgcctttgcgctgaggagaaaaccgtatga

SEQ ID NO: 368676 - DNA, 1479 bp, Salmonella enterica
atgacgctatggataaacggcgactggataaccggtcagggcgaacgccgccgcaaaacgaacccggtgagtgcggagatactttggcaggggaatgacgctaatgcggcacaggtcgccgaggcctgccaggtggcgcgcgcggcgtttcctcgttgggccagacagccttttgcggcacgacaggctatcgtagagaaatttgccgccctgctggaggcgcataaagccgagctcacggaggtcatcgcgcgtgaaaccggtaaaccgcgctgggaggcggcaacggaagtgacggcgatgatcaataagattgccatctcgattaaggcttaccatgccagaacaggcgaacaaaaaagcgaacttgtcgatggcgccgcgacgttgcgccatcgtcctcacggtgtgctggcggtattcggcccttataactttcccggccatttaccgaatggccatattgtgcccgcgttgctggcaggcaatacgctgatcttcaaacctagcgagctaacgccatggaccggggaaacggtaataaaactctgggaacgggcggggctaccggcaggcgttcttaatctggtgcagggcggccgggagaccggacaagcgctaagttcgctcgacgatctcgacggactgctgtttaccggcagcgccagtaccggatatcagcttcatcgccagctatccggccagccggaaaaaatactggcccttgaaatgggcggaaacaatccgctcattattgaggatgtggcaaatacagatgcggcggtacatctgacgctgcaatcggcgtttattaccgccggacagcgctgtacctgcgcgcgacgccttctggtaaaacagggtgcgcagggagatgcatttctggcgcggctggttgacgtcgccggacgtctgcagcccggcagatgggacgacgatccgcagccgtttatcgggggactgatttcagcgcaggcggcacagcatgtgatggaggcctggcgtcaacgagaggcattaggcggtcgcacgctactggcgccgcggaaggtcaaagagggaacctctctgctgacgcctggcatcattgagctgacgggcgtcgcggatgtgccggatgaagaggtgtttggtccgctgctgaacgtctggcgttatgcgcatttcgatgaggcgattcgtctggcgaataatacccgttttggtctgtcgtgtgggttggtgtcgacggatcgcgcgcagttcgaacagctcttgctggaggcgcgggcagggatcgttaactggaataaaccgctcaccggggcagcgagtaccgcgccgtttggtggtatcggcgcgtctggcaaccatcggcccagcgcctggtatgccgccgattattgcgcctggccgatggccagtctggaatctcccgaactgacgttgcctgcgacattaagccccggcctcgacttttctcgcagggaggcggtatga

SEQ ID NO: 368677 - DNA, 1344 bp, Salmonella enterica
atgacggcgcatgaagttaattttgacgggctggtggggcttacgcaccattatgccgggctatccttcggcaatgaggcatcgacccgccaccgttttcaggtgtcgaatcctcgtctggcggtaaagcaggggctgctaaagatgaaagctctggcggatgccggctttctccaggcggtgatcccgccgcatgagcggccttttattccggcgttgcgtcagctcggcttcacgggtagcgatgagcagattctggataaggttgcgcgtcaggcgccacgctggctttccagcgtgagttccgcgtcgccaatgtgggttgcgaatgcggcgacggtttgcccatcggcagacgcgctggacgggaaagtccacctgacggtggcgaatttaaacaataaatttcatcgcgctcttgaggcgcctgtgaccgaagcgctgctacgcgccatatttcgcgatgaaaaccagttttcagtgcatagcgcgttaccgcaggtcgcattattgggagatgaaggcgcggcgaatcataaccgtcttggcggcgagtatggttcggcaggcgtgcagctttttgtctatgggcgcgaagaggagaatgaaatacgacccgctcgttatccggcgcgccagagccgcgaagccagcgaggccgtggcgcgtcttaaccaggtgaatccgcaacaggttatcttcgctcagcagaacccggaggtcatcgatcaaggcgtattccataatgatgtcatcgccgtttcgaatcgacaggtattgttttgtcacgaagcggcgtttgcccggcagaaagtgctcattaatcagttgcgtacgcgcgttgacggttttatggcgatagaggtgcccgccgaagaggtttctgtatcagatgctgtggcgacctacctgtttaatagtcagttgctaagccgtgacgacggctcaatgctgttagtgttgccgcgggaatgtcaggaccatgccggcgtctggcgctatctgaataagctggtggcggaggataaccccatcagcgcgatacaggtgtttgatttgcgagaaagtatggccaacggcggcggcccggcctgtctgcgattacgcgtggtgttaacagaagaagaacgacgggcggtgaatccagcggtaatgatgaatgacgctctgtttacggcccttaacgcgtgggcggatcgttattatcgcgatcgcctgaccgccgccgatctggccgatccgttattattgcgagaaggccgggaggcgctggatgtgttaacgcgtctgctggatttggggtcggtttatcctttccagcaaacgggggcggctgatggataa

SEQ ID NO: 368678 - DNA, 969 bp, Salmonella enterica
atggataactttctggcgttgacgctaagcggcacgacaccacgggtgaggcaggggaagggcgcgggttttcgctggcgctggttaagccatggtctgcttgaactcacgcccgatgcgccggtcgaccgcgcgttaattctttctgcggggatacacggcaatgaaaccgcgccggtcgagatgctggataagctgctgtcggcgctgtattcaggcagcttgacgttaacgtggcgagtgctggtggtactcggcaatccgcaggcgctggcggcgggaatacgctattgtcacagcgatatgaaccgtatgtttggcgggcgttggcagtcctttgccgaaagcgatgaaacgcggcgggcgcgtgagctggagctaagtctggataccttcttttcatctggccaggcgcgggtacgctggcatctggatctgcataccgccattcgtggctcgcatcatttgcgttttggcgtattgccgcagcgcgaccgcccgtgggagacagattttctggcgtggctgggcgcggcaggactagaggcgttggtatttcatcaggcgcccggcggtacgtttacgcactttagctctgaacatttcggcgcgctttcctgtacgctggagttgggaaaggcgttgccgtttaggcaaaacgatctgacgcagttcaacgtaacctcgcaggcgttgtcggcgttgctgagcggtgtcgaaacgtcaacctcgttttcgccgccgctacgctatcgggtggtgtcgcaaatcacgcgtcacagcgacaagttcgcgctttatatggatgcgcaaacgctgaattttactgcctttgcgaagggaacgttgctggccgaggagggggataagcgcgtgacggtgacgcatgacgttgaatatgttctctttcctaatccctctgtcgcctgcggattgcgggctggattaatgctggaaagactgccctga

SEQ ID NO: 368679 - DNA, 216 bp, Salmonella enterica
atgatttgggacacagtttcatgctattacggattattcctggagaattgctttattaataagcgttgctgcgttatagttctgcataatttctgctatatcatgctgttgtatatttctctttcaactctgcgcaatttattctttttttcttcacaattggcgaaaaagtgttttttatactttcattgttttaccgttgttatgactaattga

SEQ ID NO: 368680 - DNA, 486 bp, Salmonella enterica
atgcgtaaactgactgctctatttgttgcctctaccctggcgatgggggctgcgaatctggctcatgccgctgagactaccaccgccgcgccagcggatgcgaagccaatgatgcagcataaaggtaaatttggcccacatcacgatatgatgtttaaaaacctgaacctgacagacgcgcagaagcaacaaattcgcgacattataaaagcgcagcgcgagcaaatgaaacgtccgctgctggaagagcgtcgcgccatgcatgatattattgccagcgataccttcgataaagccaaagccgaagcgcaaattacgaaaatggaagcgcagcgcaaggccaatatgctggcgcatatggaaacccagaataaaatttataacgttctgacgccggagcagaaaaagcaatataacgctaattttgagaagcgtctgacagaacgcccggcgcaagaaggtaaaatgcctgctgcggcagaataa

SEQ ID NO: 368681 - DNA, 882 bp, Salmonella enterica
gtggtacggcgtcaatcagccccccgccttgagtttgaagcggcggccatttacgaatatccagaacatttacgtcctttcctcagcgaagcgccagccttaccgggcgtctatgtatttcatagcgaaagcgatacgctgccgctttatatcggtaaaagcgtgaatattcgcagccgggtgctctcacatctgcgaacgcctgacgaggccgctatgctgcgacaggcgcggcggataagctggatctgcaccgctggggaaatgggcgcgttgctgctggaggcacggctgatcaaagaacaacagccgctgtttaacaagcggttacgtcgtaatcgccagctttgctcgctacagttgagcgaacaaaaaattgaggtcgtttccgcccgcagcgtcgatttttcccatgagccaaacctgtttggcctcttcgccaaccgtcgggcggcgctgcaaagcttacagaacctcgccgatgaacaaaaattgtgttatggcctgctggggcttgaaccggtaagccgtgggcgcgcctgttttcgtttcgctctgaagcgctgcgctggcgcgtgttgtgggcaagaaaccccgcaggcgcattttcttcgtctgcaggcctcgctggaacggttacgtgtggtttgctggccctggaaaggcgctatcgcgttaaaagagagccgtccacaaatgacccagttccacattatcaacaactggttatggctgggggcggtcccctcgctggatgaggccgccacgctggtgcgcacccctgcgggctttgatcaggacggctataagattctctgtaaaccgttaatgtcaggtcaatatgagatcattgaactgcacaccgactgtcgccagtcataa

SEQ ID NO: 368682 - DNA, 828 bp, Salmonella enterica
atgactctgcagcaagagataatccaggcgcttggcgcgaaaccgcatatcaaccctgaagaagaaattcgccgcagcgtggattttcttaaagcgtacctggaaacctatccctttttgaaatcgctggtgttaggcatcagcggcgggcaggattcgacgctggccgggaaactcagccagatggctatcgccgaattgcgagaagagaccggtgataatgcgctgcagtttatcgccgttcgtctgccttatggcgtacaggccgatgaacaggattgccaggacgccattgcttttattcagccggacagagtactcaccgtcaatattaaaggcgccgtcctcgccagcgaacaggcgctgcgcgaagcgggaattgagctgagcgattttgttcgcggcaatgaaaaagcgcgtgagcgaatgaaagcgcaatatagcatcgccggtatgactcacggcgtcgtggtgggcaccgaccatgcggcggaagcgataactgggttcttcaccaaatatggcgacggcggtaccgatattaacccgcttcatcgccttaacaaacgccagggcaaacagcttctcgcagcgctgggctgtcctgagcatctgtataaaaaagtccccaccgccgatttggaagacgaccgcccttcactgcctgatgaagccgcgctgggcgtaacgtatgacaatattgacgattacctggaaggcaaaacgctggaccccgccatcgctaaaactatcgaaggctggtatgtaaaaactgaacataagcgccgtttaccgattacggtattcgacgacttttggaaaaggtaa

SEQ ID NO: 368683 - DNA, 342 bp, Salmonella enterica
atgaacaagaacgtagcaggaattttaagcgcagcggcggtaatgactatgctggcaggctgtacggcgtatgatcgtacaaaagaccaatttgttgagcctgtcgttaaagatgttaaaaaaggaatgagcagggcgcaagttgcgcagattgcgggcaaaccgtcatctgaagtgagtatgattcatgcgcgcggtacctgtcagacctacatcctgggtcaacgtgatggtaaagcggaaacctactttgttgcgctggatgataccgggcacgtgattaactccggctaccagacctgtgcggagtacgacactgacccacaggcgccgaagcagtaa

SEQ ID NO: 368684 - DNA, 321 bp, Salmonella enterica
atggaaaagaaacacatttatctgttttgttctgcgggcatgtcaacatcgttactggtatcaaaaatgcgcgctcaggctgaaaaatatgaagtgccggtgattattgaagcattccctgaaaccctggccggtgaaaaaggcccggcagcggacgtcgtgttattaggcccgcaaattgcttatatgctccccgaaattcagcgtttattacccggtaaaccggtagaagtcattgattcaatgttgtacggcaaggtagatggcttaggcgtgcttaaagctgcggtagcggcaattaaaaaagccgccgcgaattaa

SEQ ID NO: 368685 - DNA, 1359 bp, Salmonella enterica
atgagtaacgtcattgcttcacttgaaaaggtactccttccttttgctgtaaaaataggaaagcagccacacgttaatgcaatcaagaacggctttattcgtttaatgccattaacccttgcgggggcgatgtttgtattaattaataacgttttcctgagctttggggaggggtcgtttttttattccatgggcattcggcttgatgcctcaaccattgaaacacttaatggattgaaaggcatcggcgggaacgtctataacggcacattgggcattatgtcgctcatggcgccattttttatcggcatggcgctggcggaagagcgcaaggttgatgcgctggccgccggattgctttccgtggcggcatttatgaccgtaacgccgtatagtgtcggcgaggcctatgccgtaggcgctaactggctgggcggcgcgaatattatctccggtattattattggcctggtggtcgcggagatgtttacatttattgtccggcgcaactgggtgattaaactaccggacagcgtaccggcttcggtgtctcgttcattctcagcattaattcccggctttattattctctctattatggggattattgcctgggcgctgtctaattacggttctaacttccatcagattattatggacactatctctacgccgctggcatcgctgggtagcgtggtagggtgggcatatgtcatttttgtaccgctgctgtggttctttggtattcatggttcgctggcgctgaccgcgctggacagcggcatcatgacgccctgggcgctggaaaacatctctatttaccagcagtatggctccgtcgatgcggcactggaagccggtaaaacgttccatatctgggcgaaaccgatgctggattcttatatcttcctcggtggtagcggcgcaacgctgggtctgatcatcgctatcttcctggcatcccgtcgcgcggactatcgccaggtggcaaaactggcgctgccgtcaggtatcttccagattaacgaacccatcctgtttggcctgccgattattatgaacccggtgatgtttatccccttcattctggttcagccgattctggcggcgattacgctggtggcttactatttgggtattattccgccgattaccaatattgcgccgtggaccatgccaaccgggttgggggcgttctttaacaccaacggcagtgtcgccgcgttgctggttgcgctatttaacctggcggtcgctaccctgatttatctccccttcgtggtggtggctaacaaagcgcagaacgccatcgagcaggaagaaagcgaagaagatatcgctaacgcactgaaattctaa

SEQ ID NO: 368686 - DNA, 348 bp, Salmonella enterica
atgtttgatcttgaaaatgttgtagataaccagacagcggctgaggaactcgaagaagtcgttatggggcttatcatcaattctggtcaggcgcgcagcctggcatatggcgcgctcagaaaagcgaaagaaggcgattttgaggcggcgaaagcgatgatggaccagtcgcgcatagcgctcaatgaagcgcatcttgtgcagacaaaactcatcgaaggcgatcagggcgaaggcaaaatgaaagtcagtctggtcctggttcacgctcaggatcatttgatgacctcaatgctggctcgtgaactgatcgccgagttgattgagctccatgagaaactgaaataa

SEQ ID NO: 368687 - DNA, 840 bp, Salmonella enterica
atgcagctacaggttaacgcaacggaaatcaaaacggtttatgagcagcagctcttcaatggcaaaaatttccatgtgtttatctataacaagacggaaagcgtcaccgggctgcatcagcacgactactatgaatttaccctggtattaaccggacgttattaccaggagattaacgggaagcgtgtgctgctggaacgtggagattttgtttttatcccggtggggtcgaatcaccaaagtttctatgagtttggcgcaacgcgtattctgaacgtaggaattagtaaacgtttttttgaacagcattatcttccgttactgccgttttgttttgtggcatcgcaggtatacagggcgaatagcaccttccttacctatattgaaacggtgattgcgtcgttgaattttcgcggcaatgggctcgacgaatttatcgaagtggtgacattttatattataaaccgcttacgccattaccgcgaagagcaggtttatgatgatattccacaatggctgaaagcaaccgtggagataatgcatgataaaacgcagtttggcgaacatgcgctggaaaatatggtgcgcctgtcggcaaaatcccaggagtatctgacgcgcgccacccgacgttattacagcaaaacgccgatgcaaatcattaatgagattcgcattaattttgccaagaaacagttggaaatgaccaactattcggttacggatattgcttatgaagccgggtatagcagtccaagtctgtttattaaaacgtttaagaagatgacctcatttacgccgaatagttatcggaagcgattgacggaaattaatgagtaa

SEQ ID NO: 368688 - DNA, 1356 bp, Salmonella enterica
atgagccagaaattaaaagtcgtcactattggtggcgggagcagctacacccctgaattacttgaaggctttattaagcgctaccatgaattacctgttaccgaattatggctggttgacgttgaagacgggaaagagaagctgggcattatttatgatctctgccagcgaatgattgataaagcaggcgttccgctaaaattgtataaaacgctggatcgccgggaagcgctgaaagacgctaattttgtcactacccagctacgcgttggtcaactcaaagcccgtgaactggacgagcgtatcccgcttagccacggctatctggggcaagaaaccaacggcgctggcggtttatttaaagggttgcgtaccattccggttatttttgacatcattaaggatgttgaagaattatgtccgaatgcgtgggtcattaactttactaacccggcggggatggtgacggaagcggtttatcgtcataccaactttaaaaagttcattggcgtatgtaatattcctgtcggcatgaaaatgtttattcatgacgtgctggcgctgaatgagactgacgatctttccattgacctgtttggtctaaaccatatggtctttattaaagatgtgctggtgaatggcacctcacggttcgcagaattactggatggcgtggcgtccggtcagttgaaagcgtcaaccgtaaaaaatatctttgatctgccgtttagtgaaggattgattcgctcgctgaacatgctgccgtgctcttatttgttgtattacttcaagcaaaaagagatgttggcgattgaaatgggcgaatattacaaaggcggcgcgcgcgctcaggtcgtacaaaaagtggagaaacaactcttcgacttgtacaaaaatcctgagctaaacgtgaagccgaaagagcttgagcaacgcggcggcgcttattattccgatgccgcttgtgaagtcattaacgctatttataatgacaagcagactgagcattacgttaatattccacatcatgggcatgtcgagaatatcccggcggactgggcggtggaaatgacctgcattctgggacgcaatggcgcgacgccgcacccgcgtatcacccgttttgacgaaaaagtgctggggcttatccacactattaaaggatttgaggtcgcggccagcaatgcggcgctgagcggaaactttaatgatgtgctgctggcgcttaacctgagtccgctggtgcattccgaccgcgacgcagaagtcctggcgcgtgagctcattctggcgcatgaaaaatggctgcctaattttgccgcttgcatcgaagcgcttaaaggtaagcaccactga

SEQ ID NO: 368689 - DNA, 759 bp, Salmonella enterica
atggaacgcgtgttgattgtgaatgccgatgattttggcctgagtaaagggcaaaattacggcattgttgaagcatatcgcaacggcgttgtgacctccacgacggcgctggtcaatggcgaggctattgaccatgcggcgcagcttagccgcgagctgcctgcgcttggggtgggaatgcattttgttttgacgttaggcaaaccggtgtcagagatgccgggcctgacgcgagacggcctgttggggaaatggatctggcaaatggcggaggaggatacgcttccgctggatgaaattgcgcatgaactggcgtgtcagtatcagcgtttcatcgacgtatttggccgcgagccaacgcatctcgacagtcaccatcatgtgcatatgttcccgcaaattttccccatcgtcgcccactttgcggcgcagcgcgggattgcgttacgtattgaccgccagacggtgttgaacgccgacgatctgccgtcggatttgcgcagcactcaaggatttagtagtgaattttacggcgaggagatcaccgaagcgtgctttttacgcattctggatgcctcggcgcatcgaggagaagcctctctggaggtgatgtgtcatccggcgtttgtggataacattattcgccagagcgcctattgttacccccgcttaactgaactggaggtgttgacgtctgcgtcactcaaggcagcgattgcggaacgtggatatcgtcctggctgttttcttgatatttag

SEQ ID NO: 368690 - DNA, 2253 bp, Salmonella enterica
atgtcgcataatgagaaatccccccatcagtcccccgtgcatgatacccgtgaatcacagcccggcctggactccctggcgccgtcagacggttcacatcgcccaacgccagaaccgacgccgccgggcgcgcaaccaacggcccccggcagcttaaaagcgcccgagaccgcgaatgataagctcaccgccctcgacgcctttcgtaaaggcagcgaaaattatgcgctgaccaccaatcagggcgtgcgcatcgccgacgatcaaaattctcttcgcgccggcagccgtggccctacgctgttggaagattttatcctgcgcgaaaaaattacccactttgaccatgagcgtatcccggagaggatcgttcacgcccgcggatcagcagcgcacggctattttcagtcatataaagacctgagcgacatcacgaaagccgcgtttctgtgcgatccacagaaaattaccccggtctttgttcgcttttcgacagtacagggcggcgcggggtctgctgataccgtacgtgatatccgcggttttgcgaccaaattttataccgaagagggaattttcgatctcgtcggtaataacacgccgatcttttttatccaggatgcgcataagtttccggattttgtgcacgccgttaagcccgaaccacattgggccattccgcaaggacagagcgcgcacgacaccttctgggactatgtttccttacagcctgagacgctgcacaacgtcatgtgggcaatgtcggatcgcggcattccacgcagttatcggacgatggaagggttcggcattcacaccttccgtctgatcaatgcgcaagggaaagcgacctttgtccgtttccactggaaaccgttggcgggtaaagcctcgctggtatgggatgagtcacaaaaactgaccggtcgcgatccggattttcaccgccgggatctgtgggaggccatcgaagcgggcgatttcccggaatacgagctgggcctacaactcattgccgaagaggatgaatttaaattcgattttgatctgctcgatccgaccaaactgattccggaagagttggtgccagtacaacgcgtcggcaaaatggtgttaaaccgtaatccggataactttttcgctgaaaacgaacaggcggcatttcatccagggcatattgttcccggcattgattttaccaacgatccgctgttacaggggcgtctgttctcttataccgacacgcaaatcagtcgtctgggcgggccaaacttccacgaaattccgattaaccgccctacctgcccctaccataacttccagcgtgacggtatgcaccggatggatatcgacaccaatccggcgaactatgaaccgaactccattaatgacaactggccgcgcgaaacgccgccagcgccaaaacgcggcggcttcgaatcataccaggaacgcgtggatggcaataaaatacgcgaacgcagcccctctttcggtgaatattactcgcatcctcgcctgttctggctcagtcagacgccgatagaacagcagcatattattgacgcgttcagctttgaactgggtaaagtcgcccgcgcgtatattcgggagcgggtggtcgatcagttagcgcatattgatgtcacgctggctcagggcgtcgcgcataatctcggttttgcactcacccatgagcaaacgcaaattgccccgcctcctgatgtcaacggtctgaaaaaagatccggcgctcagcctgtatgcggtgccggacggcgatgttaaaggccgagtggtcgctattctgctgaacgacaaggttaacgccgccgaactgttgaccattttgcaggctttaaaagccaaaggcgtccacgcaaaactgctctattcacggatgggtgaagtaacggctgatgacggttcaacattaactattgcggcaacctttgccggcgcgccgtcgctaacggtcgatgcggtaatagtaccgtgcggcaatattgccgatatcgagagttgcggcgatgctcgttactaccttctggaagcctacaaacatctgaagcccatcgcactggcaggcgacgcccgacggtttaaggcgcttttaaacattgatagccagggggaagaaggacttgttgaggcagataacgttgaccaccactttatggacactctgctgacgctgatggcggcacaccgtgtctggtcgcgtgcggggaaaattaacgcgattcctgcataa

SEQ ID NO: 368691 - DNA, 243 bp, Salmonella enterica
atgatgaaacctcttcgccagcaaaatcgccagattattagctatattccgcgtgttgaacccgcgccgccggaacatgcgataaaaatggatacgtttcgcgacgtctggatactgcgcggtaaatatgttgcctttgttctgacgggggagtcatttcaacggtcgcccgcctttagcgtgccagaatcggcgcaacgttgggcgaatcaggttcgccaggaaaacgaaatcgctgactaa

SEQ ID NO: 368692 - DNA, 1392 bp, Salmonella enterica
atgaattttccattaattgcgaacattgcggtgttcgtcattctgctgtttgtactggcgcaggcccgtcataaacagtggagtctggctaaaaaagtgcttgtcggccttgtgatgggcgtggtctttggtctggccctgcacaccatttatggcgctgacagtcaggtgttaaaagactccattcagtggttcaatattgtcggcaacggctatgtgcaattgctacaaatgattgtgatgccgctggtattcgcctctattttaagcgccgtggcacgactgcataacgcctctcaattggggaaaatcagttttctgactatcggcacgctgctgtttactacccttatcgcagcgctggtgggcgtgctggtcaccaatctgttcggactgacggcggaaggtctggttcagggcggcgcggaaaccgcgcgtctgaatgccattgagacgagctatgtcggcaaagtggccgatctcagcgtgccgcaactggtgctgtcttttgtaccgaaaaatccgtttgcggatctgactggcgcaaatcctacgtctattatcagcgtggtgattttcgccgcattcctgggcgtggccgcgcttaaactgctgaaagatgatgcgccaaaaggcgagcgtgtgcttgttgctatcgataccctgcaaagctgggtgatgaagctggtgcgtctggtaatgcaacttacgccttacggcgtactggcgctgatgacgaaagtggttgccggctctaatctgcaggacatcattaagcttggaagcttcgtggtagcgtcatatcttggtctggcgataatgtttgtggttcacggcatactattgggcgtgaacgggattagcccgctgaaatatttccgcaaggtgtggccggtgctgacatttgcctttaccagccgctccagcgccgcctccattccacttaatgtcgaagcgcaaacccgccgcctgggcgtgccggagtccatcgccagctttgctgcctcttttggcgcgaccatcggccaaaacggttgtgccggtctttatcctgcaatgttagcggtaatggttgcgccgacggtcggcatcaaccccttagaccccgtatggatagccacgctggtgggtatcgttaccgtaagttcggcgggtgttgccggcgttggcggcggcgcgaccttcgccgcgctgattgtgctgcctgccatgggcttaccggtcacgctggtcgcgctgttaatctccgtcgaaccgttgattgatatgggccgtaccgcactgaacgtgagcggctcaatgaccgcgggtacgctgaccagccagtggctgaagcagaccgataaaaccattctcgatagcgaagaagacgctgaactggcgcatcgataa

SEQ ID NO: 368693 - DNA, 600 bp, Salmonella enterica
atgggttttatcatgacggcggaaggacatcttcttttttctatagccagcgcggttttcgccaagaatgccgagttaacgcccgtccttgcgcacggcgactggtggcatattattccttcggctattttgacctgtctgctgccggatatcgaccaccccaaatcttttcttggtcagcgcctgaaatgggtatcgaaaccgatcgcccgcgcgttcggtcaccgggggtttacccatagtctgctggcggtctttgccctactggcgaccttttatctcaaggtaccggatacgtggattatcccggcggatgcgctgcaaggcatggtacttggctatttaagccatatcgtcgcggatatgctcacccccgcaggcgttcccttactgtggccgtgccgctggcgtttccgcctgcctattctggcgccgcgcaaaggcaatcaactggagcgatttttatgcatggcgttgtttgcctgggcggtgtggatgccacagtccatgccggaaaacaacgtcatacgctggtcttcgcagatgattactatcctgcaaatgcagttcaatcgttttataaatcaccagattgattag

SEQ ID NO: 368694 - DNA, 669 bp, Salmonella enterica
atgtcaaccccacgtcaaattcttgctgcaattttcgatatggatggactactgatcgattccgaaccgctctgggatcgcgctgaactggacgtgatggcaagtttaggcgtagatattactcggcgccatgaactgccagacacgcttgggctacgcattgatatggttgtcgatctctggtttgcgcagcaaccgtggaacggccccgatcgccaggaagtgacaaaccgtgttattgcccgcgcgattacgcttatcgaagagacgcgccctcttttaccgggtgtgcgcgaggccgtggcgctgtgtaaagcgcaggggctattagtggggcttgcctcggcatcgccgctgcatatgctggaaaaagtgctcaccatgtttgaactgcgcgacagttttgacgcgctggcctctgcggaaaaattgccctacagcaaaccgcatccgcaggtctatctggattgtgcggccaaattaggtgttgatccattaacctgcgtggcgctggaggattcggtgaatggtctaatcgcggcaaaggcggcgcgaatgcgcgccattgtggtgccagcagaagaaaaccagcctgatccgcgctttgcgctggcgaatgtcaaacttaactcactgacagagctgacggcggcgcatctactcggttaa

SEQ ID NO: 368695 - DNA, 537 bp, Salmonella enterica
atgacgtatcaacaagctggacgcattgcaatcctaaaaagagttgttgggtgggttatttttattccggcactgctttccacgctcatctcagtccttaaatttatgtatgcgcacagtgaaaagcaggaggggataaatgcggtattgctggattttacccacgtaatgatagacatgatgcgcgtgaatacgccgtttctgaatgttttttggtacaactcgccgacgccgaattttcagggaagcctgaatatcggtttctggctcatttttattctgatttttgtcgggttggcgatgcaggattccggcgccagaatgagccgccagtcacgttttttgcgtgaaggcgtggaagatcagttgatcctggaaaaagcaaaaggcgcggaagggctaacgcgtgagcagatagagtcacgtatcgtggtgccgcaccataccatctttttacagtttttcccgctctatattttgccggtcattattatcgtgctcggctactttttcttttccttgttaggcttcatgtaa

SEQ ID NO: 368696 - DNA, 861 bp, Salmonella enterica
atgtggcaagctatcagtcgtcttttaagcgagcaagtcggtgaaggcgaaatcgaactgcgtaatgaactgcctggcggagaagttcatgccgcatggcatttacgttattcaggccatgattttttcgtaaagtgcgatgaacgagaaatgcttcgcggttttaccgctgaagccgatcagctggagctgctctcccgcagtaaaaccgttgttgtgcctaaggtatgggcggtaggttcggatcgggattacagctttttagtcatggactacctctcgccccgcccgctggatgcccataatgcgtttattcttgggcaacagctggcgcgcctgcaccaatggagcgaccaacctcaattcggcctcgattttgacaacgcgctctctaccacgccgcagccgaatacctggcaacgccgttggtcgacttttttcgccgaacagcgcattggctggcaacttgaactcgccgcggaaaaaggcattacttttggtaatattgacgccattgttgaacatgttcagcaacgtctggcgtcgcatcaaccgcagccttctcttttgcatggcgatctatggtcggcgaactgcgcgcttggccctgacggcccctatatcttcgatccagcctgctattggggcgacagagaatgcgatctggcgatgctgccgctgcataccgatcagccaccgcagatttatgacggctatcagtccgtttcgccgctaccgctggattttctcgacaggcagccgatttaccagctctacaccctgcttaatcgggcaaggctgtttggcggtcagcacctggccactgcgcaaaaagcgatggatcggctgcttgcggtatag

SEQ ID NO: 368697 - DNA, 291 bp, Salmonella enterica
atggccagtggcgatattacccgttatgttattaccgtaaccttccatgaagattccctgaccgagattaacgaactcaataatcatctgacgcgcagcggttttttgctgacattaacggacgatgaagggaatgtgcatgagctcggcaccaatacgtttggctttgttagcgctcagagcgctgatgaaatcaaagcgcttgtcgccggacttgcgaaaagcgcattagataaggatgtcgacattaccgtggcgacctgggaggcgtggagtaaaaacgcacaataa

SEQ ID NO: 368698 - DNA, 933 bp, Salmonella enterica
atggtacgtatctatacgttgacgcttgcgccctctctcgatagcgcaacaatcacgccgcaaatttatcccgaaggtaaactgcggtgctccgcgccggtattcgaacccggcggcgggggtattaatgtcgctcgcgccattgcgcatcttggcggcaccgcgaccgcaattttcccggctggcggcgctaccggcgaacatctggtcgcactactggctgacgaaaatgtccccgtgtctaccgtcgatgcgaaagactggacgcgtcagaacctgcacgtccacgtcgagtccagcggcgaacagtatcgttttgttatgcccggcgccacgctggacgatgacgaatttcgccagctcgaagaacaggtactggaaattgaatccggggcaattctggttatcagcggcagccttccgcccggcgttaaggtcgagaaactcacgcaactgatttccgccgcacagaagcaaggcattcgctgcattattgatagctctggcgacgcgctcaccgccgcgctggcgcttggcgatatcgaactggtgaaacctaacctgaaagaattgagcgcgttggttaatcgcgatctgacgcagcctgatgatgtgcgtaaagcggcccaggaattagtgcaaagcggcaaggctcgccgggtagtggtctctctggggccgcaaggggcgctgggcatagacagtgagaattgcatccaggttgttcctcccccggtgaaaagtcaaagtactgtcggcgcaggcgacagtatggtgggcgcgatgacgttaaaactggcgcaagacgcgtcgctggaagagatggtgcgctttggtgtggcggcaggcagcgccgctacgctcaatcaaggtacgcgtctgtgttcccgtgacgatacccaaaaaatatacgcctatctttccgcgcaataa

SEQ ID NO: 368699 - DNA, 759 bp, Salmonella enterica
atgaagcttttgaaggcagtacccgctgtagttatgctggcgggtggcgtgttcgcgtctctgtatgccgccgccgatgattccgtttttactgtcatggatgatccctccaccgcgaaaaaaccttttgaaggtaatctgaatgcgggctaccttgctcagtcaggcaatactaaaagttcttccttaacggctgacacggcgatgacctggtatggacaacgtactgcctggtcattatggggcaatgccagcaatacctcctctaatgatgaacgctcttcagaaaaatatgcggtaggcgcgcgtaaccgttttaatatgacggattatgattatacctttggccaggccagttggctgacagaccgtttcaacggttatcgtcagcgcgacgtactgaccgccggttacgggcggcagttccttaatggtccagtgcacagcttccgttttgaatttggtccaggggttcgctatgacgaacatacggacgataccactgaaacgcagccgttgggttatgcttccggcagctatgcctggcagttaactgacaatgctaagtttacacagggggtgtcagtatttggcgcagaagacaccacactaaattcggaaacagccctcaatgtcgccattaacgaacattttggtctaaaggtggggtataatttaacgtggaactcgcagccgcctgaatcagcgcctgaacataccgatcgtcgcactacggtaacgctgggctataagatgtaa

SEQ ID NO: 368700 - DNA, 960 bp, Salmonella enterica
gtgaacaaatacagctattgcgcaacgatgattgccgccatactcagtacgaccacaatggccaatgccagtagccttgctatttcagtggcgaatgatgatgcaggtatatttcaaccatccttaaatgccctttatgggcacccggctgcagaccggggtgattatactgccgggctctttttaggctacagccacgatctcactgacgccagtcaactctcttttcatatcgcgcaagatatttattctccatcaggcgccaataagagaaagcctgaagccgtcaaaggcgaccgcgcgttcagcgcctttcttcataccggactggagtggaattcattagccaccaattggttacgttatcgtttaggtaccgatatcggcgttattggtcctgacgcaggcggtcaggaggttcagaatcgggcgcatcgaataataggcgcagaaaaataccctgcctggcaggatcaaattgaaaaccgttatggttacacggcaaaaggaatggtctcccttacgccagctattgatattctgggtgtcaatgtgggcttctatccagaagtctctgctgtcggcggcaatctcttccagtatttggggtacggcgcaaccgttgcgctgggaaatgataagaccttcaactctgataatgggtttgggttattgtcccgccgagggttaatacacactcaaaaagagggattgatctataaagtatttgctggcgttgagcgcagggaagttgataaaaactacacgttacaggggaaaacgctgcaaacaaaaatggaaacggtggatattaataaaaccgtggatgaatatcgcgtcggtgccaccatcggctattctcccgtcgcattttctctttctttaaacaaagtcacgtcggaatttcgcaccggagacgactattcttatatcaacggagacatcaccttcttcttctga

SEQ ID NO: 368701 - DNA, 249 bp, Salmonella enterica
atgttgaaaaatggtgttaaaaaacacgcgccagatattattgaatatccatttttcattcgctatctgagtgcgagaaattattggcttcacgattatgcatataatacgatgttttttggtatcaatatgaatatcacgttgtattcttttgagctcattttctatgatgtcttcgatgtttatctgttattaatttttaccgtgatagtgttgtctttaatgatgagcgcatctaacggctggtag

SEQ ID NO: 368702 - DNA, 855 bp, Salmonella enterica
gtgaataaaaccattaatctgctaaaattactgcccgtagtattattaagcgcatgtactacatcgtatcctccccaggatataatatcggcacccgagttaccccatcgtaacgtactcgttcagcaacctgataactgtagcgttggctgtcctcaaggaggaagtcaacaaacaatctatcgccatgtctatacgctcaataataatagcgccacgaaatttgccaactgggttgcctatagcgtgacaaagaccagccaggcaagcggtcgcccgcggaactgggcgcaggaccccgatttaccgccctcggatacgttggccccttcggcctataaaaatgcccatacgctattaaaagtcgacaggggacaccaggcgccgttggcaggattgggcggcgtttcggactggccgtcgttaaattatttatcgaatattacgccgcagaaatccgccctgaaccagggagcatgggctgcactggaaaaccgggtgcgcgaacttgccaaacaggctgatgtatctgtagtgcacgtagtgaccggccccctttttgagcggcatatcgccacattgccagaagatgcgacggtagaaattcccagcgggtactggaaggttttattcaccggaacggcgccgtcaaaaagtgaaggaaattacgctgcgtttattatggatcagaatacgccccgttcggcgaatttttgcgactatcaggttaccgtggaggctatcgaacataaaacgaagccagtgctgacgctgtggtctgccttgcctgaagcggtagccagcgaggtgaaaacgacaaaggggagtctggtgcagaagttaggttgtcgatga

SEQ ID NO: 368703 - DNA, 1224 bp, Salmonella enterica
atgcttataatttcatacattgtattatgcttattatttatagtttatctctatactctttccgtaagaattgagggaaaaataataaatgtaatggtcccatacctgataataacagtgcctacactgtacgtgtttgaaggtatatttgtatacctctcagaggtgcggaagtatacagtggaatatttgtttttctatacttgctatataacatacatagcatcatttgttatttcttatctttacacacaaagaaaacccatatacaacaaatcaaacacaaaaaataaaccaaggtatgtgtttacttcattgttattcaccttccttgcttttatcatttaccttccagtgttgatggagttcagagagtacatacttagcccaagaagaatatacgaattaaccagaacagggtatggtatatacttctatccttcattaatgttttctcttgtcgcttctatttgcgcgttctttacatacaaaaaatcaaagttattttgtatttccatagttttatttaactgtatacttattttcttgcatggtaacaaaggaccaatatttagtatatttatagcattcatcctttatctttcatatattgaaaataaaaaaattaaatttatgttcctggtgaaatcgtttgctgttatagcagtcattgtaacggcattctttgcatatacgtttactgatgggaatccgatagaaaatatggcgaattactcggattatacccgtaatgctgttcttgttgcttcctcaaactttgactttatgtacggaaaattactaatggagagcgaggtttactcgagaattccgagggctatttggcctgataagcctgaagattttggcgcattgtatctggcaaaagtatttttccctgatgcattctacaggaatcagggcgctcctgctttcgggtatggtgaactatacgcagatttcgggctttttacaccagtttggttagttatatctggagtatttaaaggcgtcctggctaagtatttctccaataaaactcaggaaacaaagtcagcgcattatttcataatgttcctattttgcattggaataagtgtgattcctgttagcatgggatggttgttccctgagcatttgatgattgcctttatagtatacattgcatcttcctttgttttttcagcgcatataagattcgttttactaagaagcgataaataa

SEQ ID NO: 368704 - DNA, 1929 bp, Salmonella enterica
atgcctgttattactcttcctgatggcagccaacgccattatgaccaccctgtaagcccgatggatgttgctctggacattggtcctggcctggcgaaagccaccattgcgggccgtgtgaatggcgagctggttgatgcttccgatctgattgaaaatgatgcgacgcttgccatcatcaccgcaaaagatgaagagggtctggagatcattcgtcactcttgcgcgcatctgttaggtcacgcaatcaagcaactttggccgcacacgaaaatggcgatcggcccggttgtcgacaacggtttttactatgacgttgatcttgaccgcacgctaactcaggaagatgtcgaagcgctcgaaaagcggatgcatgagctcgccgagaaaaattacgacgttatcaagaaaaaggtgagctggcatgacgcgcgcgaaaccttcgtgaagcgcggcgagacttacaaagtcgctattcttgatgaaaatatcgcccatgatgataagccaggcttgtaccatcatgaagaatatgtcgacatgtgtcgtggtccgcacgtgccgaatatgcgtttctgccatcactttaaactgatgaaaactgctggcgcatactggcgcggtgacagcaataataagatgctgcagcgtatttacggtacggcatgggcagataaaaaagccctgaacgcttatctgcagcgcctggaagaggccgcaaaacgcgaccaccgtaaaattggtaagcagctcgacctgtatcatatgcaggaagaagcgccgggcatggtgttctggcataacgacggctggactatcttccgcgagctggaagtctttgttcgttctaaactcaaagagtaccagtatcaagaagttaaaggcccgttcatgatggaccgtgtgctgtgggaaaaaaccgggcactgggacaactataaagatgcgatgttcaccacatcctcagaaaaccgcgaatattgcatcaagccgatgaactgcccgggccacgttcagatctttaaccagggtctgaaatcctatcgtgatttgccgctgcgtatggcggaattcggtagctgccaccgtaacgagccatcaggcgcgctgcatggtctgatgcgcgtacgcggctttacgcaggatgatgcgcatatcttctgcaccgaagagcagattcgcgatgaagttaacgcttgtattcgtatggtctacgatatgtacagcacctttggcttcgagaagatcgtcgtcaagctttccactcgtcctgacaagcgtatcggcagcgatgagatgtgggatcgtgctgaggcggatctggcggttgcgctggaagaaaataatatcccgtttgagtatcaactgggtgaaggcgcattctacggtccgaaaattgaatttaccttatatgactgcctcgatcgtgcatggcagtgcggtacagtacagctggacttctccttaccgtctcgtctgagcgcctcctatgtaggcgaagacaacgagcgcaaggtgccggtaatgattcaccgtgcgattcttgggtcgatggaacgcttcatcggtatcctgaccgaagagttcgctggtttcttcccgacatggctcgcgcctgttcaggtagtcgtgatgaatattaccgattcgcagtctgaatacgttaacgaattgacgcagaaactacaaaatgcgggcattcgtgtaaaagcagacttgagaaatgagaagattggctttaaaatccgcgagcacactttacgtcgtgtcccttatatgttggtctgtggtgataaagaggtggaagcaggcaaagttgccgttcgcacccgccgcggtaaagacctgggcagtctggacgtaaatgacgtgattgagaagctgcaacaagagattcgcagccgcagtcttcaacaactggaggaataa

SEQ ID NO: 368705 - DNA, 435 bp, Salmonella enterica
gtgagtctgagagaagctctggaaaaagctgaagaagccggagtagacttagtcgaaatcagccctaacgccgagccgccggtttgtcgtataatggattacggcaaattcctctatgaaaagagtaagtcttctaaggaacagaagaaaaagcaaaaagttatccaggtgaaggaaattaaattccgtcctgggacagatgaaggcgactatcaggtaaaactccgcagcctgattcgctttctcgaagagggcgataaggccaaaatcacgctgcgtttccgcggtcgtgaaatggcccaccagcaaatcggtatggaagtgcttaatcgcgtgaaagacgatttgcaagaactggcagtggtcgaatccttcccaacgaagatcgaaggccgtcagatgatcatggtgcttgctcctaagaagaaacagtaa

SEQ ID NO: 368706 - DNA, 198 bp, Salmonella enterica
atgccaaaaattaagaccgtacgcggtgctgctaagcgcttcaaaaaaaccggtaaaggtggttttaagcacaagcacgctaacctgcgtcacattctgaccaaaaaagcgactaaacgtaaacgtcacctgcgtccgaaagccatggtttctaaaggcgatctgggcctggttatcgcgtgcctgccgtacgcataa

SEQ ID NO: 368707 - DNA, 357 bp, Salmonella enterica
atggctcgcgtaaaacgtggtgtaattgcacgcgcacgtcacaagaaaattttgaaacaagccaaaggctactacggtgcgcgttctcgcgtataccgcgttgccttccaggcagttatcaaagctggtcagtatgcttaccgtgaccgtcgtcaacgtaagcgtcagttccgtcaactgtggattgcgcgtatcaacgcagcagcacgtcagaacggtatttcttacagcaaattcatcaacggcctgaaaaaagcctctgttgaaatcgaccgtaagatcctggctgatatcgccgtattcgacaaagtcgcgttcaccgcgctggttgaaaaagcgaaagcagctctggcataa

SEQ ID NO: 368708 - DNA, 984 bp, Salmonella enterica
atgtcacatctcgcagagctggttgccaatgcagcggccgccattaaccaggcgtcagatgttgccgcgttagacaatgtacgcgtcgaatatttgggcaagaaagggcatttaacccttcagatgacgaccctacgcgatctgccgccggaagagcgtccggcagccggggcagtcattaacgccgcgaaagagcaggtacaacaggcgcttaacgcgcgtaaagccgagctggaaagcgcagcgcttaacgcccgtctggccgctgaaaccatcgatatctccctgccggggcgccgtattgagaacggcggtctgcatccggtcacgcgtaccattgaccgtattgaaagtttcttcggtgagcttggttttaccgtggcgactggcccggaaatcgaagatgactaccataacttcgatgcgttaaacattccgggtcatcatccggcccgcgccgatcatgataccttctggtttgacgcgacccgtctgctgcggacccagacgtctggcgtccagatccggacgatgaaagcgcagcaaccgccgatccgtattattgcgccgggccgtgtataccgtaatgactacgaccagacgcatactccgatgttccatcagatggaaggtctgattgttgataccaacatcagcttcaccaacctcaaaggtacgctgcacgacttcctgcgtaatttctttgaggaggatctgcagattcgcttccgtccttcttattttccgtttaccgaaccttctgcagaagtggatgtgatggggaaaaacggcaaatggctggaagtgctgggctgcgggatggtgcatccgaatgtgctgcgcaatgtcggtatcgatccggaaatctattctggcttcgcttttggtatggggatggaacgtctgaccatgttgcgttatggcgtcaccgacctgcgttcattcttcgaaaacgatctgcgtttcctcaaacagtttaaataa

SEQ ID NO: 368709 - DNA, 2388 bp, Salmonella enterica
atgaaattcagcgaactgtggttacgcgagtgggttaacccggcaattgatagcgatgcgttggctaaccagattacgatggctggcctggaagtagacggcgttgagccggtcgcgggaagcttcaatggcgttgtggttggggaagtggttgagtgcgcccagcatccgaacgctgacaaattgcgtgtaacgaaagtcaacgtcggcggagaacgcctgttggatatcgtctgcggcgcgccaaactgtcgtcaggggttgaaagtagcggtggccaccattggcgctattctgccgggcgatttcaaaattaaagcggcaaaactgcgcggcgaaccgtctgaagggatgctgtgctccttctccgaactggggatttccgacgatcacagcggcattatcgaactgccggcggatgcgccgctgggtaccgatatccgtgaatacctgaagcttgacgacaataccatcgaaattagcgtcacgccgaaccgtgcggattgcttaggtatcatcggcgttgcgcgtgatgtggcggtactgaacaaagcgccgctccaggagcctgaaatggtgccggttacggcaaccatcagcgatacgctgccgattacggtagaggccgctgatgcgtgtcctcgctatcttggccgggtggtaaaaggcatcaatgttaacgcgccgacgccgctgtggatgaaagagaaactgcgtcgctgcggtattcgctccatcgatgcggtggttgacgtcacgaactatgtgctgctcgaactgggtcagccaatgcatgctttcgataaagatcgcattgatggcggtattgtcgtgcggatggcaaaagagggtgaaaccgtcgtcctgctggacggtagcgaagcgacgttaaatgcggacacgctggtgatcgccgatcaccataaggcgctggggatagccggtatttttggcggcgaacattccggcgtgaacggcgaaacgcaaaatgtgctgctggagtgtgcgtactttaatccgctgtctatcaccggtcgcgctcgccgccacggtctgcataccgatgcgtctcaccgctacgagcgcggggtggacccagcgctgcaatataaagcgatagagcgcgctactcgtctgcttcttgatatctgtggcggtgatgcgggtccgataattgatgtgagcaacgaagcaacgttgccgaaacgcgccaccattacgctgcgtcgcagtaaactggatcgcctgatcgggcatcatattgcggatgagcaggtcagtgatattctgcgtcgtctgggctgtgaagtgaccgaagggcaggacgagtggaaagccgtagcgccgacctggcgtttcgatatggagattgaagaagatctggtggaagaggtggcccgcgtttacggctataacaatattccggacgagccaattcaggccggtttaatcatggggacgcaccgtgaagccgatctgtcgttgaagcgggttaaaaccatgctgaacgacaaaggctatcaggaagtgattacctatagctttgtcgatcctaaagtacaacagctcatccatccaggcgcagaagcgctgctgctgccaaaccctatctccgttgagatgtcggcgatgcgtctgtctctgtggagcggattgttggcgacggtggtctataaccaaaaccgtcagcagaatcgcgtgcgtatttttgaaaccggtttacgtttcgttccggatacacaagccaatctgggtattcgacaggatctgatgctggctggcgtgatttgcggtaaccgctatgatgagcactggaacctggcaaaagagaccgttgatttctatgatttgaaaggcgatctggaagcagtattggatttaaccggcaaactgggtgatatccagtttaaggcggagatgaatccggctctgcatccgggacagtctgcggcgatttatctgaaagatgaacgtattggttttattggggttgttcaccctgaactggaacgtaaactggatctgaatggtcgtacgctggtgtttgaactggaatggaataagctcgcagaccgtatcgtgccgcaggcgcgggagatttcacgcttcccggccaaccgtcgcgatattgcggttgttgttgcagaaaacgttcccgcagcggatattttatccgaatgtaagaaagttggcgtaaatcaggtagttggcgtaaacttatttgacgtgtaccgcggtaagggtgttgcggagggttataagagcctcgctatcagcctgatccttcaggataccaaccgtacactcgaagaagaggagattgccgctaccgtcgccaaatgtgtagaggcattaaaagagcgattccaggcatcattgagggattga

SEQ ID NO: 368710 - DNA, 300 bp, Salmonella enterica
atggcgcttacaaaagctgaaatgtcagaatatctgtttgataagcttgggcttagcaagcgggatgccaaagaactggttgaactgtttttcgaagagatccgtcgtgctctggaaaacggtgagcaggtgaaactctctggttttggtaacttcgatctgcgtgataaaaatcaacgtccggggcgtaacccgaaaacgggtgaagatattcctattacagcacggcgcgtggtgaccttcagacccgggcagaagttaaagagccgggtcgaaaacgcttcgcccaaagaagagtaa

SEQ ID NO: 368711 - DNA, 981 bp, Salmonella enterica
atgctgacttttgcccgccaacaacagcgacgaaacgttcgctggcttctgagcctgtcactgctggtgctactggctacacttctgagcttatgcgcaggcgaacagtggattgcccccggtgactggttaagcgcccggggggaactgtttgtctggcaaattcgccttccccgcacgcttgcggtattgctggttggcgctgcgctggcgctatctggcgccgtgatgcaggcgctgtttgaaaacccacttgctgaaccgggtctgctcggcgtttcgaatggggccggtgttgggcttattgccgccgtcttactggggcaggggcaactgccaggatgggcgctgggactgtgcgctatagccggcgcgctcattattacgttaatcctgctgcgttttgcgcgtcgccatctctctaccagccgcttgttgttggcgggcgtcgcgctgggcattatctgtagcgcgctgatgacgtgggctatctatttttccacctctttcgatctgcggcaattaatgtactggatgatgggaggatttggcggcgttgactggcagcagagctggctaatgattgcgctcatcccggtactgatctggatatgttgccagtcgcaaccgctgaatatgctggcgctaggggaaacctcggcgcggcagcttggcctgccgctgtggttctggcgcaatttgttggtcatcgccaccggctggatggtgggcgtcagcgtggcgatggcgggggcgattggttttatcggtctggttattccgcacatcctgcgcttatgtggtttaaccgatcaccgggttttacttcccggctgcgcgctggccggggctatcgccctgctattggctgatgtggtcgcccgactggcgctggcgtcggctgaactgcctatcggggtggtcaccgccacattgggggcaccagtgtttatctggctgctactcaaatccgcgcgttag

SEQ ID NO: 368712 - DNA, 552 bp, Salmonella enterica
atgcaaaactcgcttcttaatactcacgttacgacgattgatggagaggtcactacacttgaaaaatacgccggaaaagtgctgctcattgtaaacgtcgcctccagatgtggcctgacgccgcaatatgaacagttggaaaatatccagaaggcgtgggcagatcaggggtttgtcgtgttgggttttccctgcaaccagtttatggggcaggagccaggcagcgaagaggagattaaaacctattgtgccagcacctggggcgtcacgttcccgatgttcagtaaaattgatgtgaatggcgacgcgcgccatccgctgtatcaaaaactgatagccgctgcgccaacggcagtcgcgccggagaagagcggcttttacgaacggatggtaagcaaagggcgtacgccactctatccggatgatattctgtggaattttgaaaaatttttggtaggccgggatggtcaggtggtacagcgtttttcgccggatatgacgcctgaagatcctattgtgatggaaagcataaaaatcacgttggcaaaataa

SEQ ID NO: 368713 - DNA, 750 bp, Salmonella enterica
atgtctcaattgatgcaattaaaggatgtcgccgagagcacccgcctggggccgctttccggcgaagtaagcgcaggagagatccttcatcttgtcgggccgaacggtgccgggaaaagcacgctactggcgcgtatggcggggttaacctccggcgaggggagcatcaggtttggcggagcgccgctggaggcatgggcgacggcaacgcttgcccaacaccgcgcttatcttgcgcaacagcaaaatccgccgttcgccatgccggtctggcattacctgacattgcatcaacctgataaaacgcgaaccgggcagcttaacgaggtggccgatatgcttggattaggcgacaaactggggcgaagcgtgaatcagctttccggtggcgagtggcagcgtgttcgccttgctgccgttgtactacaaattcatcccgacgctaatccggtcggtcaattattgctgcttgatgagccaatgaacagtctcgatgttgcgcaacaaaacgctctggatcgggtattacatcatttatgtcaggcaggaattgcgattgtgatgagtagccacgatctgaaccacacgctgcgccatgcgcataaagcctggttactaaagcgcggtaaactcattgcctgcggccgccgggaagaggtgctcaccccctcttatctggcgcaagcctacggtctgcgctttcgacgactcgacgtcgaggggcatccaacgctcatttcggccacttaa

SEQ ID NO: 368714 - DNA, 465 bp, Salmonella enterica
atgcgtttttggcttcttgttatcacagcattgttcctggcaggatgcagtactcatcgggcaccggcgccaaatgccagattatcagactccattaccgtcattgcgggtctgaacgatcagttgcagtcctggcgcggtacgccataccgttacggcggcatgagtcgcagaggcgtggactgttccggctttgtggtggtcactatgcgcgacaagtttgatttgcagttgcctcgtgatacgcgtgaacaatcaaaaatcggcaccagaatcgataaagatgaattgctgcccggagatttggttttctttaaaaccggttcgggcgaaagtggtttacatgttggtatttacgatacaaataatgagtttattcatgcctctaccagtcgtggcgtgatgcgttcatcgctggataatgtgtactggcgaaaaaacttctggcaggcacggcgaatttaa

SEQ ID NO: 368715 - DNA, 714 bp, Salmonella enterica
atgattgcttcacttgatgagctttaccattccgaactctttttccttcccgtcatggatgaaaatgctcggcttgttggtttagagattattgcaacgtttgccgctgaagacggcgccgtgcggatgccgactgagttggtagcgcctcgtctttcggtggaggaacaatactgtctgtttgttgaaaaactggcgttgttagaaacctgtcagcacttttttattcagcataaacttattgcatggcttaatttaccgcccgcaattagtgacttattattattagatagcgaacttttttcccgggcagcgcgctttccgtttcttgaattagctataaatgagaactatcctgggttaaaccagggcaaaaacaatgaaacgttagctaatctggcaatgcatttcccattaatgctggcaaattttggggcaggcgaggcgtcgactaaagctattttcgatgggcttttcaaacgagtcatgttggataaaaattttattcagcagcgagctgaaatgatctcattcgaaccattcatgcacgctattgttgcccagatctcctccagctgcgagtcgctgatgattgccggtattgataatgaggcgatgttttcgcgcgcagcgccattgggatttagcgcattccagggcggactatggcctccggtgccggtaagccagctcattaaactcgttcagcgataa

SEQ ID NO: 368716 - DNA, 1443 bp, Salmonella enterica
atgaccctgtcttttactgcccgttggcgcgatgaactgccagcaacgtataccgcgcttttacccacaccgttaaaaaatgcgcgactgatttggtataacgacaaactggcgcagcagttagcaattcccgcgtcgttatttgacgctaccaatggcgctggcgtttggggcggcgaaaccttattacccggtatgtcgcctgtcgcgcaggtatatagcgggcatcagttcggcgtctgggcgggacaactcggcgacggacgcggtattttgctgggcgaacagctcctggcgtatggctcgaccctcgactggcatctgaaaggcgccggattaacaccctattcgcgaatgggggatggacgcgccgtcctgcgttcaaccatacgagaaagccttgccagcgaagccatgcattatctgggtattcccactacgcgcgcgttatctatcgtagccagcgatacgccggttcagcgagagacgcaggaaacgggcgcgatgttaatgcgtctggcgcaaagtcatatgcgttttggtcatttcgaacatttctactaccgccgtgagccggaaaaagttcagcaactggctgatttcgctattcgtcattactggccgcaatggcaggatgtcccggaaaaatatgctttgtggtttgaagaggtggcggcgcgtaccggaagactcatcgccgagtggcaaaccgtcggtttttcgcacggcgttatgaatacggataacatgtcgattctggggctgaccatcgactatggcccctttggttttctcgacgactacgatcccggcttcattggtaaccattccgatcatcagggacgttaccgcttcgataatcaaccgttggtggcgctgtggaatttacaacgtctggcgcagacgttaaccccttttattgagatcgacgcgttaaacagagcgctggatcgttaccaggacgcgttgttaacgcactatgggcagcgaatgcgccagaagctgggtttctttaccgagcaaaaagacgataacgctttactgaatgaattgtttagtctgatggcgcgcgaagggagtgactatacccgtacatttcggatgttaagccatacggagcaacagagcgcttcctcgccgttgcgggatacgtttatcgatcgcgcggcgttcgatgcctggttcgatcgctaccgggcgcgattgcgcacagaggcggtggatgacgcgctgcgccagcagcagatgcaacgcgtgaatcctgcggttgtgttgcgcaactggctggcgcaacgcgcgatagatgcggctgaacaaggagacatggcggaactgcatcggttacatgaagttttacgtcaaccttttaccgatcgagatgatgactatgccagccgaccgccggagtggggaaagcggctggaggtcagttgttcaagttag

SEQ ID NO: 368717 - DNA, 192 bp, Salmonella enterica
atgtcgcgtatggataacaccgagctgcctcaccctaaggaaatagacaatgaaacgcttctccctgccgctgaacggcgcgtcaacagtcaggcgctattaggtccggacggcaaagtcatcatcgatcacaacggtcaggagtatctgttgcgcaaaactcaggctggtaagctactgttaaccaaataa

SEQ ID NO: 368718 - DNA, 1047 bp, Salmonella enterica
atgaacagaaccgacgaactccgtactgcgcgtatcgacagcctggtaacaccgaccgaactcgcgcagcggtatcctgtatcgtcctccgtcgccagtcacgttaccgactcccgacgccggatagaaaagattttaaatggtgaagatccacggctactggtcgtcattggcccctgttcgattcacgatctgaatgctgccatggaatacgcgacgcagctccaggcacaacgccaaaagcatcaggcgcgtctggaaatcgtcatgcgcacctattttgaaaaaccgcgcaccgttgtgggatggaaaggcctgatttccgatcctgacttgaatggaagttaccgcgtcaattatgggcttgaactggcgcgtcgcttgctattgcaggtgaacgaactgggagtaccgaccgccacagaatttcttgatatggtcactggccagtttattgccgatctgatcagttggggagcgattggcgcgcgtaccaccgaaagccaaatccatcgggaaatggcttctgcgctctcttgtccggtcggctttaaaaatggtacggatggcaatactcgcattgccgttgacgctattcgcgcctcccgcgccagccatatgtttctctcgccggataaagacggacagatgaccatctaccagacgagtggcaacccgtatgggcacatcatcatgcgcggcggtaaaaaaccgaactaccacgctgaagatattgccgccgcctgcgatacgttgcatgaatttgatctgccggaacatctggtcgtcgacttcagccacggcaactgtcaaaaacagcatcgccgccagctggaggtatgtgatgatatttgccagcagattcgtaatggctccacggcaattgccgggattatggccgagagttttttacgggaaggcacgcaaaaaattatcagcggtcaaccattaatctatggtcagtccattaccgatccctgcctgaactgggaagatacggaagttttgttggaaaaacttgccgcagcggtagacagccgcttttaa

SEQ ID NO: 368719 - DNA, 834 bp, Salmonella enterica
atggataatgttgttgatcgccatgttttctatatttctgatggtaccgccatcaccgccgaggtcctgggtcacgcggttatgtcgcagtttccggtgacgatcagcagcatcacgctgccattcgtggaaaacgaaagtcgcgcccgcgccgtcaaagaccaaattgacgccatttatcagcaaaccggcgttcgcccgctggtgttttactcgattgttttacctgaaattcgcgccatcatcttacagagcgaaggtttctgccaggatatcgtccaggcgctggtggcgccgcttcagcaggagatgaaactggatccgacgccgatcgctcatcgtactcatgggcttaatccgggtaacctgaacaagtatgacgcccgtattgccgctatcgattataccctggcgcatgatgatggcatttcattgcgcaacctcgatcaggctcaggtcattttacttggcgtttcgcgctgtggaaaaacgcccaccagcctctatctggcgatgcaattcggtattcgtgcggctaactaccctttcatcgccgatgatatggataatttgacgctgcccacatcgttaaaaccgctacaacataaactgttcggcctgacaattgaccctgaacgcctggcggcaattcgcgaagaacgccgtgaaaacagtcgctatgcctcgttgcgtcagtgccgcatggaagtggcggaggtcgaagcgctgtatcgtaagaatcagatcccctgcctgaacagcactaattattccgttgaagagatagccaccaagattctcgatattatggggcttaaccgcaggatgtactag

SEQ ID NO: 368720 - DNA, 2379 bp, Salmonella enterica
atgtccaacaatggctcgtcaccgctggtgctttggtataaccaactcggcatgaatgatgtagacagagttgggggcaaaaatgcctccctgggtgaaatgattactaacctttccggcatgggcgtatccgttccgaatggttttgcaaccactgccgatgcgtttaaccagtttttggatcaaagcggcgtaaaccagcgcatttatgagctgctggataagacagatattgatgatgtctcccagctggcgaaagcgggcgcgcagatccgccagtggattatcgacactcctttccagccggcgctggaaaacgccatccgcgatgcctatgcgcagctttcgtcggatgatgaaaatgcctcttttgccgtgcgttcctccgccacggcggaagatatgccagatgcttcgtttgcgggtcaacaggaaacgtttcttaacgttcagggcttcgacgcggtgctggtggcagtgaaacacgtatttgcttctctgtttaacgatcgcgccatctcttatcgcgttcaccagggatatgatcatcgcggcgtagcgctttccgctggcgtgcagcggatggttcgctccgatctcgcctcgtcaggggtgatgttctctatcgataccgaatccggctttgaccaggtggtctttatcacctcggcatggggactgggtgaaatggtggtgcagggcgcggttaacccggatgaattttatgtccataagccaaccctggcggcaggccgtccggccatcgtacgccgcaccatggggtcgaaaaaaatccgcatggtttacgccgccacccaggagcacggcaagcaagtgaagattgaggatgtgccgcagcaacagcgcgacattttctcgctcaccaacgaagaagtgcaggaactggcgaaacaagcggtgcagattgagcagcactatggtcgtccgatggatatcgaatgggcgaaagacggtcataccggtaagctctttattgtgcaggcacgtccggaaaccgtgcgctcccgtggccaggtgatggagcgttatacgctacatgcgcaggggaaaatcattgccgaaggtcgcgccattggtcatcgtatcggcgcgggtacggtaaaagttattcatgatatcggcgaaatgaaccgtattgagcctggcgatgtgcttgtcaccgatatgaccgacccggactgggaaccgatcatgaaaaaagcggcggcgattgtcactaaccgtggcgggcgcacctgtcacgcggcgattatcgcccgcgaattgggcattccggcggttgtcggctgcggcgacgccaccgaacgcatgaaagatggcgaaaaagtaaccgtctcctgtgcggaaggtgataccggttatgtgtatgccgacatgctggatttcagcgtaaaaagctccagcgtagataccatgccagagctaccgctgaaggtcatgatgaacgtcggcaacccggacagggcatttgactttgcctgcctgccgaatgaaggcgtaggtctggcgcgactggaattcatcattaaccgtatgattggcgttcacccacgcgcgctgctggagtttgacgaccaggatgccgcgctgcaaaacgacattcgtgagatgatgaaagggtttgactcgccgcgtgaattttacgttggtcgactgacggaagggatcgcgacgttaggcgccgccttctacccgaaacgcgtcatcgttcgcctgtctgactttaagtccaacgaatacgccaacctggtcggcggcgaacgttatgagccgcatgaagaaaacccgatgctgggcttccgcggcgcgggccgttacgtcgcagaaagtttccgcgattgttttgcgctggaatgcgaagcggtgaaacgcgtgcgcaacgatatgggccttaccaacgtcgaaatcatgatcccgttcgtgcggacggtcgaccaggcgaaagcggtcatcgaagagctggcgcgccaggggcttaaacgcggcgagaacgggctgaagatcatcatgatgtgcgagatcccgtccaatgccttgctggctgaacagttcctcgagtattttgatggcttctcgattggttctaacgacatgacgcagctggcgttggggctggatcgcgattccggcgtggtgtctgaactgtttgacgagcgtaacgacgcggtgaaagcgctgctgtcgatggcgatccgcgcggcgaaaaaacagggcaaatatgttggaatttgcggtcagggtccgtccgaccatgaagactttgccgcctggctgatggaagaggggatcgacagcctgtcgctgaacccggacaccgtggttcagacctggctgagtctggcggaactgaagaagtag

SEQ ID NO: 368721 - DNA, 1641 bp, Salmonella enterica
atgagtgttacattaacgtttgacgccgcaaggcggaaaacctatcgcgagtccggctactggggcgatgcttcactgggcgactactggcggcaaaccgcacgcgccgtacccgataaaatcgccgtggtcgataatcatggcgcgtcctggacctacgccgcgctcgactacgcggcaagccgcctggcaaactggttactgtctcaggggattcaaccgggcgatcgcgtggcctttcagcttccgggctggtgtgagtttaccctcatttatctggcctgcctgaaaacgggcgcggtatctgtcccgctacttcccgcctggcgagaagcagagctggtttgggtgctgaacaaatgtcaggctaaaatattcttcgcccccaccgtattcaaacagaatcgtccggtcgatcttatccttccgctacaaaatcaactgcgccatctgacgcatattgtcggcgtggataaactggcgcctgccaccacagcgcttgcgcttagtcaaatcatcgaccgcagcgaaccgttgcagtcagacattaacattcacggtgatgaactggcggcagtgctgtttacctccggcacagaaggaatgccgaaaggggtgatgttgacccacaataatattcttgccagtgaacgggcgtattgcgcgcggttgaatttaacctggcaagatgtgttcctgatgcctgcgccactgggccacgccaccggatttttacacggcgtcaccgcgccctttttaatcggggcgcgtagcgtattgctggacatctttaccccagaagcctgccttaccttattagcgcagcaacgctgtacctgtatgtcaggcgcgacgccgtttatttacgatctgctttgtgccgttgagcaacagcctgccgacctctcctcactgcgattcttcttatgcggcggcacgattattcccaaaaaggttgcccgcgactgccagcagcgcggtatcaaattattgagtatttacggttctacagaaagttctccacactcgatggttaatctgggtgattcgacttcacgcatgatgaataccgatggttatgccgccaccggtgtagaaattaaaatcgtggatgaagatcgcaatacgcttccagcaggccacgaaggcgaagaagcctcgcgcgggccgaacgtttttatgggatacctggacgagccggaacttaccgcccgcgcactggataacgagggctggtattacagcggcgacctctgccgcatggatgaagacggttatatcaaaattaccgggcgcaaaaaggatattattatacgtggaggtgaaaatatcagcagtcgcgaggtggaggatattttattgcaacacccccgcatacacgatgcttgcgtcgttgctatgcctgatgaacgcttaggcgaacgttcatgcgcgtatgtagtcttaaaaccgccgcacctttcgctgacgctggaagaggtgatcgcttttttcagtcgaaaacgggtagcgaagtataaatatccggaacggatcgtcatcgtagaaaaactgcccagaaccgcctctggcaaagtgcagaagtttctgttgcggcaggatattattgagcggctgcgccaggagcacactgcggtataa

SEQ ID NO: 368722 - DNA, 294 bp, Salmonella enterica
atgagttcggacaataaggtgaatgttgacgtcaaattgggcgtaaataaattttacgtagatgaaggacacccacatatcattttgcgctcctcgcctgacatgcaggagtttaataaattaataaaagcctgccctgccggactctataagctggacgatgcgggaaatattcattttgactccgcgggctgcctggaatgcgggacctgcagggttctctgcggcaatactcttctcgaaaaatgggaatacccggcgggaacgttcggcgttgagtttcgctacggctga

SEQ ID NO: 368723 - DNA, 1287 bp, Salmonella enterica
atgtcggatgataaatttgacgctattgtggtgggcgcaggcgtagcaggaacggtcgccgcgtatgtgatggcaaaagcgggactggatgtactggttattgaacgcggaaacagcgcgggcagcaaaaatatgaccggtggccggctctacgctcacagtatcgaaagtattatgccgggattcgcaacgtccgcccccatcgaacgcgtcgttacccgtgaaaaaatctcctttttaaccgaagaaagcgccgtcacacttgattttcaccgcgcgccccctactccgccccttacgtcatataccgtactgcgcaacaaactggacccgtggttaatggcgcaggcggagcaggctggcgcgcagtttatcccaggtgtacgggtcgacgctctggtacgtgaaggcaatcgcgtcactggcgttcaggccggggatgatattcttgatgcgaatattgtgattctcgcggacggcgtgaattccatgctgggccgttcactggacatggtgcctgcctcgtctgcgcatcactatgccgtcggcgtaaaagagttgattgggctctctccggcacttattgaagagcgttttaatctggcgtcccatgaaggcgccgcctggttattcgctggcgcgccctccaacgggctcatgggcggcgggtttctttataccaaccgcgattcggtttctctggggctggtatgtggcctgggcgacattgctcacgcgaccaaaagcgtaccgcaaatgctggaagattttaaacagcatccggcgatacgccctttgattcaggggggaacgctgctcgaatactccgctcatatggtgcccgaaggcggcatagcaatgatgccggagctggcaaatgacggcgtgatgattgtcggcgacgccgccggtctttgcctgaatctcggctataccgtccgcggcatggatttagccatcgcgtccgcgcaagcggccgctcaaaccgccattgacgctaaagcgcggcaagatttttccgccgcgagtcttgccggttacaaacgcgcgctggagaaaaacggcgtgttacgcgatatgcggcatttccgcaaactccccggattaatggaaaacccacggctttttaccgagtacccgcgaatggcggcaaacattgtgggcgatctgttcaccgttgatggtggtccagtcccaccgttgcgtaaaactatcctgtcacatgcgaaaaaaattggactggtgaatctattaaaagacggcataaaaggggctacggcattatga

SEQ ID NO: 368724 - DNA, 936 bp, Salmonella enterica
atgaatcatttagctaacgtatgggtatttagcgataacgtagagcgttatgccgaattaatgaccggcgcgcggcagtggggagaaaaagtttacgccatcgtgcaaggaaacacggagatcgactacgtgaaagcgcttggcgctgatgagatagtcgttcttgaatcgcatacggatttgcagcgcgtggaaaactatgccgaaacgctggcctcattattaggcgaccaaaatgggctgctgctcatggcggcgaccaagcgctgtaaagcgctgggcgcccggctgagcatccagcttgacgccatgatggtgaacgacgcgacgtctattgacctcctcgacgggacgctacacgcagagcatcgcatgtacggcggacttgctttcggcaaagagaaattaaacagtccgcaggcgattattacgctggcacccggcgtgctggaacccgccgcccctctccccggtcatacttgcccgcagaccacgctggcatatattgccccacgccacgaggtattgtgccagcagcggcgcgcgaaatcgctaagcagcgtcgatttgagcaaagccaaacgggtcatcggcgtagggcgaggcctggcggcgcaaagcgatctggatatggtgcataaactggcggccgttctcggcgcagaagtgggctgttcccgccccattgcggaaggtgaaaactggatggaacgtgagcgttatattggcgtatccggcgttctgttgaaatccgatctctatctgacgctgggcatttccggccaaattcaacatatggtgggtggaaacggcgcaaaaattattgtcgcaattaacaaagataaaaacgcgcccattttcaattatgccgattatggcctggtgggcgatatctataaggttgttcctgccctcatcgaccagttaagccgctaa

SEQ ID NO: 368725 - DNA, 765 bp, Salmonella enterica
atgaaaataataacctgctttaagttggtgcctgaagaacaggacattaccgtgaccccggagcattcgctcaattttgatcgtgccgaggccaaaatcagccagtttgatttaaatgcaattgaggccgccgcgcagttagctggcggtggcgacgagatcgccgcgctcaccgtcggcggctctctgttacaaaattcaaaagtccgcaaagatgtgttatcccgcgggccggatgcgcttttcatggttcaggatgcgcaactggagcacgccctgcccaaagaaaccgcgctggcgctagcatccgcggcggagaaaattggctttgacctgctgctcttcggggagggctccggcgatatttatgcccaacaggtgggcctgctgactggcgaactcctgaaactccccgtcatcaacgcagtaagccatattcaacgcgacggcgacaaaatcatcgttgaacgcacactggaagaagacgttgaaattatcgagctcacgctgcccgcggtgctttgcgtgacctcagatattaacgttccacgcatcccgtcaatgaaagccattctcggcgccgggaaaaaagccgttacgtcgtggctggcgagcgatatccactggaccccaaccacgccactggcggaactggtcgccatctcggtaccgccgcagacagaacgcaagcatatcattctcgataacgattcgccggaagccattaccgcactggccgaccatttgaaaaaatccctgaactaa

SEQ ID NO: 368726 - DNA, 891 bp, Salmonella enterica
atgtatcagcgctgttttgactccgccgcggagacgatttttgaacaggacaagacccctcgattttcacgttttgtcattagcgatgatccaaactgggagtctggccatcatatgcatgataatgaaacagagcttatttacgtcaaaaaagggatagccaggttaattattgactcttcactctacgtcgcgcatgcggacgatattgtcgtcgttgagcgggggcggctacacgctgtagcatccgacagcaattcgccggctaccacctatacctgtgcgctgtatgggttttgttttccaggttgggaagaaaaccaactattgcagagtcattcctgtccggtggtttccgtggttcaggggaaagaggtcattaaaagtatctttaatgaattaagcgtgttacttccgcaggggaaaaacgtattggcttcctctgtatacgatgcatttgcttacactctgaccgcactttactatgaaaattttaaaaatgcctatcgttctgaacaaggctacattaaaaaagatgtattaattaaggatgtgcttgtttatctcaataataattatcgtgaaaaaatcacgcttgaccagctatcgaaaaaatttcgtgccagcgtcagttatatatgccatgaatttgccaaagaatatcatatatcccctatcaactatgttattcaacgacgtatgaccgaggccaagtttgcgctgacaaacactgagtcgccactggcagaaatttcatggcgggtaggatatgaaaatgtggaccattttgccaaattgtttatgcggcatgtaggatgttctcccaacgattatcgtaagcaatttaaaaatagtctggttgagcaggcgtatttgctgccaaatacctga

SEQ ID NO: 368727 - DNA, 1152 bp, Salmonella enterica
atggatttttcattaactgaagaacaagaactattactggccagtattcgcgagttaatcaccagcaattttccggaagagtatttccgtacctgcgatcaaacgggcacctatcccaaagaatttatgcaggcgctggcggaaaacggtatttcgatgctgggcgtcccggaagaattcggcggcattccggctgactatgtaacgcaaatgctggcgctgatggaaatctcaaaatgcggcgctccggcctttttgattaccaacggccaatgcattcacagcatgcgccgttttggttccgcagaacaactgcgtaaaacagcagaaagtactctggccaccggcgatccagcatatgcgctagccttaacagaacctggcgcgggctctgataataatagcgccacaacaacctggacgcgtaaaaacggcaaggtttatcttaacggccaaaaaacatttatcaccggtgcaaaagaatatccttacatgctggttctggcgcgcgatacggagccaaaagatcctaaaaaagcgttcacgctttggtgggtggactcaaataaaccgggcataaagattaatccgctgcacaaaattggctggcacatgttgagtacatgcgaagtttatctcgataatgtcgaggtggacgaaagcgaccgggtcggtgaagaaggcatgggtttcctcaatgtcatgtacaattttgagatggagcgtttgattaatgcggcgcgcagtacaggtttcgccgaatgcgcatttgaagatgccgcccgttacgccaaccagcgtatcgcctttggtaaacccatcggccataaccagatgatccaggaaaagctggcgttaatggccatcaaaatcgaaaacatgcgcaatatggtgttgaaagtcgcctggcaggccgatcgggaagagtcactgcgtaccagcgccgcgctggctaagctgtattgcgcacgcacagcgatggaagtgattgacgatgcgattcagattatgggtgggcttggttatactgacgaagcccgtgtctcccgcttctggcgcgatgttcgctgcgaacgtatcggtggcggcacggatgaaattatgatctatgtggcaggacgccagattctgaaagactatcagaacaagtaa

SEQ ID NO: 368728 - DNA, 2688 bp, Salmonella enterica
gtgctcagtatcttttttgtagtgcaccgctataacgacctgcagcgtcaactggaagatgccggcgccagtattattgaaccgctcgccgtctccagcgaatatggtatgaacttacaaaaccgagagtctatcggccaacttatcagcgtcctgcaccgcagacactctgatattgtgcgggcaatttccgtttatgacgatcataaccgcctgtttgtaacgtctaatttccatctggccccctcacagatgcagcttcccgccggagcgccgtttccacgtcgtctgagcgtcgatcgccacggcgatattatgattctgcgcaccccgattatctcggagagctattcgccggacgagtcagcgattgccgacgcaaaaaataccaaaaatatgctggggtatgtggcgcttgaactggatctcaagtcggtcaggctacagcaatacaaagagatttttatctccagcgtgatgatgcttttttgtattggcattgcgctgatctttggctggcggcttatgcgcgatgtcaccgggcctatccgtaatatggtgaataccgttgaccgcattcgccgcggacaactggatagccgggtggaaggatttatgctgggcgagctggacatgctgaaaaacggcattaattccatggcgatgtcgcttgccgcctatcacgaagagatgcagcataatatcgatcaggccacctcggacctgcgtgaaacccttgagcagatggaaatccaaaacgttgagctggatctggcgaaaaagcgcgcccaggaagcggcgcgtattaagtcggagttcctggcaaacatgtcgcacgaactgcgaacgccgctgaacggcgtcattggctttacccgcctgacattaaaaacggagctgaaccccacccagcgcgaccatctgaacaccattgagcgttccgcgaataatctgctggcgatcattaatgacgtgcttgatttctccaagctggaagccggtaagctcattctggaaagtatcccttttccactgcgcaacacgctggatgaagtggttacgctgctggctcactcgtcgcatgataaagggctggagttgacgttaaatattaaaaacgacgtcccggataatgtgattggcgacccgctgcgcctgcaacaggtcattactaatctggtgggcaatgccattaagttcaccgagagtggcaatatcgatattctggtagaaaagcgggcgctcagtaacaccaaagtacagattgaagtgcagatccgcgatacggggatcggcattccggaacgcgaccagtctcgactgtttcaggcgtttcgccaggccgatgccagtatttctcgccgtcacggcggcaccgggcttgggctggtgattacgcaaaagctggtcaacgaaatgggcggggatatctctttccacagccagcctaatcgcggctcgaccttctggtttcatattcatcttgatcttaacccaaatgtcattattgacgggccgtcgaccgcgtgtctggccgggaaacgactggcttatatcgaaccgaatgctaccgccgcgcaatgtaccctggatctgctgagcgacacgccggtggaagtggtttacagcccgaccttctccgcgctgccgttagcgcactacgatattatgattttgagcgttccggtgaccttccgcgagccgctcaccatgcagcatgaacgtctggcgaaagcagcgtcaatgacggactttctactgctggcgctaccttgccatgcgcaaattaacgccgaaaagctgaaacaaggaggcgcggcggcctgtctgttaaaaccattgacgtcaacgcgcctgttgccagcgctgacggaatattgccagttgaatcaccatcctgaaccgctgctaatggataccagtaaaatcaccatgacggttatggcggttgatgataatcccgctaatctgaagcttatcggcgcgttactggaagataaagtccagcacgtagaactttgtgatagcggacatcaggcggtggatcgggcgaaacaaatgcagtttgatctgattttgatggatattcagatgccggatatggacggcatacgcgcctgcgaattgattcaccagcttcctcatcagcagcaaacaccggttattgccgttacggcacatgcgatggccgggcaaaaagagaaattgctcagcgcgggcatgaacgactatctggctaaaccgatagaagaagagaagttgcataatctgttgctgcgctataaacctggcgccaacgtagcagcgcgcctgatggcgccggaaccggctgagtttatcttcaatccgaatgcaacgctcgactggcagcttgcgctccgccaggctgccggtaagcccgatctggcacgggatatgctgcaaatgctgattgattttctgccggaagtgcgcaacaaaattgaagaacaactggtgggagaaaatcccaacggtttggtcgatctggtccataagctacacgggagctgcggctatagcggcgtaccgcggatgaagaacctttgccagcttattgagcaacagcttcgcagcggcgtccacgaagaggagctggagcctgagtttctggagctgctggatgagatggataatgtcgcgcgtgaagcgaagaagatattaggctga

SEQ ID NO: 368729 - DNA, 1143 bp, Salmonella enterica
atgaaaatagtgatcgcaccagactcgtataaggaaagtttgagtgctcttgaggtagcgaccgccattgaacaaggatttcgcgagatctggcctgacgccgattacctgaaattgccgctggctgatggcggagagggtactgtcgaagcgatggttgaagcgacggcgggtcgaatcgtgcatgttgaggtcaccgggccgttggggcatcgcgtcaatgcgttttatgggctttccggcgatgcgcgttccgcattcattgaaatggcggccgccagcgggctggagcaggtgccgcccgcgcaacgcgatccgttgaagaccacgtcatggggaaccggcgagctgatccgtcatgcgctggatgcgggcgttgagcatatcattattggtatcggcggtagcgccaccaacgatggcggcgcggggatggtacaggcgctgggggccaggctacgggatgcgcagggcaatgatattgcgcaaggcggcattgggctggaaacactcgccagcattgatatcagcggcctggataagcgtttgtcggcgtgccatatagaggtcgcctgcgatgtcacgaatccccttaccggcaaagagggcgcgtctgcggtttttggtccgcaaaaaggggcgacgccggaaatgattgaacgcctggagacggcattgactcgctatgcgcatttgattgctcgcgatctgcatgtcgatgtgttggatctggcaggcggcggcgcggcaggcggcatgggggcggcgttatacgcgttttgcggcgcgcagctacggcgtggcattgagattgtcaccgatgcgcttcatctggaagcgtgtcttgcggatgctgatttagtcatcaccggcgagggacgcatcgacagccagaccattcacggtaaagtccctattggcgtggcaaacatcgccaaacggtataacaagccggtaattggtattgcgggtagcctgacggaggacgttggcgtggttcatgaacatgggcttgatgccgttttcagcgtgatttataccatctgcacgctggaggacgcgctgaagaatgcgagtgaaaacgtacgaatgaccgcgcgcaacgtggctgcaacgctgaaagcggggcaacaattacgctga

SEQ ID NO: 368730 - DNA, 1341 bp, Salmonella enterica
atgagtactcaatttacgacgcctgtagtgactgaaatgcaggttatcccggttgcgggtcatgacagtatgctgatgaacctgagcggcgcgcacgccccgttcttcacgcgcaacatcgtcattattaaagataactccggccataccggggtcggcgagattccgggcggcgaaaaaattcgcaaaacgctggaagatgcgatcccactggtggtgggaaaaacgctgggtgaatataaaaatgtcctgaccgccgttcgcaaccagtttgccgatcgcgatgcgggcggacgcggtttacaaacattcgatctccgtaccactatccatgtggtgacgggtattgaagcggcaatgcttgaccttttgggccaacacttgggcgtcaacgtcgcttcgctgttaggcgacggtcagcagcgcagcgaagtcgaaatgctgggttatctgttctttgtcggtaatcgcaaggctacgccgctgccgtatcagagccagccggatgagcaatgcgactggtatcgtctgcgccatgaagaggcgatgacgccggaaacggtagtgcgtctggcggaagccgcctatgaaaaatacggcttcaacgacttcaaactgaaaggcggcgtgctggcgggcgaagaagaggccgagtcaatcgtggcgctggcgaaacgtttcccacaagcgcgcgtcacgctcgatccaaacggtgcctggtcgctgaacgaagcgatcagcattggtaaatacctgaaaggttctctggcctatgcagaagatccgtgcggcgcggagcagggtttttccggacgtgaagtgatggcggaattccgtcgcgcgaccggattaccgacggccaccaatatgatagcgaccgactggcgtcaaatggggcatacgctgtcgctgcaatccgtcgatatcccgctggcggacccgcacttctggactatgcaaggctctgtacgcgtggcgcaaatgtgtcatgagttcggtctgacctggggctcgcactctaacaaccactttgatatttcgttggcgatgtttacccatgttgccgcggcggcgccgggcaagatcaccgcgatcgatacccactggatctggcaggaaggcaaccaacgtctgactaaagaaccgtttgaaattaaaggcggcatggtgcaagtaccgaccaaaccgggtctgggcgttgagctcgatatggatcaggtgatgaaagcgcatgagctctatcaaaaacatggcttaggcgcgcgtgacgacgcgatgggaatgcagtacttaattcctggctggacgtttgataataagcgtccttgcatggtgcgttaa

SEQ ID NO: 368731 - DNA, 1341 bp, Salmonella enterica
atgacaacgcaatccagtcccgttattacggacatgaaggtcattccggttgccggacatgacagtatgctactcaacatcggcggcgcgcataacgcgtacttcacccgtaacatcgtcgtcctcaccgataacgccgggcatactggcgtcggcgaggcgccgggcggagaagtgatttatcagacgctggtcgatgctattccgatggtattaggccaggaagtcgcccgcctgaacaaagtggtgcagcaggtgcataaaggcaaccaggctgctgattttgacacctttggcaaaggcgcatggacgtttgaactgcgggttaacgcggtggcggctttggaagcggcgctgcttgatctactgggacaggcgcttaatgtgccggtctgtgaactgttagggccaggtaaacagcgcgatgccgtcaccgtgttgggctatctcttctatattggcgatcgcactaaaaccgatctgccgtatctggaaagcacgccgggcagtcatgaatggtatcgtctgcgccatcaggaagcgctgaacagcgacgcggtcgtgcggctggcggaagcgtctcaggatcgctacggctttaaagattttaaactcaagggcggcgtgctgccgggcgaacaagagattgatactgttcgcgcgctaaaaaaacgcttcccggacgcgcgtattaccgtggatccgaacggcgcctggctactggatgaagccattgcgttgtgcaaagggctgaaagatgtactgacctacgcggaatatccgtgcggcgcggagcaaggattctctggtcgtgaagtcatggcggagttccgccgcgcgacaggactgccggtggcgaccaatatgatcgccaccaactggcgcgaaatggggcatgcggtgatgctcaacgcggtagacattcctcttgccgacccgcatttctggactctcaccggcgccgtttgcgtggcgcaactgtgcgatgactgggggctaacctggggctgccattcgaataaccattttgatatttcactggcgatgtttacccatgtcggcgcggcggcgccaggcaaacccaccgctattgatacgcactggatctggcaggagggcgattgccgcctgactaaaaatccgctggaaattaaaaacggcaaaattgccgttccggatgcgccaggactgggcgtggagcttgactgggaacaggtgcgaaaagcgcatgacgcgtataaaaagctgccaggcggcgcgcgtaatgatgcaggcccgatgcaatacctgatccccggctggacttttgaccgcaaacgccctgtttttggtcgtcactaa

SEQ ID NO: 368732 - DNA, 1359 bp, Salmonella enterica
atgagttcattaagtcacgcggcgagcagtgcggagaaacgcacgaacgcccgctactggatagtggtgatgctgtttatcgtcacatccttcaactacggcgaccgcgccacattgtccattgccggctcagaaatggccaaagatatcggccttgatccggtaggcatgggctatgttttttctgctttttcatgggcctatgttatcgggcagatcccgggcggctggctgctggaccgctttggttccaaacgcgtctatttctggtctattttcatttggtcagtcttcaccctgttgcagggttttgtcgatatctttagtggtttcggcattattgtcgccctctttacgcttcgtttcctggtcggtctggcggaatcgccttctttcccgggcaacagtcgcatcgttgcggcctggttcccggcgcaggagaggggaacggcggtggccatctttaactccgcgcaatactttgccacggttattttcgcgccgattatgggctggctgacgcacgaagtgggctggtcgcatgtcttcttctttatgggcgggttagggatcatcatcagctttatctggttgaaagttatccatgaaccaaataaccatccgggcgtaaataagaaagagttggagtacatcgcagaaggcggcgcgctgatcaatatggatcagaaagacaccaaagcgaaagtaccgtttagcgtcaaatggggccagatcaaacagctgctgggctctcgtatgatgattggcgtttacatcggtcagtactgtattaacgcattgacctatttctttattacctggttcccggtctatttggtccaggcgcgcggcatgtcgattctcaaagcgggctttgtcgcctcggttcctgcagtctgcggctttatcggcggcgtgttgggcggcatcatttccgactggctgatgcgtcgtactggctccctgaatatcgcgcgcaagacgccgattgtgctgggaatgttgctgtcaatggttatggtgttctgtaactatgtgaacgtggaatggatgatcatcggctttatggcgttggccttcttcggtaaaggtatcggcgcgttgggctgggcagtaatggcggataccgcgccgaaagagatcagcggtctttccggcggcttgtttaatatgttcggcaatatttccggtattgtgacgccaatcgcgattggttacatcgttggcaccaccggttccttcaacggcgcgttgatctatgtcggcgtacatgccctggtggccatcatcagctatctggtgctggtaggcgatattaagcgtattgaactgaaacctgtcgcaggacaattatcatga

SEQ ID NO: 368733 - DNA, 450 bp, Salmonella enterica
atggcagaaattggtatttttgtcgggaccatgtatggcaactcactgctggtggcggaagaagcggaagcgatcctcgccagacaggggcacagcgcgatcgtgtttgaagatcctgaactgtccgactggcagcaatatcaggataaggttgcgctggtcgttacctcgacgaccgggcagggcgatctaccggatagcattgcgccgctctttcacggcattaaagatacgttgggttttcagccaaacctgcgttacggggtgattgcgctaggtgatagcagctaccccaatttctgtaatggcggcaaacagtttgatgccctgttgcaagagcaaagcgcgcagcgggtgggggagatgttattcattgacgccagcgaacatccggagccggagagccagtccaatccctgggttgaaaactggggaactttactttcctga

SEQ ID NO: 368734 - DNA, 783 bp, Salmonella enterica
atgctggagatcctctatcaagacccgtggctggttgccgtgaataaacccgcaggctggcttgttcaccggagctggctggatcgcgacgaaaaagtcgtggtcatgcaaacggtgcgcgaccaaatcggccagcatgtttttaccgcccaccgtctcgacagacccacgtcgggcgtactgttaatggggctgtccagcgaagcgggacgccgtctggcgcagcagttcgagcagcaccacatccgtaaacgctaccatgccattgtgcgcggctggctgatggatgacgcggtactggattatccgctggtggaagagcgcgataaaattgccgataaattcgcccgcgaagataaagcgccccagccggctgtaacgcagtatcgcggactggcgacggtcgaaatggcggtaccgaccgggcgttatcccaccacgcgttatggtctggttgagctagaaccaaaaacgggacgtaagcaccagctccgtcgtcatctggcgcatctgcgtcatcctatcatcggcgacagtaaacatggcgatttgcgacaaaaccgcagcgccgcagagcattttgcctgtcgtcgcctgatgcttcatgccagtcggcttgagctgacgcaccccttcaccggacagccgttgatgattcaggccgggttggatgaaacctggatgcaggcgctgacacagtttggctggcgtggacttctccctgacaatgaaagggttgagtttacggcggcgtcccggcaggatgagactcatcaggcataa

SEQ ID NO: 368735 - DNA, 330 bp, Salmonella enterica
atgacgactcatgaccgtgtgcgtcagcagttacatgcgcttgaaacgctgctgcgcgagcatcgccactggcggcaggatgcgccgcaggcgcacctgtttaccagcacccaaccattttttatggataccatggaaccgctggaatggctgcaatgggtattgattccacgtatgcataccctacttgataatgcgcagccgctgcccgaggcatttgccgtcgccccttattatgaaatggcgctggcggcggatcatccgcagcgggaggcgatcctggcggttttgcaggatctggatgcgctattcgtccgcgataaatcctga

SEQ ID NO: 368736 - DNA, 546 bp, Salmonella enterica
gtggacgaactgacagcgcaggcattgaaagcctttacgacgcgttactgcgacgcgtggcaagaaaaacacggtagctggccgttgagcgaagaactgtatggcgtaccttctccgtgcattatttcttcaacccgcgatgccgtttactggcagccgcagccttttgaaggcgaagaaaatgtaaacgcggttgaacgcgcctttgatattatggtacaacctgcgctccacgcgttttacaccacgcagtttgctggcgacatgcccgcgcagtttgcggatgaaaagcttacgctactgcaaacctggagtcaggatgactttcggcgcgtgcaggaaaatctgataggccacctggtcacgcaaaagcggctcaagcttcctcccacgctttttattgcgacgcaggaaaatgagcttgaggtcatttcggtctgtaatctgtccggcgaggtgattaaagaaacgctgggcacccgtaatcgtaccgttcttgccgcaacgcttgcggaattccttacgcaacttaatcctcttctgtaa

SEQ ID NO: 368737 - DNA, 849 bp, Salmonella enterica
atgtcttcttatgaaaaccatcaggctctcgatggcctgactctcggaaaatcaacggattaccgggacaattatgacgccagcctgctgcagggcgtaccgcgcagtttgaatcgcgacccgctcggattaacagccgataatttgccgttccacggcgcggatatctggacgttgtatgaactttcctggcttaacagccagggtcttccgcaggtcgccgtcgggcatgtcgaactggattacaccagcgttaatttaatcgaatccaaaagctttaaactgtatctgaacagctttaaccagacgcgctttgacacctgggagacggtgcgccagacgctggagcgcgatctgcgcgcctgcgcgcagggcaacgttagcgtgaggcttcatcgtcttgatgagctggaaggacagcctgtcgcccatttccacggcacctgtattgacgatcaggatatcagtatcgacaactaccagtttactaccgactatctgcaacatgcggtcagcggcgagaagcaagtagaagaaacgctggtcagtcatctgttgaaatccaactgcctgatcacccaccagccggactggggctcgatacaaattcagtatcgcggacgcaaaatcgacagggaaaaactgctgcgttatctggtctccttccgtcaccataatgaatttcacgagcagtgcgtagagcgtattttcaatgacattctgcgcttctgccagccggaaacgttaagcgtttatgcacgctatacccgccgcggcgggctggacattaatccctggcgcagcaataccgatttcgtgcccgccacgggcaggctggcgcgacagtaa

SEQ ID NO: 368738 - DNA, 1365 bp, Salmonella enterica
ttgattacacatattagcccgcttggctcaatggatatgttgtcgcaactggaagtggacatgctgaaacgcacggccagtagcgacctgtatcaactgtttcgtaactgttcacttgccgttcttaactccggcagcctgaccgacaacagcaaagagctgctgtcccgctttgaaaatttcgatattaacgtactgcgccgcgagcgcggcgtgaaactggaattgattaatccgcctgaagacgcctttgttgacgggcggattattcgtgcgctacaggctaacctgttcgcggtgctgcgcgacattctctttgtgaatgggcagatccataatgccggccgtttccagcatctggatcttgaaagctcaacacatatcaccaatctggtgttctccattttgcgcaacgcccgggcgctgcacgtcggcgaagcgccaaacatggtggtatgctggggcggccactcaattaacgaaaacgagtacctgtatgcccgtcgcgtcggcacgcagttgggattacgcgagctgaacatctgcaccggctgcggccctggggcgatggaagcccccatgaagggcgcggcggtcggtcacgcacagcagcgctataaagacagccgctttatcggcatgactgaaccttccattattgcggctgaaccgcctaacccgctggtgaacgaactgatcatcatgccggatatcgaaaaacgcctggaagcgttcgtccgtatcgcacacggtatcatcatcttcccgggcggcgtgggtacggcggaagagctgctttatttgctggggattctgatgaatccagccaataaaaatcaggtgctgccgctgatcctgaccggaccaaaagagagcgccgattacttccgcgtgctggatgagtttattacccatacgctgggcgaagcggcccgccgtcattaccgcatcatcattgacgatgcggcggaggtagcgcggctgatgaagaaagcgatgccgcaagtgaaagagaatcgccgcgatactggcgacgcctatagttttaactggtcgatgcgtattgcaccggatctgcaggtgccgtttgagccgtcgcatgagaatatggccaacctgaaactgtacccggatcagccggttgagattctggcggcggatctgcggcgcgccttctccggtattgtcgcggggaacgtgaaggaggtcgggatacgcgccattgaagctaatggtccgtataaaattcacggcgatcgagagatgatgcgtcgcatggacgatctgctgcagggattcgtcgcgcagcatcgtatgaaattgccgggttccgcctacatcccctgttacgagatctgcgcttaa

SEQ ID NO: 368739 - DNA, 1290 bp, Salmonella enterica
atggaaaccactcagaccagcactattgcttcgattgactctcgaagcgcatggcgcaaaacggataccatgtggatgctgggcctttacggcacggctatcggcgcgggcgttctgttcctgccgatcaacgcaggcgtcggcggcatgattccgctcatcatcatggcgattctcgctttcccgatgacctttttcgcacaccgtggcttaacacgcttcgtgctgtccggtaaaaacccgggtgaagacatcactgaagtcgttgaggaacacttcggtatcggcgcaggtaaactgattaccctgctctacttcttcgcgatttaccccatcctgctggtttacagcgtggcgattactaataccgtggaaagcttcctgacccaccagttagcgattaatccgccgccgcgggcgattctttccctgatcctgattgttggcatgatgaccatcgtgcgcttcggcgagcaaatgatcgttaaggcgatgagtatcctggtattcccgttcgtcgctgcgctgatgctgctggccttgtacctgatcccgcagtggaacggcgcggcgctggaaactctgtcctttgattccgccgcgtctaccggtaacggtctgtggatgacgctgtggctggcgattccggtgatggttttctctttcaaccactccccgatcatctcctccttcgcggttgcgaagcgtgaagagtacggtgaaggcgcagagaagaaatgttctaaaattctggccttcgcccacatcatgatggtgctgaccgtgatgttcttcgtcttcagctgcgtgctgagcctgacgccggcagatctggcagcggcaaaagagcagaacatctctattctgtcttacctggcgaaccattttaacgcgccgatcatcgcctggatggcgccgatcattgcgatgattgctatcaccaaatccttcctcggccactacctgggcgcgcgtgaaggctttaacgggatggtgattaaatcgctgcgtggtaaaggtaaatccatcgaaatcaacaaactgaataaaattaccgcgctgttcatgctggtcaccacctggattgtggcgacgctgaaccccagcatcctgggcatgattgaaaccctgggcggcccgatcatcgcgatgattctgttcctgatgccgatgtatgccatccagaaagtaccggcaatgcgtaagtacagcggtcatatcagcaacgtattcgttgtgattatgggcctgattgccatctccgctattttctactcactgttcagctaa

SEQ ID NO: 368740 - DNA, 1368 bp, Salmonella enterica
atgattagcgtattcgatatttttaaaatcggcattggcccttccagttctcacaccgtcggaccaatgaaagcaggcaagcagttcacggacgatctgattgcccgccatatccttacagatgtcacccgcgtcgtggtggatgtctacggctctctgtcattgacgggtaaaggccaccacactgatatcgccattattatgggcctggcggggaatctgccggacaccgtcgatatcgacgccattccgtcctttatccaggatgtgaacacccatgggcgtttactactggctaatgggcagcatgaagtcgaatttccggtcgataagtgcatgaatttccacgccgacaacctgtctctgcatgagaacgggatgcgtattaccgcgctggcgggcgataaggtgctctacagccaaacctactactccatcggcggcggctttatcgtcgatgaagagcactttggtttgacgaatagcgaacccgttaacgtaccgtacccttacaaaaccgccgcggatttacagcgccactgccaggagacgggtttgtcgctctccggtctgatgatgcaaaacgaactggctctgcacagtaaagaagcgctggagcagcacttcgccagggtctgggaggtaatgcgcagcggtattgagcgcggtatcaccaccgagggcgtattgccgggcaaactgcgcgttccgcgtcgcgcggcggcgctgcgtcgggtgctggtcagtcaggataagaccaccaccgatccgatggcggtcgtcgactggatcaatatgttcgcgctggcggtgaacgaagagaatgccgcaggcggacgagtagtcactgcgccgactaacggcgcatgtggtattgtgccggcggtgctggcgtactatgacaagtttatccgcgaagtaaatgctaactcacttgctcgctatatgctggtcgccagcgcgattggctcgctgtataagatgaacgcctctatttccggcgccgaagtgggttgtcagggagaggtcggcgtggcctgttccatggcggcagcgggtctggccgagctgctgggcggtagtccggcgcaggtgtgtatcgccgcagaaatcgccatggagcataatctggggttaacttgcgatccggttgccggtcaggtacaggttccctgcattgagcgtaacgcgattgcttcagtcaaagcggtcaacgccgcgcgtatggcgctgcgccgtaccagcgaaccgcgtgtatgcctcgataaagtgattgagaccatgtacgaaaccggtaaagacatgaacgctaagtaccgcgaaacttcgcgcggcggcctggcgatgaagatcgttacctgcgattaa

SEQ ID NO: 368741 - DNA, 756 bp, Salmonella enterica
gtggctgctcatctgcttatcgtcgacgcgctcaatttgattcgccgtattcacgccgttcagggatcgccctgtgtggaaacctgccaacacgcgctcgatcaattgattatccacagccagccaacccatgccgtagcggtatttgatgacgacgcgcgcagcagcggctggcgtcatcagcgtttaccggactacaaagcaggacgtccgccgatgcctgacgatttacataatgaaatgcccgccctacgcgccgcatttgaacagcgcggcatacgctgttgggcatcagacggtaacgaagcggacgatctggcggcgacgctggcgctaaaagttaccgaagccggacaccaggcaaccattgtgtcaaccgataaaggctattgccagttgctctctccgggattgcgcattcgcgactacttccagaaacgctggctggacgcgccgtttattgaaaaagagtttggcgtacttccccggcagttgccggattactggggtctggcaggaatcagcagttcgaaagtccccggcgttgccggtatcggccccaaaagcgcgacccagctgttgattcagtttcaaaatctggagggaatttacgcccatctggacgaggtgccggaaaagtggcgcaaaaagcttgagacgcataaagaaatggcatttctttgccgcgatattgcacgtctgcaaaccgatttacatatcgacggaaacttacagcagctacggctggcgcggtag

SEQ ID NO: 368742 - DNA, 1149 bp, Salmonella enterica
atggcgaacagaatgattctgaatgaaacggcatggtttggccggggagcggtggacgcattaaccgatgaggtgacgcgccgcggttatcataaagcgctgattgttaccgataaaacgctggtgcaatgcggtgtggtcgataaagtgacaagcagaatggatgccgcagggctggcgtgggagatctatgctggcgtgatccctaatcctacgatttccgttgtccaggaagggcttaaggtctttacccaaagcggcgcggactatctcatcgccattggcggcggttctccgcaggatacctgcaaagcgatcggtattatcagtaacaatccggaatttgccgatgtgcgcagtctggaagggctatcgccgacccgtaaacccagcgtgccgattatggcgatcccgacaacggcgggaaccgcggcggaagtcactatcaattatgtgattaccgatgaagagaaacggcgcaaattcgtttgtgtcgatccgcatgatattccgcaggcggcatttatcgatgccgatatgatggacggtatgccgcccgcgctgaaagcggcaacgggcgtggatgcgctaacccatgctattgaaggctatattacccgggccgcatgggcgctgacggatgcattacatatcaaagccattgagattattgctggcgcgctgcgcggcgccgtggccggagaaaaagaggccggtgaggcgatggcgctggggcaatatgttgccgggatggggttttccaatgtggggctggggctggtgcatgggatggcgcatccgctgggcgcgttttacaacacgccgcatggcgtcgcgaatgctattttgcttccgcatgtgatgcgttttaatgccgggtctaccaacgagaaattccgtgatatcgcccgggcgatgggggtgaaggtagaaggattgagtcttgaagaggcacgtaatgccgcagtggaagccgtatttacgctaaatcgcgatgtgggaattccgctgcatttgcgtgatgtcggcgttcgaaaagaggatatcccggcgctggcgcaggcggcgttcgatgatgtctgtacgggcggcaatccgcgtgaagcgagtctggcggacattgtcgaactgtatcatatcgcctggtaa

SEQ ID NO: 368743 - DNA, 648 bp, Salmonella enterica
atggaacgaaatagactggcgcggcagattattgatacctgtctggaaatgacgcggttagggttaaatcaggggacggcaggtaacgtgagcgtacgttatcagggcggattgctgattacgccgacggggatcccctacgagaagctgacagagtcgcacattgtctttattgatgctgacggtcagcatgagcagggcaagctgccttccagcgagtggcgttttcatatggcggcataccagacgcgccctgacgccaatgccgtggtacataaccacgctgtccattgtacggcagtctcgatcctgaatcgcccgattccggcgattcactacatgattgccgccgcaggaggaaactctattccctgcgcgccctacgccacttttggcacccgcgaactttctgaccatgttgccgtggcgcttaaaaatcgtaaagcgacgctgttacagcatcacgggcttatcgcttgtgaagaaaatttagacaaagcgttgtggctggcgcatgaagtggaagtgctggcgcagctctatttaagtacgctggccattgtcgatccggtaccggtactggatgacgaggcgatcgctatcgtactggagaaatttaaaacttacggattacgtattgaagagtga

SEQ ID NO: 368744 - DNA, 1317 bp, Salmonella enterica
atgggaaacacaacaatacaaacacagagttttcgtgctgtggatgcagagcaaagcaaaagcaagcgctacattattccattcgccttactttgctcgctattttttctgtgggccgtcgccaataatctgaatgacattttattaccgcagtttcaacaagcttttacgctaactaacttccaggccggacttattcagtcagccttttatttcggttatttcgtcattccaattcccgctgggattttgatgaaaaagctcagttataaagcagggattatcaccgggctttttttgtatgctgttggcgccgcattattctggcctgccgccgagataatgaattacacattatttttaattggcctgtttatcatcgccgccggtttaggctgccttgaaactgcggccaatccttttgttacggtattaggtccagaaagcggcggacatttccggcttaatctggcgcaaacttttaactcctttggcgctattatcgccgttgtgtttgggcaaagccttattttgtctaacgtgccgcatcaatcacaagaagcgcttgataaaatgacgccggatcagcttagcgcctataaacacagcctggtgttatcggtacaaacgccatacatgattatcgtcgccatcgtattagtagttgcgctgctgattatgctgaccaaatttccggccctgcaaagtgacgatcatagcgatgctaaacaaagctctttcttatcttctctctcccgactcatccgtattcgccactggcgctgggcggtgctggcgcagttctgctacgtgggggcgcaaaccgcctgctggagctatctgatccgctacgccattgaggagattcctggaatgacgcccggtttcgccgccaactacctgaccggcacgatggtgtgcttctttatcggccgtttcaccgggacctggcttatcagccgcttcgcgccgcataaagtgctggccgcctacgccctgtttgccatgctcctgtgtctgatttccgcctttagcggcggacatatcggcctgctggcgctgacgttgtgtagcgcatttatgtcaatccagtacccgaccatcttctcgttgggtatcaaaaatctgggacaggacactaagtacggctcgtcttttatcgtcatgaccattattggcggcggtattgtcacgccagtaatgggcttcgttagcgacgccgcaggcaaaatcccgaccgccgaactggttccggcattgtgctttgccgtcatcttcatttttgcccgtttccgttcacaagcggcgacaaactga

SEQ ID NO: 368745 - DNA, 1776 bp, Salmonella enterica
atgaaaaaaatcagcttaccgaaaatcggtatccgcccggtgattgatggacgtcgtatgggcgtacgcgagtcgctcgaagagcaaaccatgaacatggcgaaagcgacggcggcgctcatcaccgagaaaatgcgccacgcctgtggggcacaagtggagtgcgtcattgcggatacctgtattgccggaatggcggaatccgccgcctgtgaagaaaaattcagtagccagaacgtgggcgtgaccattaccgttacgccgtgctggtgctatggcagcgaaaccattgatatggacccgatgcgtccaaaagccatctggggctttaacggcacagagcgtcctggggcggtttaccttgccgcggcgctggcggcgcacagccagaaaggcattccagcgttctccatttatggccatgacgtgcaggatgccgacgatacctccattcctgccgacgtcgaagaaaaactgctgcgttttgcgcgggcagggttagcggtagccagcatgaaaggcaaaagctacctctccgtcggcggcgtgtcgatggggatcgcgggttccattgtcgatcataacttctttgaatcctggctgggcatgaaggtgcaagcggtagatatgaccgaactgcgccgccgtatcgatcaaaaaatttatgatgaggccgaactggagatggcgctggcgtgggcggataaaaacttccgctacggcgaagatcagaacgcctcgcagtataagcgcaatgaagcccagaaccgcgcggtgttaaaagagagcctgctgatggcgatgtgtattcgcgatatgatgcagggcaacaagacgctggcggacaaagggttagttgaagaatcgctgggctacaacgccattgccgccggcttccagggccagcgccactggaccgatcaatacccgaacggcgataccgccgaagcgctgctcaatagttcttttgactggaacggcgtacgcgaaccgtttgtcgtcgccaccgaaaatgacagtctgaacggcgtagcgatgctgttcggtcatcaactcactggtaccgcgcagatattcgccgacgtgcgaacctactggtcgccggaagccgtagaacgcgtcaccggccaggcgctcagcggcctggcggaacacggcattattcacctgattaattccggttctgccgctctggacggtgcctgtaaacagcgcgacagcgaaggcaagccgaccatgaaaccgcactgggaaatcagccaacaagaggcggatgcgtgtctggcggccaccgaatggtgcccggcgattcacgaatacttccgcggcggcggctactcatcccgttttctgaccgaaggcggcgtgccattcaccatgactcgcgtgaatatcatcaaaggcctgggaccagtactgcaaatcgccgagggctggagcgtcgaactgccgaaagcgatgcacgatcagcttgatgcccgcaccaactctacctggcctaccacctggtttgcgccgcgtcttaccggcaaaggcccgtttaccgatgtctattcggtgatggcgaactggggcgctaaccacggcgtactcaccatcggccatgtaggggcagactttattactctcgccgcgatgctgcgtatcccggtatgtatgcacaacgtggaggaggcgaagatctaccgtccttccgcctgggcggctcacggtatggatatcgaaggccaggattatcgcgcctgccaaaattatggcccgctgtataaacgttaa

SEQ ID NO: 368746 - DNA, 1419 bp, Salmonella enterica
atgaaacaagacgttatcctggttctcgactgcggtgcgactaacgttcgggcgatcgccgttgatcgccaggggaaaattgtcgcccgcgcctcaaccgctaacgccagcgacattgccgcagaaaatagcgcctggcatcagtggtcgctggacgccatcctgcaacgtttcgccgactgctgcaggtcactctccagcgccctgtcggagtgtgttgttcgcggtattacggtgactacgttcggcgtcgatggcgcgctggtcgatgcgcagggtaagctgctctacccggtcatcagttggaaatgcccgcgaaccgccgccgtgatggaaacgattgagcgctttatctcgccccggcaattgcagacgctctccggcgtcggcgcgttcagctttaacacgctgtataaactggtctggcttaaagagaatcatccgcgcctgctggaacaagctcactgctggctgtttatctcgtcgctgattaaccaccgtctgaccggcgagtttacaaccgatatcactatggcaggcaccagccagctactggatatccatcagcgcgactttagtccggaaatcctgcaggcgacgggcctggcgcgccgcctgttcccgcgtatcgtggaagcaggcgcccagataggcacgctacagacagacgcggccaggctactcggtctcccggcgggtgtgccggtgatctctgccggacacgatactcagttcgcgttattcggcgctggcgcgcagcaaggtgaaccggtgctctcctccggaacatgggagattctgatggtacgcagcggtcaggtggatacctcgctgctcagtcagtatccgggctcgacctgtgaactggacagtcagtcggggctttataaccccggaatgcagtggctggcctccggtgtactcgaatgggtacgaaaactgctgtggacgccggaaacaccatggcaaacgctgatcgacgaagcgcgcgctatttccgctggcgcggaaggcgtacggatgcagtgcgatctgctcgcctgccaaaatgcaggctggcagggcgtgacgctcaataccacccgcggccatttctatcgcgccgcgctggaaggcctgacggcgcaactgcagcgtaatctgcgcacgctggagaaaatcggtcattttaacgccacagaactgttactggttggcggcggcagtcgcaacgctttgtggaatcaaattaaagcgaatcagcttgatatccctatcaaagtgctggacgacgcggaaacaaccgtggccggcgctgccatgtttggctggtacggcgtaggcgaatttagtagcccggaacaggcgcgcgcgcaggtcaattatcagtatcgctatttctggccgcaaaccgaacctgaaattattgagggagtatga

SEQ ID NO: 368747 - DNA, 423 bp, Salmonella enterica
atgctaaaaaccatttcaccgttaatttccccgacactgctcaaagtgctggccgagatgggccacggggacgaaatcattttttccgacgctcactttcccgcgcatagcctgggcccacaggtgattcgcgccgatggtcttagcgtcagcgatctactgcgggcaattattccgctctttgagctggatagctacgccccgccgctggtaatgatggccgccgtggaaggcgacacgctcgaccccagcgttgaagcgcgctatcgcgatgctttgtcattagaagcgccgtgcccggatatcgttcgtatcgaccgttatgcgttttatgagcgggcgcaaaaagcgtttgcgatcgttatcacaggtgagtgcgcgaagtacggaaatattcttttaaaaaaaggggtaacgccgtaa

SEQ ID NO: 368748 - DNA, 711 bp, Salmonella enterica
atgaaagcggcacgccaacaagcgatagtcgatctgctgatcaatcataaaagtctgaccaccgaagcgctggccacccggcttaacgtcagtaaagagaccatccgccgcgatctcagtgaactacagacgcagggaaaagtgctgcgtaatcacggacgagctaaatatattcatcgtgaaaatcaggacagcggcgatccattccatatccgcctgaaaagccattatgcgcacaaagccgatattgcccgtgaagcgttagcgtggatagaagaaggaatgacgattgcgctggatgccagttcaacctgctggtatctggcccgccagttgccggatattcccattcaggtttttaccaatagccatcctatctgtcaggagctgggaaaacgcgaacgcattacgctgataagttccggcggccagcttgaacgtaaatatggctgttatgttaatccgtcgcttatctcacagctaaaatcgcttgatatcgatctgttcatcttttcctgtgaggggatcgacggcggcggcgatctgtgggactccaatgcgatcaacgccgattttaaatctatcctgctcaggcgtgcctcgcaggctttattattgattgataaaagtaaatttaatcgttcaggagaggcgcgcatcggccatctggatgacgtgacgcatattgtttcagatgcgccgcagtcatag

SEQ ID NO: 368749 - DNA, 1101 bp, Salmonella enterica
atgaataaagttgtattgctctgccgtccggggtttgaaaaagagtgcgctgcagaaattaccgataaagcgggaaaacgggaaatatttggttttgcacgcgtaaaagagaacgcaggctatgtcatttatgaatgctaccagccggaagatggcgaaaagctgatttcagagctgccgttcagttcgctgattttcgcccgccagtggtttgtggtgggtgaactgctgcaacatttaccgccggaagacagaattacgccgattgtcggcatgttgcagggcgtagtggaaaagggcggcgagctgcgagttgaagtcgccgacaccaatgaaagtaaagaactgatgaagttctgccgcaaatttacggtgccgctgcgcgcggctttgcgtgatgcgggcgtattgacgaattatgaaacgccgaagcgtccggtcgttcatgtcttttttatcgcgccaggatgctgctataccggttattcgttcgcgcataacaattcaccgttttatatgggcatcccgcgtttgaagtttccgtctgatgcgccgagccgctcaacgctgaaactggaagaggcgctccacgttttcatcccggaagatgagtgggatgaacgtctggcgaacggcatgtatgcggtggatttgggcgcctgtcccggcggatggacgtaccagttagtgaagcgcaatatgtgggtttactccgtagataacggcccgatggcgcaaagcctgatggacaccggacaggtgacctggttgcgtgaggatggcttcaggtaccgtccgaaccggaataatatttcatggatggtctgcgatatggtggagaagccggccaaagtcaccgcgttaatggcgcagtggctggtgaacggctggtgccgggagacgatttttaaccttaaactgccgatgaaaaaacgctatgaagaggtatcgcataacctggcgtatcttcaggcgcagttggatgagcatggcgttaatgcgcagatccaggcgcgtcagctttatcacgatcgcgaagaagtgacggtacacgtgcgtcggttgtgggcggctgttggcgggcgtcgcgacgagcgataa

SEQ ID NO: 368750 - DNA, 396 bp, Salmonella enterica
atgaccagccgttttatgctgattgtcgccgctatcagcggttttatttacgttgctctgggcgcgttcggggcgcatgttttgagtaaaaccctgggcgtggttgaaatgggctggattcagaccggcctgcaatatcaggcgttccatacgctggcgatctttggcctggcggtggcgatgcagcgccgtatcagcatctggttttactggagcagcgtttttctggcgctgggcacggtgctgtttagcggcagtctgtactgccttgcgctttcgcatctgcgcctgtgggcgtatatcacgcctgtcggcggcgtcagtttcctggtgggctgggcgctattgctgattggcgccattcgtatgaaacgtaagggcgcgagccatgaataa

SEQ ID NO: 368751 - DNA, 918 bp, Salmonella enterica
atgtcaaaacgattacctcctttaaatgcgttacgcgtttttgatgctgccgcgcgccatttgagctttacgcgagcagcggaagaactttttgtgacgcaggccgcagtaagccaccaaattaagtcacttgaggattttttggggctaaaactgttccgccgccgcaatcgttcgctgctactgacggaagaaggccaaagctattttctcgacattaaagagatattttcccagctcacggaagcaacgcgtaagctccaggcgcgcagtgccaaaggggcgctgacggtgagtttaccgcccagttttgccatccaatggctggtgcccaggctctccagctttaactcagcttatccgggaattgacgttcggatacaagccgttgaccgtcaggaagataaactggcagacgatgtcgatgtcgcgattttttatggccggggaaactggccgggcttgcgcgtcgaaaaattatacgcagaatatttactgcccgtctgttctcctttattactcacaggcgaaaaaccgttaaaaacgccggaagatctggcgaaacacacgttattgcacgatgcctcccggcgtgactggcaggcctatactcgtcagttagggctcaaccatattaacgttcagcaagggccgatatttagccacagcgcgatggtgctacaggccgctattcacggacaggggatcgcgctggcgaataatgttatggctcagtcggaaattgaagccgggcgactggtgtgtccatttaacgatgttctggtgagtaagaatgctttttatctggtttgtcatgacagccaggcagaactgggtaaaatagccgccttccgtcagtggattttggcgaaggcggcgacggagcaagaaaaattccgttttcgttacgaacaataa

SEQ ID NO: 368752 - DNA, 123 bp, Salmonella enterica
atgtctcagattaaaaaaactaataggttacatattgttacctatttgttaaattcattcgacattaagtccagaggccatgtcaaaacgattacctcctttaaatgcgttacgcgtttttga

SEQ ID NO: 368753 - DNA, 228 bp, Salmonella enterica
atgaaaaagactgccgcaattatctctgcatgtatgctgacttttgccctgagcgcctgttccggtcctaattacgttatgcacaccaatgatggacgtagcattgtgaccgacggtaaaccccagaccgataacgataccggtatgatttcgtataaagacgctaatggcaacaaacagcagatcaatcgtactgacgtgaaagagatggtggctctggaaaactaa

SEQ ID NO: 368754 - DNA, 1206 bp, Salmonella enterica
atgaacgcttttaatcccacgcagtttcgcgcgcagtttcccgcgctagccgatgcgggtgtttatctcgatagcgccgccacggcattaaagccacaggcagtcattgacgccacgcaccagttttattgtttgagcgccggtaacgttcatcgtagccagtttgcgcaggcgcagcgcctgacggcgcaatatgaagcggccagagcaaaagcagcgcggctgttaaacgcgcccgatgaaaaaagtatcgtctggacacgcggcaccaccgaagcgatcaacatggtggcgcagtgttacgcccgtcctcgtctgcgccccggcgatgaaattatcgttagcgtcgccgagcatcacgccaaccttgtgccctggctgatggtggcgcaacaaaccggcgcgcaggtcataaaactgccgcttaatgaccgacgtcttcctgatgttgagcgtctgccggaactgatcacgtcgcgcagccggattctggcgctggggcaaatgtcgaacgtaacgggcggctgcccggatctcgcaagcgctatcagcaccgctcacgcagcgggaatggtcgtgatggtagatggcgcgcaaggcgcggtacacttcccggcggatgtccagcagcttgatatcgatttttatgctttttccgctcacaaactgtatggcccgaccggtatcggcgtgctgtacggtaagccggagcttcttgaggcgatgtcgccctggctcggcggcggcaagatgatccgtgacgttagctttgaaggcttcaccactcaaagcgctccctggaagctggaagcggggacgccgaacgtcgccggggtcatcggcctgagcgctgcgctggaatggctgtccgatatcgatattgaacaggccgaaaactggagccgggggttggcgacgctggcggaagacgcactggcgaaacgtccgggctttcgttcgttccgctgccaggactccagcctgctggcctttgattttgtcggcgtgcaccacggcgatatggtgacgctgctggcggaatacggtattgcgctccgggccgggcaacattgcgcccagccattgctggcggaacttggcgtcacagggactctgcgcgcctcttttgcgccgtataatacccaacatgatgtggatgcgttggttaacgccgttgaccgcgcgctggaactgctggtggattaa

SEQ ID NO: 368755 - DNA, 444 bp, Salmonella enterica
atgacaaaccctctttataccggacacccgttcggcacaacggtaacggaagagacgttacgcgctatctttctcccgctgacccagtgggaggataaatatcgtcagttgattctgttaggaaaacagctccccgctctgccggatgaatgcaaagcgcaggcgaaagagatagccggctgcgagaaccgcgtctggctgggctttacccagtcagataacggaacgatgcactttttcggcgacagtgaggggcggattgcccgcggcctgctggcggtattgctcaccgcagtggaaggaaaaaacgccgccgaattacaggctcgttcaccgctggcgctgtttgatgagctgggtttacgcgcccagcttagcgcctcacgcagtcaggggctgaacgcgctgagcgaagcgattgttgccgcaacgcataagggttga

SEQ ID NO: 368756 - DNA, 915 bp, Salmonella enterica
gtggaaaaatatctgcgtaacggtaccatgtttgtggtgctggcatttatattatgggggttaacacctttatactatcaatatttatcaggggggaacctcgcacaaatattgatataccgggtattctggtcaattccattattactggcagtaaggttcttatttcggcagcgaacgcgatttcatgatgtctggaaagataaaaaatcctttttcttctgcatgatcgccggacttttgatgattgtatcatggtcatcttttatttatgcgctaacccatcatctggtgcttgatgccagcctcggctattttatcaacccgctatttgttattgcgctgggatgcatttttcttaaagaaaaactgtcgttgtttcaggccatcgccgttttttccggtgtctgcggcctgacttttcaaattatcatgctacggcatttcccggcgctggcgctaaccatgggattatcatttgcgctatatggcctggcgcgaaagtttatacattatgatgtgatgacatcgataacgattgaaacattatgggcattgcctgtctcactattaatttttctctttagcgatactggaccaattatatccgctaatactcctttctttttgtatgtcatgacggcgccagtgacgatcattccactggtattatttgccatcgcgttaaatcacacctcgttgattgtcaccggactggcgcaatatatagagccgtctttacagttcttacttgccattatgatatttggcgagcacattaattacgcggaactgctctgcttttgtgcagtatggttcgggttgtttctatgcatatctgaaaatttatattcccattatctccgcgcccgtctgaaaccggtgttcggcagggtacagcgcttctttcgctaa

SEQ ID NO: 368757 - DNA, 807 bp, Salmonella enterica
atgtcagtggtgataagtgatgcctggcgccaacgctttggcggcaccgcgcgtctgtacggtgaaaaagcgctgcagcggtttgctgaggcgcatatctgcgtcgtgggaatcggcggggtgggatcatgggcggcagaggcgctggcgcgtacgggcatcggcgcgattacgctgattgatatggacgatgtctgcgtgaccaatacgaaccgtcagatccatgcgttgcgtgataacgtcgggttggcgaaagcggaagtgatggccgaacggattcggcaaattaacccggagtgccgggtaacggttatcgatgatttcatcacgccggataatgtggcgggttatatgaacgcgggttttacctatgtcattgacgccattgacagcgttcgtccaaaagccgcgctgattgcgtactgtcgccgatataaggttcctttagtgaccacaggcggcgcgggcgggcagatcgatccgacgcaaatccaggtcgctgatttggcgaaaactatccaggatccgctggcggcaaaactgcgtgagagattgaaacataattttggcgtagtgaagaacagtaaaggtaaactgggcgtggactgtgttttttccaccgaagcgctggtttacccacaggcggacggttccgtatgcgcgatgaaagctaccgcagaagggccaaaacggatggattgcgcctctggcttcggcgcggcgacgatggtgacggcaacgttcggttttgtcgccgtttcccatgcgctgaagaagatcatggctaaagcggcgcgacaagaataa

SEQ ID NO: 368758 - DNA, 1098 bp, Salmonella enterica
atgaaaggacgttgggcaaaatatgtggcgacaggcgtaatgctggcaatgctggctgcctgttcatcaaaaccgaccgatcgcggtcagcaatataaggacgggaaatttacccagcccttctccctggtaaaccagccggacgcagtgggcgcgccgattaatgctggagactttgccgagcaggtcaaccagatccgttccgcgtcgccgcgtttatacaccaatcaaagcaacgtctataacgctgtccagaactggttacgttccggaggcgatacgcgcactatgcgtcagtttggtatcgatgcctggcagatggaaggcaccgacaactacggtaacgtccagttcacgggctactatacgcccgtcgttcaggctcgccatacgcgccagggcgcgttccagtatcctatctatagtatgccgccaaaacgcggacgcttaccgtcccgcgctcagatctacgcaggcgcgctgagcgataagtacatcctggcctggagtaattcgctgatggataactttattatggatgtccagggcagcggttatattgatttcggtgacggtagtccgctgaacttctttagttatgccggtaaaaacggctggccttatcgcagtattggtaaagtgcttatcgatcgcggtgaagtgaaaaaagaagatatgtcgatgcaggctatacgcgaatggggagagaagcacagcgaagcggaagtgcgtgaattactggagcagaacccgtcgttcgtcttctttaagccgcaatcttttgcgccggtcaaaggcgccagcgctgtaccgctgattgggcgagcatccgtcgcctccgaccgcagcatcattccgcctggcacgaccttgttggcggaagtaccgttgctggataacaacggtaaatttagcggtcagtatgagctacgtttgatggtcgcactggatgtcggcggagcgattaaaggccagcactttgatatttaccagggaattggcccggatgccgggcatcgtgccggatggtataatcactatggtcgcgtctgggtgttaaaaagcgcgccgggcgccggtaacgtgtttagcggctga

SEQ ID NO: 368759 - DNA, 1254 bp, Salmonella enterica
atgtcgggagccaattcagcaatcagccgtcgccgtttactacaaggcgcgggcgccatgtggctattaagcgtgagccaggtcgggctggctgccgtaagccaggtcgttgcggtgcgtatctggcctgcgtccagctatacccgcgtcacggtagagtcgaatcgtctgctgaaatataaacaatttgccttaagtaacccggaccgcgtggtagtagatattgaggatgtgaatctgaactcggtgcttaaaggcattggcgcgcagattcgcagcgacgatccgtatatcaaatccgcaagggtagggcagtttgatcctaagactgtgcgtatggtctttgagctaaaacaaaacgtgaagccgcagctatttgcgctggcgcctgtggcaggctttaaagaacgtctggtgatggatctttatcctgccaatgcgcaggatatgcaggatccgctgctggcgctgctggaagactacaataaaggcgatctggataaacaggtgccgccttcgcaaagcgggccgcagcccggtaaagcggggcgcgatcgtcccattgtcattatgcttgatccgggacacggcggcgaagaccccggcgcgataggcaaatacaaaacgcgtgaaaaagacgtggtgctccagatagcccgccgcctgcgcgcgttgatcgaaaaagaaggcaacatgaaggtctatatgacgcgcaatgaagacatcttcattccgttaaaagtccgggtggcgaaagcgcagaaacagcgcgccgacctgtttgtctctattcatgcggatgccttcaccagccggcagcctagcggttcatccgtattcgcgctatcgaccaaaggcgccaccagtaccgcggcgaaatatctggcgcaaacgcagaacgcctcggacttaattggcggcgtgagcaaaagcggtgaccgttatgtcgaccatacgatgttcgatatggtgcaatcgctgaccattgccgatagtttgaaattcggtaaagcggtgttgaagcagcttggtaaaattaatgacctgcataaaaacaaggtcgagcaggcggggtttgcggtgttaaaggcgcccgatattccgtctattctggtcgagacggcgtttatcagtaacattgaagaagaacgcaagctcaagaccgcgacgttccagcaacaggtcgcagagtcgattctggcgggcattaaagcgtattttgccgatggggcgacgctggcgagaagaagttaa

SEQ ID NO: 368760 - DNA, 1332 bp, Salmonella enterica
atgataaaggaacgtaaaaccgaactggtagaagggtttcgccattcagttccctatatcaacacccatcgcggaaaaacctttgtcattatgctcggcggcgaagccattgagcatgacaatttttccagcatcgttagcgatatcgggctactgcatagcctcggtattcgccttgtcgtggtgtatggcgcgcgaccgcaaatcgacgccaatctggccgcgcatcatcatgaaccgatttaccacaaaaacacgcgggtgacggacgccaaagcactggagctggtgaaacaggccgccggtttactccagcttgatattaccgcccgtctgtcgatgagtctgaacaatacgccgttgcagggcgcgcacattaatgtcgtcagcggcaatttcaccattgcgcagccgctgggcgttgatgatggcgtggactactgtcatagcggccgtatccggcgcattgatgaagatgcgatcaaccgccagttggataacggcgcgatcgttctgatggggccggtcgccgtctcagtgaccggcgaaagttttaatctgacctcagaagagattgccactcaactcgccgttaaactgaaagcggaaaaaatgatcggtttctgttcttctcagggcgttaccaatagcgagggcggcatcatttctgaactcttcccgaatgaagcacaggcgcgggtggaagagttggaagcgcagggcgattacaactccggaaccgtacgttttttgcgcggcgcggtaaaagcctgtcgtagcggcgttcgtcgttgccatctgatcagctatcaggaagatggctcgctattacaggaattgttctcgcgtgacggtatcggtacgcagatcgtcatggagagcgccgagcagatccgccgcgctaccatcaacgatattggcggtattctggagcttatccgcccactggaacagcagggcattctggtacgccgttcccgtgaacaactggagatggagatcgataaatttaccattattcagcgcgataatatgactatcgcctgcgcggcgctgtatccttttgtggaagagaaaataggcgaaatggcctgcgtagcggtacatccggattaccgcagctcatcgcgtggagaagtgcttctggagcgggttgccgcccaggcgcggcaaatggggctgcgtaaattgtttgtgctgacgacgcgcagtattcactggttccaggagcgcggtttcacgcctgtcgatattgagttactgcctgagagcaagaaaaaaatgtataactatcagcgacgttcaaaggtgctgatggcggatttagggtaa

SEQ ID NO: 368761 - DNA, 1836 bp, Salmonella enterica
atgacaatccaggagcggttgctggaggccgttgaacaaaaactcttacggcccattgatgcccagtttgctttaaccgtcgccggtaacgacgatcccgccgtgacgctggcggcagcgctgcttagtcatgacgcaggtgaaggtcacgtgtgtctgccgttgtcgcgtttaacgttaacggaggaggcgcatcccttactggtcgcctgtataagcgaaacggctacgccaatcgactggaaaaagcggttactggcgtctgcggcggttagctgcggcgatagccccgcgccgttaattctgtgcggcgagcgtctctacctgaatcgcatgtggtgcaacgaacgtacggttgcgcgcttttttaacgaggttaaccaggccatcgccgtagatgaagatcagttatcccgtattctggacgcgctattccctccgacagacgaggtgaactggcaaaaggtggccgccgccgtagcgctaactcgccgtatctccgtgatttcaggcggtcccggcaccggtaaaaccaccaccgtcgcgaagctgctggcggcattaattcaaatggcggatggcgaacgttgccgtatccggctggcagcgccgaccgggaaagcggccgcacgcctgacggagtcgctcggcgcggcgttgcgtcagcttccacttaccgatgcgcagaaaaagcgtataccggaggacgccagtacgctgcaccgactgctaggcgcacagcccggcagccagcgattacgccatcatgcgggcaacccgctacatctggacgtgctggtggtcgatgaagcatcaatgattgatttgccgatgatgtcacgtttgattgacgctctgccgccgcacgggcgggtcatttttcttggcgatcgcgatcagttggcatccgttgaggcgggcgctgtgttgggcgatatttgcgcctatgtcaacgcagggtttacggcggaacgcgcccgacagctaagtcgactcactggtagcgccattccggcgggggccggaacgcaagccgcatctttacgcgatagcctctgtttgttgcaaaagagctatcgtttcggcagcgattctggcatcggcaagctggcggcggcaattaactgcggcgacaggtcggcaatccaggctgtttttcagcaggggtttagcgatatagagaagcgtacattgcaaagcagcgacgattatgccgggatgctggatgaagcgctggcgggctatggtcgctacctgcggttgctgcatgaaaaagcgacgccggaggcaatccttcaggctttcaatgagtatcaactgctttgtgcgctgcgcgaaggcccatttggcgtgaggggattgaatgaccgcattgagcaggcgatggtgcagcaacgaaaaattcagcggcacccgcattctcgctggtacgaagggcgtccggtaatgattgcgcgcaacgatagcgcgttggggctatttaacggcgatattggtattgcgctcgatcgcgggcaggggttacgcgtctggtttgtgatgccggacggcacgatcaagtccgttcagcccagccgtctgccggaacatgatacaacctgggcgatgacggtacataaatcacaggggtctgaatttgatcacgccgcgctgattttacccagccagcgttcgccggtcgtgacgcgggagctggtgtataccgctgttacgcgagcgcggcggcggttatcgctgtatgccgatgaacggatcctggcaggcgcgattgtgacgcgtacggagcggcgcagcgggctagccaccttatttgatgaagtcagtcgtaccggataa

SEQ ID NO: 368762 - DNA, 3546 bp, Salmonella enterica
atgaatgatgtcgccgagactcttgatcctctgcgcttgccccttacaggcgagcgtttgattgaagcatcagcgggcacaggcaaaacgtttactatcgcggcgctgtatctgcggctactgctcggtttaggcggcagcaccgcatttccccgtccgttgaccgttgaagaactgctggtggtaacctttacggaggccgccactgaagagctgcgtgggcgcatccgcagtaatatccatgagttgcgcatcgcctgtctgcgggaaagcacggataatccgctgtatgcccgcttgctggaagaaattagcgacaaaaagcaggccgcgcagtggttattactggcagaacgacaaatggacgaggccgcggtctttaccatccacggtttttgccagcgtatgctcagcctgaacgctttcgaatccggtatgttgtttgagcaacagcttattgaagacgaatctttgttgcgttatcaggcctgcgccgatttctggcggcgtcattgctatccgctgccgcgcgacatcgcgcaggtggtgtttgacgtgtggaagggaccgaaggcgctcttaaaggatatcgatcgttatctgcagggcgaagcgccggtcattaaagcgccgccatcgcaggaggagacgctggcatcgcgtcatgaacagatcctggcgcgcatcaaccaggtgaagcagcagtggtgtgaggcggttagcgagctggacgcgctgatcgaatcatccggcatcgatcgcagaaagttcaaccgcggcaatcaggcgaaatggatcgaaaagatcaccgcgtgggcgcaagaagagacgaaaaactatcaattacccgaggcgttgggaaaattttcacagcgttttttagctgagcgcaccaaagctggcggcgtgacgccccagcacccattgtttgtcgccattgataacctgttgggcgaaccgctatcgattaaagatctggttcttacccgagcgctatcagagatccgtgaaacggtggctcaggaaaaacgccggcgcggcgagctggggtttgacgatatgctcagccgtttagataccgcgctgcgtagtgaaagcggcgaggcgctggctgcggcgattcgtacccgttttccggtggcgatgatcgatgaatttcaggataccgacccacaacagtaccgtatttttcgccgtatctggcgacatcaacccgatacggcgctattgctgattggcgatcctaaacaggcgatttatgcgtttcgtggcgcggatatcttcacctacatgaaggctcgcagcgaagtgagcgcgcactatacgcttgacactaactggcgctccgcgccggggatggtgaatagcgttaacaagctgttcagtcagatgaacgacgcctttatgttccgcgatattcccttcagtccggtaaagtttgcgcccagaaaccagtcgctgcaatttaaagtgaatgacgcgcctcaaccggcgatgaccctgtggctaatggagggggaaagctgcggttcgggcgattatcaaagttatatggcgcaggtgtgcgccacgcaaattcgcgactggctgcgtgccgggcaaacgggcgacgcgctgctgacgaacggcgattcgtcgcggcccgttcgtgcctcggatatcagcgtgttggtgcgcagcaggcgggaagccgcgctgatacgggatgcgctgaccttactggcgatcccctccgtctatctttctaaccgcgacagcgtattcgaaacgctcgaagcgcaggagatgctgtgggtgttgcaggcggtgatggcgcccgaacgtgagaatacgctgcgtagcgctttggcgacatcaatgatgggccttaccgcgctggatatcgaaacgcttaacaatgatgaaaatgcgtgggatgcggttgtcgaagagtttgatggctaccgacagatttggcataaacgcggcgtgatgcctatgctgcgcgcgctaatgtcggcgcgcaatattgctgaaaacctgctggcgacggcgggaggcgaacgtcggctgacggatattttgcatattagcgagctgttacaggaagccggttcgcagctggaaagcgaacatgcgctggtgcgttggctggcgcagcatatccttgaacccgatagcaatgcttccagccagcaactacgtctggaaagcgataagcatctggtgcaaatcgtcaccattcataaatcgaaaggtctggaatacccgctggtctggttaccttttatcacccatttccgcgtgcaggaccaggctttttatcacgacaggcactcctacgaggcggtgctggaccttagtcacgccgaagagagcatagcactggcggaagccgaacgcctggcggaagacctgcgcctactttatgtcgcgctgacccgtgcagtgtggcattgcagcctcggcgtcgcgccgctggtgcggcgtcgtagcgataagaaaggagagacggatgtgcaccaaagcgcgcttgggcgactcctgcaaaaaggcgaaccgatggatgccgcaggccttcgcgcctgtattgaggcgctatgcgacgaggatatcgtgtgtcgaacgccaggcaatacggataacgaccgctggcaaattgccgctgcatcgcacgcggaactcagtgccagaacgctgcaacgcctgctttatgatagctggcgcgtcaccagttattccggtttgcagcagcggggacatagcgtggcgcaagatcttattcctcgtctcgacattgacgccgcaggcgttggcgaagcggcggaagcgccggcaatgacgccgcatcactttcctcgcggggcatcgccgggaacatttttgcacaacctgtttgaagagcttgattttactcaaccgataaacccccaatgggtacaggaaaaactggagctgagtggttttgagacgcgatgggagcccgtacttacccgctggctggacaccgtgttgcacgttccccttaacgagacgggcgttagtctgagcgtgctgaccgagcgtgaaaaacaggtcgaaatggagttttatctgccgattgcccagccgcttaccgccggagagctggatgcgttgattcgtcgatacgacccgctttcagcaggttgccctgcgctggatttcatgcaggttcgcggcatgttaaagggctttatcgacctggtttttcgttatgaggggcgctattacctgctcgactataaatctaactggctgggcgaggatagcgccgcttatacccaggcggcgatggctacggcgatgcaggcgcatcgctatgatttgcagtaccagctttatacgctggcattgcatcgttaccttcgtcatcgcatggcgaattacgactatgaacgccatttcggcggcgtcatctatctctttttacgcggggtggatagcgaacgtccgcagcagggtatttttaccactcgccctgcggcggcgttaattaaccaactggatgatatgtttgcaggtgaaatgagtgaggaggcgcaatga

SEQ ID NO: 368763 - DNA, 2889 bp, Salmonella enterica
atgccccgcagcacctggttcaaagcgttattgttattggtcgccctctgggggcctgcagttcaggcggatatcggttggcaaccgctgcaagaaactatccgtaaaagcgataaagatacccggcagtatcaggcgatacgtcttgataatgacatggtggtgttgctcgtatccgatccgcaggctgtaaagtcgctttcagcgttagtggtgcccgttggatcgcttgaagatcctgaggctcatcaggggcttgctcattatcttgagcatatgtgcctgatggggtcaaaaaaatatccgcaggcggatagccttgccgaataccttaaaagacatggcggtagccacaacgccagcaccgcgccttatcgaacagccttctacctggaggttgaaaacgacgcgcttccaggtgccgtagatcgactggccgacgccattgccgcgccattgctcaataaaaagtatgccgaacgcgaacgaaacgcggtgaatgccgagctgacgatggcgcgcacccgcgacggtatgcgtatggcgcaggtaagcgccgaaaccattaacccggcgcatccaggctcgcacttttctggcggcaatctggaaacgctaagcgataagccgggaaatccggtgcaacaggcgttgatcgcttttcatgaaaaatactattcatctaatctgatgaaggcggtgatttacagtaataaacccttgccggaactggcgagtattgccgccgcaacctatggtcgcgtgccgaataaacagattaaaaaaccggaaattaccgtacctgtcatcaccgaggcgcagaagggcatcattattcattacgtgccggcgctaccgcgtaaagtgctgcgcgtggagtttcgtattgataacaatagcgcgcagttccgtagcaagaccgatgaactggtctcttatctgattggcaatcgtagcccggggacgctctctgactggctgcaaaaacaaggactggtcgaaggtattagcgcggattccgatccgattgttaatggtaacagcggcgtatttgccatttcggcaacgctgactgataaaggtttggccaatcgtgatgaagtcgtcgcagctatctttagctatctcaatacgttacgtgaaaaagggatagataaacgttactttgacgagctggcgcatgtgctggatctcgacttccgctatccgtcgattacccgcgatatggactatgtcgagtggctggcggacactatgatccgcgtcccggtagcgcatacgctggatgcggcgaatatcgccgatcgttacgatcctgccgctatcaaaaatcgcctggcgatgatgacgccgcagaatgcgcgcatctggtacatcagtccccaggaaccccataataagattgcgtattttgtggatgcgccttatcaggtcgataagattagcgaacagacgtttaaaaactggcagcaaaaagcacagggcattgcgttgtcgctgccggagttaaacccctatattcctgatgatttttcgcttgttaagaatgacaaaaactacgtgcggccagaactgattgtcgataaagcggatttgcgcgtggtttatgcgccgagtcgttatttcgccagcgagccaaaagctgacgtgagcgtggtattgcgtaacccgcaggcgatggacagcgcccgcaatcaggtactgttcgcccttaatgattatctggcgggaatggcgctcgatcagctcagcaaccaggcggcagtgggcggcattagcttttccactaacgccaacaatggtctgatggtcactgcgaacggttatacccagcgtttgccgcagcttttcctggcgctgctggaaggatattttagctacgacgccacggaggaacagctggcgcaggcgaaatcctggtatacgcagatgatggattctgcggagaagggaaaagcctacgaacaggcgattatgccggtgcagatgatttcgcaggtgccttatttttcccgtgatgaacgtcgcgctttgctgccgtccattacgttaaaagaggtgatggcctatcgtaatgcgttaaaaacgggcgctcgtccggaatttctggttatagggaatatgagcgaagcccaggcgacctctctggcgcaagatgtccaaaaacagctcgcggcgaacggatcggcgtggtgtcgtaacaaagacgtggtggttgagaaaaagcagtccgtaatatttgaaaaagcgggcagtagcaccgactccgcgttagcagcggtctttgtcccggtcggctacgacgagtacgtcagcgccgcctacagcgcgatgttaggtcagattgttcaaccgtggttttacaatcagctacgaaccgaagagcaactgggatacgctgttttcgcctttccgatgagcgttggccgtcagtggggaatgggattcctgctacagagcaacgataaacagccctcttacctgtggcaacgctatcaggcatttttccctgacgccgaggcgaagctgagggcgatgaagccggaagagttcgcccaaattcagcaggcgatcattacgcaaatgcgccaggcgccgcaaacgttgggcgaagaagcatcccgtttaagcaaggatttcgatcggggtaatatgcgctttgactcgcgtgataaaatcatcgctcagataaaattgctgacgccacaaaagcttgccgatttcttccaccaggcggtggtggaaccacaaggtatggcaatattgtcacagattgccggtagccagaatggaaaagcagaatacgtgcatccgacaggctggaaagtgtgggataacgtcagcgctttgcagcaaacgttacctctaatgagcgaaaagaatgaatga

SEQ ID NO: 368764 - DNA, 3372 bp, Salmonella enterica
atgttaagggtctaccactccaatcgtctggatgtgctggaagcgttgatggaattcatcgtcgaacgcgagcggctggatgatccctttgaaccagaaatgattctggtacaaagcacgggtatggcgcagtggctgcagatgaccctttcacaaaagtttggtattgcggcgaatatcgcttttccgttaccggcgagttttatctgggagatgtttgtccgcgtgttgccggatatccccaaagaaagcgctttcagcaaacaaagcatgagctggaaactgatgaccttgctgccgcagttgctggataaggatgagtttgtactgctgcgccattatctgaccgacgacaccgataaacgcaaactctttcagctttccgcgcgcgccgccgacctgttcgatcagtatctggtttatcggcctgactggcttacgcagtgggaagcgggaaaaaccgtggaaggtctgggagaggcgcaaaactggcaggcgccgttgtggaaagcattggtggaatataccgccgcgctggggcagccgcgctggcatcgcgccaatctctaccaacgctttattcaaacgctggaaagcgcgaccgcctgcccgccagggttgccgtcccgcgtttttatttgcggcatttccgcgttaccgccagtgtatctcagagcattgcaggcgctgggtaaacatattgaaatccatctcctttttactaatccgtgtcggtattactggggggatattaaagacccagcctggctggcaaaactcatggctcgccagcgtcgtcacagttttgaagaccgtcatttaccgttgttccgtgaaaaccagaatccggaagccttatttaacagcgacggtgaacaggatatcggtaatccgctactggcctcatggggaaaactgggacgggattatatctacctgctatctgaactggaaaacagccaggagctggatgcgtttgttgatattacgccagataatcttttgcatcggattcaggcggacatccttgaactggaaagccatgcggtggcgggcgtaaatcttgaggagtattcgcgcagcgacaataagcgtctgctcgatcccgaggataacagcctctcttttcacgtttgtcacagcccgcagcgcgaggtggagatactgcacgatcgcctgctggcgatgctggaagccgatccgacactaacgccgcgcgacattatcgttatggtggctgatattgacagctatagcccgtttatccaggcggtgtttggtagcgcgccaacggagcgctatctgccttatgccatttccgatcggcgggcgcgtcagtcacatccggtgttacaggcatttatcagcctactttcgttaccggacagccgctttgtctccgaggatgttctggcgttgttagacgtaccggtattggctgcccgctttacgatcaacgaagaagggttgcgttatttgcgcttgtgggtcaatgagtcaggcattcgctggggaattgacgatgacaacgtacgcgagctggaacttcctgccacggggcagcatacgtggcaatttggcctgacgcgtatgctgctggggtatgcgatggaaagcgcccagggcgagtggcagtcggttctgccttatgacgaatccagcggtctgattgctgagctggtcgggcatctggcttcgctgctgatgcagcttaatatctggcggcgcggtctggcgcaggagcgaccgctggaagagtggctgcccgtttgtcgcgatatgctcaatgatttcttcctgcccgatgcggacacggaagcggcaatgacattgattgaacagcagtggcaggccattatcgccgaaggcgtcgcggcggaatatggcgacgcggtaccgatttcgctactgcgggatgaactggcgcagcgtctggatcaggaacgtattagccagcgcttcctggcgggccccatcaatatttgtacgctgatgccgatgcgttccattccgtttagagtcgtttgcctgctgggaatgaacgacggcgtatacccgcgccagcttgcgccgttgggctttgacctgatgagccaaaaacccatgcgcggggatcgtagccgtcgcgacgatgaccgctacctgtttctggaagcgttaatctcggcgcagcagacgctgtatatcagctacatcggtcgctccatccaggataatagcgaacgctttccctctgtactggtgcaagaattggtggattacatcggacaaagccactatttgccgggcgacgaaacgctgacctgtgatgagagcgaagcacgagtcaaagcgcatattacgcgtctgcatacccgtatgccttttgatgcgcaaaattaccaacccggcgaacagcaaagttatgccagagagtggttgcccgcggcgagtcagtcgggaaaagcgcattctgactttgtgcagccgcttccttttacgatgccggaaacattgactctggaaagtctgcagcgtttttgggcccatccggtacgcgcattttttcagatgcggcttcaggttaatttccgctcggaagagagtgagattcctgatgcggaaccgtttgaattagagggattgacgcgatatcaacttaaccaacagttgctcaatacgctggttgaagaggacgacgccgaacgcttgttccgccgtttccgggctgcgggagagttgccttacggcgcgtttggcgaaatattctgggatgcgcaatgtcaggagatgcagcaactggcaagccgggtcatcgcctgccgtaagccgagccaaagcctggaagtggatctgctttgcaatggcgttcagctaaccggctggctgccgcaggtacaggaggatggattattgcgctggcgtcccgctttaatcagcgtggcgcaaggtgtgcaactttggctggaacaccttgtctattgtgccagcggcgggagtggcgaaagtcgcctgtttttgcgcaaagagggagagtggcgatttccgcctcttgataaaacgcaggcaatggcttacctggcgcaactgattgaaggctaccgggaaggcatgtcttctccgctattggtactgccggaaagcggcggcgcatggataaaagcctgttatgacgctgaaaatgatgtcatgttagacgacgatgacaccttacagaaggccagaacaaagtttctacaggcttatgaaggcaacatgatggtgagcggcgaaggcgaagatatctggtatcaacgtctttggcgtcagctggaatctgaaacgttgcaggctatcattgcgcagtcacggcattacctgttaccgctgtttcgttttaatcagtctcgttga

SEQ ID NO: 368765 - DNA, 321 bp, Salmonella enterica
atgtcgcatcccctgaatttacaacgcgggtttagcctcccggaagttttagtggcgatggttctaatggtaatgatcgtcaccgcgctgtcaggctatcagcgggtattaatgcacagttttgcattacgacaccagtatcttcagatctggcggcaggcgtggcagcaaacggcgctgtatccattttcgcctgctgaaggctggaaggccaaccggatgcagacaacgcaatcgggatgtgtcagcatcagcgtcacgatggtttcaccctctggcaggcaggggcagatgacgcgcttgcattgtccaaatcgttaa

SEQ ID NO: 368766 - DNA, 408 bp, Salmonella enterica
gtgaatcgggaacgtggcgcttcttcgctaatactggcgcttttaatactgattctgggcagtctgctactgcaaggcgtaaatcagcagcaggccagctatgccacccgcgtgacgacgcagagcctggcgatacaacgccaggcgctcgtacagtcggcgctggaatgggggcgggggcagctatggtcaggcgtaaccgaaatggaatgtcggcgctattcctcttcaggagcgagagtctgtttgcggaggttaccgggggatgaggtggtgatggcggcgcaagatgacagcatgacgttatggcgtttgggcaacgtcattcagggaagcattgtcttttctccccacggctggagcgatttttgtccgttaaaagaggtggcgttatgtcgcatcccctga

SEQ ID NO: 368767 - DNA, 564 bp, Salmonella enterica
gtgtcaataaccacgcgggggttctcgctactggaggtcgtgctggcgatggcgataggttccattttactgcttgggtccgcacgatttttaccggcgctacagcgtgagatctggcacaacacgcgacagttatcgctggaagatgaaatctggcagcgaacctataccgtagcgaagcatcttcaacgtgcgggttactgtcatggccactgtattggcgaagggttacatcttgccgaacaggggcaatgcgtcatcgttcagtgggacgggaataataacggtgtctgggataccataccggcgaaagaggccgaccagaccgggtttcgtgtgaaggataacgttctggagacattacgcggagcaacatcttgccagggtaagggatgggaaaaaatgaccgatcccaatacggtactcatcacggcgtttaccgttgagcgccgggatataacgggattctcgccagtgctcatgctgcatctgcgcggcgccagcaaagccgagcctcagacggttattgacgcgcaatacagcgtaacgggatttaatctgtga

SEQ ID NO: 368768 - DNA, 471 bp, Salmonella enterica
atgaaaaaacaacagggctatacgctcattgaaacggtggtcgcgatgtcgctcattatcattctcagcgccacaggactttatggctggcaacgctggcagcagcaacagcgcctgtggcaaaccgcatgtcaggtgcgggattacctgctgcaacttcgtgaggatgctcactggcataaccgcgatcacattcttcgcgtggtcagcgaaggcggttcatggtgctttgtcagctctgttgctacgcaaacatcgtgtacgccatcttccccctttgtgtttacgcccgactggcgtgatgtcgtccttgccgatatcacgccgtcgttagccttctttggcttgcgcaatacggcatgggcagggcacatcgtactgaaaaacgctgccggagagtggcgtctggtcgtctcctcctgggggcgaatcaggctatgcgagcgtaacgaggccgccacgtgtcaataa

SEQ ID NO: 368769 - DNA, 795 bp, Salmonella enterica
atgaaacagtatttagaactgatgcaaaaagtgctggatgaaggcacacagaaaaacgaccgtaccggcaccggcacgctttccatttttggccatcagatgcgttttaacctgcaggaaggctttcctctggtgacgacaaaacgctgccatttacgttcaattattcacgaactgctatggtttttgcagggcgataccaacatcgcttacctgcacgaaaataatgtcaccatctgggacgaatgggccgatgagaacggcgatttaggcccggtttatggtaagcagtggcgtgcatggccaacaccggatggccgccatatcgatcagatcgccacggtcttaagccagcttaaaaacgacccggactctcgtcgtattatcgtttctgcgtggaacgtcggcgagctggataagatggcgctggcgccgtgtcacgcctttttccagttttatgtcgcagatggaaaactctcctgtcagctttatcagcgctcctgcgatgtgttcctcggtctgccgttcaacattgccagctacgcgttactggtgcatatgatggcgcaacagtgcgacctggacgtcggcgattttgtctggaccggcggcgacacgcacctgtacagcaaccatatggagcagacgcacctgcaattaagccgtgaacctcgcgcgctgccgaaattggtgattaagcgtaaacccgattcgctttttgactaccggttcgatgatttcgaaattgaaggctatgatccgcaccccggtattaaagcgccggtcgctatctaa

SEQ ID NO: 368770 - DNA, 876 bp, Salmonella enterica
atgaccagtagctatctgcattttccggactttgatccggtcattttctcaattgggcccgtcgcgcttcactggtatggcttgatgtatctggtggggttcgttttcgcgatgtggttggcggtgcgtcgcgctaaccgtccgggaagcggttggaccaaaaacgaagttgaaaatttactctatgcaggtttcctgggggtcttcctggggggacgtattggctatgtcctgttttataacttccctctgtttctggataacccgctctatttattccgcgtctgggacggcggcatgtcctttcacggcgggcttatcggcgtgatactggtgatgattatcttcgccaggcgcacgaagcgctcgttctttcaggtgtctgattttattgcgccgttaattccgttcggcctgggcgccgggcgtctgggcaactttatcaacggtgaattgtgggggcgcgtcgatcctgacttccggtttgccatgctctttcctggctcacgcgcggaagatattgcgctgctgccgtcacatccgcaatggcagcctatttttgatacctacggcgtattgccgcgccacccttcccagttgtatgagctggcattagaaggcgtggtgctgtttatcatccttaatctctttattcgcaaaccgcgtccgatgggcgcagtctccggattattcctgattggctatggcgcgtttcgtatcattgttgaattcttccgccagccggacgcgcaatttaccggcgcgtgggtacagtacatcagcatggggcagattctctctatcccgatgattatcgctggcgcgatcatgatggtttgggcatatcgccgccgcccgcagcaacacgtttcctga

SEQ ID NO: 368771 - DNA, 2247 bp, Salmonella enterica
atgctcactcgcctgcgcgaaatagtcgaaaaagtggccagtgcgccgcgtctgaacgaggcgctgaatattctggtcacggatatctgtcttgcgatggatactgaggtttgctcggtttacctggccgatcatgaccgacgctgttattacctgatggcgacgcgggggttgaaaaaaccgcgtggtcgaaccgttgcgcttgcgtttgatgaggggatcgtcggtctggtgggcagactggcggaacccattaaccttgccgatgcgcaaaaacatcccagctttaaatacattccttcggtaaaagaggagcgttttcgcgcgtttctcggcgtgccgatcattcagcgtcgccaacttctcggcgtgctggtcgtacagcagcgcgaattgcgccagtacgatgaaagcgaagagtctttccttgtcacgctcgctacgcagatggcggctatcctgtcacagtcgcaggtcacagcgctgttcgggcaataccggcagacgcgaatccgcgcgcttcctgcggcgccgggcgtggctatcgcaacgggctggcaagacgcgaccatgccgctgatggaacaggtttacgaagcgtctacgctggatacctctcttgaacgtgaacgactgaccggcgcgctggaagaggcggcgaacgaattccgacgatacagcaaacgctttgccgccggcgcgcaaaaagagacggcggccatttttgatctgtactcacacctgctttcagacgccagactgcgtcgcgaactcttcgccgaggtcgacaaaggcgctgttgcggagtgggccgttaaaaaaatcatcgaaaaatttgccgagcaatttgcggcgctaaccgataactacctcaaagaacgtgcgggagacttacgcacgctggggcagcggctgttattccaccttgatgattcagttcaggggccaaacgcctggccggaacgttttattctggtcgcggatgagctgtcggcgaccaccctggcggagctgccgcaggacaggctggcgggcgttgtggtgcgcgacggcgcggcaaactcgcatgcggcgattatggtgcgcgcgctcggtatcccgaccgtcatgggtgcggatatccagccttcggtgctacatcgccgtacgttggtggtggatggctatcgcggtgaattactggtcgatcctgaacccgtacttattcaggaatatcagcggctcattagtgaagagatagaactcagtcgtctggcggaggacgacgtcaatcttcccgcccaactgaaaagcggcgagcgtatcaaagtgatgctgaatgccgggctcagtcccgagcatgaggaaaagttaggcagtcggatcgacggtatcggcctgtaccgtactgaaattccctttatgctgcaaagcgggtttccctcggaagaagagcaggtggcgcagtatcaagggatgctgcaaatgtttaacgataaaccggtgacgctgcggaccctggatgtgggagcggataagcaactgccctatatgccgatcagcgaggagaacccgtgtctgggctggcgcgggatccgcattacgctggatcagccggagatctttttgatccaggtccgcgcgatgctgcacgccaatgcggcgactggcaacctcagcattttgttgccgatggtcaccagtattgatgaagtcgatgaagcgcggcgtctgatcgaacgcgccgggcgcgaggtcgaggagatgatcggctatgcgatcccgaaaccgcgtatcggcattatgctggaagtaccgtcaatggtatttatgctgccgcatctggctaaccggatcgactttatctcggtcggcaccaacgatttaacgcaatatatcctggcggtagatcgcaacaatacccgcgtggccagtatttacgacagtctgcatccggctatgctgcgcgcactgagcatgattgcgcaggaagccgaaaaaaatggcctcgatcttcgcttgtgcggcgagatggcgggcgatccgatgtgcgtggcgattcttatcggtctgggatatcgccatctttcgatgaatggccgttcggtagcgcgtgtgaaatatctgctgcggcatatcgattttgaagacgcgcaaacccttgccagacgcagccttgaggcgcagatggcgaccgaggtgcgtcatcaggtggcggcgtttatggagcgccgcgggatggggggattgattcgcggagggttgtaa

SEQ ID NO: 368772 - DNA, 531 bp, Salmonella enterica
gtgattgatgacgatggctaccgcccaaatgtaggtatcgtaatttgtaatcgtcaggggcaggtgatgtgggcccggcgatttggtcagcactcctggcagttcccgcagggcgggataaatccaggggagtcggcagaacaggcgatgtaccgggaactgtttgaagaagttgggttaagccgtaaagatgtgcggatccttgcttctactcgcaactggttgcgttacaagttaccaaaacgtttggtgcgttgggacacaaagccggtatgtatcggccagaaacaaaagtggtttcttttgcagttaatgagcgccgacgccgaaatcaatatgcaaaccagcagtacgccggagtttgacggctggcgctgggtaagttactggtatccggttcgacaagtggtgtcatttaaacgcgatgtctaccgcagggtaatgaaagagtttgcaagtgttgtcatggcgcttcaggataatccccctaagctacaaagcgcgcctgcttatcgacgtaaaagaggttaa

SEQ ID NO: 368773 - DNA, 696 bp, Salmonella enterica
atgtccgctctttgtccgctactgactccgcctgcttcggaagcattgctgttagcccaggcgcggcagctttccggctatacgttaggcgagctggcggcgatggccggcattaccacgcctaaagatttgaagcgagacaaaggctggatcggcgtcttgctggagatctggctcggcgccagcgccgggagcaagccggagcaggatttcgccgcattaggcgtagaactgaaaaccatcccggtggatagtctgggtcgtcctctggaaacaacctttgtttgcgtggcgccgttaaccggtaacagcggcgtgacctgggagacaagtcacgtacggcataaattgaagcgcgtgctatgggtgccggtcgaaggcgatcgcagcataccgttagccgaacgccgcgtaggttcgccgctactctggagtccgagtgaagaagaggacaggcagctacgcctcgactgggaagagctgatggacatgatagtgctgggccaggtggaacgcattaccgcccgccatggcgaagtcttgcaactgcggcccaaagccgccaatgccagggcgctcaccgaggctatcggtgcgcgcggggaacctattttgacgctaccgcgtggattttatctgaaaaaaaattttacgcaggcgctgctggctcgccattttttattgcagaatccgtaa

SEQ ID NO: 368774 - DNA, 714 bp, Salmonella enterica
atgttatttgcatggataaccgatcctaatgcctggctggcgctcggtacgctgacgctgctggagattgtacttgggatcgacaacattatttttctttctctggtggtagcaaaacttcctacggcgcaacggaaccacgcacggcggcttgggttggcggcggcgatggttatgcgcctggcgctgctggcgtcaatcgcctgggtcactcggctgactaatccgctgtttgagcttttcggcgaagcgatttccgcccgcgatctcattctgttactgggcgggttatttttaatctggaaagccagcaaggagattcatgagtccatcgaaggcgaagaagaagggttaaaaacccgggtttcttctttcctgggcgcaatagtgcagattatgctgctggatattattttcagccttgattcagttatcacagcggttggcctctccgatcatctgtttattatgatggcggcagtcgttattgccgtgggcgtcatgatgtttgcggcacggcccatcggcgagtttgtcgatcgtcatccgtcggtaaaaatgctggcgctctcctttctgatcctggttggctttaccctgattctggaaagtttcgacgttcacgttccgaaagggtatatctatttcgccatgttcttctctatcgcagtagagagcctgaacctgttgcgtaataaaaagaatccgctgtaa

SEQ ID NO: 368775 - DNA, 219 bp, Salmonella enterica
atgaaaaagtgggcagttgtaatttccgcagtagggttggcttttgcggtatccggatgcagcagcgattatgtaatggcgacgaaagatggtcgtatgatcctgaccgatggaaaaccgcaagttgacgatgataccggtctggtcagctataccgatgcacagggaaacgagatgcaaatcaaccgtgacgaagtgtctcaaatcatcgaacgttaa

SEQ ID NO: 368776 - DNA, 1041 bp, Salmonella enterica
atgcactatcaccgtataccccacagctcgctcgaagtaagtacgctagggctgggcacaatgacatttggtgaacaaaacagcgaagccgacgctcacgcacagctcgactatgccatcgcaaatggcattaaccttatcgatgccgccgagatgtatccggtaccgccgcgcccggaaacacaagggctgacggagtcctatatcggtaactggctcgccaaacgcggcaaccgtgaaaaactgatcatcgccagcaaagttagcggaccggcacgtaataatgatcaaggcatccggcctcatcaggcgctggatcgtaaaaatattcgcgaagcgctacacgacagtttgacccgattgcagaccgactatctggatttgtatcaggtgcactggccgcagcgccccactaactgcttcggtaaactcggctataactggacggactccacgccagtagtaagtctactggagacgttagacgcgctaagtgagtttcagcgagcgggtaagattcgttatattggcgtttcaaatgagacagcgtttggcgttatgcgctatctgcatctggcggaaaaacatgacctgccgcgtattgtcacgatccagaacccctatagcctgttaaaccgcagctacgaggtcgggctggcggaagtcagccagtatgaaggtgttgaattgctcgcctactcctgtctggcgtttggcacattaaccggtaaatacctgaacggggccaaacccgcaggcgcgcggaataccttgttcagccgcttcacacgttacagcggcgaacaggcgcaaaaagccgttgccgcctacgtcgatatcgcgaagcgtcacaatcttgatccggcgcagatggcgctggcctttgttcgccgccagccgtttgtcgccagtacgttactgggcgcaaccacgatggcgcagctcaagacgaatgtggaaagtctgcatctgacgttaagcgaagaggtcctggcggagatagaggcggcgcatcaggtttatacctacccggcgccgtga

SEQ ID NO: 368777 - DNA, 1203 bp, Salmonella enterica
atgagtgagtcagtacgtactaacacctccatctggtcgaaagggatgctgtcggtgattgtcgcgcagtttctctcggcttttggcgataatgcgctgctgtttgcgacgctggcactgctgaaagctcagttttacccggactggagccagcctgttttgcaaatggtgtttgtgggcgcttacattctttttgcgccgtttgtcggccagatggcggacagctttgccaaaggccgggtgatgatggttgccaatggtcttaaactggcgggagcggcaggtatctgcctcggcgtaaatccttttgtcggttatacgttggtcgggattggcgcggcggcttattctccggcgaaatacggtattctgggcgaactgacgacgggtgataagctggtgaaagccaatggcctgatggaagcctctacgattgcggcgattttgctcggttccgtcgcgggcggcgtattggccgactggcatgtcatcgccgcgctggttgcctgcgcgttggcctacgctggcgcagtggcggctaacctgtttatcccgaagcttgtggcggcgcgtccaggacaatcctggcggttgtcggcgatgacgcgtagtttcttcagcgcttgcgttgtcctttggcgtaacggtgaaacgcgtttttcgctggtggggaccgggctattctggggcgcaggcgtgacgctgcgttttctgctggtgctgtgggtgccagtggcgctgggcattacggataacgccacgccgacttacctgaacgccatggtggcggtaggcattgtggtcggcgcgggcgcggcggcaaaactggtgacgctggagaccgtatcgcgctgtatgcccgccgggattttgattggcgttgtggttgcgatcttctcattacagcacgcattgctgcctgcttatgccttgttgctgttgataggtatgctgggcggcttttttgtggtgccgctcaacgccttgctccaggagcgcggtaagaagagcgttggtgccgggaatgccattgccgtacaaaatctgggcgagaatagcgccatgctattaatgctgggactgtactcgctggcggtgctggttggcgttccggcagtggcgataggtatcggctttggcgtgctgttcgcgctggcgatcgcggcgctgtggatctggcagcgccggcaggcatcatactga

SEQ ID NO: 368778 - DNA, 2160 bp, Salmonella enterica
atgctgtttggatttttccgtaacctgtttcgcgtgctttatcgtgtgcgcgtcactggcgatgtccgggcgctacaggggaaccgggtcttaattacccccaatcacgtttcatttatcgatggtatgctactggcgctgtttttgccggtacggcctgtctttgcggtatatacctccatcagccagcaatggtatatgcgctggttaacgccgctgatcgattttgtgccgctcgatcccactaaacccatgtccattaaacacctggtgcgtctggtggaacaggggcgtccagtggtgattttcccggaagggcggatttccgtgaccggttcgctgatgaaaatttatgacggcgcaggctttgtggcggcaaaatcgggcgcaaccgtcattccgctccgcattgacggcgcggagcttacccctttcagtcgcctgaaaggtctggttaaacggcgcttattcccccgcattcagcttcatattttaccgccgacgcaaataccgatgccggaagcgccgcgcgcgcgcgacagacgtaagatagcgggtgagatgctgcaccagatcatgatggaagcgcgtatggcggtgcgcccgcgcgagacgttatacgaatcgttgctggcggcgcaatatcgttacggcgcgggtaaaaactgtattgaggacattaactttacgccggatacgtatcgtaagttactgaccaagacgctctttgttggccggattctggaaaagtacagcgttgagggcgagaaaattggtttaatgctgccgaatgccgccatcagcgcggcggtgattttcggcgcggtttctcgtcgccgcattccggccatgatgaactacacagcgggggtaaaagggctgaccagcgcgattaccgcggcggaaattaaaacgatttttacctcccgccagttcctcgataaaggtaaattgtggcacctgccggagcagctaacgcaggttcgctgggtttacctggaagatttaaaagcggacgtcacacccgccgacaagctgtggatttttgcccacctcctggcgccgcgactggcgcaggtaaaacagcagccggaagacgcggcgatcattctttttacctccggctcggaagggcacccgaaaggggtggtgcacagccataaaagcattctggcgaacgtcgagcagataaaaacgattgcggatttcaccgccaatgaccgttttatgtcggcgctgccgctctttcactcgttcggtttgacggtgggcctgtttacgccgttgttgaccggcgcggaagtgtttctttatccaagtccgctgcactaccgcattgtgccggaactggtctatgaccgtaactgtaccgtgttgtttggtacgtcaaccttcctcggcaactatgcgcgctttgccaatccgtatgatttttatcgcctgcgctatgtggtggccggtgcggaaaaacttcaggagagcaccaaacaactgtggcaggataaattcggtctgcgcattcttgagggctacggggtaacggaatgcgcgccagtagtctcgattaacgtgccgatggcggctaagcctggcactgttggccgcattctgcctggcatggacgcgcgtctgctggcggtgcccggtattgaaaacggcggtcggctacagctgaaagggccgaatatcatgaatggctatctgcgcgtggaaaaaccgggcgtgctggaggtgccgtcggcggaaaacgccagaggcgaaaccgagcgcgggtggtacgacacgggcgatattgtacgcttcgatgaaaatggttttgtgcagattcaggggcgcgcgaaacgctttgcgaaaattgctggcgaaatggtctcgctggagatggtcgagcaactggcgcttggcgtttcggcggacaaaatgcacgctaccgccattaaaagtgatgccagcaaaggtgaagcgctggtactgtttacgactgacagcgaactcacccgagaaaagttacagcactatgctcgtgaacacggtattccggaacttgccgtcccgcgtgatatccgttatctgaagcagcttcccttgcttggcagcgggaaacccgattttgtgacgctgaaaagttgggtggatgcgccggaacaacatcatgagtga

SEQ ID NO: 368779 - DNA, 1029 bp, Salmonella enterica
atggcgaccataaaagatgtagcccgactggccggtgtttcagtcgccaccgtttctcgcgttattaacgattcgccaaaagccagcgaagcgtcccggctggcggtgaccagcgcaatggagtccctgagctatcaccctaacgccaacgcgcgcgcgctggcacagcaggcaacggaaaccctcggtctggtggtcggcgacgtttccgatccttttttcggcgcgatggtgaaagccgttgaacaggtggcgtatcacaccggcaattttttactgattggcaacgggtatcataacgaacaaaaagagcgtcaggctattgaacagttgattcgtcatcgttgcgcagcgttagtggtacacgccaaaatgattccggatgcggacctggcctcattaatgaagcaaatccccggcatggtgctgattaaccgcattttaccggggttagaacaccgctgtgtcgcgctggatgaccgttacggggcatggctggcgacccggcatctgatccagcaaggtcatacgcgtattgggtatatctgttccaatcacactatctctgatgccgaagatcgcctgaggggctattacgatgcgctggcggaaagccatatcccggctaacgatcggctggtgacgttcggcgaaccggatgaaagcggcggcgagcaggcgatgactgagttattaggccgcggcagacattttaccgcggtggcctgctataacgactcgatggcggccggcgcgatgggagtattaaatgataatggcgtgggggtgccgggcgaagtatcgctcatcggttttgatgatgtactggtctcacgctatgtgcgtccccgactgaccaccattcggtatccgatcgtcaccatggcgacacaggcggcggagctggcgttagcgttggcggggaaatgccctacgccagaagtaactcatgtatttagtccgacactggtacgccgacattcggtatccacgccgacggataccgggcacctgtcgacaaccgattaa

SEQ ID NO: 368780 - DNA, 1020 bp, Salmonella enterica
atggcgacaatgctggatgtttcccgccatgcgggcgtatcaaaggccaccgtctcacgagtgctgaatgggacggggcaggtaaaagaaagcacgcgccagaaagtgtttacggcgatgcaggctctgggctatcgccccaacctgctggcacgctcgctggcgaatcgcaccagcaacagcatcggtctggtcgtctctacgtttgacggcttctatttcggcagtttgttgcgccgggcgtcgcgccaggcggagtttcataacaagcagttgatcgtcaccgatggtcacgatacgccggaacgagagcagaaagccgtacaaatgttggccgacagacagtgcgacgctattattctttacactcgctatatggatgagccggcgattttgtcgttgattgacgccacggaaatgccgctggtgattattaatcgcaacgtcactcaggcccgcgatcgcgctattttcttcgagcaggagacggcggcattccaggcggtggaatacctgattacgcagggccatcgcgatatcgcctgtattacgctgcctgttcatactcccactggcacatcacgcgtagcgggttatcgcaaggcgctggaaaagtatggtattccctggcaaccggcaaaagtgaaatacggcgattacacgctgacgcgcggctatgacgcctgccgggaattactggaggaaggcgtcacgtttagcgcgctattcgcctgtaatgatgacacggcgctgggcgcggcaaaagcgctgcgccaggccggattacgcatcccgcaggatgtgtcgctgtttggttttgacgatgcgccgggcgcaacctggcttgaaccggggctttcaacagtctatttacccatcgaggatatgatagccaccgcgatcgatcaggccgttcgcctggcgaacagcgagccggtcgccccgatcccgccctttaccggcacgctgattctgcgcgagtccgtcgccgcgggcccgttttttcaacgtccggcctaa

SEQ ID NO: 368781 - DNA, 1263 bp, Salmonella enterica
atgtcattgccgcattattacgctgaaactgaccttaacgctgaaaatttgctcagattgcctgctgaattcggctgtccggtctgggtctatgacgcgcacattattcgccgtcagatagccgccctgcagcagtttgacgtcgtgcgttttgcgcaaaaagcctgttcgaacattcatatcctgcgcttaatgcgcgcgcagggcgtcaaggtggattctgtttcattgggggagatcgaacgtgcgctggcggcgggctacgatccgcaaacgtgccctgatgatatcgtttttaccgccgatgtgattgacgccgccacgctggcgcgcgtcagcgaactgcatattccggtcaatgccggctcggtagatatgctgacgcagcttggtcaggtttcgcctgggcatcgcgtctggttgcgcgtgaatcctggctttggtcacggccacagccagaaaaccaacaccgggggcgaaaacagcaaacacggcatctggcatagcgatcttccggcggcgctggcggtaatgcagaaataccgactgaaacttgtcggtatccatatgcacattggttccggcgtcgattatggccatctggagcaggtttgcggcgcgatggtacgccaggtgctggaatgtggtcaggatgtggaggcgatttcggcaggcggcggactctcgataccttatcgtgagggagaagagcccgttgatacgcgccattactatggtctgtggaacgcggcgcgcgagcaaatcgcccgccatctgggacatgcggtcaaacttgagatcgaacccggacgttttctggtggcgcaatcgggcgtgctggtaacgcaggtgcgtagcgtaaaacagatgggaagccgccatttcgtgctggtagatgcgggttttaacgatctgatgcgcccggcgatgtacggtagctatcaccgtatttcggcgctggcggcggatggtcgcgcgcttgaaaatggcccgtgggtcgagacggtggtcgccgggccgctatgcgaatcaggcgatgtttttacgcagcaggaagggggaatggttgaaacacgcgccttacctgcggtcatccccggcgattacctcgtattgcacgataccggcgcgtacggcgcgtctatgtcatcgaattacaacagccgcccgctcctgccggaagtactgtttgacaatggacaggcgcggctgatccgccgtcgtcagaccattgaagagctgttagcgctggagatgctctga

SEQ ID NO: 368782 - DNA, 936 bp, Salmonella enterica
atggctgccgttaatttacgtcacattgaaatttttcatgccgtaatgaccgccggaaatctcaccgaagcggcgcggctgctgcatacctcgcagcctaccgtcagtcgcgagctggcgcgttttgagaaagtgctgggattaacgctgtttgagcgcacacgtgggcgcttacatccgacggtgcaagggctacgcctgttcgaagaggtacaacgctcctggtatgggttggatcgcatcgtcagcgcggcggaaagtctgcgcgagttccgtcagggcgagctctctatcgcctgcctgccggtcttttcacaatcctttttgccgccgttactaccgccttttctggcgcgttatccggatgtcagcctgaatattgtgccgcaggagtcgccgttgctggaagagtggctctccgcccagcgccacgacttagggctgacggagacgcttcatgccccggcaggaacaacccgcaccgagttactaacgctaaatgaagtgtgcgtactgccctgcgaccatccgcttgccgccaaaacggtactgacgccagacgattttcagggggaaaactttatcagcctctcccgcctggacagctaccgacagttgttggatacgttatttgccgaacatcaggtgaagcgcagaatggtggtggaaacgcatagcgcggcctccgtctgcgcgatggtgcgcgccggggcgggcgtttcgatcgttaacccgctgaccgcgctgggctatgccgccagcggcgtcaccgtccgccgcttcagcattgacgtgccctttaccgtcagcctgattcgcccgctacaccgccccgcctccgcgctggttgacgccttcagtaagcatttacaaacgcatctttcgcgcctggtcgaaccgctggaggttattctggggccgatgacgaaagcataa

SEQ ID NO: 368783 - DNA, 708 bp, Salmonella enterica
gtgaaaacgatcggactgttgggggggatgagctgggaatcgactatcccttattaccgtttaatcaatgaaggcattaaacagcagctgggaggcctgcactcggcgagcttactgctgcatagcgtagatttccacgatattgaagtatgtcaacgccgcggcgagtgggataaagcgggcgatatcctggcgcaggccgcgcaggggttacagcaggcgggcgcagaaggcattgtgctgtgtaccaacaccatgcataaaatcgcgcacgttattgaatctcgttgttctctgcctttcctacacatcgcggatgctaccgggcgagctatcgcccgtcaggggttgcatcgcgtggcgctattagggacccgctatacgatggagcaggatttttatcgcgggcggctggaacagcaatttgcgattgagaccatcgtgccggaggcggacgatcgggcgcgtatcaatcaggtcatttttgacgagctctgtcaggggacattcaccgacgcgtcgcgccactattatttacaggttatcgaacaactggctgcgcaaggcgcgcagggcgttatttttggctgcactgaaataggtttgcttgttccccagacgcaaagcgcgctaccggttttcgataccacggcaattcatgctgcagatgccgtgagctttatgctttcgtcatcggccccagaataa

SEQ ID NO: 368784 - DNA, 1419 bp, Salmonella enterica
atggtctctattaatcatgactctgctttaacgccgcgttcgcttcgcgacacacgacgtatgaatatgtttgtttcggtttctgcagcggtagcgggactgttatttggtctggatatcggcgttatcgccggggcgctgccttttattaccgaccatttcgtactgaccagccggctgcaggaatgggtcgtcagcagcatgatgcttggcgcggcaattggcgcattatttaacggctggctttcattccggctggggcgtaagtatagcctgatggctggcgcgattttgttcgtgctcggctcgctggggtcggcgtttgcttccagcgtggaagtattgattggcgcccgcgtgatactgggcgtagcagtagggattgcctcctataccgcgccgctttatctctctgaaatggctagcgaaaatgttcgcggcaaaatgatcagtatgtatcaactgatggtgacgttaggcattgtgctggcttttttatccgatacggcattcagctacagcggcaactggcgcgcgatgttgggcgtgctggcgctgcctgcggtgttgctcattattctcgtggtattcctgccgaatagtccgcgttggctggcgcaaaaaggtcgccatattgaagcggaagaggtgctgcgtatgctgcgcgatacctcggaaaaagcccgtgatgaactgaatgaaattcgggaaagcctcaaactcaagcagggagggtgggcattatttaaagctaaccgcaatgttcgccgcgccgtgttcctcggtatgctgctacaggcaatgcagcagttcaccggcatgaacatcattatgtactatgcgccgcgcatttttaaaatggccggctttaccaccacggaacagcaaatgatcgccacgctggtggtcggactgacttttatgttcgcgacgtttatcgccgtctttacggtcgataaggccgggcgtaaaccggcgttaaaaatcggtttcagcgtaatggcgttagggacattggtgttgggctactgcctgatgcagtttgataacggtacggcatcaagcggtctctcctggctttccgttgggatgacgatgatgtgtatcgccggttacgcgatgagcgccgctccggtggtgtggatactgtgttcggaaatccagccgctgaaatgccgtgattttggcattacctgttcaaccacgacaaactgggtatcgaacatgatcatcggcgcgacattcctgacactgttggacagcattggcgcggcaggtacattctggctctacaccgcgctgaatatcgcttttatcggcatcactttctggctgattccggaaaccaaaaatgtcaccctggagcacatcgaacgcaagctgatggcgggcgagaagctaagaaatattggcgtgtaa

SEQ ID NO: 368785 - DNA, 762 bp, Salmonella enterica
atgattttgaatgcattttctcttgaaggtaaagtcgcggttgtgacggggtgcgataccggattggggcagggaatggcgttagggctggcggaagcgggctgtgacattgtcggtattaacattgttgaaccgacggaaactattgcgcgcgtcaccgctctgggacgtcgttttttaagcctgacagccgatctgcgtcaaatcgatggtattccggcattactggaacgggcggtggcagaatacggtcatattgatattctggtgaataacgcgggtttaatccgtcgtgaagatgcgattgatttcacggaaaaagactgggatgacgtcatgaacctgaacatcaagagcgtgttctttatgtctcaggcggcggcaaaacattttattgcccagggcaacggcggcaaaattattaatatcgcgtctatgctttccttccagggcggcattcgcgttccgtcttataccgcgtcgaaaagcggcgtaatgggaataacgcgtctgatggcgaacgagtgggcgaaacacaatatcaatgtaaacgccatcgcgccgggctatatgtccacgaataatacccagcaattgcgcgctgatgcacaacgtagcgccgaaattctcgaccgtattccggctggacgttgggggctaccgggcgatttaatgggtccggtagtcttcctggcatccagcgccgctgattatgttaacggctataccatagcggtagatggcggttggctggcgcgttaa

SEQ ID NO: 368786 - DNA, 912 bp, Salmonella enterica
atgatgccgttaaataaatcaaaacagtgttttgaattttatgccattgcgatcgatttatcattggagggaaaagtggacgtaaggcaaagcatccatagcgagcacgctaaaacgctggacacccaggcgctgcgacgcgagtttttaatagaaaatatttttgtcgctgatgaatatacgatggtctacagccatatcgaccgtattattgtcggcggcattatgcccgtcagccattctgttgaaatcggcggagaggtgggtaaacagcttggcgtttcccggttactggaccgccgcgagctgggcgtcattaatattggcggcgcgggcgccattatcgttgacgggcagcgccatgatattggtcatcgtgatgctctgtatattggtaaaggggcgaaagagctggtcttcgtcagcaatgaggcgagcagaccggcgaagttttattacaactgcgcgccagcgcataccgcttatccgacgaaaaaagtgtcgcctgccgacgttgcgcccgtcaccttaggcgataacctcaccagtaaccgtcgcaccatcaataaatacttcgtaccggatgtactggaaacctgtcagctcagtatgggactcaccgaactggcgcccggtaatctatggaacaccatgccatgccatacccatgagcgccgtatggaagtttacctctatttcaatatggaagaggacagttgcgttttccatatgatggggcagcctcaggaaacccgtcatattgtgatgcgtaatgaacaggcggttatttccccaagctggtcaatacattctggcgttggcaccaaagcctatacgtttatttggggcatggtgggagaaaatcaggtcttcgatgacatggatcacgttgcggtacaagatctgcgctag

SEQ ID NO: 368787 - DNA, 1179 bp, Salmonella enterica
atgaaagaggttgtgatagtgggggctttacggacacccatcggctgttttcagggaacgctggcccgtcattccgccgtcgagctggggagcatggtcgtaaaagcgttaattgagcgcaccggcgtggacgctaacgctatcgatgaggtcatcctcggtcaggtgctgacggctggcgccgggcagaatccggcgcgccagtcagccatcaaaggagggctgccgactaccgtttccgccattactattaatgacgtttgtggttccggtttaaaagcgttgcacctggcgacgcaggctattcagtgcggcgaagcggacattgttattgcgggcgggcaggagaatatgagccgtgcgccgcatgtcctcaatgacagccgtaccggcgcgttgcctgatgccgacaatctggtggatagtctggtacatgatggcttatgggatgccttcaacgattatcacattggcgtgacggcagaaaacctggcgcgggaatatggcatcagccgcgagttacaggatgcttatgcgctcagttcgcagcaaaaagccagggccgcgattgataccgggcgttttaaagatgagattgtccccatcgtcacgcaacgtaatgggcagaccgcaattgtcgatacggatgaacaaccgcgggccgacgccagtgcggaggggttagccctgctgcatccggcgtttgatagtttaggttcggtgacggcgggtaatgcctcctcaatcaacgatggcgccgccgcggtgatgatgatgagcgaggcgaaagcccaggcgctggggctgccggtgctggcgcgcatccgcgcgtttgccagcgtcggcgtcgatcctgcgctaatggggattgcgccggtatatgctacccggcgctgtctggagcgtgccggctggcaactgacggaggtcgaccttatcgaagccaacgaagcgtttgccgcccaggcgttgtcggtaggaaaaatgctggaatgggatgagcgacgggtaaacgttaatggcggcgcgattgcgctggggcatcccattggcgcttccggttgtcgaattctggtttcactggtgcacgaaatggttaaacgcgacgcgcgaaaaggtctggcgacgctgtgtatcggtggcggccagggcgttgctttaaccattgaacgcgactga

SEQ ID NO: 368788 - DNA, 864 bp, Salmonella enterica
atgcgttactcacctgaagcgttaatggcatttgttgagaccgtctcttgcggttcgttttctgcggcggcgcgccgcctgcgtaaaagccagtccaccattagtaccgccattgcgcatctggaggcggatctgggattttcattatttgatcgatcttcgcgccagcccgttctgaccgaagaaggaaaacgggtgcttagctatgttcaggctattttatcggcgagcgatcgtttggatgaggtggcgctgacgttatccggcgagacggaggcaagactcacgttcgtcctctctgataccctgcaccctgacagtctggaagagttaatggcgcagtttgatcgtcaatttccgcataccgagtttgaatgcttgatcggagaaaatgatgatgtcatcgacctgttgcaaaaagggcgcgcccagataggcctgattgaagcgcgtgatgactatcccacagacattggcgcgacgcgtctgcctgttcaaagctggatgggggtttatgtggcgaccacgcatccgttggcgtcgcagacgaacctgcaatgggagcaactgcatacctggcgcgagctgcgtctgaatacctaccttgaatctaatgccaacattacgcgcggcccggcctggtcagcgccaaactatttattactgttgagcatggcggttcagggatttggctggtgcgtattgccctgcgcgctggtggaagagtttgcggcggaaaaaccgctggcccagctggaagttcctggctggccgagggcgattgctattgatttgctgtggaacaagaagacgccgcccggaacggcagggaactggcttcgctaccatttgcagcagaaataa

SEQ ID NO: 368789 - DNA, 456 bp, Salmonella enterica
atgcaacatgacgccatacaacgtcgctcgctgccggagcgtattttccatgctgtctgttttgaaggtattgcgactgcgatactggcgccaacgaccgcctggctaatgcagcgctcggtgctagagatgggcggcctgacgatattgctggcaacgacggccatgatctggaatatcatttataacgctctgtttgatcgactgtggcctgcgcatcaggtgagacgaaccgccaaagtgcgcgcactccatgcgttaggatttgaaagtgggtttattgtcattggcgtgagtattgtcgcctgggtactgaatgtcagcctgctacaagcattcaccctggaaattggtttcttcctgttctttttgccgtacacgatgctgtacaactgggcatacgatgttttacgccaacgaatagtgactcgccgccaacagcgcgttagtgcatga

SEQ ID NO: 368790 - DNA, 1230 bp, Salmonella enterica
atgtctaaaatttggtcaaaagatgagactctctggagttttgcattatacggaacggctgtaggcgcaggcactcttttccttcccatccagttgggatcggcaggcgcaatcgtgctatttattaccgcgctggtcgcctggcctctgacatactggccgcataaggcgctgtgtcagtttattctttcctcaaagacttctgccggtgagggaattactggcgccgttactcattattacggcaagaaaatcggcagtattattaccacgctttattttattgcgttttttgtcgtggtattaatttatgcggtggcgattaccaattccctgacagagcaattagcgaagcatattcagatagatattcgcatccggatggcagttagcttcggcgtagtacttatcctgaatatgattttcttaatgggaagacatgccactcttcgcgtaatgggctttttagtctttccacttatcgcttacttcttgttcctttcgctctacttaaccggaagctggcaaccctcgttactgaccgggcagatgtctttggatagtcacacgttgcaccaggtatggatttctattccggtgatggtttttgcttttagccatacgcccattatttcgacgtttgccatcgacagacgggaaaattttggcgatcaggccatggataaatgcaaaaagatcatgaaggtcgcctacctgattatctgcctgagcgtgctattctttgtctttagctgcctgctctccattccgccgtcatacattgaagacgcgcgcaacgaaggcgttaccatcctttccgcgctctcgatgatgcccaatgcgccggcctggctctctatttccggtattatcgttgccgtcgtggccatgtcgaaatctttcctcggcacctatttcggcgtcatcgagggcgcaaccgaaatggtaagaaccaccctacagcaggttggcgtgaaaaaaagccgggcgttcaatcgcgcgctgtctatcatgctggtttccgggattacgtttattatttgctgtattaacccgaatgccatctctatgatttatgccattagcggcccgctcattgcgatgattctgtttattatgcccacgttgtcaacgtacctgataccggcattgaacccctaccgttcagtaggtaatttcattacgttggtcgtcggtttactttgcgtatcggtgatgtttttcggctaa

SEQ ID NO: 368791 - DNA, 273 bp, Salmonella enterica
atgtcacataccatccgggacaaacaaaagcttaaagccagaaccagcaagattcaggggcaggtgatagcgctaaaaaaaatgctggatgaaccgcatgaatgcgcggccgtgttacaacagatcgcggcgattcgcggcgcggtaaatggcttaatgcgcgaggtgattaaagggcatctgaccgaacatatcgttcatcagagtgatgaagccagacgtgaagaagatctggacgtaatattaaaggtgctggattcttatataaaatag

SEQ ID NO: 368792 - DNA, 849 bp, Salmonella enterica
atgggtgaattttcgacacttcttcagcaaggaaacggctggttcttcattcccagcgccattttattaggtattttgcacgggcttgaaccagggcactccaaaactatgatggcggcttttattattgccattaaaggtacggttaaacaggccgtcatgctcggtctggcagcaacgctttctcataccgcgatcgtctggttaatcgcgctgggtgggatgtatcttagccgggcattcaccgcacaatcagtggaaccatggctgcagttaatttctgcgattattattctgagcaccgcgtgctggatgttctggcggacatggcgaggcgagcagcagtggctggcgggaaaccaccatcacgaccatgaccatgaccatgaccatgaccatgaccatgaccatgaccatgaccatgaccatcatggtcacatacatccggaaggtgcaacgtcaaaagcgtatcaggatgcccatgaacgcgcccatgctgccgatattcaacgccgttttgatggtcaaacagtgactaatggacagatcctgctgttcggcctgaccggagggcttatcccctgtccggctgcgatcaccgttttactgatttgtatccagcttaaagcgtttacgctgggcgccacgatggtactgagctttagtcttggcctggcattaacgctggtgacggtaggcgttggcgcggcgataagcgttcaacaggcagcaaagcgctggagtggtttttcgacgcttgcccggcgggcgccctatttttcgagcattctgattggtctggtcggcgtgtatatgggaattcatggctataccgggatcatgcagtaa

SEQ ID NO: 368793 - DNA, 759 bp, Salmonella enterica
atgacggaacataaccggatgccggcccggcagattatcgtttacggtgactgctggccggtgacgatcgccgtggcacacctggtccggagatttctgccgggctgcaactgtgaaaccgcatacagtctgcctgttctgttgcagcaattacgtcggaaaccggaggccatactgatactgtgtctgcgtccccgtgaacatctctttttgttctattccctgagacagatactgccggactacccggttatgattatcagcgatgagctgtttttcagcgaccgggtggtactgaaggtatacggcggcatcccggcgctgctggagcaggaactggcggagatacttattcggtggcggcgggatgaacagtgggccgggggcgcacgcctgcgcaggacaggagggctggacgcctttttgttatctccggatccggtgacgggctttctggaagtgccaccgatatttaacaatccgaagcggttgatgaactatatggatcagttgatgcaccgggagatactggcatgcggagtgagcctggcccagttacgcttgcttcaggaagtttaccgtggacgaggaaggttgtcagcgttgtgtggaaggctgaatacacaggagaagcaaatctggcaggacaaataccggttactggtgaagctgggaatgcggaaccgattacgggaactgctgtttggtacccggttttgtaaatcactgcagcgaactccgtttatcgctccgcaataa

SEQ ID NO: 368794 - DNA, 513 bp, Salmonella enterica
atgtgccctgataatacacacgcaaaaaagcagtaccttacccctggtaacgatattcattatcccggacagaccaaccatgatgcctgttttattccggaaagcgtccgccagtatgccgacgagcccctgtatatcattgtggcacactggtgcctgttgcagcagaactgggttcagcgtaaccagatagcagaggcgtttcacatcacggccagacgggccagctacctgattgcctatctgcgaagcaaaacatcgcgggtggtcagcatctgccgtcaccagaccctgcctaataaagcacgacgctatgagatttatgttatccgggttcttgacagtcccaccccgtccacgcgccgtgaaaaagccggaccgccgctggtatcaaaacgccgggtcggtaatggtgacaggtcgatggcaaatgaactgtggaaccggctgtgcagtaacagaaatgcggggaaaatcctgaaaaagaaggaggatgaggatgacggaacataa

SEQ ID NO: 368795 - DNA, 1077 bp, Salmonella enterica
atgacagaatggatttttaatctgaaaacaaaactgaccgtgctggtgatgatgttgtgctctttatgtgtgactaaagtgtatgcggttgagctaggtataaatgaatgtgcagtcacttccggtcagaatattaatttaagaagtataaatttgacaaccgatgattttaaacctggcacggattcggttatctatacaatcaatcaggatgcagtttttaaatgttacatgggatatgacacgcaatttccacagctggtatttaatcagggctacttcagtaaatttaccaagacactagatgcgatgggacttggattcagaatgtccattaaagaaacaggaaatgcttcaagtgctgtttcgttctcctgggatgaaataaagagtactcagtcaggaaatgagttacgaaaagagtttggcacaaaactacctgttgggactacagaacgaaaagtaaggataacactggatttcttatatacaaaagcatattcagagagtagtgcagttacagcttttacggggataagtaatgttttaaatattgtacctttttcttattctttgagacaaaacggatttattttatctggttttaatgtgagaattctcagaaacggattgggtaaagttgacattgttccattacaggtcaactttgggcatatttatacgacttatgaaccttcacagaccagacaggcaaattttacagtgatcgccacgcaggttttacgaccggctatgggacaggaattcacgatccctctggccatcaccttcgggaaaggtgcactgacacaggataccgggcaaactctgaatcttgtcagcctggatggccccaacaaaggtcagcctaatggactccggctttcaataaaagatgataaaggaaaagagattacttttgataaacaagaagtactgggggatattactattacaggagctgtcaccggtaatgtgtcgaaggtatatactgcagtaataaccccgaccccggggggaagtgtaaagacaggaacgttttctgctgcaatacccgttactgttacctataactaa

SEQ ID NO: 368796 - DNA, 744 bp, Salmonella enterica
gtgaaaaacagcagaagaagccgtgtgattttactcgcactggcggcagcatggagccagtacagcccggcggccgtcaatgttgaccggacccgtattatcatggatgcgccgcagaaaacggtggccatcacgctgaataacgatgacaaaaccacgccgttcctggcgcagtcctgggtgacggacgctgacggggtgagaaccgatgcgctgatggcgctgccgccgctgcagcgtattgatgccggacagaaatcccaggtccgcatcacccaggttcgcgggctgacagataagctccctcaggacagggaaacactgttctggtttaacgtgcggggcgttcccccgaagccagaagacgacaacgttctgcaactggccatgcagagccagctgaaactgttttaccgtccgaaagccattatcagaagcagcagtgaccagccggaaagaaagctgactgctgagcggaatgcgggacatctgaccctcagaaacccgacgccgtactacatcactgtggcgtggctgggagcagaccgtagccacaggctcagcggtttccgcgagggcgtgatggtaccgcccctggggaacctgcctttaaaggctgttctgccggcagaaacccggacgctgtgggtggggtatattgatgattacgggggactgcagatgaatcgctacacctgcgatgccctgaactgcgcgtttaaggacgcaggggcgacatcatga

SEQ ID NO: 368797 - DNA, 2484 bp, Salmonella enterica
atgaaaattacccggcttgccattctgattaccctgacattttccgtcctgaagtcgcaggccacggagttcaatgccagcctgctggacagcgggaacctgtctaacgtggacctcacggccttcagccgcgaggggtatgtggcgcccggtaactatattctcgatatctggctcaatgaccagccggtacgggaacagtatccggtcagggttgtaccggttgccggacgcgacgcggccgtcatctgtgtgacaacagacatggtggccatgctgggtcttaaggataagattattcatggcctgaaacccgttaccggtatcccggacgggcaatgccttgagctgcgctccgctgacagtcaggtacggtacagcgctgaaaatcagcgtctgaccttcattattccccaggcctggatgcgttatcaggacccggactgggtgcccccttcacgctggagcgacggcgtcaccgccggcctgcttgattacagcctgatggtcaaccgctatatgccgcagcagggggaaacctctaccagctacagcctctacggcaccgccgggtttaatctcggcgcctggcgattgcggagcgattaccagtacagccgttttgacagtgggcagggcgcatcacagtccgatttttatctgccgcagacgtatctgttccgtgccttgccagcactgcgctcaaaactgacgctcggacagacgtacctcagctccgctatttttgactccttccgctttgccgggctcactttggccagcgatgagcgcatgctgccgccctctcttcaggggtatgccccgaaaattagcggcattgcgaacagtaatgcacaggtcaccgtcagccagaatggtcgcattctgtaccagacccgggtgtcgccggggccttttgagcttcccgacctgagccagaatatcagcggcaacctggatgtcagcgtccgggaaagcgacggtagcgtccggacctggcaggtcaacacggccagcgtcccctttatggcacgccagggacaggttcgctataaggtggccgccggacgtccgctgtacggcgggacgcataacaacagcacggtcagccctgactttctgctcggggaggccacctggggagcatttaacaacacgtcgctgtatggcggcctcattgcctccaccggcgactaccagtccgcggcgctcgggatcggccagaatatggggctgttgggcgctctgtctgcggacgtcacccgctcagatgcgcggttgccgcatgggcagaagcagtccggttacagctaccgtatcaactatgccaaaacgtttgataaaaccggcagtaccctggcgttcgtcggataccgcttctcggaccgccattttctgtccatgccggagtacctgcagcgtcggaccactgacggcggcgatgcatggcatgaaaaacagagctacaccgtgacttatagccagtccgttccggtactcaacatgagcgcggccctctcggtaagccggctcaattactggaacgcacagtccaacaataactacatgctcagcctcaacaaggtgttcagtctcggcgaccttcagggactctcggcctcggtgtcgtttgcccgtaaccagtacaccggcgggggtagccagaaccaggtctacgccaccatcagtatcccgtggggagacagtcgccaggtgagttacagcgtacagaaagataaccggggcggcctgcagcagaccgtgaattacagcgatttccataacccggacactacatggaacatcagcgccggtcataaccgttatgacaccggcagcagcttcagcggcagcgtgcagagccgtctgccgtggggccaggcggcagcggacgccaccctgcagcccggacagtaccgcagcctgggcctgagctggtacggctcggtgactgccaccgcccacggtgccgctttcagccagtcgatggccgggaatgagccccgcatgatgatagataccggagacgtggccggtgtgccggtgaacggcaacagcggggtgaccaaccgcttcggggtgggcgtggtgagcgccggcagcagctatcgccgcagcgatatttcggttgatgtggccgccctgccggaggacgtggacgtcagcagctccgtcatcagtcaggtactgacggagggcgcggtgggctaccggaagattgacgccagccagggggagcaggtgctcggtcatatccggctggctgatggcgcaagtccgccgtttggcgccctggtggtgtccgggaaaaccggcagaaccgcggggatggtcggagatggcggtctggcctacctgacaggtctcagcggggaagaccgccggaccctgaatgtgtcctgggatggccgggtgcagtgcagactcaccctgccggaaacggtgacactcagccgggggccgctgttactgccctgcagataa

SEQ ID NO: 368798 - DNA, 582 bp, Salmonella enterica
atgcgtaataaaataatacttgccatggcggctgccggtatgatgtatggcgcttctgtatatgcagtcgatccacccacagcaggcccgttcggctcaggtaaaattaccttcactggcaccatcaccaactccccctgtgatatcgcaccgggcgacgatgcgatcaccgttccgtttggacagatttcttaccgtaaactgaataccgccgacgcaactacggaatcaaaaccgttcaccattcatctacagaactgtgctttcgatccgaataccccggacacagctggctccgcagggaaaatgtccaaagtaaccgtatctttctctggcgcagcgaataccagcaaaaaggcttacaccaccagcggtatcgcacagcatgttggtgtccagctactgaagagtgacaacgccacaattatcgatcccaacaccccgatgccggatggcgacgctcagcaactgcaggccggaaacaacgaactcaacttctttgcccgactaatagcactggataatggcgtcactcccggtgacttcaacgcatccgtcacctacaccctgaaatacctgtga

SEQ ID NO: 368799 - DNA, 633 bp, Salmonella enterica
atgaaaagccatattatgccaggcgttgcgctgatggttatcctgttttcaggaaatattatggccgcaacaaacatgactgataacgttactctgaataatgacaagatatccggacaggcctggcaggccatgcgtgatatcggaatgtcgcgattcgagttgtttaatggtcgcacccaaaaggcggaacaactggctgcgcaagcagaaaaactcctgaacgatgacagcactgactggaatctgtatgtcaaatcagataaaaaagccccagttgaaggagaccactatattcggataaattcatcgattacggtagcagaagattatctccctgcgggccagaaaaatgatgctattaataaagcaaaccagaaaatgaaagaaggagataaaaaagggactatagaggccctgaaactagcaggcgtcagtgttattgaaaatcaggaactcattcctcttcagcaaacccgtaaggatgtgaccacagcgctttccttgatgaacgaaggaaaatactatcaggcaggtctattactgaaatcagctcaggatggcatagttgtagactctcagtcagttcaggaatcacccacgcactccgtgcagcacgacgccgcgcattaa

SEQ ID NO: 368800 - DNA, 537 bp, Salmonella enterica
atgaacaaaatgctattagccggaagtgccggtattgttctgctgtctgctgcagccagtccggtatgggcagacgataatgccagtacattttcacttggatacgcccagtcccatactaatcacgccgggacgttgcgtggggtacggctggcaaacaactatgaaatgtcaccggactgggggctgacaacctcatttgcatggctaaatggaagccagcgctattccgatgaaagcagtaatggtcgtgtaacaacccgttattactccctgcttgcaggcccctcatggaaaataaataaccagttaagtctgtatagtcaagtgggccccgtattattgcatcagcgtgatcacgggataaatgagtctgacagtaaggtcggatatggttattctgctggcgtggcttataccccggtcagtagtgtcgctataactctgggttatgagggagcggattttgatgctacccataacagcggaagccttaatagcaatggttttaatcttggcgtgggttaccggttctga

SEQ ID NO: 368801 - DNA, 366 bp, Salmonella enterica
atgccgttactgcccgataactgccgccccccccctctccatagccgtttcctgcaacttaaatcacagacgttgatttaccaggccgatatgccttctttcccgttatatatccttcatacttcaagttgcttatgtgttggctacggattactcggtccatccatgggcctcgccctgacgggccgtcgcacgcgacgttcaaatctgctcccggcagaattgtcgctcaccccagtcacagagttatctatgctcccggggactcactcccttgccacctttaagcaactcgaattattttgggtatatatcagtgaacttctatttttgtcagtttttatttttcagtttatttattattaa

SEQ ID NO: 368802 - DNA, 399 bp, Salmonella enterica
atgctgaaattcatgcttgataccaatacctgtattttcaccatcaaaaataagcccgaacacatcagagaacgcttcaacctcaatacatcccgaatgtgtatcagctccatcaccttaatggagctgatttacggtgctgaaaaaagcctggcgccggagcgtaatcttgccgtcgtggagggatttatctcccgccttgaggttctggattacgatacacaggcagcgatacataccggtcaaatccgtgccgaactggcccgcaagggaacacctgtcgggccttatgaccagatgattgctggccatgccggtagccgcggactggtcgtcgtcacaaacaatctccgcgaatttgaacgcattccgggtatccgaatcgaagactggtgctaa

SEQ ID NO: 368803 - DNA, 228 bp, Salmonella enterica
atgcacacaacacttttttttagtaaccggacccaggcagtcagattgcctaaatcgatatcctttccggaggatgtgaaacatgtcgaaatcattgcggttggtagaagcagaatcattactccagtcggagaatcctgggacagctggttcgatggcgaaggcgccagtactgattttatgagtaccagagaacaacccgcagtacaggaacgggaaggattttga

SEQ ID NO: 368804 - DNA, 261 bp, Salmonella enterica
atgcaaacaatgcataaaaaacatatgtgccgatggcttctgcccggtttgctcggtctggctctgtgtgcgccagtaccacatacttacgcagccatcattgaggcaggattttatccggaaggtacagatctccagcttgttcttaagataattgagaccgcgcgacaggaaatccgtctgatggactattccttcacctcttgggaggtggtccggttcgaacattcagtgagtacaaaattctccatgtcaaagtga

SEQ ID NO: 368805 - DNA, 801 bp, Salmonella enterica
atgaaggtaaatacatggacaattttgcttatgtcggcgcatctgacggcctgtgccgtccctggcacagaaaaatatcagaccagcatggacagcgttacggcagaaaaaataagccggattatccagtcggatgtcattccttataaaggcgaaaaccatggagaagttatcagccgcgtatcgtctgcttttctcggaacaccttatcaggcggatacgctcatcggtgggcccggcatccccgaagtccttgtagcgaatttcaacggcgtggactgctttacactggctgattacgttgaagccctggcccgcagcgataatcagaaatcgtttctgcataatcttgccaggactcgctacgccgcgggcaaagttgcttatctcagccgccggcacttcttctctgactggttcgccgcaacaccgcgtaatgcacgggatgtaacgccggatatcagccctgattatgtcgttgttgacaagcagcttaaccataaacctgatggcggcgagtacattcctggtctgggcatccatcctcgtaaaataaattacattcccggaagagccatcaaccagcaggtcatgaaccacctaaaaaacggggattatatcggtgtctactccccgcttgacgggctggacgtttcacatgtgggtatcgtagttcgccatgatgaacaggtgtggttcaggaacgcctcctcattggccgcaaacagaaaagtggtggatacaccgtttatggaatacatgcattccagaccgggcatcgttgtgttgcgggctgaatga

SEQ ID NO: 368806 - DNA, 759 bp, Salmonella enterica
atggttttgagcgcaggacgcctgaacaaaaatagcctgggtattgcggtgctgttatgcacagggctgctgctggcggggtgttccagtaattccggctcaggaacgtattccggctccgtctataccgttaagcgcggcgatacgttgtatcgtatatcgcgcgctacgggaaccagcgtgaaagaactggcccgactgaatggcatttctccgccttatactattgaggtggggcagcgaattaaagtgcgcggcagcgcaaagagtagcagttcaacacgcaaaaccagcaataaaacagcaacaaaaactgctgcggtcagaccgtcatcttcggtgccaaaatcctcctggccgccggtggggcagcgttgttgggtatggcctgctaacggtaaagtgattttaccttattccaccgcggagggcggaaataaggggatcgatattgcgggcgcgcgcggaacgcctgtttatgcggcgggagcgggtaaagttgtctatgtcgggaaccagctgcgcggttacggcaatctcatcatgattaagcacaatgaagattacattacggcttacgctcataatgacaccatgctggttaataatggacaaagcgttaaagcggggcaaaaaatcgctacgatgggcagcacggatgctgcatccgtaagactacacttccagattcgctaccgggcgacggccatcgatccgctgcgttatctgccgccgcaggggagtaaaccgaagtgctga

SEQ ID NO: 368807 - DNA, 546 bp, Salmonella enterica
atgactgaggaacatgtcgttttattggatgagcaggataagccttccggcacactggaaaagtatgcggctcatacgcttaatacgcctttgcatctggctttctcctgctggctatttaacgaagatggccagttgctggtaacacgacggtcgctgagcaagaaagcctggccaggcgtgtggacgaattcggtttgcggtcatccgcaacaaggcgaaaccaccgaagaggcgatcatccgccgttgtcggttcgaactcggcgtggaaattaccgatctcacccccgtctatccgcacttcagctatcgagcgacagatccaaacggtattgtggaaaatgaagtctgtccggtatttgccgcgcgggcaaccagtgtgttacaggttaacagcgaagaggtgatggactatcagtggagcgaatttaaaagcgtatggaaaagccttctcgctacgccgtgggcatttagcccgtggatggtcatgcaagcgtcagacgaacaagcgcgtgaacgactgctcaattactgccagcgttaa

SEQ ID NO: 368808 - DNA, 1518 bp, Salmonella enterica
atgtctgaacaaaacgcacagggcgctgacgaggtagtcgatcttaacaatgaaatgaaggcacgtcgcgagaagctggctgcactgcgtgagcagggtatcccgttcccgaacgatttccgtcgtgaccgtacctcagaccaactgcacgcagagtttgacgcgaaagaagctgaagaactggaagcgctgaatattgaagtgtccgtcgcgggccgtatgatgactcgccgtattatgggtaaggcctcttttgttaccctgcaagacgtaggcggccgcattcagctgtatgtggcgcgcgatgatctgccggaaggcgtttacaacgagcagttcaagaagtgggatcttggcgatatcctcggcgcgaaaggtaagctgttcaaaaccaaaaccggcgagctgtctatccactgcaccgaactgcgcctgctgacgaaagcgctgcgtccgttgccggataaattccacggcttgcaggaccaggaagcgcgctatcgccagcgttatctggatctcatctctaacgatgaatcccgtaacaccttcaaaacccgttcgaagatcctggccggtattcgccagtttatggttgctcgcggctttatggaagtcgaaaccccgatgatgcaggtgatcccaggcggcgcgtctgcccgtccgtttatcacccatcacaacgcgctggatctggacatgtacctgcgtatcgcgccggaactgtacctcaagcgtctggtggttggcggcttcgaacgcgtattcgaaattaaccgtaacttccgtaacgaaggcatctccgtgcgccataatcctgagttcaccatgatggaactctatatggcgtatgcggactacaaagacctgatcgagctgacggagtctctgttccgtacgctggcgcaggatgttctgggcaccacccaggttccgtacggtgatgaagtgtttgacttcggtaagccgttcgaaaaactgaccatgcgtgaagcgatcaagaaatatcgcccggaaacggatatggctgatctggacaacttcgattccgcgaaggcgattgctgaaagcatcggcattcacgtcgagaaaagctggggtctgggccgtatcgtcaccgagatctttgacgaagtcgctgaagcgcatctgattcagccgaccttcatcaccgaatatccggctgaagtgtctccgctggcgcgtcgtaatgatgtgaacccggaaatcactgaccgcttcgagttctttatcggcggtcgtgaaatcggtaatggctttagcgagttgaacgatgcggaagaccaggcgcagcgtttcctggatcaggttaatgcaaaagcggcgggcgacgacgaagccatgttctacgacgaagactacgtgacggcgctggaacacgggttaccgccgacagcgggtctgggaattggtatcgaccgtatggtgatgctgtttactaacagccacacgattcgcgacgttattctgttcccggcgatgcgtccggtgaaataa

SEQ ID NO: 368809 - DNA, 882 bp, Salmonella enterica
atgactcaggggctggacgacgtttccgggctgctggaactggcggtagaagctgacgacgaagagacgtttaacgaagccgtcgcggaactgaatacgctggaagagaaactggcgcagttggaattccgtcggatgttctccggcgagtacgatagcgccgattgctatctcgatattcaggccggttccggtggtactgaagcgcaggactgggccagcatgttgctgcgtatgtatctgcgttgggcggaagcgcgcggcttcaagacggaaatcattgaagaatcggaaggggaagtcgccggtattaagtccgcgactatcaaaatctccggcgaatatgcctatggctggctgcgcactgaaactggcgtacatcgtctggtgcgtaaaagcccgttcgactccggcggtcgccgtcatacctcgtttagctccgcgtttgtgtacccggaagtggacgacgatatcgatatcgacattaacccggcggatctgcgtatcgacgtctatcgcgcgtctggcgcaggcggtcagcacgttaaccgtacggaatccgccgtgcgtatcacccatattcccaccgggattgtgacgcagtgccagaacgaccgttcgcagcacaaaaacaaagaccaggccatgaagcagatgaaagcgaagctttatgaactggagatgcagaaaaagaacgctgaaaaacaggcgatggaagacactaagtccgatatcggctggggaagccagattcgttcctatgtcctggacgattcccgcattaaagacctgcgtactggggtggaaacccgcaatacacaggcggtactggacggtagtctggatcaatttatcgaagcaagtttgaaagcagggctatga

SEQ ID NO: 368810 - DNA, 1602 bp, Salmonella enterica
gtgaaaggaatgctgccctggcaacagcttagcggcatagataacgcggtggagatcctctacaacgcctttcgcgaaggtatccgcattattgttgttggcgattttgacgccgacggcgcgaccagtactgcgctaagcgtattgggaatgcgtgcgttgggatgtgacaacatcagttatctggtgcctaatcgctttgaggacggctacggtttaagcccggaagtggtcgatcaggcgaaggcgcgcggcgcgcagcttatcgtcaccgtagataacggcatctcatcccacgccggcgtagcgcatgcaaagacgttggggattccggtgatcgtgaccgatcaccacctgcctggcgatacattgccggaggccgaagcgattattaatcccaatctgcgcgactgcgaattcccgtctaagtcgctggcgggcgtcggcgtggcgttttacctgatgctggcgttgcgaacatttttgcgcgacaaaggatggttcgacgagcgcaacattgcgccgccgaatttggcggagctgctggatttagtggcgttgggaacggtagcagacgttgtgccgctggacgctaacaaccgtattctgacctggcaagggctaagtcgtattcgtgccgggaaatgccgtccgggaattaaagcgttgctggagatatcgaatcgcgatccgcagcagcttgccgccagtgatttaggcttcgcgttggggcctcgcctgaatgccgccggcaggctggatgatatgtccgttggcgtggcgttactgttgtgcgacaacctcggcgaagcgcgtgttctggccagcgagctggatgcgcttaaccagacgcgcaaagaaatagagcaggggatgcaggcggaagcgcttatcctgtgcgaaaagcttgagcgcagtagtgaaacgcttccgggcggtctggcgatgtatcatcctgaatggcaccagggcgtggtcggaattctggcgtcgcgcattaaagagcgttttcaccgcccggtgatcgcctttgcgcctgcgggcgacggcacgctaaaaggctcaggccgatcgattcaggggctgcatatgcgcgatgcgctggaacggctggataccctttaccctgatctgatgatcaagttcggcggccatgcgatggcggcgggattgtcgctggaagagcataaattcgagcagtttcagcaacggtttggcgagctggtgacggaatggctcgatcctgccctgttgcaaggcgaggtgatctccgatggtccattaagcgcggcggagatgtctatggaagtggcgcaactgttgcgggatgccggaccgtgggggcaaatgttcccggaaccgttattcgatggtcgtttccgtctgctacagcagcgtctggtgggcgagcgtcacctcaaggtgatggtggagcctgtcggcggcggcccgctgttggatggcatcgcatttaatattgatacgacctgttggccggataacggcgtgcgggaggtagaactggcttataaactggacattaacgagtttcgcggcaaccgtagtttacagattattatcgatgatatttggccgctatga

SEQ ID NO: 368811 - DNA, 714 bp, Salmonella enterica
atgaaaaagcgttttatgatgttcactttactggcggcggcgttttcaggcgtggcccatgcggatgatgcggctatccgtcagtcgctggctaagctgggcgttcagagtacggaaattcaggcctcgccagtggcagggatgaaaaccgtcctcactcacagcggcgtactgtacgtcactgatgacggcaaacatattattcaagggccgatgtatgacgtgagcggcgcgcatccggtaaacgtgacgaacaaactgctgatgagccagctaaatgcgctggaaaaagagatgatcgtctataaagcgccggatgagaaacatgtcattactgtttttaccgatatcacctgcggctattgtcataagctacatgaagagatgaaagattataacgcgctggggatcacggtacgttatctggccttcccgcgccaggggctggaaagccaggcggagcaggatatgaaatctatctggtgcgccaaagacaaaaacaaagcgtttgatgacgccatggcaggtaagggcgtgaaaccggcaagctgtgacgtgaacattgctgatcattatgcgttgggcgtgcagttgggcgtcagcggtacgccagccattgtattgagtaacggctatgtggtgcctggctatcagggaccgaaagagatgaaagcgtttcttgatgagcatcaaaaacagaccagtggtaaataa

SEQ ID NO: 368812 - DNA, 897 bp, Salmonella enterica
atggaacaggatttagcgcgtattgagcagtttctggatgccctgtggctggaacgaaatctggcggaaaatacattaagcgcgtatcgtcgcgatttatcgatggtcgttgcgtggttgcatcatcgcggaaaaacgcttgcgacggcgcaggctgatgatttacaaacgctattggctgaacgggtggagggcggatacaaagcgaccagctccgcacgcctgttaagcgctatgcggcgctttttccagcatctgtaccgtgaaaagtatcgtgaggatgatccgagcgcgcagttggcctcgcctaagcttccgcagcgtttaccgaaagatcttagcgaggcgcaggttgaacggctcttgcaggcgccgcttattgatcaacctttggagctgcgcgataaagctatgttggaagtgctgtatgccaccggtttgcgcgtgtcggaactggtggggctgacaatgagcgatatcagtctgcggcagggcgtggtgcgggttatcggtaaaggcaataaagagcggttggtgccgttaggtgaagaggcggtatattggctggaaacgtatctggagcatgggcgtccctggttactcaatggcgtatcgattgacgtattattccccagccagcgtgcgcagcagatgacgcggcagaccttctggcaccgtattaaacattatgcggtactggctggaatcgatagcgaaaaactatcgccgcatgttttacgtcacgctttcgccacgcatttgctgaatcacggtgccgacttgcgcgttgtacaaatgctacttgggcatagcgatctttcgacgacacaaatttatacgcatgtcgcaacggagcgtttgcgtcaacttcatcaacagcaccatccgcgggcatga

SEQ ID NO: 368813 - DNA, 522 bp, Salmonella enterica
atgaacatgggtcttttttacggttccagcacgtgctacaccgagatggccgcagagaaaattcgcgatatcctcggcccggagctggtgacattacataacctcaaggatgacgcccccgccttaatggagcagtacgacgtgctcattttaggcatccccacctgggattttggcgaaattcaggaggactgggaagccgtctgggagcaactggacgatctcaatctggaaggcaaaatcgttgcgctttacggtatgggcgaccagctcggctacggcgagtggttcctggatgcgctgggtatgttgcatgacaaacttgccctcaaaggcgttaaatttgtcggctactggcccacagaaggctacgaatttaccagcaataaaccggtcattgcggatgggcaactgtttgtcggcctggcgctggatgaaacgaaccagtacgatctcagcgatgagcgtatacagacctggtgtgaacaaattctcggcgaaatggccgaacactacgcctga

SEQ ID NO: 368814 - DNA, 414 bp, Salmonella enterica
gtggtcctgtggcaatctgatttacgcgtctcatggcgcgctcagtggatctcattgctcattcatgggctggttgccgcggtgattttattgatgccctggccgctgagttataccccgttatggatgatactactgtcgctggtcgtgtttgactgtgtacgtagccagcgcaggattaatacctgccagggagagatcaagctactcatggacgggcgcttacgctggcaggggcaggactggacgctcttgcgtccgccttggttactgaagagcgggatggtgttgcgtttacgcgcagagtctggacgtcatcagcatttatggctggcggcggatagcatggaagaagcggaatggcgtgagttgcgtcggatactgttacagcagccgatatcaggccaacactaa

SEQ ID NO: 368815 - DNA, 267 bp, Salmonella enterica
atggatattcacaataaagcacgtattcactgggcatgtcgtcgcggtatgcgcgaacttgatatttccatcatgccgttttttgaacatgagtacgatagtttaagtgatgaagaaaagcgtatttttgtccgtttgttgcagagtgacgacccggatttatttaactggttaatgaatcacggtaaaccggctgacgctgaactggaacagatggtccgactcattcagacacggaatcgggaacgtggtcctgtggcaatctga

SEQ ID NO: 368816 - DNA, 981 bp, Salmonella enterica
atggcttttatctcctttccaccacgtcatccttcatcgtcagcccgcctgccgctgacgctgatcgcgcttgacgactgggcgctgtcgaccattaccggcgtagacagtgaaaagtatattcagggccaggtcaccgctgacgtaagccagatgactgaacagcaacaccttctcgccgcccactgcgatgctaaaggtaagatgtggagcactctgcgcctgttccgtgagcgcgacggtttcgcctggattgaacgccgtagcgtgcgtgaagcgcaattaacggagctgaaaaagtacgccgtattttccaaagtagtcatcgcgccggatgacgaacgcgtattgcttggcgtggcaggttttcaggcccgcgcggcgctggctaatgtctttagcgaactgcccaatagcgaaaatcaggtggtcagagacggcgcctccacgctgctatggtttgaacatcctgcggaacgattcctgcttgtcaccgatgtcgcgacggctaacatgttaacggagaagttgcatggcgaagccgaactgaataacagtcaacagtggctggcgttggatattgaagcaggcattccggtgattgacgcggcgaacagcggtcagtttatcccccaggcgactaacctacaggcgctgggcggcatcagcttcaagaaaggctgctacaccggacaggagatggtcgcacgggcaaaattccgcggcgccaataaacgcgcgctttggttgctggcgggcaaagccagccgggtaccggaagcaggagaagatctggagctacagatgggcgagaactggcgtcgtaccggcgctattctggcggcgacgcagttggacgatggtcagttactggttcaggccgtcatgaataacgatttagaagccgaaagcgtcttccgcgttcgcgacgatgccaacaccctgcatatcgtcccgctgccctactcgctggaagagtga

SEQ ID NO: 368817 - DNA, 192 bp, Salmonella enterica
atgcccgtgccggatggcggcgctgtcgtaccttatccggcctacgagaacagcacgtgcgagcctgatggcgttgcgctatcaggctatccggcttttaacgtgatatcactcttccagcgagtagggcagcgggacgatatgcagggtgttggcatcgtcgcgaacgcggaagacgctttcggcttctaa

SEQ ID NO: 368818 - DNA, 660 bp, Salmonella enterica
atggtgcaaaaaccattaatgacgcagggatattcgctggctgaggaaatcgccaacagtattagccacggcattggattggtatttggtattgtcggcctggtgctgttgttggttcaggcggtagaggcgaatgcgggtatgacggctatcgccagctacagtttatatggcgggagcatgatcctgctttttcttgcctcaacgctttatcatgccattcctcatcagcgggcaaaaatctggttaaagaaatttgatcactgcgctatctatctgctcattgccggaacctatacgccatttctgctggtaggtctggattcgccgctggcgcgcggactaatgattgtgatctggagcctggcgctattcggtatcctcttcaagttgacgattgcgcaccgatttaaagtgctttcactggttacgtatctggcaatgggctggctgtcgctgatagtggtttatcagttggcgattaagctggcgataggcggcgtgacgctgctggcggtaggtggcgtcgtttactcgctaggcgtaattttctatgtttgcaaacgcataccttataaccacgccatctggcatggctttgtgctgggcggcagcgtgtgccacttcctggccatctatttgtatgtgggacaggcataa

SEQ ID NO: 368819 - DNA, 312 bp, Salmonella enterica
atgcagccaaacgacattactttctttcaacgtttccagaatgacattctggcagggcgtaaaaccatcactattcgtgatgcctccgagtcccactttaaagcaggcgatgtgctacgcgtggggcggttcgaagatgatggctatttttgcacaattgaagtgacaggaacgtcaactgtgacgctggatacgctgaacgaaaaacatgcgcaacaggaaaatatgtcgcttgatgagctgaaacgggtcattgctgaaatctatcccaaccagacgcaattttatgtgattgattttaaatgcctttga

SEQ ID NO: 368820 - DNA, 1434 bp, Salmonella enterica
atgagaaaactcaccttgccaaaagattttttatggggcggcgcggttgctgcacaccaggttgaaggcggctggaataaagacggtaaaggccccagcatctgcgacgtgctaaccggcggcgcacacggcgtgccacgcgaaatcacccagaatgtcgttgctggcaaatactatccgaaccacgaggcggtggatttttacggacattacaaagaagacatccgtcttttcgccgaaatggggttcaaatgcttccgtacctctattgcctggacgcgtatcttcccgaatggcgacgaatcccagccaaacgaggccggtctgaaattctacgacgacatgtttgatgagttactcaaatacaacatcgaaccggtcatcaccctttcccactttgaaatgccattacatctggtacagcactacggcggctggaccaatcgtaaggtcgttgatttctttgtccgttttgctgaagtcgtgtttgaacgctacaaacataaggtcaaatactggatgaccttcaacgaaattaacaaccagcgaaactggcgcgcgccgctgtttggctactgctgttccggcgtggtgtataccgagcatgagaatccagaagaaaccatgtatcaggtcttacatcatcagtttgtcgccagcgcgctggcggtaaaagcggcacgtcgcattaacccgcagatgaaagtgggttgtatgctggcgatggtcgcgctgtatcctttctcctgtaaaccagaagatgtgatgtttgctcaggagtcgatgcgtgaacgctacgtctttaccgatgtgcagctgcgcggctattacccgtcctatgtgttgaacgagtgggagcgccgcggatttaacatcaaaatggaagatggcgatcttgaagtgctgcgcgaaggcacctgcgattatcttggtttcagttattacatgaccaacgcggtcaaagccgaaggcggtagcggcgatgcgatttccggttttgaaggcagcgtaccgaacccctatgttaaagcatctgactggggctggcagattgatccggtgggcctgcgttattcattgtgtgaactgtacgaacgctatcaaaagccgctgtttattgtcgaaaacggttttggtgcttacgacaaagtagaagaagatggcagcatcaacgacgactaccgaattgactacctgcgcgcccatattgaagagatgaaaaaagcggtgacttacgatggtgtcgacctgatgggctacacgccgtggggctgcatcgactgcgtgtcgttcaccaccggtcagtacagcaagcgctacggcttcatctacgtgaacaagcacgatgacggtacgggcgatatgtcgcgttcgcgtaagaagagcttcaactggtacaaagaggtgattgccagcaacggcgagaagctttaa

SEQ ID NO: 368821 - DNA, 894 bp, Salmonella enterica
atgaaacgatttatatttctgccattaatgacatattttctattaatgaatgcaatggcagctaacggagaaaataatcccagtaatctattaggtgcaccagttaatactgctatttctggtggttcagtattgccggaaggaaagttattaaccgccgtgaatagctcatttcgcgataaagatcatcaaatcgaggggcacggaagtccggatgtttactcccagatatggttattgaagattcgttacggtttgaccgacagactggaattatcaactgtgggttcctatatcaataacaaacgagacaatctgtctcctgagcacatagagggaatgggcgaccaatcagtgggggtcaattatgctttaatgagccagcgaagaggtgatccgttttgggttacggtaggtggggcagtattactacccaccgggcaagatggagataatcatttgcctgggaatagcgcctggggaggaagagtaacactcactttaacaaaattatttactcctaacattaaaggggatatgggttttgtctatcagggaccatttgagcgcggtaaccaggacgtgaaacgaggtaacgaattccagtggaatacccaggtgcggtatatgtttagcgatttaccgctggatcttggtctggaaagtgcctacagcaataatgcctctggaacgaaaaaactgtctaatggcagcgtaattaataaccattctggaactaccgaatgggttgttggtccgtcatttaatattgccgtcgattcactgaaattatggtttggtgccggagccttcttcccggtaatgcaggaagcgaagtcgccaaccaaaatggaagatgtacgctgggaatttaaaataggtaagacctggtaa

SEQ ID NO: 368822 - DNA, 2874 bp, Salmonella enterica
atgacacagacgttaagccagcttgaaaaccgcggcgctttcattgaacgccacatcggaccggacgccgcacagcaacaagagatgctgaatgcggttggcgccgagtcgttaaacgcgctgacaggtcagattgtgccgaaagacattcagctcgcgactccgccgcaggttggcgaggcggcaaccgaatatgccgcactggcggaattaaaagccatcgccgggcgtaacaagcgcttcacgtcgtacattggcatgggctacaccgccgtgcagctaccgccggttatcctgcgcaacatgctggaaaatccaggctggtacaccgcttataccccgtatcaaccggaagtctctcaggggcgtctggaagcgctgctcaacttccaacaggtgacgctggacctgacggggctggacatggcttccgcctcgctgctggatgaagcgaccgccgccgctgaagcgatggcgatggcaaagcgcgtcagcaaactgaaaaatgccaaccggttctttgtcgcctctgatgtccatccgcaaactctggacgtcgtgcgtactcgcgccgaaacctttggctttgacgtcattgtggatgacgcggcgaaagcactggatcaccaggatgtgtttggcgtgctgttgcagcaggttggctccacgggcgaaattcacgattacagcgcgctgattagcgaactcaaagcccgtaaagtgattgtcagcgtcgccgccgactttatggcgctggtgctgcttaccgcgccgggtaaacagggcgcggacattgttttcggctctgcgcaacgcttcggcgtaccgatggggtacggtggcccgcatgcggcgttctttgccgccaaagacgaatttaaacgctccatgccaggccgtattatcggcgtctcaaaagatgcggcgggcaataccgcactgcgcatggcgatgcagactcgcgagcagcatatccgtcgtgagaaagcgaactccaacatttgtacctcgcaggtactgctggctaacatcgccagtctgtatgccgtttatcatggtccggttggtctgaagcgcatcgctaatcgtatccaccgcctgaccgatattctggcggcaggtctgcaacagaaaggcttaaagctgcgtcatgcgcactacttcgacaccctgtgtgtggaagtggctgataaagctgcggtactggcgcgtgcggaagcggcagagatcaatctgcgcagcgatattcataacgcggttggtattacgctcgatgaaaccaccacccgtgagaatgtggcgcagttgttcaatgttttgctgggcggcagccacggtctgaacattgaaacactggataaagacgtggcgcttgatagccgttccattcagcaaagtatgctgcgtgacgatgcgattctgacgcatccggtatttaaccgttaccacagcgaaaccgagatgatgcgctatatgcactcgctggagcgtaaagatctggcgctgaaccaggcgatgatcccgctgggttcctgcaccatgaagctgaacgccgccgccgagatgattcctatcacctggccggaattcgctgaactgcacccgttctgcccgccggaacaggccgaaggatatcatcagatgattagccagctttctgactggctggtgaaactcaccgggtacgacgccgtctgtatgcagcctaactccggcgcacagggggaatacgcggggctgctggcgattcgtcactatcacgaaagccgcaacgaagggcatcgcgatatctgcctgatcccggcctctgctcacggcactaaccctgcttctgcacatatggcaggaatgcaggtggtggtggtcgcctgtgataagaacggcaacatcgacctggacgatctgcgggcaaaagcagaacaacatgctgcgaacctctcttgcatcatggtgacttatccttccacccacggcgtctatgaagaaacgatccgtgaagtgtgtgaagttgtgcaccagttcggcggtcaggtttaccttgacggcgcgaacatgaacgcccaggtcggcattacctcaccgggctttattggcgcggacgtttcgcatcttaacctgcataaaactttctgcattccgcacggcggcggtggcccaggcatgggaccgatcggcgtgaaagcgcatctggcaccgttcgtaccgggccatagcgtggtgcaaatcgaaggcatgttaacccgtcagggcgcggtttctgcggcgccgttcggtagtgcctctatcctgccaatcagctggatgtacatccgcatgatgggcgcagaaggcctgaagcaggcaagtcaggtcgcgattcttaacgctaactacattgccagccgtctgaaagatgcctatccggtactgtatactggtcgcgatggccgtgtggcgcacgaatgtattcttgatattcgcccattgaaagaagaaaccggcatcagcgagctggatattgccaagcgtctgatcgactacggtttccatgcgccaaccatgtcgttcccggtggcgggcacgctgatggtagagccgacggaatctgaaggtaaggctgagctggatcgctttatcgatgcgatgctggctattcgcgcagagattgaccaggtgaaagcgggtgtctggccgctggaagataacccgctggtgaacgcgccgcacattcagagcgaactggtcgccgagtgggcgcatccgtacagccgtgaagttgccgtattcccggcaggcgtggcagacaaatactggccgacggtgaaacgtctggatgatgtttatggcgaccgtaacctgttctgctcctgcgtaccgattagcgactaccagtaa

SEQ ID NO: 368823 - DNA, 390 bp, Salmonella enterica
atgagcaacgtacccgcagaactgaaatacagcaaagaacacgaatggctgcgtaaagaagcggatggcacttacactgttggcattactgaacacgctcaggagctgttgggcgatatggtttttgttgatctgccggaagtcggcgcgaccgtaagcgcgggcgacgactgcgccgtggcggagtccgtaaaagcggcgtccgacatttatgcgccggtaagcggcgagatcgtggcggtaaacgatgcgctgagcgactccccggagctggtgaacagcgaaccgtatgccggtggctggatctttaaaatcaaagccagcgatgaaagcgaacttgaatcgctgctggatgccaccgcgtatgaggcattgttagaagacgaataa

SEQ ID NO: 368824 - DNA, 1095 bp, Salmonella enterica
atggcccaacagacgcctttgtacgaacaacacacgctatgcggcgcccgcatggtcgattttcatggctggatgatgcccctgcattacggctctcagcttgatgaacaccacgctgtgcgcaccgatgccgggatgtttgatgtatcgcatatgaccattgtcgatcttcatggcagccgcacacgagagtttctacgttatctgctggccaacgacgtcgcgaagctaacgaagacgggtaaagccctctactccggtatgcttaacgcatcgggcggcgtgattgatgaccttatcatctactacttcactgaagatttcttccgtctcgttgttaactccgccacccgcgaaaaagacctctcctggattacccaacacgctgaaccttatgccatcgacattaccgttcgtgacgacctgtcgctgattgcggtacaggggccgaatgcgcaggaaaaagcggcgactctgtttactgacgaacagcgccatgcagtagaaggtatgaagccgttcttcggcgttcaggtgggcgatctgtttatcgccaccaccggttataccggcgaagcgggctatgaaatcgccatgccgaatgaaaaagcggcggatttctggcgtgcgctggtggaggcgggcgtgaagccgtgcggtcttggcgcgcgcgacacgctgcgtctggaagctggcatgaacctgtacggtcaggagatggatgaaggtatctctccgctggcggctaatatgggatggactatcgcctgggaacctgctgaccgcgactttattggccgtgaggcgctggagatgcagcgtgaaaaaggccatgagcagcttgtcggtctggtgatgaccgagaaaggcgtattgcgtaatgaactgccggtgcgttttaccgatgcgcagggcaatcagcaagaaggcattatcaccagcgggacgttttccccaacgttgggctacagcattgcgctggcgcgtgttccggcgggcatcggcgagacggcgattgtacaaattcgtaaccgtgaaatgccggtaaaagtgactaaacctgtttttgtgcgtaacggcaaagccgtcgcgtga

SEQ ID NO: 368825 - DNA, 1203 bp, Salmonella enterica
gtgcaaagtgttgatgtagcaatagttggcggaggcatggtgggactggctgtcgcctgcggcttgcaggggagcggtttgcgcgttgcggtactggatcacgttgtcccccagccgttggcgaacgatgcgtcgcctcagcttcgggtgtcggcgattaatgccgccagcgaaaaactgcttacccgtcttggcgtatggtcaaacattgtggcgcgacgggcaagttgctaccacggtatggaagtctgggataaagacagctttggccgtattacgtttgatgacgcaagcatgggatatagccatctggggcatattgttgaaaacagcgtcattcactacgcattgtggcaaaaagcgcagcaagcggcggatatcaccttaatggcgccagcggagttacagcaggtcgcctggggggagaacgacgccttcctgactttaaaagacggcgcgatgttaaccgcgcgtctggtgattgccgcggatggcgccaactcctggctgcgtaacaaagcggatattcccttaactttctgggactaccgtcaccatgcgctggtagcgactatccgcaccgaagagccgcacggcgcggttgctcgccaggtgtttcatggtgaaggtattctggcgtttttgccgttaagcgatccgcatctgtgttccattgtctggtcgctttctccgcaggatgcggagcgtatgcaacagagcggcgacgaggcgtttaaccaggcgttgactatcgccttcgataatcggctgggcttatgccgcctggaaagcgaacggcaggtttttccgctgacgggccgctatgctcgccagtttgccgcgcatcgtctggcgttggtcggcgatgccgcgcacaccatccatccgctggcagggcagggcgtcaacctcggctttatggacgcggccgaactggtggacgatctgcgccggcttcagcgccagggcaaagacattggccaacatctttatctccgtcgttatgagcgtagccgtaaacatagcgcggcgatgatgcttgccgggatgcaaggttttcgtgacctgtttgccggcgaaaacccggcaaaaaaattgctgcgcgacatcgggctgaaactggcggatacgctccccggcgtcaaaccccaactgcttcgccaggcaatggggctaaacgaccttccgcaatggcttcgttaa

SEQ ID NO: 368826 - DNA, 1179 bp, Salmonella enterica
atgagcgtcattatcgttggcggcggcatggcaggcgcaacgctggcgctggccatctctcagttcagtcatgggacgttgccggtacacctgattgaagcgaaagcgcctgaagccgacggtcatcccggctttgacgccagagcgattgcgctggcggcgggcacttgccagcaactggcgcgaattggcgtctggcaggcgatttccgattgcgcaacggcaatcaacaccgtacacgtcagcgatcgcggtcatgtcggatttgtgactctcgacgcgcaggattacagcctggcagcgttgggtcacgttgcggagctgcatgatatcgggctgcgtctgtttgcgctcttgcgtaaagcgccaggcgttacgctgcactgcccggagcgcgtagccagcgtgtcgcgtacccaacagcaagttaacgtcactctggaaaacggcaatgtgatagctggcagcgtgctggtggcggctaacggtacccactctgcgctggcgtcagcctgcggcgttgactggcatcaggagccttacgaacagttagcggtgatagcgaatgtcgcgaccgctatcccgcatcagggacgcgcctttgaacgttttactcccaatggcccgctggcgatgttgccgatgtcgcatggccgatgttcgctggtttggtgtcacccactcgaccagcgcgatgaggtgctgagctggtccgacgcgcagttctgccatgcattgcaggccgcgttcggctggcggctggggcgaattactcaggccggtaagcgcagcgtgtatccgcttgccctgactacggcggcaaaagtgtttactcaccggactgtcatggtcggcaatgcggcgcagacgttgcatcctatcgccggacaagggtttaatctcggtctgcgcgatgtcatgagcctggcggaaacgctgatcgcggcacaggacgcgggcgaggatattggcgcctggcacgtgttatcgcgctatcagcagcgtcgtcaggttgaccgggatacgacgattggcgtaacgaacggtctggtccatctgtttgcaaatcgttgggcgccgctggttattgggcgcaatatcggtttaatggcgatggaattattaccgcctgcgcgcgatgcgctggcacagcggaccttaggttgggttgcgcgttaa

SEQ ID NO: 368827 - DNA, 1317 bp, Salmonella enterica
atgactcagcaggaataccaacgccgtcgccaggcattactggcgcaaatgcagcccggcagcgccgcgctgatctttgccgcgccggaggcgacgcgcagcgcagacagtgaatatccgtatcgccagagtagcgacttctggtatttcaccggttttaacgaaccggaagccgtgctggtactgattaagagtgatgacacccacaaccacagcgttttgttcaaccgcgttcgcgacctgactgcggaaatctggtttggtcgccgtttaggacaggatgccgcaccggaaaaactgggcgttgaccgggcgctggcgtttagcgaaatcaaccagcaactctttcagttgcttaatggtctggatgtggtgtaccacgcgcagggcgaatatgcgtatgccgacgagattgttctggctgcgctggggaagctgcgtaaaggctcccgccagaatctgaccgcgccggccaccatgactgactggcgaccgatcgtccatgagatgcgcctgttcaaatcgccggaagagattgcggtcatgcgccgcgccggggaaattagcgctctggcgcatatccgcgcgatggaaaaatgccgtccggggatgtttgagtatcagctggagggtgaaattcaccacgaatttaatcgccatggcgcgcgctatccctcctataacaccattgtcggcagcggcgaaaatggctgtatcctgcattacactgaaaacgaaagtgaaatgcgcgacggcgatttagtgcttatcgacgcgggttgtgaatataaaggttacgcgggcgacatcacgcgtactttcccggtgaacgggaaatttacgccagctcagcgtgaaatttatgacatcgttctggaatcgctggagaccagcctgcgactgttccgtcctggtacctctattcagcaggtgaccggcgaagtcgtgcgcatcatgataaccgggctggtgaagttggggattttgcaaggagaggttgatcaactgattgccgagaatgcgcatcgtcctttctttatgcatggcttgagccactggctggggctggatgttcatgatgtcggcgtttatgggccggatcgctcccgcatcctggagccgggcatggtgctgaccgtagagccaggcctctatatcgcgccggatgccgacgtgccggaagcgtatcgcggcattggcgttcgaattgaagatgacattgtcattaccgaaaccggtaatgaaaacctgaccgctggcgttgtgaagaaggcggatgacattgaggcattaatggcggcggcgcggcagcaatga

SEQ ID NO: 368828 - DNA, 579 bp, Salmonella enterica
atgtctatacagaacgaaatgcctggttacaacgaaatgaaccggtttttgaatcaacaaggggccggtctgaccccggctgaaatgcatggtttaatcagcgggatgatttgcggcggcaacaacgacagctcatggcagccgctgctgcacgacctgacgaacgaaggtctggccttcgggcatgagcttgctcaggcgctgcgcaaaatgcacgcggcgaccagcgacgcgctggaagacgacggctttctttttcagctttatctgcctgaaggcgacgatgtcagcgtattcgatcgcgcagatgccttagccgggtgggttaaccactttttgcttggcctcggcgtaacgcagcctaaacttgataaagtcaccggcgaaacgggtgaagcgattgacgacctgcgtaatattgcgcagcttggttatgatgagagcgaagatcaggaagagctggagatgtcgctcgaagagatcatcgaatatgtccgtgttgcggcgctgttatgtcatgacactttcacgcgccaacagccgaccgcgccggaagtgcgtaaaccgacgctacactaa

SEQ ID NO: 368829 - DNA, 330 bp, Salmonella enterica
atgtctgcacaacccgtcgatatccaaatatttggccgttcactgcgagtgaattgcccgcctgaccaaagggatgcgttgaatcaggctgcggacgatctgaatcagcggttgcaagatctgaaagttcgcactagagtcacaaatactgagcagttggttttcattgccgcattgaatatcagctatgagttaactcaggaaaaagcgaagacccgcgattacgcggcgagcatggaacaacgtattcggatgctacaacagaccatcgaacaggcgttgcttgatcaaggtcgcataaccgaaaaaacgggccaaaactttgaataa

SEQ ID NO: 368830 - DNA, 549 bp, Salmonella enterica
atgattcggcaacgtcgtcgtgcgctgacgccagagcagcaacgccgctttggtcaacaggccgccgcccgaatgctcagctttcctcccgtcgtgatggcgcacactgtcgccgtgtttctctcctttgatggcgaactcgacacccagccgctgattgaacagctatggcgagcaggcaagcgcgtctaccttccggttcttcatcccttcagccctggcaacctcctgttcctgcactatcatccgcagagtgcgctggtgaccaaccgcttaaagatccgggagccacggcttgatgtccgcgacgtattgccgctggcaaagctggatgtgctggtaacgccattagtggcgtttgacgaaggcgggcagcgcctggggatgggcggcggattttatgaccgtacgttgcaaaactggcagcagcataagatccagcccgtgggctacgcgcatgattgccagttagtagaaaaactgccagttgaagagtgggatatcccgctgcctgcggtggtgacgccgtccaaaatttgggagtggtag

SEQ ID NO: 368831 - DNA, 1233 bp, Salmonella enterica
atggcaaaggtatcgctggagaaagataaaattaaatttctgctggttgaaggggtgcatcaaaaggcgctggaaagccttcgtgcggcaggttacaccaacattgaatatcacaagggcgcgctggacgctgaacagttgaaagcgtccatccgcgatgcccacttcatcggtctgcgatcccgtactcatctgacagaagaagtgattaacgccgcagagaagctggtggcgattggctgtttttgcatcggcaccaaccaggtggatttaaatgcggcggcaaaacgcggtattccggtctttaacgcgccattctcgaatacccgttccgtggcggagctggtgattggcgagctgttgctgctgctgcgcggcgtgccggaagcgaacgccaaagcgcaccgcggcgtatggaataaactggcggcgggatcgttcgaagcgcgcggtaaaaagcttggcattatcggttacggccatataggaacgcagttgggcattctggcggaatcgctggggatgcatgtctatttctatgatattgaaaataaactgccgctcggtaacgcaactcaggtgcagcacctgtctgaattgctgaatatgagcgatgtggtcagtctgcacgtacctgaaaacgcctccaccaaaaacatgatgggcgcaaaagagattgccctgatgaagccgggttcgctgctgattaacgccgcgcgcggtacggtggtagatatcccggctttgtgcgacgcgctggcgacgaaacatctggcgggggcggctatcgacgtcttcccgacggaaccggccactaatagcgatccgtttacctctccgctgtgcgaattcgataacgtgatcctgacgccgcatatcggcggctcgacgcaggaggcgcaagaaaacatcggtctggaagtcgcaggaaaactgattaagtactcggataacggctcgacgctgtccgccgtgaacttcccggaagtgtcgctgccgctgcacggcggtcgtcgcttgatgcacatccacgaaaaccgcccaggcgtattgaccgcgcttaaccagatttttgccgagcagggcgttaacattgccgcgcagtatctgcaaacctccgcccgaatggggtatgtggtaattgatatagaagccgatggcgatgtggcggagaaagcgctgctggcgatgaaggcgattccaggtaccattcgcgcccgtctgctgtactaa

SEQ ID NO: 368832 - DNA, 660 bp, Salmonella enterica
atgacgcaggatgaactgaaaaaagcggtaggatgggcggcacttcagtatgtacagcccggcaccattgtgggcgttggtacaggctcaacggccgcacactttattgatgcgctgggcacaatgaaaggccagattgaaggcgcggtctccagctcggacgcctcgactgaaaaactcaaaggcctcggtattcacgtgtttgatctcaacgaagtggatagcctgggtatctatgtcgatggcgcggacgaaatcaacggtcatatgcagatgatcaaaggcggcggcgcggcattaacccgtgagaaaattattgcttccgtggcggagaaatttatctgtattgcggatgcctctaagcaggtggatattcttggcaaattcccgttgccggtcgaagtgattccgatggcgcgcagcgcggtcgctcgtcaactggtgaagctgggcgggcgtccggagtaccgtcagaacgtggtcacggataacggcaacgtgattctggatgtttatggtatggaaatccttgatcccatcgcgctggaaaacgccattaacgcgattccgggcgtcgtgaccgtggggctgttcgccaaccgtggcgccgatgtcgcactgatcggcacgccggacggggtgaaaaccatcgtaaaatga

SEQ ID NO: 368833 - DNA, 894 bp, Salmonella enterica
atgaaacgtccggactacagaacactacaggcgctggatgccgttatacgtgaacgagggttcgagcgcgccgcccagaagctgtgcatcacgcaatccgccgtctcacagcgcataaaacagcttgagaatatgttcggacaacctttattggtgcgtaccgttcctcctcgccctacggagcaagggcaaaaattactggctctgctgcgtcaggttgaactgctggaagaagagtggctgggcgatgaacaaaccggctctacaccgctgctgctgtcgctggcggttaacgccgatagtctggcgacctggctgcttccggcgctggcgccggtgctggcggactcccctatccgtctcaatttacaggtggaagatgaaacgcgcacgcaagaacgtctgcggcgcggcgaggtggtgggcgcggtgagtattcagcatcaggcgctgcccagttgcctggtagacaaactgggcgcgctcgactatctgtttgtcgcgtcaaggccgtttgccgagcgctatttccccaatggcgttacccggtcgtcgctgctgaaagcgcccgccgtcgcgttcgaccatctggatgatatgcatcaggcctttttgcaacagaatttcgatctaccgcccggcagcgtgccgtgccatatcgttaattcatccgaagcatttgtacagcttgcgcgtcagggcacgacctgctgcatgatccctcacctgcagattgagaaagagctggaaagcggcgagttgatcaacttaacgcctggtttgctgcagcgccggatgctttactggcaccgctttgccccggaaagccggatgatgcgcaaagtgaccgacgcgctgctggagtacgggcacaaggtgctgcgtcaggattag

SEQ ID NO: 368834 - DNA, 747 bp, Salmonella enterica
gtgaagttcaaagtgatggccctggcggcattagtgggtttaagtgcaatgtcggcgcaggcaagcgaattgccggaaggcccgcacatcgtgacttccggtacggcaagcgtcgatgctgtgcctgatatcgccaccttagcgattgaagtgaacgtcgcggcgaaggacgcggcgacggcgaagaagcaggccgatgagcgcgtggcgcaatatctttccttccttgagcaaaatcagattgcgaaaaaagacattagcgcggcgaatctgcgcacgcagccggattatgattaccaaaacggtaaaagcattctgaaagggtatcgcgcggtgcgaaccgttgaggtgacgctgcgtcagttagataaactcaattcgctgctggacggcgcgctgaaggcgggtctgaacgagattcgttcggtatcgctgggcgtggcgcaaccggacgcctataaagacaaagcccgcaaagccgccattgatgacgcgattcatcaggcgcaagcgctggcagccggttttaacagcaaattggggccggtttacagcgttcgttaccatgtctctaattatcagccgagtccggtggtgcgaatgatgaaagccgcagatgctgcgccggtatccgcgcaggaaacttacgagcagccgaccattcagttcgacgatcaggtcgatgtggtattccagcttgaacctggaacagggcagacgtcgaccacggccgccagcacgcagtaa

SEQ ID NO: 368835 - DNA, 636 bp, Salmonella enterica
gtgatatcttattattttcaagggtttgcccttggcgccgccatgatccttccgcttggcccgcaaaatgcgtttgtgatgaatcagggaatccgtcgccagtaccacctcatgatagcgctgctttgcgcgttaagtgatttagtcctgattagcgccggtatttttggcggtagcgcgttgctgatgcagtcgccgtggctgctggcgctggtcacatggggcggggttgcgttcttgttatggtacggtttaggcgcgctgaaaacggcaatgagcagtaatctggagctggccagcgccgaggttatgaagcaggggcgctggaaaattattgctacgatgctggcggtaacgtggctgaatccgcacgtttatctggatacgtttgtcgtgttgggcagtctcggcggacaactggctatggagccaaagcgctggtttgctctcggcacgattagcgcgtcgttcttgtggttttttgggttagcgctactggcggcctggcttgcgcctcgactgcgtacggcgaaagctcaacgcattatcaacattctggtaggggtggtgatgtggcttatcgccttccaactggcgcgggaaggcgtcgcgcatatgcacgcgcttttcaactaa

SEQ ID NO: 368836 - DNA, 861 bp, Salmonella enterica
atggaagatttgaatgttgtcgacagcataaatggtgcgggcacctggctggtacgcaaccaggcgttattgctcagctatgctgtgaatattgttgcggctatcgctattatcatcatcggcttgattgtagcgcgcgtgatttccaatacggtaaatcgtctgatgcgtgcgcgtcatattgatgcgacagtggccgactttctttctgcgctggtgcgctatggggttatcgcttttacgctgattgcggctctgggtcgcgtgggggttcaaaccgcctcggttattgccgtactgggcgccgctggtttagccgttggcctggcattacagggatcgctttctaaccttgcggctggggtattgctggttatgttccgtccgttccgcgccggtgagtatgtcgatttaggcggcgttgccggtacggtacttaacgtgcaaatcttttccacgacaatgcgcgcggtagacggcaaaattattgtgattccgaatggcaaaattatcgcgggaaatatcatcaactattctcgtgagccggttcgccgcaacgaattcattattggggtggcctacgattcggatatcgatcaggtgaaacagctgctcacgacgattatcgagtccgacgatcgtattttaaaagatcgcgaaatgacggtgcgtttgaatgagctgggcgcctcatcaattaattttgtggtgcgtgtctggagtaaaagcagcgacctgcaaaatgtctactgggacgtgctggaacgtattaaacgtgaattcgacgccgctggtattagcttcccgtacccgcagatggacgtcaattttaaacgcgtgaaagataacgccgcggagtaa

SEQ ID NO: 368837 - DNA, 1080 bp, Salmonella enterica
atgtctaaaatttttgatttcgtaaaaccaggcgtgatcactggtgatgacgtacagaaagtgttccaggtagcaaaagaaaacaattttgctctgccggcagttaactgcgtgggcactgattccatcaacgctgttctggaaaccgctgcaaaagttaaagcaccggtcatcgttcagttctccaacggcggcgcgtccttcatcgcgggtaaaggcgtgaaaactgacgtacctcagggcgcggcaatcctgggcgctatctctggcgcgcatcacgttcaccagatggctgaacactacggcgtgccggttatcctgcacactgaccactgcgcgaagaaactgctgccgtggatcgacggtctgctggacgcgggtgaaaaacacttcgcggctaccggtaaaccgctgttctcttctcacatgattgacctgtctgaagagtctctgcacgaaaacatcgaaatctgctccaaatacctggcgcgcatgtccaaaattggcatgactctggaaatcgaactgggttgcaccggtggtgaagaagacggcgtggacaacagccacatggacgcttctgctctgtacacccagccggaagacgttgattacgcgtacactgaactgagcaaaatcagcccgcgtttcaccattgccgcttccttcggtaacgtacacggcgtttacaagccgggtaacgtggttctgaccccgaccattctgcgtgattctcaggactatgtttctaagaaacacaacctgccgcacaacagcctgaacttcgttttccacggcggttccggttctactgctcaggaaatcaaagactccgtaagctacggcgtagtgaaaatgaacatcgataccgatacccaatgggcaacctgggaaggtgttctgaactactacaaagaaaacgaagcgtatctgcaaggtcagctgggcaacccgaaaggcgaagatcagccgaacaagaaatactatgacccgcgcgtatggctgcgtgctggccagacttcgatgatcgctcgtctggaaaaagcatttaaagaactgaacgcgattgacgttctgtaa

SEQ ID NO: 368838 - DNA, 1164 bp, Salmonella enterica
atgtctgtaattaagatgaccgatctggatctggccgggaaacgcgtttttatccgtgcggatctgaacgtacctgttaaagaagggaaagtgaccagcgacgcgcgtatccgcgcctctctgccgaccatcgaactggctctgaaacagggcgcgaaagtgatggtaacttcccacctgggtcgtcctaccgaaggcgagtacaacgaagaattctctctgctgccggttgttaactacctgaaagacaaactgtctaacccggttcgcctggtcaaagattacctggacggcgttgacgtggccgaaggtgagctggtggttctggaaaacgttcgctttaacaaaggcgaaaagaaagacgacgaagcgctgtctaaaaaatacgccgccctgtgtgacgtattcgtgatggacgcctttggtactgcgcaccgcgcgcaggcttctacccacggtatcggcaaatttgctgatgttgcgtgcgcaggcccgctgctggccgctgaactggatgcgctgggtaaagcgctgaaagaaccggctcgtccgatggtggctatcgttggtggttctaaagtatctaccaaactgaccgttctggattccctgtctaaaatcgctgaccagctgattgtcggcggcggtatcgccaacaccttcgttgccgctcagggccacagcgtcggtaaatccctgtacgaagctgacctggttgacgaagcaaaacgtctgctgaccacttgcgatatcccggttccgaccgatgttcgcgttgccaccgagttctccgaaaccgcaccggcgactctgaaatccgttaacgacgtgaaagaagacgagcagatcctggatatcggcgatgcttccgctcagcagctggctgaaatcctcaagaatgccaaaaccattctgtggaacggcccggttggcgtgtttgagttcccgaacttccgtaaagggactgaaatcgtggcgaatgccatcgctgatagcgaagcgttttccatcgctggcggcggcgacaccctggcggcaatcgacctgttcggcattgctgacaaaatttcctacatttctactggcggcggcgcattcctcgaattcgtggaaggtaaagttctgccagccgtagcgatgctcgaagagcgcgctaagaagtaa

SEQ ID NO: 368839 - DNA, 1047 bp, Salmonella enterica
atgaccgtacgcatagcgattaatggctttggtcgcatcggacgtaacgtggttcgtgctttgtatgaatccggacgtcgcgcggaaattaccgtggtggccatcaacgagctggcggatgccgcaggcatggcgcatttgttgaaatacgataccagccacgggcgttttgcatgggaggttcgccacgagcgcgagcagctttttgtcggcgacgacgtcattcgtattctgcatgaacgaacgctggcggatctgccgtggcgcgaactgggcgtggatgtcgtgttggattgtacgggcgtatatggcaaccgggagcatggcgaggcgcatattgccgctggcgcgaagaaagtgctcttttctcatccgggcagcaacgatcttgacgccaccgtcgtttttggcgtgaaccagaatgaactgcgtgcggaacatcgtattgtctcaaacgcatcctgtaccacgaattgcataattcccgtcattaaattgttggatgatgcttacggcatcgagtctggtaccgtcacgacgatccactccgcgatgaacgatcagcaggtgatcgacgcgtatcactccgatctgcggcgcacgcgcgcggccagccagtcgattatcccggtagatacaaaactggcggcaggcattacgcgtatattcccgcagtttaacgaccgttttgaggcgattgccgtgcgcgttccaaccattaatgtgacggcgatcgatttaagcgtaacggtgaaaaaaccagtaaaagccagtgaagtcaaccagttgctgcaaaaagcagcacaaggtgcatttcatggtatagttgactatacggaatcaccgttggtctcgatagattttaaccacgacccgcacagcgccattgttgatggcacgcaaacccgggttagtggcgcccacctgatcaagacgctggtctggtgcgataatgaatggggctttgctaaccggatgctcgacaccacgttagcgatggccgcagttggtttcaggctcgacgcgtcagcgtcgacaaaactttaa

SEQ ID NO: 368840 - DNA, 426 bp, Salmonella enterica
atgactgtatctcaccacaatgcctctacagcgcgcttttacgcgcttcgtctgcttcccggccaggaagtgttttcccaattacacgcctttgtgcaacagaaccaattacatgccgcctggattgcagggtgtaccggcagtctgaccgacgttgcgctgcgttatgccgggcaagaagcgaccacatcgctcaccggcacgtttgaagttatctcgctaaacggcacgcttgaattgaccggcgagcatctgcatctcgcggtatcggatccctacggggccatgctcggcggccatatgatgccagggtgtaccgtgcgtaccacgctggaactggttatcggcgagctgccagcgctgacgttcagccgtcaaccgtgcgccatttccggttatgacgaactgcatatttcttcccgttaa

SEQ ID NO: 368841 - DNA, 579 bp, Salmonella enterica
atggcgcgtcgcccgttttccagccagtctctggtgctgattgtcatcgctattgccatcaatatgattggcggacagcttattagcatgttgaagctgcctatttttctcgactcgatcggcaccttaattagcgcggtactgttagggccgttcatcggcatgttgactgggcttctgaccaacttgctgtgggggctgcttaccgaccctatcgctgccgcgtttgccccggtagcgatggttatcggtctggtcgccgggtggctggcgcgcgcaggctggtttcgtaccctgcccaaagtgatcgtcagcggggtcgtcattacgttggcggtgacgctggtcgccgtaccgcttcgtaccgcgctttttggcggcgttaccggtagcggcgctgatttgttcgtcgcctggatgcattcaatgggccaaaacctggtggagtcagtcgcgattaccgtcataggcgctaatctggtcgataaaattctgacggcgatcatcgtttgggtgctgctgcgtcagctaccgttacgtacgacacggcattttcctgcgatgtcagccgtacgctaa

SEQ ID NO: 368842 - DNA, 708 bp, Salmonella enterica
atgcatccgtttacctcgttaaccttatgggcgttggcggcctgcaccacgctgctactccctgcgcagaccgtgctcccggtttatagcgcggcggccttcctctgtctgctggcgctgaaatcaacgcggcggcgggcgaagtatgtcgcctggctgatgctgtctttagggtttgggctatggctggtacatggcggttggctaacggaatggataagcgggcagccttgcgatccgcagcgctggatatatgccgttacgctatggctacgcctgctggcgatcgtgtcgacgtcgcagctatggatgcagtatgtgccggttcagcggtttattcgcgccctgttcgcttcacgtttgccgcccggcatcgcttacctgttcgctggcccgctgctggtcgtcgaacagctcaaacgacaactgacgatcgttcatgaagcccagcgcgcgcgtggcgtaccgctagatgaaggctggtatcagcggctacgggcaatgcctgcgctgatcgtgccgcttacgcaaaatgcgcttaacgatctgacaatacgcggcgcggcgttggatatgcgggggtttcggctgcatcgagcccgaaccacgctgtgggcgccgaaagatagcatgttacaacgggttgcgcggtatggcatggtactgctaatactggcggaagcgggagtgtggatatggttacgttag

SEQ ID NO: 368843 - DNA, 678 bp, Salmonella enterica
atggttacgttagagcagtttcgttatcttccgtccgatgcgacacgcccgccggcatgttttgatttccactattcaacacccggaatagtggcgatagtcggcgataacggcagcggaaaaagtacgctggcgcaactgatggctggctggtatccggattatcttcccggtgatattgacggcacaggcttactgcttggcgtccctatcgggcagctcccgctggtagaacagtcgcccaccatccagttggtgcagcaatcgccttatttacagctttccggctgtacctttagcgtagaggaagaggtggcgtttggcccggagaatctcggcctccatgaagcggaaattctacggcgcattgacgaggcgctgactctgacaaactgccagtcgttacgccatcgccatcccggcacgctctccggcggcgaaacgcagcgggtagtgattgccagcgcgcttgccatgcagcccaggctattagttcttgatgaagccttcagtcggctgacgtcagcggccaccgggatgctgctggaacggctacaacagtgggcgctggaacgtcattctctcattgtgctttttgagcgtaaccattttccttttctgacgcgatgccagcgggtatggcaattgcgcgacggagcgctaaccccattatgttga

SEQ ID NO: 368844 - DNA, 657 bp, Salmonella enterica
atgttgacgttaaatcaggtcgcttatcgctggccggatgccgcagccgactgtttgcacgctatctcgcttgaacttcgtgacggcgaatggctggcgttgaccggcgataacggcgcgggaaaatcaacactgttacggattatggccggcctgctttcccccacttccggctcggtaacgcttaatggagagccgattgcgcagcttaaaaatcgtcaacgcgccgccgctatcggcgtactctttcaggaagcggaaaaccagattttccacagcaatgtcgcgcaagaggtcgcttttgggctgaaactacaacgcttatcggcagaggaaatttcacggcgcacgcaggccgcgctgcggttatgccagctaacggacgtcgccgaggcgcacccgcttgatctgcacgccgcaccgcgccggatggtggcggtcgccagtctggaggcgatggcgccgcctgtgttattgctggatgaacccagccgggattttgacgcccactggctaaccgtatttgaacactggctggcgacatgccgggcacggggaaccagcgtcgtggcgattagccatgacgctgcgtttacccggcgtcatttttcacgggtggtacggctggaaaacggcaggttgtcaaagggagaataa

SEQ ID NO: 368845 - DNA, 1992 bp, Salmonella enterica
atgtcctcacgtaaagagcttgccaatgctattcgtgcgctgagcatggacgcagtacagaaagccaaatccggtcacccgggtgccccgatgggtatggctgacattgccgaagtcctgtggcgtgatttcctgaaccacaacccgaccaacccgtcctgggccgaccgcgaccgcttcgtgctgtccaatggccacggctcaatgctgatttacagcctgctgcacctcaccggttatgacctgccgatgtccgagctgcagaatttccgtcagctacattcaaaaacccctggtcacccggaagtgggctacaccgctggcgttgaaaccactactggcccgctgggtcagggtattgccaacgccgtcgggatggcgattgccgagaaaactctggcggcgcagtttaatcgtcctggccacgatatcgttgaccacttcacctacgtctttatgggcgacggctgcatgatggaaggcatttctcacgaagtgtgctctctggctggtactctgaaactgggcaaactgatcgcgttctatgatgacaacggtatctctatcgatggtcatgttgaaggctggttcaccgatgacaccgcgaaacgttttgaagcctacggctggcacgttatccgtggcattgacggtcacgatgccgacgccattaaacgcgccacggaagaagctcgcgccgtgactgacaaaccgtccctgctgatgtgcaaaaccatcatcggtttcggttcgccgaacaaacagggtacccacgattcccacggcgcgccgctgggcgacgcggaaatcgcgctgacccgcgaacagttgggctggaaatacgcgccgttcgaaatcccgtctgaaatctacgcccagtgggatgcgaaagaagccggccaggcgaaagaatccgcatggaatgagaaattcgcggcttatgagaaagccttcccgcaggaagctgctgaattcactcgtcgtatgaaaggcgacatgccggctgacttcgatgcgaaagcgaatgagttcatcgctaaactgcaggcgaatccatccaaaatcgccagccgtaaagcgtcccagaatgccatcgaagccttcggtccgctgttgccggaattcctcggcggctccgctgacctggcaccttctaacctgaccctgtggtccggttcgaaagcgattaacgaagatgccgcaggtaactacattcattacggtgtgcgcgaattcggtatgaccgctatcgccaacggtatcgccctgcacggcggtttcctgccgtacacctccaccttcctgatgttcgtcgaatatgcccgtaacgcagtgcgtatggcagcgttgatgaaacagcgtcaggtgatggtctatacccacgactccatcggtctgggcgaagatggcccgacgcaccagccggtcgagcaggtggcaagcctgcgcgtaacgccgaacatgtccacatggcgtccgtgcgaccaggtggaatccgcggtggcgtggaaatatggcgtagagcgtcaggatggcccaaccgcgctgatcctctcccgtcagaacctggcgcagcaggaacgtactgaagagcaactggcgaatatcgcccgcggtggttacgtactgaaagattgtgcgggccagccgcagattatcttcattgcgaccggttcagaggttgagctggcggttgccgcttacgaaaaactaactgccgaaggcgtgaaggcgcgcgtggtttccatgccgtctaccgacgcattcgacaagcaggatgcggcttaccgtgaatccgtgctgccgaaggacgtctctgcgcgtgtagcgattgaagcgggtatcgctgactactggttcaaatacgtcggcctgaacggcgctattgtcgggatgaccaccttcggtgaatccgccccggcagagctgttgtttgaagagtttggcttcacggtggacaacgtgatcgccaaagcgaaagcactgctgtaa

SEQ ID NO: 368846 - DNA, 759 bp, Salmonella enterica
atgaaaattcgcgctttactgcttgctttgggcatggcgacggtgctgaccggttgccagaatatggactctaatggactgctttcttcgggcgctgaagcttttcaggcctatacgttaagcgatgcgcaggtaaaagcgttgagcgatcaatcctgtcaagagctcgacagcaaagcgaaaatcgcgccggcgagcagcgaatacgctaaacgactggcaaaaattgccgctgcgctgggggataacattaacggccagccggtgaactataaggtttacgagacgaaagacgtcaacgcgtttgccatggcgaacggttgtattcgcgtctacagcggactgatggatatgatgaccgacaacgaagttgaagccgtgatcggccatgaaatgggccatgtcgcgctgggtcatgtaaagaaagggatgcaggtcgcgctgggcactaacgccgtgcgcgtcgcggcggcatcggcaggaggcgttgtcggcagcctgtcgcaatcacagcttggcgatcttggcgaaaaactggtgaactcgcagttctcccagcgtcaggagtccgaagcggatgattattcttacgatctgttgcgcaaacgcggtatcagtccggcaggacttgccaccagctttgagaaactggcaaaactggaagcgggtcgtcaaagctcgatgttcgacgatcacccggcgtccgccgcacgcgcacagcatgtgcgcgatcgtatgagcgcggacgggatcaaataa

SEQ ID NO: 368847 - DNA, 921 bp, Salmonella enterica
atgagcaccttaggtcatcagtacgataactcactggtttctaatgcgtttggttttttacgtctgccaatgaacttccagccgtatgacagcgatgccgactgggtgatcactggcgtaccgtttgatatggcaacgtccggtcgcgctggcggccgtcatggcccggcggcgatccgtcaggtgtcgaccaacctcgcctgggaacatcaccgtttcccgtggagttttgacatgcgcgagcgcctgaacgtcgtggactgcggcgatttggtgtatgcgtttggcgatgcccgtgagatgagtgaaaaattacaggcgcacgctgaaaaactgctgtctgcaggcaagcgtatgctctctttcggcggcgaccacttcgtcacgctgccgctgctgcgcgcccacgcgaaacattttggcaaaatggcgctggtacattttgatgcgcataccgatacctacgctaacggctgcgaattcgatcacggcacgatgttctacaccgcgccgaaagaaggcctgatcgatccgcatcattcggtacagatcggtattcgtactgagtttgacaaagacaatggctttaccgtgctggatgcctgccaggtcaacgatcgcggcgtggatgatattctcgctcaggtgaaacagatcgtcggcgatatgccggtctatctgacctttgatatcgactgtctggacccggcgtttgcgcctggcaccggtacgccggtgatcggcggtttgacctccgatcgcgccattaaactggtacgcggtctgaaagatctgaacattgtcggtatggatgtagtggaagtcgcgccggcttacgatcagtcggagatcaccgctctggcggccgcgacgctggcattagaaatgctctatatccaggcggcgaagaaaggcgagtaa

SEQ ID NO: 368848 - DNA, 333 bp, Salmonella enterica
atggttaaattttatcagaacatgcatcatccagagcaaaaagactactggcgcacgtttctcgaaggtgtctggccaatgtggacaacgcccacatcgctgacggaagaagaggtgaaaaaaatccacattcctgtgctattactggacggcgaccgggatgaatttttcaccgttgaagaagttaccgagctgtaccggctgctgcctcaggcggagatgaccctcattcccggtagcggtcacgccattttccagacgccggggaaaacaccgctgttttacgcattagtgcttgagtttttacagcggcaactccctaaggcctcttaa

SEQ ID NO: 368849 - DNA, 507 bp, Salmonella enterica
atgaatcatatttttaaattagcatttatttttattatcaatattatatttttaataaatgcttcagcaacaacgatggacaaagataaatttgtggaagcgaatggtatcaaaattcattacgttgaagagggcgaggggcctccgctgctgttgattcacggtggtggtctgacggcgaaaagttggcagggattagcgaaagaggcatctcgatattttcgcgtcatcatgccggacagtcgtggacatggattaaccaataacccgcaaggaacgtttagctatgatctgatgacggaagatatggcggcttttgttaaagcgctgaagctggaaaaaccgctggtgatgggttacagcgatggcggcatggtcgttctgaagttaaccagccgatacccggatctagcgcgcgctgctatcgtcggcggcgcaacgcatcgctttgctacgacccattacatgcaggggatggaaattttttatggtaaaggaatgccttag

SEQ ID NO: 368850 - DNA, 495 bp, Salmonella enterica
atgctatatggaaatatagagcagcttactttattaccttacgttaaccacattattaaaaaacttatcatcgaagcggtgaagatagctgaagatcagcctgctggtagatatgaactttctttcccggagtcatttcttatgataagcgaaggagaaacacactcttcgttaaaccgcaaagctgaacttcataaaaaatatatcgatgttcagattttactaagcggttatgaggagattggctattccaacaaaattgataccaggataaaggagcttgagcatcttcctgatgacatcatctttcctgaatgtgtcgctaatgagcagttcgttacattaaatcctggcgatttcgcgcttttttatcccaaccagatccaccgtccgctttgtacgcgtggtaaacctgcgccggttaaaaaagcgattgtgaaaattccggccacggcatttagcgagtcaagcttgccctgtcagacgaaggaataa

SEQ ID NO: 368851 - DNA, 1008 bp, Salmonella enterica
atgtcaacaatattagtcaaagaaaatgaattgaaagcgctggcgtttaataaactcacccaggcgggccttgacgcgcaaacggcgcagcaggtagccgacgttttggttcatgccgatattaccggcgttcactcccacggcgttattcgcgtagagcactattgtacccgcctgaacgcaggcgggctcaatccaaaagcaacattcagcatcgaacagatttcgccttctgtcgctattctggactctgatgatggaatggggcactgcgcgctgataaaggcgacagaccacgctattagtctggcgagagagacggggctgggcttcgtcagcgtcaaaaatacgtcccattgcggcgcgctctcgtggttcattgagcaggcgacaagccagggaatggtggctatcgccatgacgcaaacggatacctgcgttgcgccgtatggcggcgcggagcgctttctggggactaacccaatcgccttcggcttccccgttaaagacagccatccgatgatcgtcgatatggcgaccagcgccattgcgtttggtaaaattctgcacgccaaagaaaccgggaaaccaataggtcatggtctggcgctggataaagagggacatatcactaccgatccgcataaaattgaaaatctgctgccctttggcggacacaaaggttctggtattgccctggcgattgatgcgctcacgggcgtcctgatgggggcaaactttagcaaccatattgttcggatgtatggcgactatgacaagatgcgcaagttagcgagtctggttatcgttattgatccgcagatgttgggcaatccgctgttttcctcaataatgagcacaatggtcaatgagctaagggctgtaaaaccgatgcccggtgttgataaagtgctggcgccaaacgatccgcaaatcgcctataaagaaaaatgtttaaaagaaggtattcctgtggctgaaggtatttaccagtacctgattggctga

SEQ ID NO: 368852 - DNA, 1017 bp, Salmonella enterica
atgaaaacgcttatctgtaataatccgggaaatatcgaatacattgaaagagatattcctcatttaaaagacgatgaagtactgttaaaaattaaagcggttggtatttgcggcaccgatatccatgcgtttgccggtcgccagcccttttttgcctatccgcgcgtgctgggtcatgaaatttgcggcgtggcggaaatattgggtaaatcgtgcagcacggcgaaggtcggccaacgctatagcgttattccctgtattccttgcggcgcttgcgcagcctgccgggaaggaaaaaccaactgctgtgagaacgtctcgctgtatggcgttcaccaggacggcggctttagcgaatatctggccgttcgtgaacaaaatctggttgaactgtcggataacctcaccgacagcgcgggcgcgctggttgagtgtttcgccatcagcgcccacgcagtacgccgcgctgacgtgaagccgcagcaaaacattgtggtggtcggcgccgggccgattgggctggccgccgccgcgatagcaaaagccaaaggcgctcgcgtcgcggtagctgatattgacgccgaacgccgtcgtctggtcgccgaaaaggtaggcgttgcaacgctcgatccgtcgtcagacgactatattgatgtgctgaaagcctgtttctccggtgaattagccggcattgtgcttgatgccaccggcaataaatcctccatgagccgcgctgttgatctgattcttcacggcggaaaaatcgtcttcatcgggctatatatcggcgagctcgtcattgacgatccgaccttccataaaaaagagaccacgctattgagcagtcgtaacgcgacgcgggaagacttcgaatgtgtcattgagctaatggctcagggcgctattagcgaaacaatgatgaaaaaccaggaattcgatttctatacgttcggcaaccagtaccagaagaacgtggtagaaaacaaaaaattggttaaaggcgttatcaaattttaa

SEQ ID NO: 368853 - DNA, 1473 bp, Salmonella enterica
atggacaccatagctcgccagttagacgccgcaaggcaccaattcaaaacgacttattcacgtcagggaatggaagccaacatcgtacatattggatttggcgcctttcaccgtggtcatcaggcggtttataacgatctcacgaatgagataaccggcaaccgctgggggatttttgaactgaatctgttcggcgatgcggagctggtggatgcgctaaatgcgcaacaggggctgttttcagtggtggaaacgtcagccagcgccatcaatagtcgcctggttcgtaccatcaccggcgcgttgcatacgccgaagtcaggtattcaggcggcgatcgagaagctgactgagccgcaggtaaaaattgtttcgttgacgataacggaaaaaggttactgcaccgatccacggtccagaacgctcgatctcagccatccgctcatcaaacacgatcttgccgatcctgaacatccccgctcagcactcggactgatcgtcgaagcgctacggatacgccgccagcaagggcttcccccgtttagtgtactgtcgtgcgataacattccggaaaacggtcatttgaccaaaacggcgatcgttacgtttgccgataatctcgatccgcaactggcggcctggatagcgaagcatgtcacctttcctggcaccatggtcgatcgcatcgtgccggcaatgacgccagagcaatttgacatgattaaagaccagatcggttttgccgatccctgcggcatcgtatgcgaggatttccgtcagtgggttatcgaagataatttcgttgccggtcgtcctgactgggataaagcaggggcgatgttcgtctcggacgtgcttccctatgaagaaatgaaacttcgtatgctgaatggcagccattcgtttctcgcctataacggcagcctggctggatatgagtttatctatcagtgcatggaagacgacgcttttaaaaccgccgtacatcatttaatgacggaagagcaggcaaaatcgctgcgcccgaatttggcggtagatgtacatcaatatgcgcagttgctcattgagcgattcagcaacccgaacattaaacataagaccggacagattgcgatggacggttctcagaagctgcctcagcgggccgtcgatccttatctgacgcttcaggcgcgcggcgttaagggcagggcgttagcgacgctgattgcgggctggctccattacgtcattaatacactctctcaggggcagagtgtggccgacccgctcaatgataccttcaatgcggctattaaaaataaaaacacgcgatgggaacaagcgctgtctttgctgcagataaatagcatctttggaacgctggccggcgacaacgcagactttttaaacgacattcagcaggcctttaaccatattgagttacatggcgtcacggccaccattcaccgtttatcttcaaagggttaa

SEQ ID NO: 368854 - DNA, 750 bp, Salmonella enterica
atggaacaaattttaaccaagcggcgctattttgatatagggctgcaaatagaagaactactctattcaggggtatttaaagctggcgagcgacttccggcggagagagaactcagcgagcgttttcaaaccagccgcacgacgattcgtgaggcgattattatgcttgagctgaagggggtggtagaggttaagcaaggcgcaggcacttactttattgatagtctggaaaaaatcaatcaaaaagcgctcttgccttactcagacattggcccctttgaattgctacaggcccggcaggttatcgaaagtaacatcaccggttttgccgctacgcaaataagatttaatgagcttaagcagcttaaacgtattattgagcagcaggaaaagcagattggcggcgacagcgacaaatttgaagaactggatcgtcagttccacaatatcatcgcggaatccacgcaaaatcgtgtattaatgaaacaatctgccgagctgtggcgggctgtcaggaccgaaaatccgcgctggaagcagttaaactataagtatttacataagaaagagttaagaatgaaatgggtggaagatcaccgtagtatcttccttgcattgcaaaaacgcgatgctgagcaggccagacaggcctcgtggacccatcttgaaaacagtaaaaatgagctggtaaaaatcttccaacaggatgattcgctggaagattttgatgattttttcttcgccacctga

SEQ ID NO: 368855 - DNA, 732 bp, Salmonella enterica
atgagcaaatttaaatttaatgccgtcattgttggcttgtttttgctgttaggcggttgttccagcggaatgcaatctaataatggctcttcatccgacgtcggcaccgcctggggcggcgacgtgcattcatcggtacaaagcgtttcggtagaacgtgccgatcgagaacctgccgaaatggtgataataaattactccactcaatatccgtcaggttacgataaagtttatagtatacgtatcagcgatcttgaatatgctgtgcgcgacgctaattttaattcgattccaattactcgtcgctacaacgcatcaatgggacaatggcaatatagtattcctgcaagatcagggatgaactatcagttatatattcgtaattacagtcatgataccaattacgaaatcgtcgcaacggttgatggcctggacgtgttgaacggaaaagcaggctcgctgaatcatcatggctatattgttaacgccggcgattcactggcgattaaagggtttcgcaaagataaacacactgaggcggcattccagttcgccgacgtagctgacgcttatgcggcccactccgcgcagggcgatgtacgcaacatcggcgtcatcggctttgccgcttttgcattgcagggtaaagcaacaaatacgctaccgccttgttcctcgcaggctttcccggcggacaacaacgggtatgcgccgccgccctgccgcaaataa

SEQ ID NO: 368856 - DNA, 1977 bp, Salmonella enterica
atgtctgacgacatgtctatgggttcgccttcgtcagcaggcgaacagggtgtactacgctccatgcaggaggttgcaatgagctcccaggaagccagcaagatgctgcgcacttacaatattgcctggtggggcaataactactacgacgtcaacgagctgggccatattagcgtatgccccgatcccgacgtaccggaagcgcgtgtcgatcttgccaaactggtgaaagcgcgcgaagcgcaaggtcagcgtctgccggcgctgttctgcttcccgcagatcctgcaacaccgtttgcgttcaattaacgcggcgtttaagcgtgcgcgtgaatcttacggttataacggcgactacttcctcgtttatccgattaaggtcaatcagcatcgccgcgtgatcgagtcccttatccattccggtgaaccgttggggctggaagcggggtcaaaagcggaattgatggcggtgctggcgcatgccggcatgacccgtagcgtgatcgtctgtaatggttataaagaccgtgaatacattcggctggcgctgattggcgagaagatgggccataaggtttatctggtcatcgaaaagatgtctgaaatcgcgattgtgctggaagaggccgagcgcctgaatgtggttcctcgcctgggcgtgcgtgcgcgtctggcctctcaggggtccggtaagtggcaatcctccggcggcgaaaaatcaaaattcggcctggcggcgacccaggtgctgcaactggtggagaccctgcgtgacgccgggcgtctggacagtctgcaactgttgcacttccacctgggatcgcagatggcgaacattcgcgatatcgcgaccggcgtgcgcgagtccgcgcgtttctatgttgagctgcataagctgggcgttaatatccagtgcttcgacgtgggcggcggtctgggcgtggattatgaaggtacccgctcgcagtccgactgttcggtgaactatggcctgaacgaatatgccaataacatcatctgggcgattggcgatgcctgcgaagagcatggtttaccgcatccgacggtgattaccgagtctggccgcgccgtcactgcgcaccatacggtactggtctctaacattatcggtgtggagcgtaacgaatacacggatccgactgcccctgctgaagatgcgccgcgcgcgctgcaaaatctgtgggaaacctggcaggagatgcataaacctggcacccgccgctcgctgcgtgagtggctgcatgatagccaaatggatctgcacgatattcatatcggctactcttccggcgcgtttagtttgcaggagcgcgcctgggcggagcaactttatctcagcatgtgccatgaagtgcagaagcaactggacccgcaaaaccgtgcgcatcgcccgattatcgacgaactgcaagagcggatggcggacaaaatgtacgtcaacttctcgctgttccagtcgatgccggacgcgtggggaatcgatcagctctttccggtgctgccgctggaagggttagatcaggtaccggaacgtcgtgccgtgctgctggatataacctgtgattccgatggcgctattgaccactatatcgatggcgacggtatcgccacgacgatgccgatgccggaatacgatccagagaatccaccgatgctcggcttctttatggtcggcgcctatcaggagatcctcggtaacatgcacaacctgtttggcgatactgaagcggttgacgtgtttgtcttcccggatggtagcgtcgaggttgagctgtcggacgaaggcgataccgttgcggatatgctgcaatatgtgcaactggatccaaaaacgctgttaacgcatttccgcgaccaggtaaaacagacggatctggacgatgcgttgcagcagcagttccttgaggaatttgaagcgggactgtacggttatacttatcttgaagatgagtaa

SEQ ID NO: 368857 - DNA, 300 bp, Salmonella enterica
atgacagaagattctaccatgagtctgaaggtcgctgacactggcagtctgagtgttaatcagtatggatggattaacatctggacggctattttaggtcacttcttcgcccaatttccagctttttttgaaggccgtcgcaatgtcggtcaaaatcaggcgataaacgtttctgataatgctgacattatgcgcatttatgctttgctttttttctgcgttctgggtataaaacgcgacgcgcggctcatacaaaagcacacgacgttttcttcgtgtcgccacttccagccgggttaa

SEQ ID NO: 368858 - DNA, 1155 bp, Salmonella enterica
atggcaaaacacctttttacgtctgagtccgtatcagaagggcatcctgacaaaattgcagaccaaatctctgatgccgtgttggacgctatcctgcaacaggatccgaaagcacgcgtcgcctgtgaaacctacgttaaaaccggcatggttttagttggcggtgagatcaccaccagcgcctgggtcgatatcgaagagattacccgtaatacggtgcgcgaaattggctatgtgcattccgacatgggctttgacgccaactcttgcgcggtactgagcgcaattggcaaacagtctccggatatcaaccagggcgttgaccgcgcagacccgctggaacaaggcgcgggcgaccagggcctgatgtttggctacgcgacaaatgaaaccgacgtactgatgcctgcgccaatcacctacgcgcaccgtctggtacagcgtcaggctgaagtgcgtaaaaatggcaccctgccatggttgcgtccggatgcaaaaagccaggtcactttccagtatgacgacggcaaaatcgtcggtatcgacgccgtggttctctctacgcagcacgcagaagatatcgaccaaaaatcgctgcaagaagcggtgatggaagagatcatcaaacccattctgccgtctgaatggttaaatacgtccactaagttttttatcaacccaaccggtcgttttgttatcggcggcccgatgggcgattgtggtctgaccggtcgtaagatcattgttgatacctacggcggtatggcgcgtcacggcggcggcgccttctccggtaaagatccgtctaaagttgaccgttctgcagcttacgctgcgcgttatgtcgcgaaaaacatcgtggcggcaggtctggcggatcgctgtgaaatccaggtctcctacgctatcggcgtagcggagccgacgtccatcatggtggaaacgttcggtactgaaaaagtgcctgctgaacagttgattctgctggtgcgcgaattcttcgacctgcgcccgtacggcttgattcagatgctggatctgctgcacccgatctacaaagaaactgcggcttacggccacttcggtcgcgaaaacttcccatgggaaaaaaccgacaaagcgcaactgctgcgcgatgctgccggtctgaaataa

SEQ ID NO: 368859 - DNA, 1395 bp, Salmonella enterica
atgcctgacaataaaaaacaagggcgttccaacaaggccatgacattttttgtctgctttcttgcagccctggcaggattactttttggcctggatatcggcgttatcgccggtgctttacccttcattaccgacgagtttcagattaccgcacacactcaggaatgggtggtcagctccatgatgtttggcgcggccgtcggcgctgtcggcagcggctggctctcctttaagctgggtcgtaaaaaaagcctgatgatcggcgctatcctgttcgtcgccggttcgctgttctccgctgcggcgcctaacgttgaagtcctgattatttctcgcgtgctgctgggtctggccgtcggcgtcgcttcctacactgcaccgttgtacctgtccgagatcgcgccggaaaaaattcgcggcagtatgatctcaatgtaccaactcatgatcaccatcgggattctgggcgcttatctgtcagataccgcgttcagctacagcggcgcatggcgctggatgctcggcgtgatcatcatcccggccattctgctgctgatcggcgtcttcttcctgccggacagcccgcgctggtttgcggcaaaacgccgcttccatgatgctgaacgcgtcctgttgcgcctgcgtgacaccagtgcggaagcaaaacgtgagctcgatgaaattcgcgaaagtttgcaggttaaacagagcggttgggcgctgttcaaagagaacagcaacttccgccgcgccgtgtttcttggcattttgttgcaggtcatgcagcaatttaccgggatgaacgtcatcatgtattacgcgccgaaaatcttcgaactggcggggtacacgaataccacggagcagatgtggggcaccgttattgttggtctgactaacgtgctggcaaccttcatcgctatcggcctggttgaccgctggggccgcaagccgaccctgacgctgggcttcctggtcatggcgattggtatggggattctgggtacgatgatgcacatcggcatccattcgccgtctgcgcaatacttcgctatcgctatgctgctgatgttcatcattggatttgcgatgagcgctggtccgctgatttgggtactgtgctccgaaatccagccgctgaaaggccgcgatttcggcatcacctgctccaccgcgaccaactggatcgccaatatgatcgtcggcgcaacgttcctgaccatgctgaacaatctgggtaacgccaacaccttctgggtctacgctggcctgaacgtgctgtttatcctgctgaccctgtggctggtgccggaaaccaaacacgtttcgctggaacacattgaacgtaacctgatgaaaggtcgtaaactgcgcgaaatcggcgcccacgactaa

SEQ ID NO: 368860 - DNA, 456 bp, Salmonella enterica
atgcgccgtctgcgggaaaatctcgcccaggcgaacctcaagctcgatagacattatccggagccgaaactggtgtatacgcaacgcggcacctcggcgggcaccgcctggctggagagctacgaaatccgcctcaacccggtgttactgctggaaaacatcgacacctttatagcagaggtcgtgccgcatgaactggcgcatctgttggtgtggaagcacttcggacgcaaggctccgcatggcaaggaatggaagtggatgatggaaagcgtgctgggcgttccggccagacgtactcatcaatttgcgctgcaatccgtacggcgcaacacctttccctaccattgccaatgccagcaacatcaactcaccgtccgccgtcataatcgggtagtacgcggcgaagcggtttatcgttgcgttcactgcggcgaaccactggtcgccgggtag

SEQ ID NO: 368861 - DNA, 708 bp, Salmonella enterica
atgtaccgtaatttttcttttgccgctgcgttgctggccgcagcgttttcaggccaggccctggccgatggcattaacaatttttctcaggccaaagcggcgagcgtcaaagtcaatgccgacgcgcccggcagcttttactgcgggtgccaaatccgctggcagggtaaaaaaggcgtcgtagacctggagtcctgcggctataaggtgcgtaaaaacgagaatcgcgccagacgcattgagtgggagcacgttgtccccgcctggcaattcggtcatcagcgccagtgctggcaggacggcgggcgaaaaaactgcgctaaagacccggtctaccgcaaaatggaaagcgatatgcataacctgcaacccgcgattggcgaagtgaatggcgatcgcggcaactttatgtatagccagtggaacggcggcgaaggtcagtacgggcagtgcgccatgaaagtagatttcaaagcgaagctcgccgagccgcccgcccgcgcccgtggcgcaatcgcccgcacttatttttatatgcgcgaccaataccaactgaaactttcccgccaacaaacgcagctttttaacgtctgggataagcagtaccccgttaccgcctgggagtgcgagcgcgatgcgcgtatcgcgaaggtccagggtaatcataatccctatgtgcaacgcgcttgccaggcgcgaaagagctaa

SEQ ID NO: 368862 - DNA, 732 bp, Salmonella enterica
atgcgtattccccgcatttatcaccctgaattgttgacgtccggtacgcagatttcgttatgcgaagatgcggccaaccatattggtcgtgtactgcgcatgggagcgggacaagcgttacagctgtttgacggcagtaatcaggtattcgatgctgaaatcattagcgccagtaagaaaagcgttgaagtgcaagtgatgaaaggcgaaatcgacgatcgtgaatcgccgctacatatccatctgggccaggtgatgtcgcgcggtgaaaaaatggaatttactatccagaaatcgatcgaactaggtgtaagcctcattacgccactgttctctgagcgctgcggcgttaaactggataatgaacgtctgaacaaaaagcgccagcagtggcaaaagatcgccatcgccgcctgcgaacaatgcgggcgtaaccgggtgccggaaattcgcccgccgatggcgctggaagcctggtgcgccgagcaagattccgggctgaagctcaatcttcatccgcgcgcccatgccagcatcaacactctgccgctgccggttgaacgcgtccgactgctgatcggcccggaaggcgggctgtcggcggacgaaatcgcgatgaccgcgcgctatcagtttactgatattctgttaggacctcgcgttctgcgtactgagacaaccgcgctcaccgccattaccgcgctacaggtgcgttttggcgacttaggatga

SEQ ID NO: 368863 - DNA, 948 bp, Salmonella enterica
atgatcaagctcggcatcgtgatggaccccatcgcacacatcaacatcaagaaagacaccagtttcgctatgctgctggaagcccaacgtcgtggttatgaacttcattatatggagatggccgacctttatctgattaacggcgaagcccgcgcccgcacgcgaacgttgagcgtggagcaaaattacgataaatggtacgagttcggcagcgagcaggagattaaactcgccgatctggacgtcattttgatgcgcaaagatccgccgtttgataccgagtttatttatgcgacctatattctggaacgcgctgaagaagaagggacgctgatcgtcaacaaaccgcaaagcctgcgcgactgtaatgaaaaactgtatactgcctggtttgccgatctgacgccggaaacgctggtaacgcgcaataaagcgcagctcaaagcgttttgggaaaagcacggcgatatcattatgaaaccgctggacggtatgggcggcgcgtccattttccgcgttaaggaaggcgatcctaacataggcgttattgccgaaacgctgaccgagctgggcaaccgctactgcatggcacagaactatttgcccgcgatcaaagatggcgataagcgcgtcctggtcgtcgacggcgagccggtgccttactgcctggcgcgtattccgcagggcggcgaaacccgcggcaacctggcggctggtggtcgcggcgaaccccgtccgttgagcgaaagcgactgggaaatcgcccgccgcgttgggccaacgcttaaagccaaagggcttattttcgtcggtctggatattatcggcgaccgcttaacggaaattaacgtgaccagcccaacctgcgtgcgtgaaattgaagcggaatacccgatctctatcaccgggatgttgatggacgccatcgaagcgcgtctggcgaagtaa

SEQ ID NO: 368864 - DNA, 564 bp, Salmonella enterica
atgaatttacagcatcactttcttattgccatgcctgcgctccaggacccgattttccgccgttccgtggtgtatatttgcgagcacaaccaggacggcgctatggggattattgttaataagcctttggaaaatctgcaaattgaagggattctggaaaaactaaaaattacgccggaaccgcgcgattcgtcaattcgtcttgataaagccgtgatgctcggcggcccgctggcggaagatcgcggatttattctccatactccgccgtcacgtttcgcctccagcattcgtatctcagacaataccgtgattaccacctcccgcgatgtgctggaaacgttaggtacccaacaacagccttccgatgtactggtcgcgctgggctacgcctcctgggataaaggccagcttgaacaagagctgcttgataacgcctggcttaccgcgcccgccgatctcaatattttgttcaaaacacccattgccgagcgctggcgcgaagcggcaaaacttattggcattgatattctgaccatgcctggcgttgcggggcacgcctga

SEQ ID NO: 368865 - DNA, 417 bp, Salmonella enterica
atgagcgacaccttactggcctttgacttcggcacaaaaagcatcggcgttgcaataggacaacgcattaccggcaccgcccgtccgcttccggcaatcaaagcacaggacggcacgcccgactggatgctcattgaacgtttgctgaaagagtggcagccggacgaaattattgtcgggctaccgctcaatatggatggcactgaacagccgctgacggcgcgcgcacgtaaattcgccaaccgtattcatgggcgtttcggggtaactgtcacgctgcacgatgaacgactcagcaccgttgaagcacgctccggtctgtttgaacgaggtgggtatcgcgcactgaacaaaggcaaagtggactcggcctccgccgtgattatcctcgaaagctattttgaacaggggtattaa

SEQ ID NO: 368866 - DNA, 687 bp, Salmonella enterica
atgtcatcacaaccgaatcaaagcctgatagatggcattcgctgtctgcaatatctggtctccagcgaccgtgctatcggatgtcgcgagcttgcccggctgatggatattaataccacgcgcgttaatcgcctgttaatgacgatggcctctattggactcacgatgcaggatgagcaccgacgctatttacccgggccaggcattcatgctttggcggcgcaggcgattcgtggttcagcgctgttctcccatgcgttgcctatccttgaacgccatgcgcccaaagacatcgtggtggcattaggcgtgctatgggaagaccagattatctatatttatcactctacgccgggttcgcagggaagtcaggcgctggcggggtttcgcatgtgcccggcctggcagtcggtaacaggagtggcgttactggcggcagaaagcgatgaggcgctaatgcagcgttttactccggagcaatggcgtaatctggcgccgcatgtggcgcagcagcgccagcggggatacgtgctgtggcatcacgctgatggtgaagtttctatggcgcaaccgctaggcaagcacgccgcagcgctggcctttgcgggaatgtggcggattgatgaggcggaggcggctgcgcgtttacaggcgttgaaggcattaaaccagcttattgcccagtaa

SEQ ID NO: 368867 - DNA, 981 bp, Salmonella enterica
atgaatatggaagaaattgtgacgcttagtgtaaagcataacgtctcggatctacacctgtgtaacgcctggcctgcgcgatggcgcaaacaaggacgcatggagaacgcgccttttaccgcgcctgatgtcgacaggcttctgcttgattggcttaatgatgcgcaacaatatcagtggcgaacgcacggccagcttgatttcgccgtctcgctgtctggcacgcggcgcctgcgcgccagtgcgttcacacatcaacagggaacgtcgctggcgctacggctattgcccgagcgttgtcctgatctggcggaaatccagacgccgccgatagtacccgcactgcttgccagcgagaacggactgattctggtcactggcgctactggctgcgggaaatccactacgctggcggcgatggtgggacatcttaatcaacatgccgataaacacatcctgacgctggaagatcctattgagtaccgttacaccagcaagcgttgcctgatacagcagcgggaaatcggccagcattgcgccacttttgccgccgggctgcgcgcggcgttacgtgaagatcccgatgtcattttactgggagagctgcgtgacagcgagaccattcgcctggcgctgacggcggcggaaacggggcatctggtactggcaaccctgcatactcgcggtgcggcgcaggcggtggaaagattagtggatagttttccggcgcaggaaaaagaaccggtacgcagccaactggcgggtagtctgcgcgccgtactatcacaaaaactggaggtcgacagacaggatgggcgcgtggcgttgtttgaattactgattaatacgccagccacagggaatttgatccgtgaaggcaaactccatcagttggcccacgtgatacaaaccgggcagcagcaggggatgatgacattcgcccagagcgcgcaatggcgtcaggcgcagggacgactgtag

SEQ ID NO: 368868 - DNA, 705 bp, Salmonella enterica
atgaaagatatcgcgcataacctggcatacatccgggacaaaatctccgccgcggcgacgcgttgcggccgctcttcagaagaagttacgttgcttgcagtgagtaaaaccaaacctgcgagcgacatcgcagaagccattgccgccggacaacgggcatttggtgaaaattatgtacaagagggggtggaaaaaatccgccactttcaggaagcgaaagtggaaggcctgcactggcactttattggccctttacagtccaacaaaagtcggctggtggccgagcattttgactggtgtcataccatcgatcgcctgcgtatcgcctcgcggctgagcgaacagcgtccggataatctgccggcgctaaatgttctgatccaaattaatatcagcgatgaaaacagcaaatcaggcattccgctggcggaactggatgagctggccgctgcggtggctacactgccgcgtctgcggcttcgcggactgatggcgatcccggcgccagagtcagattatgtaaggcagtttgaagtcgcacgtcaaatggctgtagcatttgccgggctgaaagcgcgctaccctgacgttgataccctatctctgggtatgagcgacgatatggaagccgcgattgcggcaggtagcacaatggtgcgcatcggcaccgctatctttggtgctcgtgattacacaaaaaattaa

SEQ ID NO: 368869 - DNA, 567 bp, Salmonella enterica
atgaatacgttgaccttcctgctctcaacggtaattgagctgtataccatggtgctattattgcgcgtgtggatgcagtgggcccgctgtgacttttacaaccctttctcccagttcgtggtgaaaattacgcagcccatcatcggaccgctgcgtcgtattatcccgccaatggggccgattgacagcgcttccctgctagtggcgtttattcttagcgttattaaggcgatagtgctgtttaaggtcattacgtttcaggcgattatctggattgccgcagtgcttatcttgcttaaaacaatcggcctgctgatcttctgggtgctgctggtcatggctatcatgagctgggtgagccagggtcgtagcccgattgaatatgtattgattcagcttgccgagccgctgctcagcccgattcgccgtatactgcctgcgatgggcggcatcgacttctcgccgatggttctggtgctgctgctgtatgtcgttaatatggggatcgctgaagtcttacaagcgacaggcaacatgttgctgccggggctgtggatggcgctatga

SEQ ID NO: 368870 - DNA, 291 bp, Salmonella enterica
atgagtgctgtgactcgctgcgaagacggtctggtgttacggctttatattcagccgaaagccagccgcgacagtattgtgggcttacatggcgacgaggtgaaagtcgccattactgccccgccggttgacggtcaggcaaacagccatctgaccaagtttcttggtaaacagtttcgcgtggcgaaaagtcagatcgtcatcgaaaaaggcgagctgggccgtcacaaacaggtaaaaattattcacccgcaacagatcccgccggaaattgcggcgttaactgagtag

SEQ ID NO: 368871 - DNA, 594 bp, Salmonella enterica
atgcaaaaagttgttctcgcaaccggcaacgccggtaaagtgcgcgagctcgcgtcgctgttaagcgattttgggcttgatgtggtagcgcaaacggaactgggcgtcgattccgcggaagaaaccggcctgacgtttattgaaaacgcgattctcaaagcgcgccatgccgccaaaatgaccggcctgcccgccattgccgatgactccggtctggccgttgacgttttaggcggcgcgccgggtatctattccgcgcgctattctggcgaaaacgcgacagatcagcaaaatctggaaaaactgctgcatactctacgggatgttccggacgacaaacgccaggcgcgattccattgtgtactggtttatttgcgtcatgcggaagatcccacaccgatagtctgtcacggtagctggcctggcgtcattactcgccaggcggccggaaatggcggatttggctatgatcccattttcttcgtaccgtctgaaggcaaaaccgccgcagaactgacccgtgaagaaaaaagcgcgatttcccaccgtggacaagcgctcaagctgctgctggatgcgttacgcaatggctaa

SEQ ID NO: 368872 - DNA, 1137 bp, Salmonella enterica
atggctaaactaccgccgctcagtctttatattcatattccctggtgtgtacaaaaatgtccatattgcgacttcaattcccatgcgttgaagggcgaggtgccacatgacgactacgtccagcatctgttaaacgatctggatgccgacgtcgcttgggcgcaagggcgtgaagtaaagaccatttttattggcggcggtacgccaagcctgctttccgggccggcgatgcaaacgctgctggacggcgtgcgtgcgcgcctgaatctggcggcggatgcggaaattactatggaagcgaaccccggcacggtcgaagccgaccgcttcatcgactatcagcgcgccggcgtaaaccggatctccattggcgtgcagagctttagtgagcctaagctgaaacgtcttggccgtattcacggtccacaagaggcgatgcgggcagcaagactggcaaatgggcttgggctacgcagctttaacctcgacttgatgcatggattgccggaccaaacgctggaagaggcgctgaatgatttgcgacaggcaattgcgcttaatccgccgcatctctcatggtatcaattgacgattgaacccaacactctgttcggttcgcgtccgccggttttaccggacgatgacgctctgtgggatatctttgagcagggccaccagttattaaccgccgcgggctatcagcaatacgaaacgtcggcctatgccaaacccggttatcagtgccagcataatctgaactactggcgctttggcgactatctggggattggctgcggcgcccacggtaaagtcaccttcccgggcggcaggatcctgcgcaccaccaaaacccgtcacccacgcggttatatgcagggacgttacctggaaagccagcgtgacgtgagtgatgacgataaaccctttgagttctttatgaaccgttttcggttgctggagcgcgcgcctcgcgccgaatttgtcgactataccgggcttacggaagcggttattcgtcagccaatcgacgaggctattgcccagggctacctgaccgaatgcgagcaatactggcagattacccggcacggtaaactgtttttaaactctcttcttgagttgtttctcgcggaataa

SEQ ID NO: 368873 - DNA, 1008 bp, Salmonella enterica
gtggttcgacaatggattgctggcgcagcgctgtttgccctgatttcaggctatagttgggcagaggttgctcaaccctccgataacatcttaaaagaacagtttagtaagcagtaccacggcatacttaaactggattccattaccttaaaaaatcttgattcgacgggcaatcaggccacctggtctgccgaaggggatatttcttcccgtgaagatatgtataccggcgttggtatggcggcggattattattttgttgaaaaaacctggaccaaagatcgtcccgttaaattttctgccatgttaaccagtaaagggacgccagcctctggctggacggtgaactattactcattacaaatggcagccagcgatcagggccgggctattgacgacattaaaacgaatgataaatacctgatcgtcaacagcgatgattttaactatcggtttggcaacattgaagcctcctggcgtgcgcagaaagcgtcgatccccggtcttgaagaacaactctctgccctggataagaaaatagcggtagctaaaaaagaagcggacgcgtattggggaaaaggcgctgatgggaaaccgttgacccgcgctgaggcgtttaaaaagacgttaaaagagcgcgatgattatgtaaaagccaacgatagcagcgtatatgccgagaaatacgaaaaagaggtctatcaaccggcattagacgcgtgccgtaagcagagtgagccgtgcaatgaagcggctattcagcagaaaagagatttagacatacacgagcaacggcggcaggtatttttgaaatcagaagagctgcgtcgaaaagcgcagaatgactggataacgttagagaaaggacaatatccgctgaatatagcggtacagaaacttcagatgcaacagagtgatatccgtgtgaaaattatggatattaatgacggttacgagcgctggaaaaaagatacggacgatttgcgtcgtaaaggagttattaaataa

SEQ ID NO: 368874 - DNA, 1047 bp, Salmonella enterica
atggagtttttcaggaaaacggcattagctgctctggtaatgggtttcagcggcgcagcgttcgctttaccgaatatcaccatcttagcgaccggcggaacgatcgctggcggcggtgattcagcaacaaaatcaaattatacggcaggtaaagtcggtgtcgaaaatctggtggatgccgttcctcaattgaaggacattgcgatagtgaaaggcgagcaggtcgttaacattggctcgcaggatatgaacgatgaagtctggctcacgctggcgaaaaaaatcaataccgagtgcgacagcaccgacggtttcgtgatcacccacggtactgatacgatggaagagaccgcttatttcctcgatctgaccgtgaaatgcaataaaccggtggtactggtcggcgcgatgcgtccctccacgtcaatgagcgcagatggcccgttcaacctctataatgcggtagtaacagcggctgataaacagtctgccaaccgcggcgtgctggtggtaatgaatgataccgtcatggacggacgcgacgtcactaagaccaatacgactgacgtggcgacgtttaaagcggttaactacggcccgctgggttatatccacaacggtaaaattgactaccagcgtacgccagagcgtaaacataccacctccaccccgttcgacgtgtcgaagctgaccgcgttgccgaaagtcggtatcgtttataactatgcgaatgcgtccgatctgccggcaaaagcgctggtagacgcgggttatgacgggatcgtgagcgcaggcgtgggtaacggcaacctgtataaaacggtctttgataccctggcgaccgccgcgcacaacggtacggtagtggtgcgttcttcacgtgtgccgactggcgcaaccacgcaggatgcggaagttgacgatgcaaaatacggctttgtcgcttccggcacgctgaacccgcaaaaagcgcgtgtcttactgcaactggcgttaacccagactaaagatccaaaacagatccagacgatgttcaatcagtattaa

SEQ ID NO: 368875 - DNA, 720 bp, Salmonella enterica
atgatgcgcaaaacgctgctggcggcagtgctaacgtttacggcgatggccgctcatgcagattacaaatgcagcgtcacgccgcgtgacgatgtgatcctgagtccacaaacggtgcaggtgaaaggtgaaaacggcaacctggtgatcacgccggacggcaatgtgatgtacaacggtaagcagtacacccttagcgccgcgcaacgcgagcaagcgaaagattaccaggcggaactgcgaagcgcgctgccgtggattgatgagggcgcccgatcgcgcgtcgaaaaaggccgcgtggcgctggataaaatcatcgctaaagaggtgggcgaaagcagcaacatgcgtagccgtctgacgaagcttgatgcgcaattaaaagcgcaaatgaaccgcattattgaacatcgtacggacggcctgacgttccactataaggctatcgaccaggtgcgtgccgacggtcagcagttggtgaatcaggcgatgggcggtattttgcaggacagcattaacgaaatgggcgccaaagtagtgcttaaaggcggcggcaatcctttacagggtgtgatgggcagcctcggtggtttgcaaaccgctatccagaacgaatggaaaaaccaggagaaagatttccagcagtttggcaaagatgtctgtagccgcgtagtgaccttagaagatagccgcaaagcgctggttggcagcctgaagtaa

SEQ ID NO: 368876 - DNA, 327 bp, Salmonella enterica
atggcaaagaaccgtagtcgtcgtctgcgtaaaaaaatgcacattgacgaattccaggaattaggattttcggtggcatggcgttttccggaaggtacatctgaagagcaggtcgataagactgtcgatgactttattaatgacgttattgagcctaataaactggcgtttgacggcagcggctacctggcctgggaagggctgatttgtatgcaggaaatcggtaaatgtaccgaagaacatcaggcgattgtgcgtaagtggctggaagcgcgcaaccttgaagaagtccgaaccagcgaacttttcgacgtttggtgggactaa

SEQ ID NO: 368877 - DNA, 720 bp, Salmonella enterica
atgaaaaacgacgtcatttcaccggaatttgatgaaaacggtcgcccgctgcgccgtattcgtagttttgttcgtcgccaggggcgactgacaaaggggcaagaacacgcgctggaaaactactggccggtgatgggcgtcgagttcagcgaagcgccggtagatttcgccacgttgtttggtcgcgaagcgccggtgacgctggagattggttttggcatgggggcgtctctcgtggcgatggcgaaagcgcgcccggagcagaatttcctcggcattgaagtgcattcacccggtgtcggcgcgtgtctggcatccgctcatgaagagggcgttgaaaacctgcgcgtcatgtgccacgacgcggtagaagtgttgcataaaatgattcctgacaattctttatcgatggttcagctctttttccctgacccgtggcataaagcgcgtcataataaacgccgtatcgttcaggtgccgtttgctgaactggtattgagcaagctgaaattgggcggcgttttccatatggcgaccgattgggaagcgtatgcggaacacatgcttgaagtcatgtcttctatcgacgggtacaaaaatctgtcagagagcaatgattatgtaccgcgcccggaatcgcgcccggtaacgaaatttgaacaacgtggccatcgtcttggtcatggcgtatgggacttaatgttcgagagggtgaaataa

SEQ ID NO: 368878 - DNA, 1053 bp, Salmonella enterica
atgcaagcgtctcaattttcagcccaggttctggactggtacgacaaatacgggcggaaaacgctgccctggcaaattaacaagacgccttacaaagtatggctctcggaagtcatgttgcaacaaacgcaggtgacgacggtgattccttactttgagcgatttatggcgcgctttccgacggtaacggatttagcgaatgcgccgctggatgaagtactccatttatggaccgggctcggctattacgcccgcgcacgtaatttgcataaagcggcgcaacaggtggcgacgcttcacggtggagaattcccgcaaacttttgccgaaatcgccgcgctccccggcgtcggacgttcaaccgccggcgcaattctctccctcgcgttaggtaaacattatccgattcttgatggaaacgttaaacgtgtgctggctcgctgttatgctgttagcggctggcctggaaaaaaagaggtggagaatacgctgtggacgttgagcgagcaagtgacgcccgcacgcggcgtggagcgttttaatcaggcgatgatggatctgggcgcgatggtttgtacgcgttcaaagccaaagtgcaccctgtgtccgctgcaaaacggttgtatcgccgctgcgcatgaaagctggtcatgctatccgggtaagaaaccgaaacagacgttgccggagcggacgggttactttttattgttacagcataatcaggagattttcctggcgcagcgccctcccagcggtttatggggcggactctactgctttccgcagttcgccagcgaagatgaattacgtgaatggctggcgcaacggcatgttaacgctgataatttgacccagcttaacgcgtttcgccacacatttagccatttccacctggatattgtgcctatgtggcttcccgtgtcgtcactggacgcctgcatggatgaaggcagcgcgctctggtataacttagcgcaaccgccgtcagtcggactggcggcccccgtggagcgcttgttacagcagttacgtaccggagcgccagtttaa

SEQ ID NO: 368879 - DNA, 276 bp, Salmonella enterica
atgagcagaacgattttttgtacttacctgcaacgcgacgctgaagggcaagattttcagctctaccctggcgaactgggaaaacgtatctataacgagatctctaaggacgcgtgggcgcagtggcagcataagcagaccatgttgattaacgagaaaaagctcaacatgatgaacgccgagcaccgtaagctgctggaacaggagatggtgagcttcctgttcgaaggcaaagacgttcatatcgaaggttatacgccggaagataaaaaatag

SEQ ID NO: 368880 - DNA, 1086 bp, Salmonella enterica
atgatgaaaaaattactcgcgcttgctgttattgcgccgttgctcatctcctgctccagttcgaccaaaaaaggcgagacgtataatgaagcctgggtcaaggataccaacggctttgatattttgatggggcaatttgccaacaatattgaaaatctgtggggatataaggaagtcctgattgccgggccgaaagactacgtcaaatataccgatcagttccagacccgtagccacatcaactttgatgatgggaccattaccgttgaaaccatcgccgggacggaacctaccgcacatctgcgccgggctattattaaaacgttgctcatgggtgacgacccaacctccgtcgatctttactccgatgtcgatgacataaaaatttctaaagaacccttcctgtatggtcaggtcctcgacaataccggccagcctattcgctgggaaggccgcgccacgacattcgcggattacttgctgaaaacgcggctcaaaagccgcagtaacggcctgcgtattatttacagcgtcaccattaatctggtgccgaaccaccttgataaacgcgcgcataaatacattggcatggtacgccaggcctcccgtaaatacggcgttgacgagtcgctgattctggcgattatgcaaacggagtcctcgtttaacccgtatgcggtcagccacgcggatgcgctgggcctgatgcaggtggtgcaacacagcgccgggaaagatgttttccgttctcagggtaagtccggcacgccaagccgtaacttcctgttcgaccccgccagcaatatcgataccggcacagcgtatctggcgatgttgaataatgtctatctgagcggtatcgagaatccgacgtcgcggcgctatgcggtcattactgcctataatggcggcgcaggcagcgtattacgcgtattctcgaacgataagattcaggccgcgaatatgattaaccgcatgtcgccgggggatgtgtaccagatattaaccacccgacatccatctgcggagtcgcgccgctatctgtataaggtgaattccgcccagcgatcgtatcgccgccgataa

SEQ ID NO: 368881 - DNA, 294 bp, Salmonella enterica
atgaatcttaagctgcagcttaaaatactctcttttctgcagttctgtctgtggggaagctggctcactaccctgggctcgtatatgttcgtcaccttaaaatttgacggcgcatctattggcgcagtttatagttcactggggattgccgccgtctttatgccgaccttgttaggcattgtggctgacaaatggctgagcgcgaaatgggtctatgccctgtgtcatgtcgtcgcgccatcacgctattcatggccgcggaagtcactacgcctggggcgatgttctttgtga

SEQ ID NO: 368882 - DNA, 1005 bp, Salmonella enterica
atggccgcggaagtcactacgcctggggcgatgttctttgtgatcctgcttaactcgttggcctatatgccgacgttgggcttgatcaataccatatcgtattaccgcctgcagtctgccggcatggatatcgtgactgacttcccgcctatccgtatctggggcaccattggctttattctggcgatgtggggcgtgagtttctccggtttcgagctgagccatatgcagctttatatcggcgcgacgctttccgttctgctggtactgtttacctttaccctgccgcacattccggtggcgaaccaacagaaaaaccagagctggacatcaatgctgggccttgacgcttttgcgctgtttaaaaataagcggatggcgattttcttcatcttctccatgatgctgggcgcggaactgcagatcaccaacatgtttggcaacaccttcctgcatagctttgataaagatccgctattcgccagtagctttatcgtgcagcacgcctcggtgatgatgtcgatttcgcagatttctgagacgttattcatcctgaccattccgttcttcctgagccgttatggtattaagaacgttatgcttatcagtattgtggcgtggatgctgcgtttcggcctgttcgcttatggcgacccgacgccgttcggtaccgttctgctggtactgtcgatgattgtgtacggctgcgccttcgacttcttcaacatttctggctcggtgtttgtcgaaaaagaagtacgcccggaaatccgcgccagcgcgcaggggatgttcctgatgatgaccaatggcttcggctgtatcctgggcggcattgtgagcggtaaagtggtggagtattacactcaaaacggcattaccgactggcagaccgtgtggctcatcttcgcaggctactcgctggtgctggccttcgcgttcgtagccttgttcaaatacaaacacgttcgcgttccggcaagttcgcaacccgttgcacattaa

SEQ ID NO: 368883 - DNA, 2136 bp, Salmonella enterica
atgaaatcaatgaatattgccgccagcggtgaactcatcccccgtctatccacccaccgaaacgtagtggcgctggacagtaccgactttaccgatgtggccgcagtcgtcattaccactgccgacagccgtagcggtattctggcgttgcttaaacgcaccggttttcacctgccggtgtttatgcttgcggatgaacccgtcagcgcgcctgtcggcgttacggcggtaatcggcgggaacgcgcaggaatggctggagttggaaaacgccgccagtcgctacgaagcggaacttctgccgcccttttatgacaccctgacccaatatgtcgacatggggaatagtacctttgcttgtccggggcaccagcatggcgagttttttagaaaacatcccgcaggccgccatttttatgacttttttggtgaaaacctgtttcgtgcggatatgtgtaacgccgatgtgaaacttggcgatctgctaatacatgaaggttctgccaaacacgcgcagaaatttgcggcaaaagtgtttaatgcggataaaacctactttgtgctgaatgggacttcggcggcgaataaagtggtcaccaacgccctgctgacgcgcggcgatctggtgctgtttgatcgtaataatcacaaatccaaccaccacggcgccctgattcaggccggggcgacgccggtctatcttgaagcggcgcgtaacccgtttggttttatcggtggtattgatgcgcactgttttgatgaaacgtacctgcgcgaccagattcgtgacgtgatgccggaaagcgccgatgcgctgcgtccgttccgcctggcgatcattcagctgggtacctatgacggcactatttacaacgcccgtcaggtggtggataaaatcgggcatctctgcgattacattctgtttgactccgcgtgggtaggctatgagcagtttatcaatatgatggcggatacctcgccgttgcggctggagcttaatgaaaacgacccagggatctttgtgacccaatcggtacataagcaacaggcggggttctcacaaacctcgcagatccacaaaaaagataaccatattcgcggccaggcgcgtttttgcccgcacaaacgcctgaacaacgccttcatgttgcatgcttcaaccagtccgttctacccgctgtttgcggcgctggatgtcaatgccaaaatccacgaaggggagagcggtcgccgcctgtgggcggagtgcgttgcgctgggcattgacgcgcgtaaagccattctcgcccgttgcaaactgcttcagccctttatcccactggtggttgacggcaagccgtggcaggcatatccgacggagaccattgccagcaatcgtcgtttcttcagttttgagcccggggcgaaatggcatggctttgagggttatgcggatgaccagtattttgtcgacccctgtaaactgttactgaccacgccaggtattgatgccgatagcgggcagtacaccgaattcggcatcccggcgaccattctcgcccactatctgcgtgagaacggtattgtgcctgagaagtgcgatctcaactcgattctgttcttgctgacacccgccgagagcgaagagaaactggcgcggctggtcgcgatgctggcgcaatttgaacggcacattgaagacgatacgccgcttgcggatgtattgccgacggtttttcagaaatacccggtgcgctaccgcgattacaccctgcgtgagctatgtcaggagatgcacaatctgtacgttagctttgacgttaaggatctgcaaaaagcgatgttccgcaaagaaagcctgccgcatgtggcgatgaacccacaggacgccaacagcgcctttattcgcggcgatgtagaactggtgcgtatcagcgaggcgggcgggcgtattgctgccgagggggcattgccatacccgccgggcgtactgtgcgtggtgcccggggagatttggggcggcgcggcgcagcgttattttttggcgctggaagagggcatcaatctgttgcccggtttttcgccggaattgcagggggtatatagcgagaccgatgccgatggaattcaacgcttgtacggatatgttttaaagtaa

SEQ ID NO: 368884 - DNA, 708 bp, Salmonella enterica
gtggtaattggaccttttattaacgctggcgcaattttattcggcggcgttattggcgcgctgttaagtcagcgtctgccagaacggattcgcgtctcaatgacgtctatttttggtctgtgctctctgggaattggcattctgctggtgatgaagtgcgctaatcttccggtgatggtgctggcgacgctggtcggcgcgcttatcggcgagttttgtttgctggaaaaaggcattaatggcgcagtcgcgaaaatccaacaattatttatggcatcgggtaagaagccgacacacgactcatttattcaaagttacgtcgctatcattgtacttttttgcgccagcggcaccggtattttcggcgcgatgcatgaagggatgaccggcgatccaaacattttgatcgctaaatcttttctggattttttcactgccattattttcgcctgttcgcttggcatcgccgtttcggcgatttgcgcgccgatgttgattatccagttaacgcttgccgcctgcgccaccctcattcttccactgaccacgccggcaatgatgggcgactttagcgccgtgggtggactgctgctggtggctaccggcttgcgtgtatgtggaatcaaaatgtttccggtagtgaatatgctcccggcgctgttgctggcgatgccgatctccgccgcatgggcgatgttttttgcctga

SEQ ID NO: 368885 - DNA, 381 bp, Salmonella enterica
atgataattgacagaattgatcaccttgtattaacggtatctgatatatcaaccacaataagattctacgaagaggtacttggtttttctgcggtaacatttaaacaaaacagaaaagcgttaatatttggagcgcaaaaaattaacctccatcagcaagaaatggagttcgaaccaaaagcgagtagaccaacgccgggatctgccgatttatgttttattacatcgacaccgataaatgatgttgtgtctgagatcttacaggcaggcattcccattgttgaaggcccggttgagagaactggagccacaggcgagataatgtctatctacatcagggaccctgatggaaacttaattgaaatttcgcagtatgtttaa

SEQ ID NO: 368886 - DNA, 1326 bp, Salmonella enterica
atgatgaatgttaatgcagtgtatgccgaaaaatgcgtgacgcctgacgaggcggttactttaattacctccggcagtcacctctctatgggaatgtttgcagcagagcctccagctttgctgaatgcgctggcaaagcgagcgaaaaggggagaaatcaacgatctgcgggtttactgttatgaaacagccagcattgccgggaacactattttccgttatgagctaagtgactatattcatctctacagtatgtttattaccggtattgaacgggctttaatacgtcaggggattgagagttccgggcgaaaaatagttaactatgtaccttcaaattttcatcaggcgacgcgattactagctgatgatattggtattgatacctttattcacaccgtgtcccctatggataagtatggctattttaattttggaactggaaacgattattccacccggattgcgaggacagctaaaaagcttattgtcgaagttaacaaatatatgccgcgcgttcatggagaaggtgctgcaatccatatttcagaaattgacgccattgttgaaaaccatgtccctttaattgaactaccaatacgtactgccgtagccgaagatattgctatcagtcagattatcgcttctcttgtgccagatggcgcttgtctccagatgggggtcggcgcattaccggagctcatctgtaatgcgctcaaggaacataatgatctgggggtccatacagaggcgctgaatccggggttggtaagtttgattcaacaaggcgtcgttaccaatcagcgtaaaaatatcgaccggggaatgtctgtatttacttttgctatgggacaaaaggatatgtatgactatctcaacgacaacccctctttttttagtcggcctgtcgattatgttaacgatccggggatcattgcgcaaaatgagaatgttgtctccattaacgctaccttacaaatcgatctcactggtgcctgtaactctgaatatttgcttggacaccagtacagcgcttcaggagggcaattggattttgtcagaggcgcatatgcatctaaaggaggtcgttccattattacgacccgctcaacggccgcgaatgatacgatttctcgtattgttccccgccttgaggggcctgtaacaaccccacgaacggatacgcactggatagtcactgaatttggctccgtaaacctgaaggggctctcttcaaccgagcgtgcgctcagcatcattgaattggcacatcccaattttcggcagcaacttagagtagatgcaaaaaaaatgcatctgatttaa

SEQ ID NO: 368887 - DNA, 528 bp, Salmonella enterica
atgaacacgttattacccgcttataaaaccattagcgaggggcgctaccgagaaatttcgggtctttactgggaggattttcatcccggtgatgtttttgaacatcgtcccggccggacggttctggacgccgataatgtgtggtttaccctgctcactctcaatgtgcagccggtccatttcgatgcggcttacgccagcaaaacggaatggaaaaagttactggttgattcaacgttcactctggcgcttttaaccggtatgagcgtgcgtactgtcagcgccaaggtcgtggccaatcttggctgggataaggtacaagccgtccatccggttttcgcaggggatacactttatgctgaaagcactgtactcagcaaacgcctgtcaaatagtcgcccgggacaaggcatcgttaccgttcggacatgtggtattaaccagaatggtgtagaggtcatgcgcttcgaacgaacaatgttagtttattgctgtggatgttcgcctgaagaagacgccgcttattga

SEQ ID NO: 368888 - DNA, 843 bp, Salmonella enterica
atgcccgatatttctcatacaccgacacgtagctggctttttaccccagcaattcgaccagaacgtttcataaaagcagttgaaagtgcggcggatatttctattatcgatcttgaagattccgtcaccccgaatgacaaggcgcaggcccggaaaattgcgatgcagttcctttcatcccgaccaaactcatcgctgaaaatagcattaagaattaatggaatgaatactcatgctggcattgaagacctgcatatgttactggaatgccgtttttttcctgattacattattcttccgaaaacagagtcagccgcgcacctgcaaatcgtggatagtcttatcatgatggctggttctgatactcgccttattggcattattgagtcagttgttgggcttaatgccgtagagtctattgcggacgccacccccagactctgcgggttgatgtttggcgccgcagatatggcggctgacattggcgcgacacccgcctgggagcctcttgcgctggcgcgggccagaatagtggctgcctgcgctatgaaagggcttcttgcaatagatgctcccttctttgatataggcgatttttcaggtctgaaagaggaaacgctgcaggcgctcagttttggtttttctgcaaaatcggctattcaccccgctcagattagtgtaatcaacgccgcatttactcctacaacggcagaaattaatcatgctcgtgcagtactgacagagaatgccaaaggcgtcgggatcgttagcggcatgatgatagatgcagccgttgcccgtcaggcccggagattactcgcccgggcagggatcttttcctga

SEQ ID NO: 368889 - DNA, 879 bp, Salmonella enterica
atggaactgcgccatattcgctattttctcgccgtcgctgaagagcggcatttcacgcgggctgcgacaaaattaggcataggtcagccgccgctaagccaacagattaaggatctggaaagagagctgggagcgcagctattccggagagtgcctcatggcgcggaattaaccgaggctggaaaagcattttatgatgttgttaaagggatgcctgctaccgcgacaagagccgtgctggcggcgcagcgtgttgccaggggggaatcgggcgtgttaagggtgggttttactgcctctgcggcatttaacagtgtggtgcccggcgcaatccgtactttcaagcgggcttatcctgacgttcgtttgcagcttgaggaaggaaatacaactcaactggctgatgaattgaatgaaggatcgctggatgttgcctttctgagacccggttttacaggcaatgaacggttccagctcaggttactgtctgaagagccaatggttattgtgctggcagaaacgcatcctgctgcggcgtgtaaacagattgcactctcgattctcaaagatgagttttttttactcttcccacgtgaaatcggcctgtcgctttatgacgcagtgatcaaggcctgcggtaaagcgggctttgaaccgaaaattggtcaactcgtgccgcaaatttcgtcagtcattaaccttgtgtcggcagagatgggcgtgtcgatggttccagattcaatgagacaggttaatgtcaagggagtagtataccgccccgttgcagaccagatgcccgtcgcaaagctggctctggcataccggcgcggcgatacatcgccaacgctgagaaacttcatcctgaaagtcactggctga

SEQ ID NO: 368890 - DNA, 1740 bp, Salmonella enterica
gtgaaaaaagaagtaacacttgccacactcagcattatcttctccggtacggcgcacagtacgcaaaacgaacgtcctgatattatcgtgattatcgctgatgatatgggatattctgatatcactcccttcggtggggaaatcccaacgcctaatttgcaggcgatggctgagaacggcgtgcggatgagtcaatattacacgtctcccatgtctgctcccgcccgtgcgatgctattaaccgggaacaccagtcagcaagcgggtataggcggtatgtggtggtatgaaaataccataggtaaggaaggctatgaattgcgcctgactgatcgggtgacgaccatggctgaacgctttaaagatgctggttacaatacgctgatggcgggtaaatggcatcttggttttacgccaggctcgacgccaaaagatcggggctttcgtcattctttcgccttgatggggggaggcgccagtcactttgatgatgccgtgccgctgggaaccgtggagatatttcatacctattatacccgtgacaatcagcgcatttcactgccctctagtttttactccagcgaagcctatgccagccagattaatcgctggatcagcgagacgccacgggaacaacctatcttcgcgtggttggcctttactgcgccacatgatcctctgcaggcgccggatgaatggattagtcgttttaaacgtcagtatgaacagggctatgcaaacgtctatcgtcagcgtattgctcgtttgaagaaactgggtttcctgcgtgatgacatacctctgccaggactggaacttgataaagaatggcaggcaatgaccccggaacagcagaaatatacggcgaaggtgatgcaggtttacgctgctatgatcgccaatatggatgcacagattggcaccgttattgagacattaaaaaagaccgggcgcgataaaaacacgattctggtcttcttaagtgataatggggtgaatccggcagagggctttcactatgaatctgaaccagatttttggaagcaattcgataatcgttacgaaaatattggtcgtaaaaattcatttatctcttatggtccccactgggctgatgtcagcaatgcgccttatggtcgctatcacaaaacgaccagcggtcaggggggaattaataccagttttatgatttccggtcctggtatcatccatcatggcgccatagataacgccacgatggcggcgtatgatgttgcgcccacgctctatgaatttgcaggtattgatgccagtaaatcattatctgaaagaccgacactgccaatgatcggcgtgagttttaaacgctatctgaccggtgaaagtctgcacgcgcctcgcacacaatatggtgttgaactccataatcaggcggcctggatagatggggaatggaaattgcgtcgtcttgtcacagtattcccacaggcgggtaatgctccatgggaattattcaacctgcaacgtgaccccctggaaacgcataatctcgcagcagattatgtggataaagtgaaaatactgagcagtgcatatgaggcatttgcaaaacagacaatggtgctttatgccaaaggcaagcttatcgattatgtgggtatcgacagtaaaaccgggcgttatctggctgtcgatccacagacattgcagccagttcctgctccgttagcgattcctttagacacaaaatcggaccaataa

SEQ ID NO: 368891 - DNA, 861 bp, Salmonella enterica
gtgacgatcagtaatagtctgcaaacgaatgcgacgttgttaaacgatgcctggtgccgtctgtttcgcgacaataattttactattggcatcagtcttgagggcagtgaagacttgcaaaatcatcatcgtccgggcaaacgcggcgaggccagctatccggcggtgttgcggggaatcacattgttacaacactatcgagtcgattttaatgtactgattgtcgtgcatgatgacatggctcgccatgcggcagccatctacgatcatgttgttagccttggcgctcgttatctgcaatttcagccactgatgaacgaaggcaacgccctacagcaacgttaccaattgagtgcggataactggggacgtttcatgattgatatctggcgtcaatggcgcaaacgcggcgatatgggacgggtttttgtgatcaacattgaacaggcatgggcacaatattttacgcatatcagcgccacctgtgtccattccgcccgctgcggaacgaatctggtcatggagccggacggcaaactctatgcctgcgatcatctgattaatagccagcattacctgggacagcttgctaataatacgttagcgccagccgtagattccgcaacccggcttccctttggtattaagaaaagccagcgccgggagtgtcaacggtgttctgtgaaaatagtctgccagggaggctgccccgcacatatcaacagtgccggctacaaccgactttgtagcggctattactcttttttcacggagattctggctccgctacgcgcctggccccgggatctgaatggactgaaagcctggcgtgctgacgttatgggtagattttcgggctga

SEQ ID NO: 368892 - DNA, 243 bp, Salmonella enterica
atgttgaatctcaacacattacggcaacaacaaatccccgtaatgacggaatatcgcgcgcagataccctttcatattctggcaaaacccataggccctgcatgtaatctggcctgccgctattgttattacccacagggcgaaacgcccgtagaaaaaatgaatgaatcaacgctggaggtttttatttgtcgctatattgcggcgcaacctgccagtgcgcgtgaaattaattttgtctag

SEQ ID NO: 368893 - DNA, 684 bp, Salmonella enterica
atgtcagccttatcaactactggccataatgacgggatcactctccattgcttacagagcattgcgcaactcattcctctgtcgtcggcggttttttatcgtgttaatgcttatttaaagccggaagcctatgttttacataatatttctaatagcacacaccaacaatatctggagcattttcaaccattagacccgctatcgccttcccgattcggccaacaggttattacagtagcgacgatgacgcccggcatctgtgctcgtcatcgccattattatcatgaatttatgctacctaatcatgtgtgcgacatgattgagatctttattcgtcggggccatcgtattatcgcgggcatttcattaatgcgcgatatacctttttccagcgaagagcgtttgcgagcccaggcagtacaaccattactgggactggcaattcatgattctcttcaggaagacaacgatctggcgtcaatattgaccgccaaagagcgtgaaattgtgggaatggtctgcgaaggggccagcaacaaattgattgcccgtcagttgaatatttctctctcaacagtgaaaacgcatttacgtaatatttttgctaaaacagaagtgataaatcgcacggaactggtttcccgaaccagaatgtcttcggtacaacattcacagcatatgtga

SEQ ID NO: 368894 - DNA, 558 bp, Salmonella enterica
atgtcctccgtcccctggtttaagaacgcattaatgaatatggtgttacgtgatttgagcggctggcgttgtgaaaaattgaccgaacatagcgccgtgctgcatctgaatgcatttacccaggttatctgccatgttcagcaaaaacggttattcatggccagtattcacagttgtgaattcagggtgaaaggcacaatcaattatcctttgcagggcaaaattcgcgttcatcagcccggatggctgaaacgttatcccgtcatttttactggcagcaaaagtaccgccgggctgattaactatcttaattgtttccccaatttacaacaggcactgagtgaactggattatcgtcggtttacgctggttttacatcataaggaatggtattgcggcattgagctatgggctgctagcgaagtggtttgtaaaatgccgccgctgcgccgttatctgcggcttgagcggcaccagcgtgttcttctgcttagtgtgataaatatgatcaatcaggccatgaatcaatggctgcaacaggataccgacgccagataa

SEQ ID NO: 368895 - DNA, 1500 bp, Salmonella enterica
atgtttaaaaacagacttgccagccatcttgaacgtggcgttattggtttccccacgacgcttgccagctccgtcgggctgattatggcaagcccggtgatcctgaccgtgaccagtggttttggctcagggggagatacctttgctcttgcggtattactggcatttattatgatgcaagcgcagattaccacctttgccgaagcggcaacgcttattcccacgactggctccgtctacgactatatttcctgcgggatggggcgttttttcgctatcaccggtgcgctttgcgcttacctgatcgtacacatttttgccggcacggcagaaacgattctcgctggcgtcatggcgctggtgaactttgagtctgttagcgaacacgtggccatgcagcacaatacctggatggttggcgtcggcatggtagtggttttcgggttactgaatgccattggtgttgaagtatttggcaaggtggaagtgtttcttacattcggtatgtggactaccctgaccatcttcggtttatgcgggatcctgttatccccggtcactcatcattccgggtggtttggcgcaccgcttgatgtcagtaatctttctggtctgtttggttatattggcatggcgatgtttatgttcgtcggttgtgaactggtcacgccaatggcgccggaaattaaaaaagcgcatcgtacgattcccagagcgatggcgcttggccttttagcggtggcaggttgtatgttcctctatggcgctgcgattaaccggcaggtaaataatgtggtggtcgatgcggcaaaccatatctttttactggatacgccgatggctattcccgcctttgccaatcgtgtcatgggacatgtcgggcaatactggctgggcgtggggttgttgttagcgggatgtgcgacgattaatacgctaatggcggcagtaccgcgtattatatacggcatggcgctggacggcgctttgccgcggtttctgacctggttgcacccccgctttaaaacaccggtcatcgccatcgcattcggtgttgcgattccctgtttacatgcctggtatctgaacggtgatatcgaccacattgttccgctgatcctcgctgcggtctgcgcctggggagtagcttatctgctggtaacgttatcggtcgttatcttacgtattcggcgccccgatttaccacgcgcttaccgggccccctggtttcccttacctcagattatttcgagcgtgggtattattatcgccattattaatatcgcgcctccaggaatgaacagtcgggatgtacttataccattcggtattatgcttggattgactgccgcctatgccttattctggacattatgtgtgcaacgggttaatcctttcctcccgcttccggtagaagaggtcgtggaacgggctatgggcaattatgaaaagcgaaacaatgaagagatgacgccagatgtcctccgtcccctggtttaa

SEQ ID NO: 368896 - DNA, 375 bp, Salmonella enterica
atgcacgcttttaaactcaatcaacctgttcctgaattacagccaatcgggagtgtcagcctgttgggggcgttgccaacagaaggcgatccccaggtcgccgttgcgatgatttacggtaaacctgaggacgtatttacctgtggactgttttcatcgacccgcggcggtttcactatgatttatccctttaccgagcacgcaaccgtgctggaaggggaagtggaactcactgttgcgggtcaggaaccgatacgtttttcaccaggcgatagttggtttgttgaacagggaaccgaagtggcatggaaagttttaacgccccgttttgtaaaacattatctggcaaaagttgaaagccataagcagggttga

SEQ ID NO: 368897 - DNA, 1302 bp, Salmonella enterica
atgaatacaaaaatcgatgcgttgaattactacggcgcgacgaaaaaatacccgttgcattttcctgctctgcaagacgatattgatgccgatgtggtgatcattggcggtggcttttcaggcatcaataccgcgctggaactggcggagcaggggatcactaatgttgtcgttctggaagcccgccatcttgggtatggcggcaccgggcgaaacggcggtcaggtgatggccggtataggtcacgacatcgaagccgttaaaaaatatgtaggcgcagcgggaatggagacgctgtttaaaatctcgaacctcggcgcaggtattattcgggagcgaattcgtaaataccatattgaggctgattttgtccccggatatggttatctggcctacaaccagcggcagttaaaaacgctgcaacaatgggaaaaagaattcaaagctgctacgccggaagatgatattgaactctataccggtaaagacgtgcagcaggttattggttccgacgtctactgcggtgttctcaagcatatggggggagggcatgtccactcgctgaatttattgctgggctccgctcaggctgcgaattcgctgggggtgaagatattcgaatattcacctgtggttgaggtcagttacggtaaaactgtgcgggtacgtactgcgatgggcagcgtaaaagcggccaaattgctgtgggcctgtgatagttttctcaataatctggaaccagaaatttataagaaaacgctggttacttattcttatcaggtctctacagaacctctctccagcgagcttgttgagcggatcagtcccttgcgcggggcttttagtgatatccgcccggtgataaattactaccgtctcacaaaagaaaaccgtctgctgtttggcagcgccacaaggtttcttgaatataccccgcacgattttgctgcctggaaccgcactctgttgacggaggtctttccttatttgaaagacgttaaaatcgattttgcctggggcggaccgatggcctgtagcgcgaatctgtttccgcagattggcacgcttcgtgagcacaataatgttttttatgttcagggttattccggatttggcgtcacgccttcccatattgtatgcaaaatcctggccgaaggaataaatggcggttccgagcggtatcgtctgatgagtagcattccccacgcgacaatttatggtcgcgacagtctacgtctattgctggtcagtgcgggaaaactgatacatcaaacagccggtttctggaaaggccggaattaa

SEQ ID NO: 368898 - DNA, 1485 bp, Salmonella enterica
atgagcgacgtgacattacttgccgaagtaacgacttttttacgccaacgacacggacaatttattgcaggtgaacgtcaggccggaaacggcacgaacttctcggtcactaacccagccaccggcaaaatcatcgccgacgttgtgtcggcaacccctgcgcaggcagaagaggccatgcagagcgccagacgggcgtttgatgtctggcgtaaaatgccaacgttacaacgcggcgcattactgctgaaactggctgatactcttgccgctcatcgtgaagagttagctcaactggaaagcgtctgttcaggtaaaacgattacgctgtcgcgcggtcttgaactcgatcagtcagtggccttcctgcgttactttgccggttgggcaggaaaaataaccggtgaaacgctgaatgtctccctgccatcaatgggagaagagagatacacagcgtttacccaacgccaacccattggcgtggtcgtcggtattgtgccgtggaatttctcaattatgattgctatctggaagctggccgcagcgctggtatgtggctgcaccatcgtcattaaaccaagtgaatataccccgctgacactgctgcgagtcgctgaactggctaaagaggcaggtttccctgatggcgtaattaacgtggtaaacggtgctggcggtgagatagcgcaacagctgatcgcgcatccagattgcgccaaagtgagtttcaccgggtcagttgagacaggtgagaaagtccggcgttcggcaacatcgtcaggaaaacgcgttaccctcgaactgggagggaaaaatgcggcgctgtttctcaatgatctctcggcacaagccatggtcaacggtattcttgaagccggttatctgaatcaaggacagatttgtgctgccgcagagcgtttttatctgccccaggaaaaactggatacggtcatgacgctcctcaggcaacggttatcggagatcgtgcccggctcgcctttagatgaaaaaacggtgatgggcccgctggcgaatcaggttcagcttgaaaaagtgctgcatctgattcaacgcgcacgggaagaaggggatactattgtttacggcggtgaaactttacccggcggagggttctttttacagccgacagcggtaaaagtgcgtagtaaaaacagtacgctgatgcacgaggagacctttggccctgtctgtagctttatcggttatcagaatgaaaaagaggcgctttcgcatatcaacgcttcgccattcggccttgctgcaagtgtgtggtcggaaaatatgtctaaggcattacgctacgctgaagatattgatgctggcatggtgtgggtcaatatgcataccttcctcgatcccgcggtaccctttggagggatgaaaggatcgggtagtggtcgtgaatttggcagcgcgtttattgatgactataccgaacttaaatctgtcatggtccgttattaa

SEQ ID NO: 368899 - DNA, 381 bp, Salmonella enterica
atgatgacgccaaccattccggtcgcgctattcgacaggctcttggttgaggggataagcccacatgaattggtacgacgcaagttaatgtgtttattcaactcttgcgccgtgccaggtggcgagacattaccgccgctgctcactcggggtatgccggaatggcacgaggtgaatgtgggtgacaaacgggttctcaactggttttgccgtgagcttcgcgctgctattttacgttatgaaccgagcatcaacatgctgaaagtcagtgtaaaagatgcccatcatcagacgctggcgttgtctttggaagcgatgttacaggatgagtctgaaccgttaaggctggagatagcctactctaacggtagatggcgctag

SEQ ID NO: 368900 - DNA, 486 bp, Salmonella enterica
atggatgcgatttttttaaagctcgacaatatcaaaggcgaaagccaggttgaaggctttgaagatcagatagagatcatgtcttatagccacaatgtggcaatgcaggtaaataacgatgttagcctcactgagcggacttccgggcgcgcgcatgttggtgaaatgtcgctcaccaaatttgtcgacctcgccacgcctgtgctcaatgagtactgctgtagcgggaggctaattagaaccgcggtgctgacgttgtgccgcaatgacgacggcaaaatgcggtcgcttatcgtttataccctgacaaacgtgctgatatcacaactcagtgttagcggcggcgccggcggtaagccggtggaaacgatgtcgctgaacttcacgaaaatcgaatggcaaatcactgccgagaaatcagacggcgctcagcaggagtccagaacgtcagtatgggatctggcgatggaccagatagggaaatga

SEQ ID NO: 368901 - DNA, 924 bp, Salmonella enterica
atgggatatttaaaattacctgagggtaaaaggattgcggtcaatcttggtgttgatgtagatgctcagtctttatggctgggcggatttaatcgaccgtcgccatcctttatgtcacgaggagagtttggtgctcaagttggcgtaccaaggcttctgaaattgttcaaagaaaataatatcaaaaccaccttttttattcccggacacactgtagacaccttcccggaaatcattaaagcaatttttgatgccgggcatgaaatcgctcaccatggctactatcatgaaaatccgacgctggtgaatcgtgatacagaacgccgacttatggatctggcgttcgcctgttataaaagacatttcggcatacgccctgtgggataccgttctccctattgggattatagcgagaatacgctggatcttctggaggaagccggttttctctatgacagtagcctgatggcgagagatcttgtgccttaccatcctcaacgttggcaggtgaattgggagacgggaaatatcgcaggcccggccagcgcgattctggaaattcctgttagctggtatctggatgattttcccgcactggcgtataccggcaaccaggaggggatgagcgatactgacggtgttctgcgacgctggaaggatatttttacctatgcttatcaccatcaggaaaacggtttatatgcgatggcccttcatccgcagataatcggtcatgggcatcatatgatgatgttgtcacgtttgattgaacatattaaagggcatgatggcgtatggtttgcaacctgtgaagagatagccagtgtctgggtggatgacgaagaggatcgacaaaaaatgctccgtcctgatgttcgtggcgtagcgccggttccggatgattatggctggccgggcaaatga

SEQ ID NO: 368902 - DNA, 879 bp, Salmonella enterica
atgtcacgtaattttactgtttcagcctgtcagtatattgttaccgaaataaacacttttgaagatttcataacaaaagtaaggatacttcttaataaaagtcagggtgctgatgtcgttatcttcccggagctatttaccattgagttatttacattattgaaaaaatggcaagaaagacccatttcacaccttactttaattgatcagttcacggatgcctataagcagctttttcaacaggaagcgaaagaaagaggacagttcattattgctggctctcatctggagcagactggagcagatcgctatgagaatgttgcgcatatatggggacccgatggcgaacattatgctcacagtaagacgcatatcttcccggctgaacggggttggtatactcaggaaggcgataaaatggctgtttttcaactgccatttgcaaaggtgggttttaatatttgttatgaagcagaaataccggagtgtgccgcgacgctggcggaacagggtgcggagttaattttaacgccttccgctacgtttactgaacagggattttggcgagtcaggcattgttgccacgcacgttgtattgaaaatcaaatttatcttgttcactgttgcctgggcggaaacccgggcgggccactgccaggctgctgggcccgaagttcaattttaagcccctgtgatgtcgtgtggaaaaatccacaaggtattatcgcagaggcgcacgtcaatcaagaggatgtcatttcaggagaaattaacctcgatgttctatatgaaaatagacttgggggggcagcaacaacgttcaaggacagacgcagaaaagcaggcatatataatatctggccatcacacattaaataa

SEQ ID NO: 368903 - DNA, 1305 bp, Salmonella enterica
atgaagatgacaaaattaagatggtggattatcggcctggtctgcgtagggaccatcgtaaactacctgtcccgtagctcgcttagcgttgcggcgccagcgatgatgaaagaactccattttgatgagcaacaatattcctgggtggtgagcgccttccagctttgttacaccattgcgcagccgatcaccggctatttgatggatgtcatcggactgaaaatcggcttctttatctttgccttgttatggtcgctgatcaacatggcgcacgcgctggccggcggctggataagtctggcatttctgcgtggtctgatggggctaaccgaagcgtcagcgattccggccgggattaaagccagcgccgaatggttcccgacgaaagaacgcggtattgcggggggactgtttaatatcggtacttcgattggcgcgatgctggcgccgccgctggtggtctgggcgatgctgacctttgctgatagcggcatcggtactgaaatggcgtttgtgattaccggtgggatcggcgtgctgttcgccatcacctggttcctgatttataactcgccaaataaacacccgtggatcacccacaaagagctgcgttatatcgaagacggccaggaaagctatctccaggacgataataaaaaaccggccgttaaagagatcgttaaaaagcgtaacttctgggcgttggcgattacccgttttctggctgacccggcatggggaacgctgagtttctggatgccgctgtatctgattaacgtgatgcatctgccgttaaaagagatcgccatgtttgcctggctgccgttcctggcggcggactttggctgcgttgcaggcggtttcctggcgaagttcttcatggaaaagatgcacatgaccacgatcaatgcgcgtcgttgtagctttaccatcggcgctgttttgatgatttcgatcggttttgtcagcattacgactaacccgtatgtcgccattgcattgatgagtattggcggttttgcgcaccagacgctgtctaccgtcgtgattaccatgagcgctgacctgttcaagaaaaatgaggtcgcgacggttgccggtctggcaggatctgcggcatggatgggacagttaagcttcaacctgtttatgggggcattggtcgctattatcggttacggcccgttcttcattgcactcagtctgttcgatattatcggcgccatcatcctgtgggtactgattaaagatccagaaaagcaccacccgccaatgacggaacagccgctggcgtctcaccgctaa

SEQ ID NO: 368904 - DNA, 1185 bp, Salmonella enterica
atgaaacaaacctggcgctggtacggacctaacgacccggtaacgctgtcagatgtacgccaggctggcgcaaccggcgtggtaacggcgttacaccatatcccgaatggagaaatttggtcgatagacgagatccagaaacgtaaagctatcgttgaagaggcgggtctggagtggtctgtggtagagagcgtacctatccacgaagatatcaaaacccacaccggtcagtacgatttatggatcaaaaactaccagcaaacgctgcgtaacctggcgcaatgcggtatctatacggtttgctataactttatgccggtgctggactggacacgtacggatctggaatacgtattgccggatggttcaaaagcgttgcgttttgaccagattgaattcgccgcgttcgaactgcatatcctgaagcgtccgggagcagaagccgactatacggcagaagaaattgctcaggcagagcgacgtttcgccaccatgagcgaggaagacaaagcacgtctgacccgcaacattattgccggtttacctggcgcggaagaaggctatacgctggatcagttccgtcaacacctggcgacgtataaagatatcgataaagcaaaactgcgtgaacattttgcctatttcctgaaagccattattccggttgccgacgaggttggcgtgcgtatggccgttcaccctgacgatccgccgcgccctattctcggcctgccgcgcattgtctctaccattgaagacatgcaatggatggtggaaaccgttaatagcatggcgaacggcttcaccatgtgtaccggatcttacggcgtgcgcgccgacaacgatctggttgatatgatcaaacagtttggtccgcgcatctactttacgcatctgcgctctacgctgcgcgaagagaatccgaagaccttccacgaggccgcccatttgcacggcgatgtggatatgtatgaagtcgttaaagcgattgtggaagaagagcaccgtcgtaaagccgaaggtagcgacgatctgatcccaatgcgcccggaccacggtcatcagatgctggacgatctgaagaagaaaacgaatccgggttattccgccattggccgtctgaaagggcttgcggaagtccgcggcgtcgaactggctatccagcgcgctttctttagcaaataa

SEQ ID NO: 368905 - DNA, 1473 bp, Salmonella enterica
atggaacagaatatcgccaccgcccaggtttccgtcgcccgcccaaactgggacaaatcacgtctggtatcccgtattgtgcatctgggctgcggggcgtttcaccgcgcgcaccaggcgctctttacccatcatttactggaaaagagcgacagcgactggggcatttgtgaagtgaacctgatgccgggtaacgacgcgcggctgatcgcgaacctgaaagcgcaaaatctgctgtacaccgttgcagaacgcggcgcagaaagcaccgaactgaaaattatcggttcaatgaaagaagcgctgcaccctgaattcgacggccatgcagggattctggcggcaatggcgcgcccggaaaccgccatcgtctccttaaccgtgaccgaaaaaggctactgcaccgaccccgccagcggcgagcttgatgtcaataacccgctgatccaaaacgatcttgcccatccacagcagcctaaatccgccattggctatattgtcgaagcgctaaacatgcgccgggagcaaggactgaaagcttttaccgtgttgtcatgcgataacgtacgcgagaatggtcacgtcgcgaaggctgccgtcctcggcctggcaaaagctcgcgatgccgccctcgccgcatggattgccgacaatgtgaccttcccctgcaccatggttgaccgcattgttccggcggcgaccgaagagacgctacaactggttgccgaccagttaggggtttatgatccttgcgctatcgcctgcgaacccttccgccagtgggtcatcgaagataactttgtgaatggtcgcccggactgggacaccgtcggcgcgcaattcgttgcagatgtcgtaccgtttgaaatgatgaagctgcgtatgcttaacggcagtcactctttcctcgcctatctgggttatctcggcgggtatgacactatcgccgataccatgaccaacccggcttaccgtcgcgcggcgctggcgctgatgcttgatgaacaagcgccgacgttatcaatgccggaaggcaccgatctggaagggtatgcgaatttgttgatcgcgcgtttcactaacccctcgttgaaacaccgcacctggcagatcgcgatggatggcagtcagaaactgccgcagcgtttgttggacccggtacgtctgcacttgcaacagggcgatgactatcgccgcctgacgctgggcgtcgccggatggatgcgttacgtcggcggtatcgatgaacaaggtaaaaccattgatgtcgtcgatccgctgctcgcgcagtatcaggcgattcatcagcaatatcagacgccggaagaacgcgttcgcgggctactggccatcgagtctatctttggcagcgacctgccgaagaaccacgaatttgtgcaagccgttaccgacgcttaccaacagctattgcagaacggcgcgaaagccacggtagaagcgctggctaagtaa

SEQ ID NO: 368906 - DNA, 1413 bp, Salmonella enterica
atggctacgtttatgactgaagattttctacttaaaaacgacattgcccgcacgctgtaccataaatacgccgcgcccatgccgatttatgacttccactgccatttaagtccgcaggaaatcgccgacgatcgccgtttcgataacctcggtcagatctggctggaaggcgaccactataaatggcgagcgctacgaagcgcaggcgtggatgagtcgctgatcaccggcaaagagaccagcgattatgaaaaatatatggcctgggccaataccgtaccaaaaacgctgggcaatccgctgtatcactggacgcaccttgaactacgccgtccatttggcattacaggtacgctgttcggaccggataccgcggaaagtatctggacgcagtgtaatgagaaactggcgacgccggccttttccgcgcgcggtattatgcagcagatgaatgtgcggatggtcggaaccaccgacgacccgatagattctctggaatatcaccgccagatagccgccgacgacagcattgatattgaagtcgcgccaagctggcgccccgacaaagttttcaaaatcgaactggacggctttgtcgattacctgaggaaactggaagcggcggcagatgtcagcattacccgtttcgacgatttacgtcaggcgctcactcgccgcctcgaccatttcgccgcctgcggctgccgcgcgtcggatcatggcattgaaacgctgcgatttgcgccggtgcccgacgacgcgcagcttgacgccattctgggcaaacgtctggctggcgaaacgctgagcgaacttgagatcgcccagtttaccacggcggtgctggtctggctgggccgtcagtacgccgcgcgcggctgggtgatgcagctacatattggcgcgatccgtaataataatacccggatgttccgcctgctggggccggataccggctttgactccattggcgataataacattagctgggcgctctcccgtttgctcgacagtatggatgtgaccaatgaactgcccaagactatcctctattgcctgaacccacgtgataacgaagtcctggcgaccatgatcggtaacttccaggggccgggaattgccggaaaagtgcagtttggttccggctggtggtttaacgatcagaaagacggtatgctgcgccaactggagcaactgtcgcaaatgggactgttaagtcagtttgtcgggatgctgaccgactcccgcagtttcctttcttatacgcgacatgaatatttccgtcgtattctctgtaacctgctgggacagtgggcgcaggacggagagattcctgatgatgaagcgatgctaagccgtatggttcaggatatctgcttcaataatgcccagcgttatttcacgattaaataa

SEQ ID NO: 368907 - DNA, 1056 bp, Salmonella enterica
atgtttaaaaaagtattaggcttgcgccactggaataataatgttgtaaaaataccgccgccagcagaatctggcgctaatgcatctgacgtggtggtggatactcctgagccttatgagcggatactgtgtcaaaaaattctgatggggatctcgacgatcgatatcattcgtaatgccatcattaagtcctgtgagcagctcaacattgaaaaagaacgcattaatgaacttaacgaacagaatgataaagccagaagttcattaaaatcgctcgtggaatttatcaccgaaattggcacgacttcatcggatattggctgtcgtatgggcgacttaaatacctccttaacgcaaattaatgcgtgtattaaagagatacagaagatcgctaaccagaccaatttgatagcgattaactccgcgatcgaggccgcgcgcgtaggggatgccgggcgtggttttagcgttatttcgaaagaggtgaaaaacctgtccgaagatgttaaacacagttcgaaaagcgtcagtacgttaacctctgtaatcaaagataatacggccagagtgagtgaggtactggataaccaacagccggttattgataatattacgactaacataaatcaaattgtggagtctattggcatcgtcatcgataaatcgctgagcatgaaatcggtcatgcagtacatctctacggtgcagtttttgaatattgtcaaagttgaccatgttatctggaaaatggaagtctacaaattactcttaaataaagacataaacagtaaaataacgatgcacgatcagtgtcggctggggaaatggtactacggttttgaaggacagcagtttagcaattactacagtttccgtagtctggaagcgcctcataaagaggtgcataccgctggccactctgcgctgaactattttgccgcaggcgatatgaatgcgatgtcgcaagaactcgacagaatggagcgatccagtaatgaggtggttaaccagctggaaatgctggctgtcgatttgttaaaagaaaccacactgtga

SEQ ID NO: 368908 - DNA, 1857 bp, Salmonella enterica
atgagcaaaggaaccaccagtcaggatgcccccttcgggacattattgggttacgcccccggcggcgtagcgatctactcttcagattacaattccctcgatccgtgggacgacgacgacgcagcttttcgtagctacatcgacgatgaatacatggggcataaatggcagtgcgtggaatttgcccgccgttttctctttctgaattatggcgttgtttttactgacgtcggcatggcctgggaaattttctcgctgcgttttctgcgcgaggtcgtgaatgacaatattttgcctttgcaggccttcccgaacggttcgccgcgcgcgccggaggccggggcgttgctcatctggcaaaagggcggcgagtttaacgaaaccgggcacgttgcgattatcacccaactcctggataacaaaattcgtattgctgagcaaaacgttatccacacgccattgccgccagggcagcagtggactcgcgaactggaaatggtcgtagaaaacgggtgttacaccctgcgcgacacctttgatgacacgacgattttaggctggatgatccagaccgacgacacgcaatacagtttgtcacagcctgacatcgcgaatcagtcgctggcgattcgcggcgcaagactgccagagaaaggtcagtttgacggtccgtggctggatgagcgcgatccgttacaaaaagcctatgtacaggcgaacggacacgttatcaatcaggacccgtaccagtattttaccatcaccgagagcgctgaacaggagcttatcaaagcgaccaatgagttgcatttgatgtacctgcacgccacggacaaagttttaaaagacgataatctgctggcgctattcgatatccccaaaattctttggccgcgcctgcgtctctcctggcagcgccgtcgtcaccatatgatcaccggtcgtatggatttctgcatggatgaacgcgggctgaaagtctatgaatacaatgccgattccgcatcatgccataccgaagcgggattaattctcgaaaaatgggctgagcagggctataccggtaaagggcataacccggcggagggcttaattaacgagctggcaggcgcctggaaacacagtaaagcgcgtcctttcgtccatatcatgcaggatgatgatatcgaggaggactatcacgcgcagtttatgcagcaggcgctgcatcaggccggtttcgcgagcaaaattctccgcggtctgggcgagttgcgctgggatgacgccgggcagttgatcgatggcgacggacggctggtgaattgtgtctggaaaacctgggcgtgggaaacggcgatggagcagatacgcgaagtcagcgagacggagtatgccgcagtgcctattcgtaccgggcacccggaaaatgaagtccggctgattgatgtattactgcgcccggaagtgttggtgtttgaaccgctgtggacggtgatcccgggtaacaaagcgatcctgcccatcctgtggtcgctcttcccgcatcatcgctatttgctcgacacggattttaccgttaacgatgagctggtgcagaccggctatgcggtaaaaccgattgccggacgttgcggtagtaatattgatttggtgagccatcaggaagagctcctggataaaaccagcggcaagttcgccacgcagaaaaatatctatcagcagttgtggtgcctgccgaaggtcgccgggaagtatattcaggtctgtacgtttaccgtgggcggtaactacggcggtacgtgcctgcgcggcgatgattcattagtcattaaaaaagagagcgatattgaaccgttaatcgtcatcaaagcgtaa

SEQ ID NO: 368909 - DNA, 558 bp, Salmonella enterica
atggcagataatacttatcaacccgcaaaagtctggacgtgggataaatccggcggcggcgcgttcgctaacattaatcgcccggtttccggcccgacgcacgacaaaacgctgcccgtcggcaaacatccgttacagctttattcgctggggacgcctaacggccagaaagtgactattatgctggaagagctcctggcgctgggcgtgaccggcgccgaatatgacgcctggttgattcgcatcggcgagggcgatcagttctccagcggctttgttgacatcaatccgaactcaaaaatcccggcgctgcgcgataactcacacaacccgccgattcgagtttttgagtcgggcgcaattcttgtttatctggcggataagtttggccatttcctgccgcaggatctggctaagcgcacagaaacccttaactggttgttctggctacagggcgcggcgccgttcctcggtggcggtttcggtcatttctatcattatgcgccggtaaaaattgagtacgccattaatcgcttcaccatggaagccaagcgctga

SEQ ID NO: 368910 - DNA, 504 bp, Salmonella enterica
atgaacagtattttttattctgttattatattgctattactgaccggcgcgatactcttcctgatgtgggaggttaataaaaaacgtcctggtggaaaaatcgtaaatttaaatcaaactgaacccatgacaaaggaagagggcgaagatcatttctcagtattaatgaattcgataacgccggtatggtactggcgcgttaaccatgaatatatcgatttccttcatgcaacgataaaacgaatgacaatgactgagttgaatgaaacgcctggattatttgacgcacagcgtcgttgcagcgaccttaactctgccgtttataagtattacgacaatattaagaagcgttgtctgaacggagaaaaggtgccgtattcggatttggacgtccttaatttacgccagtgttttcgcgagttcagtcttgaagcctacccggcattggtcgcgctggtatggccggaatatcagcgcccgcaggttaacccggatgagatttag

SEQ ID NO: 368911 - DNA, 411 bp, Salmonella enterica
atgcttcctgagcatctggtttcctctcattttcgcctgtcatcgccgccccctgaagccacagaaaacagtaaaaatttgcctcagggaaagacaaaactcagcgattacgagcccgatattttaatttgcgctaacgcaaccgggcaacacagaaacgtattatttgaagaacgcgaccgtcatattaaagaacgtctgtattgtgtggctaaaattgaaacgtttgcccgcctgataaacgcactacaggcagaaggcaatattgatgcccaaacactaagtaaaatactggcggataaaaccgcaatgataaatgaaaaaggtaatgccatttggcttaatttaatcactcgcgaaaccaatatgccgctattttattcactggaagataaagatgaaagaagttga

SEQ ID NO: 368912 - DNA, 405 bp, Salmonella enterica
atgaaagaagttgaagacaataacgtttatttggctttagacaaccataaaagtgatgaatttatcttaaagcaaaatcttgcagcgctaatcgccagtaaaaatgccaccctggaaaaggtaacgcaggaggtggtatccataccggcggcgttagtgcgcctgaagtggcaaaaccgacgagagatgtatacgttacaggtcaaagaggagatttatggcgcgaccatcaatgctattatcgagcagcatcctgaattacgagacaaaattatgtctcgtcttgaaagtgactggcagcatctgctggctcgcgagacggcaaccttacgtctgacgcgtaagctttccgatggcgactaccggacgcgcaacgtcaccaccgtcgcacggcaagaaaaataa

SEQ ID NO: 368913 - DNA, 885 bp, Salmonella enterica
atgtctcatctatacgaccctaccacgcagtattacaccggcgaatatcctaagcaaaaacagccggcgcccggcgtccaggcgaaaatgacgcctgttcctgactgtggcgaaaaaagttatgtcggcagtggtcgccttaaagatcgtaaggcgctggtgacagggggcgactccgggattgggcgcgctgccgctatcgcttacgcgcgtgaaggcgcagatgtcgcgatcaactatctgccagcggaagaagaggacgcccagcaggttaaagcgctgattgaggagtgcggtcgtaaagcggtgttattgccaggcgatcttagcgacgaatccttcgcccgttcgctggtccataaggcgcgtgaagcgctgggcgggctggacattctggcgctggtagccggtaaacagacggcaatcccggagataaaagatctgaccagcgagcaatttcagcaaaccttcgccgttaacgtttttgccctgttctggataacccaggaagcgattccgctgctgccaaaaggcgccagtattatcacgacgtcgtctatccaggcgtatcagcccagtccgcacctgctggattatgcggcaaccaaggcggcaatcctcaattacagccgtggcctggcgaaacaggtggcggaaaaaggaattcgtgtgaatattgtcgcgcctggccctatctggacagcgctgcaaatttccggcggtcaaacccaggataaaattccgcagtttggtcagcagacgccaatgaagcgggccggccaaccggcagagctggcgccggtgtatgtctatctggcaagccaggaatccagttacgttaccgcagaagtgcacggcgtgtgcggcggggagcatttaggctaa

SEQ ID NO: 368914 - DNA, 426 bp, Salmonella enterica
atggcaatgcgtcttaacgagaacctggatgacaacggcgaaatgcatgaaatcaacgtgacgccgtttatcgatgtcatgttggttctgctgattatctttatggtggctgcgccgctggcgacggtggacgtcaaggtgaatctgcccgcttctaccagtacgccacagccgcgtccggaaaaaccggtttatctgtcggtgaaagcggataacaccatgtttatcggtaacgatccggtgacggatgatacgatgattgccgagctaacggccctgacggaagggaaaaaggatactacgattttcttccgtgcggataaaaccgtagagtatgaaaccctgatgaaagtgatggatatgctgcatcaggcgggctatctcaagattggtctggtcggcgaagagaccgcgaaagcgaaataa

SEQ ID NO: 368915 - DNA, 735 bp, Salmonella enterica
gtgggtaataatttgatgcagacggatctttccgtctggggcatgtatcagcacgccgatattgtcgtgaagtgcgtgatgattggtttgattctggcgtcagtcgtcacctgggctatcttcttcagtaaaagcgttgaatttttcacgcaaaagcgccgcttaaagcgcgaacaactgcaattagccgatgcgcgctctttagatcaggcttccgacattgcggcaggtttcagcgcaaaaagcctcagcgcacagctcatcaatgaagcgcagaatgaactggaactctctcagggcagcgaagataacgaagggattaaagaacgtaccggcttccgtctggaacgtcgcgtcgcagcggttggccgctacatgggacgaggcaacggttatctggcgacgatcggcgccatttcccccttcgtcgggttgtttggcaccgtatggggcattatgaatagcttcatcggtattgcgcaaacgcagaccaccaacctggcggtggtcgctcctggtattgcggaagcgctgctggcgacggcgattgggctggtagccgcgatcccggcggtcgtcatttacaacatcttcgcacgtcagataggcagttacaaagcgacgctgggtgacgtggcggcgcaggtattgctgctgcaaagccgcgatcttgatctgaatgcgagcgccagtgcgcagccggtacgcgccgcgcagaaattacgggtagggtaa

SEQ ID NO: 368916 - DNA, 138 bp, Salmonella enterica
atgcgtaagcgcaaagaaaaagcagtaaaggtgcggcagtatgtaaatagtaatgagaacgactatcaattcgacgttgttttgatattattatgctcagattttgtgatttgcgtcctggagatacagagtgggtaa

SEQ ID NO: 368917 - DNA, 1188 bp, Salmonella enterica
atgacggataaacagttggataccaaactggtaaacgcaggacgcagcaaaaaatacacgcttggctcagtgaatagtgtgattcaacgcgcttcttcactggtgtttgacaccgtcgaggccaaaaaacacgctacccgcaatcgcgccaacggcgaattattttacggacgccggggaacgctgacccacttttcgctccaggaagccatgtgtgaactggaaggcggcgccggatgcgcgctcttcccgtgcggcacggcggcggtcgccaacaccattctggcattcgttgagcagggcgaccacatcctgatgaccaacacagcctatgaacccagccaggatttctgcagcaaaattctcggcaaactgggcgtgacgacaagctggttcgacccgctcatcggcgctgatatcacgcaacatattcaaccgaacacgaaagtcgtatttctggaatcccccggttctattaccatggaagtacatgatattccgagcattgttagtgcggtcagacgcgtcgcgccagaagccgtcatcatgattgataatacctgggcggctggcgttctgttcaaagctctggaattcgatattgatatctctatccaggcgggcactaagtatctgattggtcattctgatgcgatggtcggtactgccgttgcaaatgcgcgctgctgggaacaattgcgggaaaacgcctatctgatggggcaaatgctcgacgccgacacggcttatatgaccagccgcggtctgcgcacactcggcgtgcgactgcgccagcatcaagaaagcagcctcaaaatcgccgcatggctggcgaaccatcctcaggtcgcgcgcgttaatcatccggccctgccgggtagcaaaggtcatgcgttctggaaacgagactttacaggcagcagcggcctgttctcctttgtgctcaataaaaagctgaccgaggcagaattatcagcctatctggataacttttcgctgttcagtatggcctactcctggggaggctacgaatcgctgattattgctaatcagccggaacagatcgccgcgattcgtcccgcaggcggcgtagattttaccggtacgctggtccgggtgcatattggtttagagagtgttgatgatttgatcgctgatttagccgccggcttcgccagaattgtgtaa

SEQ ID NO: 368918 - DNA, 660 bp, Salmonella enterica
atggctgtcattcaagatattatcgctgcgctctggcaacatgattttgccgcgctggcgaatccacacgttgttagcgtcgtctactttgtcatgttcgccacgctatttttagaaaacggtctgctgccagcatcattcttacctggcgatagtctgctgctactggcaggcgcgttgatcgcccaggatgtgatgcattttttgccgacgattggcattctcaccaccgcggccagtctcggctgctggctaagttatatccagggacgctggctcggtaatacgcgtaccgtcaaaggctggctggcgcagcttccggcaaaatatcatcagcgcgccacctgcatgtttgaccgccacggtttgttagcgttgcttgccgggcgctttctggcgtttgtccgcactctgctgccaacaatggcgggtatttccggcctgtccaaccgccggtttcagttttttaactggttaagcggcctgctgtgggtgactgtcgtgaccagcttcggctacgcgctcagtatgatcccgtttgttaagcgccatgaagaccaggtaatgacatttttaatgatccttcccgtcgcgctactggtcgccggactgttaggtacgctggtcgtggtgattaaaaagaaatactgtaacgcctga

SEQ ID NO: 368919 - DNA, 918 bp, Salmonella enterica
atgaaaaaatggcgcgttatgaatcgtgaagcaatttgcttacagttggcggataaaattaatcatttaaaaaataatgataaaataatcagcgagcggctggcgggcattcgtctgttgtatggtgttgaaccggggccgcgcacgccggtcatgtatcagcctggcatcatatttctcttttccggccataaaattggctatattaacaagcgcaagtttcgttatgacgctaatgaatatctcttactgaccgtgccgctcccttttgaatgcgagacctgggcaacgccggaggtaccactggccggtattcggctcgacattgatgtgctgcaactgcaagagttgctcatggacattggcgaagatgaacgtttccagttgccgatggcggccagtgggattaactccgccacgctgtcggacgagattttatgcgcggtggaaagattgctggatgtgatggagcgcccgctggatgcgcggattctgggaaaacaaattattcgcgaaattctttatcatgtgctgatgggaccgcgcggcggggcgctgcttgcactggttagtcgccagacgcactttagcctgatcagtcgcgtacttaaacagatcgaaatgaaatacaccgagaacctgaatgttgagcaactggcggcagaagcgaacatgagcgtgtcggcgtttcaccataattttaaggcggtcaccagcacctcgccgttgcagtatttaaaaagctaccgactgcataaagcgcggatgatgatgattcacgacggtatgaaggccagcgccgcggcgatgcgggtcggctatgagagcgcatcgcagtttagccgggagtttaaacgttattttggcgttacgccgggcgaagatgcggcaagaatgcggacaatgcaagggagctaa

SEQ ID NO: 368920 - DNA, 1164 bp, Salmonella enterica
atgaacaatttcaaattacatacccctacccgcattctgtttggtaaaggcgctatcgtcgatcttcgcgatcaaatcccgcaggacgcccgcgtgctgattacctatggcggcggtagcgtgaaaaagaccggcgtactggcgcaagttcaggaagcgttaaaaggactggatgttcgggagtttggcggtattgaaccgaacccgtcctatgaaacgctgatgaaggccgtgcagcttgtgcgcgacgaaaatattaccttcctgctggccgttggcggcggttccgtactggacggcaccaaatttatcgccgcagcggcgcagtatacggacggcgtcgatccgtggcacattctggaaaccggcggtactgagattcgtagcgcaatcccgatggggtctgtgctgaccctaccggcaaccggctcagaatcgaacgccggcgcagtcatttcccgtaaaaccactggcgacaaacaggccttccactcctcgttcgtgcaaccggtgtttgccgtactggacccggtctacacctatacattgccgccgcgccaggttgcgaacggcgtcgtggatgctttcgtccataccgttgagcagtacgtcacttacccggttaacggcaaaattcaggatcgtttcgccgaaggtattttactcacactgatcgaagaaggtcccaaagcgctgcaagagcctgaaaattatgacgtccgcgctaacgtgatgtgggccgctactcaggcgttgaatggcctgattggcgctggtgttccgcaggactgggcgacacatatgctgggccatgagcttaccgcgatgcacggtctcgatcatgcccagacgctggctatcattctgcctgcgctatggaacgaaaaacgagacgttaaacgtgcaaaactcctgcaatatgctgaacgtgtatggaatatcaccgacggttccgacgacgagcgtattgatgccgccattgccgccacccgccgtttctttgaacagatgggcgtgcctacccgtctgtccgattacggtctggatggcagcactattccggcgctactggctaaacttgaggcgcatggatgcacaaatttaggtgaaaatcaggatattacgctggatgtcagccgtcggatttatgaagcggcgcgctaa

SEQ ID NO: 368921 - DNA, 828 bp, Salmonella enterica
atggctaatccaaccattatcaggctacaggatggcaacgtaatgccacaacttgggctgggagtctggaaagcaagcaatgaagaggtgatcgcggcgattcataaagcgctggaggtgggctatcgatcgattgataccgccacagcatatcagaatgaagaaggcgtcggcaaagcgctaaaagcagcgagcgtggcgcgggaagagctgtttatcactaccaagttgtggaatgacgatcaaaaacgtccccgcgaagccctgcaggagagtctgaaaaaactgcagcttgattatctcgatctctatctgatgcactggcccgtaccggctatcgatcactatgtcgacgcctggaaaggcatgatcgcgctgcaaaaagaggggctggtaaagagtatcggggtctgtaactttcagatccatcacctccagcgtctgatcgatgaaaccggcgttacccctgtgatcaaccagatcgagcttcaccccttgatgcaacagcgccagctacatgcgtggaatgcgacgcataaaatccagaccgagtcctggagcccgctggcgcagggtggcgaaggcgtattcgatcagaaagtgattcgcgaactggcggataaatacggcaaaacgcccgcccagattgttattcgctggcatctggactgcgggctggtcgtcattccgaaatccgtcaccccttcccgtatcgcggaaaactttgctgtctgggatttccgtctcgataaagatgaattaggcgagatcgcaaaactggatcaaggaaaacgcctcggtcccgatccggatcagttcggcggttaa

SEQ ID NO: 368922 - DNA, 1455 bp, Salmonella enterica
gtggcggaaaaaaaatctcagggcgtcaaatggctcccatttattcttattctggttatcgccgccggactgtggcagctaacgcccccttccgggttaagcgcgccggcctggcattccgcgattatttttgtcgcgacgatcgcctctatcgtggcgaaagtgctgcctattggcgcagtcggtattatcggcatcaccgtctttgcgctcgcctatgctgccggcgacaaaacggccagcggcgcgattaccacggccttgagcgagctgaacagttcgctgatctggcttatcgtcgtcgcctttatgattgcccgtgggtttatcaaaaccgggctgggtcggcgtatcgccctacaaatgatccgtctgttaggtaaacgaacgctgggtctggcttatggtctggcgtttgccgatctgatcctctcccccgcgatgcccagtaacaccgcgcgctgcggcggcgtgatttacccgatcgccgactcgctggcgcgcagctttgattcacatccggaagatgagtctcgcagcaaaatcggcacctttctgatcacctgtattggcaatgttaacgacgtcaccgccgcactgtttatgaccggttatacgggtaacctgctggcggtaaaactggcggcgaacgccggcgttacgttgagctggggaagttggtttatcgccgcgctcctgccttgcctggtctcttttcttatcgtcccgctgctggtctactggctgacgcgtccggaaattaaacatacgccggatgcgccggatttggcgcgcaaagagctggcgcaaatgggcagtatgacgcgcggcgagtggctcatgctggcgaccgtcggcgtgttgctggtgctatggatttttggcagctcgctcggcgtggatgccacgacggcctcttttgtcggtctctctattttattactgagcggcgtgctcacctgggaagacgttaaaagcgaaaaaggcgcctgggatacgttgatttggtttgccgcgctgctgatgatggctaaccagttgaagaaactaggattcaccagctggtttggcaacctgattggcgacagcatcggcagcacgatgcatggaaccagttggataatcatcctgctgctgcttaacgcagcctatttttatacccactattttttcgccagcggcaacgcgcaaatcgccgcgctgtatgcggtatttctgggcgtcggtctgcatctgaatattccggcggcgccgatggcgctcatgctggcgtttaccagcagcctgtactgctctcttacgcagtatacccacgcacgcggccccattctttttggcgccggctatgtaccgacgggcgtctggtggcgaacgggatttattatcagtctctttaatcaggcggtctttttgacagtcggcctcgcatggtggaaagtgttagggttgtattaa

SEQ ID NO: 368923 - DNA, 456 bp, Salmonella enterica
atgacctgcattttctgtcaaatagttgaaggtaaagcaccttgtcataaagtttgggaagatgagcatcacctggcttttttgtcgatttttccgaataccgatgggtttaccgtagtgatcccgaaaaaacattaccccagctacgcgttcgatctaccgccgcaggcgttagcggacctgatgctggcgacccaaaaagtggctaagaaactggataaggctttcccggatgtcagtcgtacgggaatgttcttcgaaggtttcggcgtagaccatgtgcacagtaaattaagccccatgcacggtactggcgatttaacccactggaaaccgattgaatcgcggcagaataaatttttcgaacagtatgaaggatatctgtcgtcacacgatcatgaacgggctgatgatgaaaaactggccgcgctggcggccagaattcgtgaggcataa

SEQ ID NO: 368924 - DNA, 195 bp, Salmonella enterica
atgggtatgattattattccctgttttatcgtaattgctataatagctgttgttatattcataatggctattaaagcatgtagtatggaaaaacgtgaagataggcaaatgactcttgcagggataattttaatgggtgttattgccgctattcctggatggtttttgtacgaaatatttagccacgcgccgtaa

SEQ ID NO: 368925 - DNA, 2172 bp, Salmonella enterica
atgagcgctatctccctgatccaaccggatcgcgaccttttctcctggccgcagtactgggccgcctgctttgggccggcgccgtttttgccgatgtcacgtgacgagatggatcaacttggctgggatagctgcgacattattctggtaaccggcgacgcctacgtcgaccatccgagcttcggcatggcgatttgcggtcgtatgctggaagcgcagggcttccgcgtggggatcatcgcccagcctgactggaacagcaaagacgactttatgcgtctgggaaaaccgaacctgttcttcggcgtcaccgccggcaacatggactcgatgatcaaccgttacaccgccgaccgtaagctgcgccatgacgacgcctacaccccggataacgtcgcgggcaaacgcccggaccgcgccacgctggtctatacccagcgttgcaaagaagcgtggaaagatgtcccggtgatccttggcggcattgaggccagtctgcgccgtaccgcgcattacgactactggtctgatactgtgcgtcgttcggtgttagtcgattccaaagccgacatgctgatgtttggcaacggcgagcgtccgctggtggaagtggcgcaccgtctggcaatgggcgaaaccatcgatcagattcgcgacgtgcgtaacactgcgattatggttaaagaagcgctgcctggctggagcggcgtcgactccactcgtctggacacgccgggtaaaatcgatccaattccccatccctatggtgaggatctgccgtgcgcggataacaagccggtcgcgccgaaaaagcaggaagctaaagcgattaccgtgcagccgccgcgtccgaagccgtgggaaaaaacctatatcctgctgccatcctttgaaaaggtgaaaggcgacaaggtgctgtacgcccatgcgtcgcgtattctgcatcacgaaactaaccctggctgcgcgcgggcgctgatgcaaaaacacggcgaccgctatgtctggatcaacccgcccgccataccgctctccactgaagagatggatagcgtgtttgcgctgccgtatcagcgtgtgccgcacccggcttacggcaatgcccgtattccggcctatgagatgatccgcttttcgatcaatatcatgcgcggctgctttggcggctgctctttctgctcgatcactgaacatgaagggcgcatcattcagagccgctcggaagactctattatcaacgagatcgaagcgatccgcgacacggtgccggggtttaccggcgtgatctccgatctgggcggtcctaccgcgaacatgtatatgctgcgctgtaagtcgccgcgtgcggagcagacctgtcgtcgcctgtcatgcgtctatccggatatctgtccgcatatggatactgaccatacgccgacgatcaatctttatcgccgcgcccgtgagctgaaaggcattaagaaaatcttaattgcctccggcgtgcgctacgacatcgccgtagaagatcctcgctacattaaagagctggcgagccatcatgtgggcggctatctgaagattgcgccggagcatactgaagaaggtccgctgtcgaaaatgatgaagccgggtatgggcagctacgatcgctttaaagagttatttgacctttactctaaacaggccggaaaagagcagtatctgatcccgtattttatctccgcgcatccgggcacgcgggacgaggatatggtgaatctggcgctgtggctcaagcgccaccgcttccgtttggatcaggtgcagaacttctacccgtcgccgttggcgaattcgaccaccatgtattacaccggcaaaaacccgctgggtaaaattggttataagagtgaagatgtggtggtgccgaagggagacaggcaacgtcgcttgcataaggcgctgctgcgttatcacgatccggcgaactggccgctgattcgccaggcgctggaagcgatggggaaaaagcatttgattggcggtcgccgtgagtgtctggtgcctgcgccgaccattgaagagatgcgcgaagcgcgtcgccagaaccgcaatacccgcccggcgttgaccaagcatacgccggtggaacatcagcggcaggggcttgccgctaataagaagcgcgggaaaggcgcagggcgttaa

SEQ ID NO: 368926 - DNA, 984 bp, Salmonella enterica
atgaaaaacacacgttcattcacaacatcagcggtattactggccggctgtttgctactggcatttccagcgctcgccaaaaccacgctgaaactgagccacaatcaggataaaagccacgccgttcacaaagcgatgagctatctggccgataaagcgaaagcctattcggacggcgaattaaatattcgtatttaccccaacgccacgctgggcaacgaacgtgaatcgctggaattgatgaactccggcgctctgcaaatggtgaaagtcaatgcggcatcgctggagtcttttgcgccggaatatagcgtgtttagcctgccgtttttattccgcgaccgcgatcactactacaacgtactgaaaagcgacttagggaaacgcattctcgcgtcctccgaaagcaaaggcttcgtcggcttaacctggtacgacggcggcgcccgcagtttttacgctggtaagcccatcactcaacccgacgatttagccggtatgaaaatcagagtgcagcaaagccccagcgctatcgcgatggtgaaagcgctcggcggcgtgccgacgccgatggcgcaaggcgaactctataccgcgctccagcaaggcgtggtcgatggcggcgaaaacaaccccgtggtttatgccgatatgcgtcatgcggaggtggcgaaattctattcccgcgacgagcacacgatggtgccggatgtcctggtcatcagtaccaaagtacttaacaaattgagcgataaagagcggaaagcgttatataaagccgcagatgaatccatgcagcaaatgaaagacgtcatctggcccgccgcggaaaaagaggcttatgagagcatgaaggccatgaatgcgaccgttgttgatattgataaatccgcgttcaaacagcgtgttaagcccttgtttgatgagttccgcgcgaaagatgctcaatcagcgaaggatctggaatacatcgagaatatgtaa

SEQ ID NO: 368927 - DNA, 483 bp, Salmonella enterica
atgcgaatactcaccaatgcactgaacaaaatactggccgggtgctgctgtattattctggcgatcatggttgcctgcgtatcctggcaggtggcggcgcgctttatattcaacgcgccaagcagcacgctcgacgaattcacccagattctttttatgtggatgattctgttaggcggcgtctataccgccggattaaaaaaacatttagctatcgatttgttagcgcaaaaactctcccgaacgcccgccctcgtgctcgacagtatcattcaggtgattattaccgtgttcgcgctgatttttatggtgtacggcggtgatattattgttgaaaaagcggcgcacgtcagccaaatgtccccggtattaaaatggcctatggataaagtctattgggtcatgccgattagcggcgtcatcctggtgtactacaccattgtgaacgttattgataattatcatcagcgccatcttcgctaa

SEQ ID NO: 368928 - DNA, 1308 bp, Salmonella enterica
atggactttgaatatatttacccaataattgttttatttggcagctttgccattatgctggcggtcggcgttcctattacattcgctatcgggctgtcgtccttattctcaatcctgatagcccttcccccggatgcggcaatctcggttatttcgcaaaaaatgaccgtcggtctcgatggctttacgctgctggcgatccccttttttgtgttagccggcaatatcatgaataccgggggaatcgcccggcgcctggtgaatctggctcaggcgttagttggccgccttcccggttcgctggcgcactgcaatattctggcgaacaccctgtttggcgcgatatccggctcggctgtcgcttctgcggccgcggtgggcggcatcatgtcgccattacaggaaaaagagggctactctccggcgttctctacggcgatcaacgtcgcttcggcgccgattggcctgatgatcccgcccagcaatgtgctaattgtctattcgctggctagcggcggcacctctgtcgccgccctgtttttggcgggctacctgcccggcatcttaaccgcgctggctttaatgacggtagcggcgctgtatgcccatcgccaccattacccggttgccgaacgcatcaacctgcggcagtttctgtcggtattccgcgattcattgcccagcctgttgctgatatttattattatcggcggcattatcggcggcgtatttacgccaacagaggcctctgcgatcgcggtaatctatagcctggcgctggcggccatttatcgagaaattaatgtgagtaagttgcgcgatattctgctggattcggtagtaaccagctctattgttctcttactggtcggctgctcaatgggaatgtcatgggcgatgaccaatgctgatgttcctgaactgattaatgaaatgattaccagcgtgtccgaaaataaatgggtcatcttgctgattatcaatctcattttgttactcgtcgggacgtttatggatattaccccggctattctgatctttacgcctattttccttcccattgctcaacatctgggaatcgaccctgtccattttggcattattatggttttcaatttaaccatcggactgtgtacgcccccggtaggcactattttgttcgtcggttgcagtatcggcaaaatcagtattgataaagtcgtcaaaccgctattaccgatgtttctggcactctttgtggtcatggcgatgatttgctacttcccgcagttgagtctgctgcttcccacgctgtttgctccttcctga

SEQ ID NO: 368929 - DNA, 1413 bp, Salmonella enterica
atgtcattcagtcggcgtcagtttcttcaggcatcgggaatcgcactatgtgcaggcgcgattcccctcagggcgaatgctgccggtcagcaacagccgttgcctgttccgccgttgctggagtcccgtcgcgggcagccgttgtttatgacgctacagcgagcgcactggtcctttacgcaaggcacgcgcgcgccggtctggggagtgaacggtcgttatctggggccgacaatccgcgtctggaaaggcgatgacgttaaactcatctatagcaaccgcctggcggaaaatgtctccatgacggttgctggtttactggtgccggggccgctgatgggtggcccggcgcgtatgatgtcgccgaacgcggactgggcgccggtgttgccgattcgtcagagcgccgcgacgctgtggtatcacgctaacacgcctaaccgcactgcgcagcaggtgtataacggcctggccggaatgtggctggtcgaagacgacattagtaaaacgctgcccattccgaaccattacggcgtggatgattttcccgtcattatccaggataaacggctggataactttgggacgccggagtacagcgaaccgggaagcggtggttttgtcggcgatacgctgctggtgaacggcgcgcaaagcccctatgtcgaagtgtcccgcggctgggtgcggttacggttgttgaacgcctcgaactcgcggcgctatcagcttcagatgagcgatggccgggcgctgcatgtgatttcaggcgatcagggctttttacctgcgccggtttccgtcaaacagttgtcactggcgcccggcgagcgacgtgaaatcctggttgatatgaccaacggcgacgaagtctcgatcacctgcggggaagcggccagcatagtcgatcggattcgcggtttctttgagccttccagtattctggtttcgaccctggtgctgacgttacggccaaccggattgctgccgctggtgaccgataatctgccgatgcgtctgttgccgacggagatcatgagcggcgcgcctgtccgcagtcgggacatcagtcttggcgacgatccggggattaacggccaactgtgggatgtgaatcgcattgatattaccgcccaacaaggcacctgggagcgctggacggtacgcgccgatatgccgcagtcgttccatattgagggcgtctctttcctgattcgtaacgtcaacggcgctatgccgttcccggaagatagaggctggaaagataccgtctgggtggatgggcaagtcgaattgctggtctattacggtcagccgtcctggccgcacttcccgttctatttcaacagccagacgctggaaatggctgaccgcggctcgattgggcaaatgctggtgaatccggcgtcgtaa

SEQ ID NO: 368930 - DNA, 738 bp, Salmonella enterica
atgctatatatttttcgtcttattgttaccgttatttactccattctggtctgtgttttcggttctatttactgccttttcagcccacgtaacccaaaacacgtggcgacgtttggacatatgttcggtcgtctggccccgctgtttggcctgaaagtggagtgccgcaaacccgccgacgcggaaaactatggcaatgctatctatattgctaaccaccagaataattatgatatggtcacggcggcgaatattgtgcagcctccaacggtgacggtggggaaaaaaagcctgctttggatcccgttttttgggcaactgtactggctgaccggtaatctgttgattgaccgtaataaccgcgccaaagcgcatagcaccattgcggcagtggttaaccattttaaaaagcgccgtatttctatctggatgttccctgaaggtacgcgtagccggggacgcggtctgctgccgtttaaaaccggcgcgtttcatgcggctatcgcggctggtgtgccgatcattcctgtctgcgtttccaacacctctaacaaagtcaatctaaaccgcctgaacaacggactggttattgtggaaatgctgccgccagtcgatgtcagcgaatatggtaaagatcaggttcgcgagctggcggcccactgccgtgcgttaatggagcaaaaaatcgcggaacttgataaagaggttgcggaacgtgaagcgaccggtaaggtttaa

SEQ ID NO: 368931 - DNA, 2259 bp, Salmonella enterica
atgagcgatatggcagagcgccttgcgctacatgaatttacggaaaacgcctacttaaactactccatgtacgtgatcatggatcgtgcgttgccgtttattggcgacggcctgaagccggtacagcgccgcatcgtctatgcgatgtcagagctggggctgaacgccaccgctaaatttaaaaaatccgcccgtaccgttggtgacgtactgggtaagtatcacccgcatggcgacagcgcctgctatgaagccatggtgctgatggcgcagccgttctcttaccgttacccgctggtcgatggccaggggaactggggcgcgccggatgatccgaagtcattcgcggcgatgcgttataccgaatcccgcctgtccaaatacgccgagctgctgttaagcgaactcggtcaggggacggcggactgggtgccaaacttcgacggcaccatgcaggaaccgaaaatgttaccggcgcgtctgccgaacatcctgctgaacggcaccaccggtattgcggtgggcatggcaacagatattccgccgcataacctgcgcgaagtggcgaaagcggcgattacgctgattgagcagccgaaaacgacgctggatcagttgctggatatcgtccaggggccggattacccgaccgaagcggagatcattacccctcgtgcggaaattcgtaaaatttacgaaaatgggcgtggctccgtgcgtatgcgcgcggtatggaccaaagaagacggcgccgtggtgatcaccgcgttgccgcatcaggtatctggcgcaaaagtgctggagcagattgctgcgcagatgcgcaataaaaaactgccgatggtggacgacctgcgcgatgaatcggatcacgaaaacccgacgcgtttagtgattgtcccgcgctccaaccgtgtggatatggagcaggtgatgaaccatctgttcgccaccaccgatctggaaaaaagctaccgtattaacctgaacatgatcggtctggatggtcgtccggcggtgaaaaacctgctggagatcctcaccgagtggctggcgttccgccgcgacacggtgcgccgtcgtctgaactatcgtctggagaaagtgcttaagcgcctgcatatcctcgaaggtttgctggtggcgtttctcaacatcgatgaagtgatcgagattatccgtaacgaggatgagccgaaacccgcgctgatgtcgcgtttcggcatcagcgaaacccaggcggaagcgattctcgaactgaaactgcgtcatctcgccaaactggaagagatgaaaattcgcggcgagcaggacgagctggaaaaagagcgtgaccagttgcagggcattctcgcgtccgaacgcaaaatgaataccttgctgaaaaaagagctacaggcagattccgatgcctatggcgacgatcgccgttctccgctgcgtgagcgcgaagaagctaaagcgatgagcgaacacgacatgctgccgtccgaaccggtgactatcgtgctgtcgcagatgggctgggtgcgcagcgccaaaggtcatgatattgatgcgccggggcttaactataaagcgggcgacagctttaaagccgcggtgaaaggtaagagtaatcaaccggtggtgtttattgataccaccgggcgcagctatgctattgatcccattacgcttccgtcggcgcgtgggcagggcgagccgctgaccggcaaactcacgctgccgccgggggcgaccgtagagcatatgctgatggaaggcgatgaccagaaactgctgatggcgtcggatgcgggctacggcttcgtttgtacgtttaacgatctggttgcccgtaaccgtgccggtaaggcgttgattacactgccggaaaatgcgcacgtcatgccgccgctggtgattgaagacgagcacgatatgctgctggcgattacccaggccggacggatgttgatgttcccggtagactctctgccgcagctgtcgaaaggcaaagggaataagatcattaatatcccctctgcagaagcggcgaaaggcgatgatggactggcgcacctgtacgtgctgccgccacaaagcactctgactatccatgtcgggaagcgcaaaatcaaactgcgccctgaagagttacaaaaggtagtcggtgaacgcggacgccgtggcacattaatgcgcggcctgcagcgtatcgatcgcattgagattgattcgccgcatcgcgtaagtcatggcgacagcgaagagtaa

SEQ ID NO: 368932 - DNA, 867 bp, Salmonella enterica
atgaatgacctgatcagcgcggcttattccgaacgtctgcggcgcgtttgcgaccacattgagcgtcatctggatgagcctctgtcgcttgaggcgttaagccggatggcgcacagctcgccgtttcattttcaccggcagtttaccgtctggagcgggcttccgctctatcgctatatccagtggctgcgtttgcgccgggcgtcatggcggctggcgtttaatccgcaagataaagttatcgatatcgcgctggatgccggatttcagaatccggagtcgttcacacgtgctttcaaaaccgcgtttggtcaaagcccgtgccggtttcggcaatcgccggactggctggcctggcaccaacgcgttcctaaacttgcgttacaggagcagcatgtcatggacgtaaaaatcgttgaatttccacctacccgcgtcgcgatgctgacgcatctggggcatccggataaggtcaacgccagcgcggcgaaatttattgcatggcgacgcgaaacgggccagtcgccgattgccagcagtcaaacttttggtattgcctggcacgacccgcagacgacgccgccggctcaattccgctttgatatctgcggcagcgtccgccagccgatagccgaaaatgacgttggcgtggtgaatagcgagattcctggcgggcgctgcgcggtggtgcgccatcagggatcgctcgacagcctcccggagagcgtgtggtatttattccgcgaatggctacccgccagcggtgagacgccgcgcgattttccggtcttcttccagtacctgaatttcgtccatgaggtcgcggaacatgagctgctgacggatatctatctgccgcttcgttaa

SEQ ID NO: 368933 - DNA, 393 bp, Salmonella enterica
atgaaaaaattagctgcaatcgttgccgttatggcactgtgttctaccccggttctggcggctcagcagggcggtttctccggcccgtcggcgacgcaaacgcaaggcggcggatttgtcggcccgaacggcagcagcacgacggtagagagcgctaaatcgctgcgtgacgatgcgtgggtaacgttgcgcgggaatatcgtcgagcgcatttccgacgacctgtatgtgtttaaagatgcgaccggtactatcaatgtggatattgaccacaagcgctggaacggcctgaccgtaaccccgcaggataccgttgaaattcagggtgaagtggataaagactggaactctgtcgaaatcgacgtaaaacagattcgtaaagtgaatccgtaa

SEQ ID NO: 368934 - DNA, 660 bp, Salmonella enterica
atgcgaattttactggtagaagatgacacacttattggcgatggcataaaagcgggcctgagtaaaatgggtttcagcgtcgactggtttaccgagggacgtccgggcaaagaggcgctttacagcgcgccttatgatgcggttattttagatttgacgctgccaggcatggacggacgggatattttgcgcgaatggcgcgaaaagggtaaacaggaaccggtactgatcctgacggcgcgcgacgcgttagcagagcgcgtcgaggggctacgtctgggcgccgatgactatttatgtaaacctttcgcgctcattgaggtcgccgcccgtctggaggcgctggtacgccgcgccagcggtcaggccagtagcgaattgcgccacggccaggtgacgctcaatccaggcaatctcgtcgcgacgcttgccggcgaaccgctggccctaaaaccaaaagagttcgcgttgctggaactcttactgcgcaacaaaggtcgcgtgctgccgcgcaagcttattgaagagaagctgtataactgggatgacgacgtgtccagcaatgcagtggaagtccatgttcatcatttacgccgcaagctcggcagcgaatttattcgcaccgtgcacggcatcggctacaccctgggtgacgcatga

SEQ ID NO: 368935 - DNA, 1350 bp, Salmonella enterica
atgaaattgacgcaacgtctcagcctgcgcgtcaggctgacgcttattttcctgattctggtctccatcacctgggcaatctccagttttgtggcctggagaaagacgacggataatgtcgacgagctgtttgacacacagttgatgttgttcgccagacggcttagcaccctcgatcttaacgagctcaacgccccgcagcgcatggcgcatacgccaaagaaattaaaacatgggcatatcgatgacgatgcgctggcgttcgccatcttttccgctgatggcaaaatgttgctgcatgatggcgacaacggccaggatattccgtatcgctatcgccgggaaggtttcgacaatggctatctgaaggatgacaacgacctctggcgttttttgtggttgaactcggcggacggcaagtatcgtatcgtcgtcggtcaggagtgggattaccgcgaagatatggcgctggcgatcgtagcggcgcaattaacgccgtggctgatcgcccttcccttcatgctgctgattttattgctcctgcttcaccgcgagctcagaccgttgaaaaaactggcgcaggcgctacgcttccggtcgccggaatcggaaacgccgctcgacgccaaaggcgtaccgagcgaggttcgcccactggtcgaagcgcttaatcagctttttagccgcatccactccatgatggtgcgcgaacggcgatttacctccgacgccgcccatgaattgcgcagcccgctggccgcgctgaaagtacaaaccgaggtggcgcagctctcgggcgacgatccgctatcgcgtgataaagcgctgacccagctccatgcggggatcgatcgcgccacgcggctggtcgatcagctactgacgttatcgcgtctcgactcgctcaataatttgcaggatgtagcggagatttcgctggaagagctgctgcagtccgcggtaatggatatttatcatccggcgcagcaggcgaatatcgacgtgcgtttacagcttaacgcccatgacgtcatacgtaccggccagccgctactcttaagcctgttagtgcgtaacctgctggataatgcgattcgctacagtccgcaaggcagcgtcgtcgacgttaccttacatgcccgcagcttcaccgtcagagataatggccctggtgtagcgccagagattctgacgcatatcggcgagcgtttttaccgcccgcctggccaaagtgtgaccggcagcggtctgggattatcaatcgtccgtcgcatcgctacgctgcacggcatgacggtgtcgtttggcaacgccgcggaaggtggatttgaggccgtagtaagttggtaa

SEQ ID NO: 368936 - DNA, 582 bp, Salmonella enterica
atgagtaacatcctgattatcaacggggcgaaaaaattcgcgcactccaacggccagttaaatgacaccctgaccgaagttgccgatgggctgctgcgcgatctgggtcatcaggttaagatcgtccgcgccgacagcgactatgacattaaagaagaggtgcagaatttcgtctgggctgacgtggtgatttggcagatgccaggctggtggatgggcgcgccatggacagtaaaaaaatatatggatgatgtctttaccgaaggtcacggcacgctctatgccagcgatggccgcacgcgttccgatgccgctaaaaagtacggttccggcggtctggtgcaggggaaaaaatatatgctgtcactgacgtggaacgcgccgatggaagcatttaccgaaaaagatcaatttttccacggcgtaggcgtagatggcgtctatctgccattccataaagccaaccagttcctgggcatggacgcgctgccaacgtttattgccaacgacgtgattaaaatgccggatgttccgcgctataccgcagaatatcgcaagcatctgagcgaaatttttgcttaa

SEQ ID NO: 368937 - DNA, 315 bp, Salmonella enterica
atgcttaccgtcattgccgaaattcgcacgcgtccgggccaacatcaccgtcaggccgtcctcgaccagtttgcgaaaattattccaaccgttcttaaagaagaggggtgccacggttacgcaccgatggtggatcatgccgcgggcgtgagttttcagactctggcgcctgactcgatcgtgatgattgaacagtgggaaagcgttgcgcaccttgaggcgcatctgcaaaccccgcatatgaaagcctacagcgacgcggtaaaagacgatgtgctggaaatgaatattcgtattctggaatccggcgtttaa

SEQ ID NO: 368938 - DNA, 1893 bp, Salmonella enterica
atgacgcaaacttataacgctgatgccattgaggtactcactgggcttgagccggtacgccgccgcccggggatgtacaccgatacgacccgtcccaaccatttgggtcaggaagtaattgataatagtgtggatgaagcactggcaggtcacgccaaacgcgtggatgtcattttacatgccgatcaatcgctggaagtgattgacgacggacgcgggatgccggtggatatccatccggaagagggggttccggcggtagaactgatcctctgtcggcttcatgccggcggtaaattctccaataagaactatcagttctctggtggtctgcatggggtggggatttcggtcgtgaatgccctgtcaaagcgcgtggaagtgaccgtgcgccgcgacggtcaggtctataacatcgcgtttgaaaacggcgagaaagtgcaggatttgcaggttgtcggcacctgcggtaaacgtaatactggcaccagcgtccatttctggccggacgaaagtttcttcgacagcccgcgtttttctgtctctcgcttaatgcacgttctgaaagcaaaagcggtgctgtgtcccggcgtggaaatcacttttaaagatgaagtgaataacagcgagcagcgctggtgctaccaggatggtctgaacgactatctgggcgaagcggtaaacggcctgccgacgctgccggaaaagccgtttatcggtaattttaacggtgaaacggaagctgttgactgggcgctattgtggctgccggaaggcggcgaattactgacggaaagctacgtcaacctgatcccgaccatgcagggggggacgcacgtcaacggtctgcgccagggcctgctcgacgcgatgcgcgaattttgcgaataccgcaatattctgccgcgcggcgtcaaactgtcggcggaagatatctgggatcgctgcgcttatgtgctctccgtgaaaatgcaggacccgcaatttgccgggcagaccaaagagcgtctgtcgtcgcgtcaatgtgcggcatttgtttccggcgtggtgaaagatgccttcagcctgtggctgaaccagaacgtgcaggcggcggaacaactggcagagatggcgattgccagcgcgcagcggcgactgcgcgccgcaaaaaaagtggtacgcaaaaagctcaccagcggtccggcgttgccggggaaactggcggactgtaccgcgcaggatcttaatcggaccgagctgttccttgtggaaggggattcggcgggcggttccgccaagcaggcgcgcgatcgcgaatatcaggcgatcatgccgctcaaaggtaagatccttaacacttgggaagtctcttccgatgaagtgctggcctcgcaagaggtgcatgatatttccgtggcgatcggtatcgatccggacagcgacgatctgagtcagctgcgctacggcaagatctgtatcctggcggatgcggactccgatggtttgcatatcgctactctgctttgcgcgctgtttgtcagacatttccgcgcgctggtgaagaatggtcatgtctacgtcgcgctgccgccgctataccgtatcgatttgggtaaagaggtctattacgcgctgacggaagaagagaaggcgggcgtactggaacaactgaagcgtaagaaaggcaagccgaacgtacagcgtttcaaaggcctgggtgaaatgaacccgatgcagttacgcgaaaccacgcttgatccaaatactcgccgcctggtgcagctcaccattagcgatgaagacgatcagcgtactaacgcgatgatggatatgctgctggcgaagaaacgttctgaagatcgacgcaactggctacaggaaaaaggcgatctcgcggatctcgacgtgtaa

SEQ ID NO: 368939 - DNA, 582 bp, Salmonella enterica
atgtctacgcttctctatttgcacggattcaacagttcccctcgctcggcaaaagcgtgccagctaaaaaactggctggcggagcgtcatccgcatgtcgagatgatcgtccctcaactaccgccgtatcctgccgatgcggcggagttgctggaatctctcgtgcttgagcatggcggtgcgccattagggctggtaggatcgtcgctgggtggttattacgccacctggctgtcgcaatgttttatgctgccggctgtggtggtgaatcccgccgtgcggccctttgaattactgaccgactatctcggtcagaacgagaacccctacaccgggcagcaatatgtgctagagtctcgccatatttatgatcttaaagtcatgcagattgacccgctggaagcgccggacctgatctggctactgcaacagacgggcgatgaagtgctggattaccgccaggcggtggcatattacgcctcctgccgtcagacagtgaccgagggtggtaatcacgcattcacgggcttcgaagattatttcaaccagattgtcgattttcttggactgcacagttgctga

SEQ ID NO: 368940 - DNA, 828 bp, Salmonella enterica
ttggaaagcctgttaaccctacctctggctggtgaggcccgagtcaggattttacaaattacagatactcacctgtttgccgaaaagcatgaaacgctgttaggcgtcaatacctgggaaagttaccaggccgtgctggaggctattcgggcgcaacagtatgaatatgatctgatcgtggccaccggcgatctggcgcaggatcaatccgctgcggcttatcagcattttgctgagggtatcgcaagctttcgcgcgccttgcgtttggctaccgggcaatcatgattttcagccggcaatgtacagcgcgctgcaagaggcggggatttccccggctaaacgcgtgttaatcggtgaacaatggcagattttgttgctggatagccaggtgtttggcgtcccgcatggcgaactgagcgagttccaactggaatggcttgagcgtaagctcgccgatgcgccagagagacagacattgctcctgttgcaccaccatccgttgccggcagggtgcagttggctggatcagcacagcttgcgtaatgctggtgagctggatagcgtgctggcgaatttcccgcgtgtaaagtatctgctatgcggacatattcaccaggagctggatctcgactggaacggacggcgtctgctggcgtcgccgtcaacctgcgtacagttcaaaccgcactgcgcgaactttacgctggatactatcgcgccgggctggcgtacgctggagctccaggcgaacggcgtcctggagacggaagtgcatcgcctgcaggatacccggttccgacccgataccgcttcggaaggatactga

SEQ ID NO: 368941 - DNA, 423 bp, Salmonella enterica
atgaagcgttatacacctgacttcccagaaatgatgcgtttgtgcgaaaccaatttttcgcaattgcgccgcctgctgccgcgcaatgacgcccccggtgaaacggtgagctatcaggtgggcaacgtacaatatcggttaacgattgtggaatcgacccgatacactacgcttgtaacgatcgagcaaacggcgccagccatcacctactggagcctgccgtcgctgacggtgcgcctctaccatgatgcgatggtggctgaagtgtgttcaagccagcagatctttcgcttcaaagcgcggtatgattatccaaataaaaagttgcatcaacgcgacgaaaagcatcaaattaatcagtttctggccgactggctacgattctgtttagcacatggagcgatggcgattccggtttattag

SEQ ID NO: 368942 - DNA, 633 bp, Salmonella enterica
atgcgtaaatcagacaacttgccagttactttcaccaaaagcgatgtagaaattattgcacgggaaacgcgctatcgcggttttttttcattggatgtgtatcgattccgccatcgtttattcaacggagaaatgagtggcgaggtaaagcgcgaaatttttgagcgcgggcacgccgccgtcttgctaccctttgaccctgaacgcgacgaggtggtgctggtcgaacagattcgtattgccgcgtacgacacaagcgttacgccgtggctgctggagatggtcgccggcatgatagaagaaggcgaaaccattgaggcggtcgcccggcgggaggcgatggaagaagcggggctgaccgtaggccgcacccgaccggtcatcagttacctggcgagtccaggaggaaccagcgagcgctcatctattctggtgggtgaagtggacgccacgaccgcggtaggtattcatggtctggcggatgaaaacgaagatattcgggttcatgtggtaagccgggaacaggcataccagtgggtagaagaggggaaaatcgacaacgcagccgcagtcatcgctttgcaatggcttcagttgcatcatcaagagttaaaaaacgagtggaaaaaatga

SEQ ID NO: 368943 - DNA, 1470 bp, Salmonella enterica
atgaagaaattgctccccatccttatcggcctgagcctgtcggggttcagcacactaagccaggcagagaacctgatgcaagtttatcagcaagcacgcctgagcaacccggaattgcgtaaatccgctgccgatcgcgatgctgcattcgaaaaaattaacgaagcgcgtagtcctttactgccgcaactgggtttaggtgccgactacacctacagcaacggttatcgcgatgcgaacggtatcaactccaatgaaaccagcgcttccctgcaattaacgcagacactgtttgatatgtcgaaatggcgtgggctcaccctgcaagaaaaagcagcaggcattcaggatgtcacctatcagaccgatcagcagacgctgatcctcaataccgcgaacgcgtattttaaggtattgaacgctattgatgtgctttcctatacccaggcgcaaaaagaggctatctaccgtcagttagatcaaacgacgcaacgttttaacgtgggtctggtcgccattaccgacgtgcaaaacgcccgtgcgcaatatgataccgtactggcgaatgaagtgaccgcccgcaacaacctggataacgcggtagaagagctgcgccaggtaaccggcaattattacccggagctggcgtcgcttaacgtcgagcattttaaaaccgacaagcctaaagctgttaatgcgctgctgaaggaagcggaaaaccgtaacctgtcgctgttgcaggcgcgtttaagtcaggatctggcgcgcgagcaaatccgtcaggcgcaggatggtcatctgccgacgctgaatttaacggcctcaaccggcatttctgatacctcttatagcggttctaaaaccaacgccgcccagtacgacgatagcaacatggggcagaataaaatcggcctgaacttctccctgccgctgtatcaaggcgggatggttaactcgcaggtaaaacaggcgcagtataacttcgtcggcgcaagcgaacagctggaaagcgcgcaccgtagcgtggtgcagaccgtacgttcttcctttaacaatattaacgcctccatcagcagcatcaacgcgtataaacaggcagtcgtttccgcgcaaagttctttggatgcaatggaagccggttactcggtcggtacacgtaccattgttgacgtactggatgccaccaccactctgtatgatgccaagcagcaactggccaacgcgcgttatacctatttgattaatcagttaaatatcaaatatgcgctcggtacgctgaacgagcaggatctgctcgcgcttaacagtacgttgggtaaacctatcccgacgtcgccggaaagcgtagcgccggaaacgccagatcaggatgctgccgcagacggttataatgcccatagcgccgcgccggcagtacagccgaccgccgctcgcgccaacagcaataacggcaatccattccggcattga

SEQ ID NO: 368944 - DNA, 672 bp, Salmonella enterica
atgaaacggacaaaatccatccatcacgcatcatttcgcaaaagctggagcgcgcggcatttaacgccggtcgccctggcggttacggctgtttttatgctggctggctgtgaaaaaagcgatgacaccgtatcgctgtatcaaaacgctgatgactgttcagcggcgaatccgggcaaaagcgcggagtgtacaaccgcgtataacaatgcgctgaaagaggccgaacgtactgcgcctaagtacgctacacgcgaagattgcgtcgctgagtttggcgaaggtcagtgccagcaagcgcccgcacaggctggcatggcgccggaaaatcaggcgcaggcccaacaatccagcggcagtttctggatgccgcttatggcaggttacatgatggggcgtctgatgggcggcggcgcaggctttgcgcaacagccgctgtttagctcgaaaaacccggccagccctgcatacggcaaatataccgatgcggcaggtaaaaactacggcgcggcgcaaccgggccggacaatgaccgtaccgaaaaccgcgatggcgccgaaacctgccaccacaacaaccgttacccgcggcggttttggcgaatccgtcgccaaacagagcaccatgcagcgtagcgctgccggtacttcaacacgttcgatgggcggctga

SEQ ID NO: 368945 - DNA, 1164 bp, Salmonella enterica
atggaaagagtcagtattaccgagcgcccggactggcgcgataaagcgactgaatacgggtttaattttcacactatgtatggtgaaccgtactggtgtgaagacgcttattacaagttaacgctcgcccaggtggaaaaactggaagacgttaccgccgagctgcaccagatgtgcctcaaggtagtagaacgcgtcatcgccagcgatgagctgatgacgaagtttcgtattccaaaacatacctggggttttgttcgccagtcctggcaaacgcaacaaccgtcgctctattcccgcctcgatttggcctgggacggcatcggcgagcctaagctgctcgaaaataatgccgacacgccaacatcgctgtatgaagcggcgttttttcagtggatttggctggaagatcagatcaacgcgggcaatctgccggaaggcagcgatcagtttaatagcctgcaggaaaaactgattgaacgctttgctgaacttcgcgagcagtacggttttcagttgctgcatctcacctgctgtcgcgatacggttgaggatcgcggcaccattcagtatttacaggactgcgcggccgaagcggaaatcgccaccgaatttctctatatcgacgatattggtctgggggaaaaaggccaatttacggatctgcaggatcaggtcattgcgaacctgttcaagctctatccgtgggaatttatgctgcgcgagatgttttccaccaagctggaagatgccggcgtgcgctggctggaaccggcctggaaaagcattatctccaataaagcgttgttgccactgttgtgggagatgttccctgaccatccgaatctgttgcctgcgtatttcgccgaagacgaacatccgccaatggataaatatgtcgtgaaaccgatcttctcccgcgaaggggcgaacgtatcgattattgagaacggtaaaacgatcgaatccgtggaaggcccgtatggcgaagagggtatgatcgtgcaacagttctatccgctgccaaaattcggcgacagttacaccctgattggtagctggctgattaacgatcagcccgccggaattggtatccgtgaagatcgggcgctgatcacccaggatctctcccgcttctatccgcatatttttgtcgaaggatag

SEQ ID NO: 368946 - DNA, 789 bp, Salmonella enterica
atgtctttaacgtgtatgccagcattgtttttggggcatggcagcccgatgaacgtgctggacgataatgattatacccgcgcctggcggcgattgggggaagccctgccgcgaccacaggcgatagtggtggtgtcggcgcattggtatacccgcgggacgggcgtcacagcgatggaaaggccgcaaactctccatgattttggcggttttccgcaggcgctgtatgacacgcattatccggcccctggatcgcctgcgctggcgcagcgtctggttgaactgttggctcccgttcccgtcgcgctcgataaagaagcgtggggatttgatcacggctcctggggcgtattgatcaagatgtatccgaatgcggatatcccgatggtgcagcttagtgttgatagtaccaaaccggcggcatggcattttgaggtgggccgtaaactggcgacgctgcgtgacgaaggcgtgatgctggtggccagcgggaatgtggttcataacctgcggactgtgcgttggcacggtgacaatataccgtatccctgggcggcgtcatttaatgactttgtgaaagccaatctgacgtggcaggggccggtagaacagcacccgctggtgaattatctgcaacatgaagggggggccttatcgaacccgacgccggagcactttttacctttgctgtatgtacttggcgcctgggacggcaaggaacctatcaccatcccggtcgacggtattgagatgggcagtataagtatgttgtcggtgcaggtggggtag

SEQ ID NO: 368947 - DNA, 774 bp, Salmonella enterica
atgtcagtaccacttattctgaccttactggcgggcgccgccacctttattggcgcgtttcttggcgttctcggccaaaaaccgtctaaccgcgtgctggctttttcgctgggcttcgccgcagggatcatgctgcttatctcgctgatggagatgctgcccgccgcgcttgataccgaggggatgtcgcctgtactgggctacggaatgtttattatcggcctgttgggctacttcgggctggaccgcctgcttcctcacgctcatccgcaggatctggtgcaaaaaagacagcagccgcttcccggctcgataaaacgcactgcgattttattgacgctcggcattagcctgcacaactttccggaagggatcgccacctttgtcactgccagcagcaatcttgaactgggtttcggcatcgcactggcggtggcgttgcacaatattcctgaaggtctggcggttgccggcccggtttatgccgcgacgggctcaaaacgtaccgcgattttttgggccggtatctccggcatggcggaaattcttggcggcgtactggcgtggctgattttgggcagcctggtttcaccgatcgttatggcggctatcatggcggcagtcgccggcattatggtggcgctctccgtcgatgaactgatgccgctggcaaaagagatcgatcctaacaataaccccagctatggcgtgctttgcggtatgtccatcatggggctcagtctcgtcattttgcagacgataggtatcggttaa

SEQ ID NO: 368948 - DNA, 177 bp, Salmonella enterica
atgtttattgcctggtattggataatattaatcgttctggtggtagtagggtatatttgccatatgaagcgttattgcagagcgtttcggcaggacagagatgcattacttgaagcgcgaacgaaacgttttcgccagacgagcgaaggcgacagcgtgatgaatgagcagaaatag

SEQ ID NO: 368949 - DNA, 1797 bp, Salmonella enterica
atgtttgaccaataccggaaaacaatacttgccggcgccgtcgcactgacatgcggactcaccgcagccagtacgtttgccgcaggttttcaaccggcacagcccgcagggaaattaggcgcagtcgttgtcgatccttacggaaatgcccctctcaccgcgctggtggaattagatagccatattatttcagacgttaaagttactgtacatggcaaaggggaaaaaggcgttcctgttacttataccgttgggaaagagtctttagaaacctatgacggtattcctatttttggcctttatcagaaatttgccaacaacgtcacggtagaatataaagaaaacggcaaagccatgaaggatgactatgtggtgcagacgtccgccatcgtcaaccattatatggataaccgttctatttcagatcttcagcaaacgaaagttattaaagtcgcgccaggatttgaagatcgcctttatctggtaaatacccatacctttacgccgcagggcgctgaatttcactggcacggcgaaaaagataaaaatgcgggtattcttgatgccggtccggcgggcggtgctttgcctttcgatatcgccccttatacgtttgtggttgacacccagggtgaataccgctggtggctggatcaagataccttctacgacggccacgatatgaatatcaacaaacgcggctacctgatgggtattcgtgaaacgcctcgcggcacctttaccgcggtgcagggccaacactggtacgagtttgacatgatggggcaaattcttgccgatcacaaactgccgcgcgggttcctggatgcgtctcatgaatccatcgaaaccgtgaacggcaccgtactgctgcgcgtcggcaaacgcgattaccgcaaagaagacggcatacatgttcatacgattcgtgaccaaatcattgaggttgataagtctggccgcgtagtagacgtttgggatttaaccaaaatcctcgaccctatgcgtgatgcgctgctcggcgcgctggatgcgggcgcagtatgcgtgaacgtcgatctggcccatgccggacagcaggcgaaactcgaaccggatacgccgtatggcgatgcgcttggcgttggtgccggtcgtaactgggcgcacgtcaactctatcgcttatgacgcgaaagacgactccatcatcctttcttcccgccatcagggtattgtaaaaattggtcgcgataagcaggtgaaatggatactggcaccgtctaaaggctggaataagcagctagccagtaaattgctgaaaccggtagacgatcatggtaagccgttgacctgtgacgaaaacggcaagtgtaaggacaccgatttcgatttcacctatacccaacatacggcatggctttccagcaaaggcacgttaacggtctttgataacggcgatggtcgcggcctggagcaaccggctctaccgaccatgaaatattcccgttttgtcgaatataagatcgatgagaagaaaggcaccgtacaacaagtttgggaatacggtaaagaacgtggatatgatttctatagtcctattacctcggttgttgaatatcaaaaagaccgcgacaccatgttcggctttggcggttctattaacctgttcgacgttggtaaacccacagtcggcaaactgaatgagattgactataaaacgaaagaagtgaaagttgaaattgatgtgctgtcggataaacccaaccagactcactatcgtgcattactggttcatccaacgcaaatgtttaaataa

SEQ ID NO: 368950 - DNA, 672 bp, Salmonella enterica
atgtcatctaaatggattacctctttatttaaaagcgtagtattaaccgcggcattagtcactccttttgcggcatcggcttttaccgagggcacagattatatggttctggagaaaccgattcctaatgcggataaaacgctgattaaggtatttagctacgcctgccctttctgctacaaatatgacaaagccgtaacaggtccggtttctgataaagtagccgatctcgttacgttcactccgttccacctggaaacaaaaggcgaatatggcaaacaggccagcgaagtatttgcagtcctgatcgccaaagataaagctgccgggatttcgttatttgatgctaaatcacaattcaaaaaagcgaagttcgcctggtatgcggcttaccatgataagaaagagcgctggtcagatgggaaagatccggcggcatttattaaaaccgggctggacgccgcaggcatgagccaggctgattttgaagcggcgctgaaagatcctgccgttcaggagactctggaaaaatggaaagccgcctatgacgttgccaaaattcagggtgttccggcttacgtcgtcaacggcaagtaccttatctataccaaaaacatcaaatccatcgattctatggctgaactcgttcgggaactggccactaaaaaataa

SEQ ID NO: 368951 - DNA, 678 bp, Salmonella enterica
atggattttattaagggattatggcgagacctacgcgcaagaccagtagatacgctggtgagatggcaggaacagcgctttctgtggctgttaatggccatcgcgatgggagggttaattatcctggcgcactcgttcttccaaatctatctctacatggcgccgtgcgaacagtgtgtttacattcgttacgcgatgtttgtgatggtaattggcggggtgattgcggcgataaatcccaaaaatatcgtgctgaagctgattggctgcatcgcggcgttttatggcagcattatgggcattaagttttctattaagcttaatggtatccatcatgcggtacataatgcggaccccgattcactttttggcgtgcaaggatgttcgactgacccgacctttcctttcaacttaccgttggcggaatgggcaccggagtggtttaaacctaccggagactgcggttatgacgcgcctatcgtccctgatggcgtaacgctcagtagcgtacagcagtggtttgtcgatctctaccagcagtccgaaggctggtatctgcttccgccctggcactttatgaacatggcgcaggcatgtatgttggcctttgggttgtgcctgattctgctgctggtgatgagcggcgcctgggcattgaaactggccagaggcaaataa

SEQ ID NO: 368952 - DNA, 654 bp, Salmonella enterica
atgaatcagacgctactttcctcttttggtacgccttttgaacgtgttgaacttgcactggatgcgctgcgtgaaggacgcggtgtgatggtgcttgatgatgaagatcgtgaaaacgaaggcgatatgattttccccgcagagacgatgaccgtagaacagatggcgttaaccattcgtcacggtagcggtattgtttgcctgtgtattactgaagatcgtcgtaagcagctcgacttgccaatgatggtggaaaacaacaccagcgcctacggcaccggttttaccgtgaccattgaagccgcagaaggcgtgaccaccggcgtttccgccgctgaccgtgtcactacggtgcgtgcggcaattaaggatggcgcaaaaccgtccgatcttaaccgtccggggcacgttttcccactgcgcgctcaggcgggcggcgtgctgacgcgcgggggtcatacggaggcgaccatcgatctgatgacgctggccggttttaaacctgcaggtgtactgtgcgagttgactaacgacgatgggacgatggcgcgcgcgccggagtgtatcgcgtttgcaggccagcataatatggcggtagtcacgattgaagatctggtggcttaccgccaggcgcatgagcgcaaagccagctga

SEQ ID NO: 368953 - DNA, 297 bp, Salmonella enterica
atgattgacccgaaaaaaattgagcaaatcgcacgccaggttcatgagtcaatgccgaaaggtattcgcgagttcggggaagatatcgagaaaaaaatccgtcaaacgctgcaatctcagctgacgcgtctcgatctggtgagccgcgaagagtttgatgtccagactcaggtcttgctgcgcacccgggaaaaactggcgctgctggagcaacgcctcagcgaactggaagctcgcgacaagcctgaagaagtaaaacctgcgcccgccatcccgccagtcgatccacaagagtaa

SEQ ID NO: 368954 - DNA, 204 bp, Salmonella enterica
atgaacaacaataacgtctattcactaaataattttgattttctggcgcgcagttttgccagaatgcaggcggaggggcgtcctgttgatatccaggcggtaaccggcaatatggacgaggagcatcgcgactggttttgcaagcgttacgcgctttactgccagcaggcgactcaggcgaaaaggttagaattagaacactaa

SEQ ID NO: 368955 - DNA, 621 bp, Salmonella enterica
atgaccttatttgcggagtataacagcccctatctgtttgccatcgcgttcgttttctttatcggcgtgctggagatgatttcgctgatttttggccactttctttcaggcgcgctcgacgcccatctcgatcattatgacgccctgtcatccggccctgcgggccaggcgcttcattatctgaatattggacgcgttcccgccctggtcgtcctctgtctattggccggttatttcggcctcttcggtatcctcatccagcatggcgggatcatgctctggcaagcgccgctcagcaatctgctgctggtcccgttgagcattgtcctgtcggtctttgccgtgcattacagcggaaaaatcctcgcgccctggctacccagagatgaaagctccgccctccgggaagaggaatttatcggcggcatggcgattattaccggccacgccgccgtcgccggtacaccttgcgaaggaaaatttaccgataagttcggccagattcactatttactgctggaacccgaaaagggaaaagaatttaaaaaaggagacaaggtgctgattgtctgccgactttccgcaacgcgttatttggctgagcgtaccttctatgtttaa

SEQ ID NO: 368956 - DNA, 1680 bp, Salmonella enterica
atggatgatgtttttggcatattgccatcatggatgtttaccgccatcgttgcggttatcgtcttactaattatcgggatcatttttgctcgcctctatcgccgcgcatctgcggaacaggcgtttgtccgtaccgggcttggcgggcaaaaagtggtgatgagcggcggcgctattgtgatgccaatctttcacgaaattattccgatcaatatgaataccctaaaacttgaagtcagccgtgctaccgtcgacagcctgatcaccaaagatcgtatgcgcgttgacgtggtcgttgctttcttcgtacgtgtaaaaccctctgttgaaggtattgccaccgccgcacaaacgcttggccagcgaacgctgtcgccggaagatcttcgtatgctggttgaggataaattcgttgacgccttacgcgctaccgcggcccagatgacgatgcatgagctacaggatacgcgtgaaaacttcgttcagggcgtacaaaacaccgttgcggaagatttgtcgaaaaacggcctggagctggaaagtgtctcattaaccaactttaaccaaacgtccaaagagcatttcaatccaaacaatgcctttgatgccgaaggtctgacgaaactgacgcaggaaaccgaacgccgccgtcgtgaacgtaatgaagtggaacaggatgtggaagtggcggtgcgcgaaaagaaccgcgacgcgcttgagcgcaagctggaaatcgagcaacaagaagcctttatgactctggagcaggagcaacaggttaaaacccgcaccgccgaacaaaacgctaaaattgccgcttttgaggccgagcgccatcgtgaagcagaacagacgcgcattcttgctgagcggcagatccaggagacggagatcgaacgtgagcaagcagtacggtccaggaaagttgaggccgagcgtgaagtacgtattaaagagatcgaacagcaacaggtgacagaaatcgccaaccagacgaaatctatcgccattgccgccaaatccgagcagcaatcacaagcagaagcgcgcgccaacgacgcgctggccgatgcggttcgcgcccagcaaaacgtagaaaccacccgccagaccgccgaagcggatcgcgccaagcaggtcgctctgatcgccgcggcgcaggatgcggaaaccaaagcggtcgaactgaccgttcgggcaaaagcagagaaagaagcggcagaattgcaagccgccgccatcatcgaactggcggaagcaacgcgtaaaaaaggtctggcggaagccgaagcgcaacgggcgctgaatgacgctatcaacgtactatctgacgaacaaaccagcctcaaatttaaactagcgctcttacaatcgttgcctgctgttattgagaagtctgttgaaccgatgaaatccatcgacggcattaagattattcaggtcgatggcctcaatcgcggcgcgacggcgggcgacgtcgccgctggcggcgctaacgggggaaacctggcggaacaagcgttatctgccgcgctcacctatcgtacccaggcaccgctgatcgattcgctgttaaacgagattggcatcgctggcggctcgctaaaggcgctgaccacgccgttggtttcatcggcaacggatgagattaatcgcgaagcaacggtaaaagagcaataa

SEQ ID NO: 368957 - DNA, 1434 bp, Salmonella enterica
atgaaagtaaatctgccagcgtttgaacgtgcaggcgtcatggttgtgggtgatgtaatgctggatcgctattggtatggccccacttgccgtatttcaccggaagcgccggtgcccgtggttaaggtaaataccgttgaggaacgtccgggcggcgcggcgaacgtggcgatgaacattgcgtctctgggagcgaacgcccgtctggtcggcctgacgggtattgatgacgccgcgcgcgcgctgagcaaaacgttggcggaggtcaatgtgaagtgcgacttcgtttctgtgccgacgcatccgacaattactaaactgcgcgtgctatcacgtaatcagcagctcattcgtcttgattttgaagaaggctttgagggggtggacccgcagccgttgcatgagcgtatcaaccaggcgctgggatcgatcggcgcgctggtgttgtccgattatgccaaaggcgctctgaccagcgtgcagactatgatttccctggcgcgccaggcgggcgtgccggtgctcatcgatccgaaaggaacggattttgaacgttaccgcggcgccacgctgctgacgccaaacctttctgaattcgaggcggtcgcggggaaatgtaaaagcgaagacgaactggttgaacgcggcatgaagctcattgccgattacgacctttccgcgctgttggtcacgcgttccgaacagggaatgacgctgctgcaaccgaataaagcgccgctacatatgccgacgcaggcgcaggaagtttatgatgttaccggtgcgggcgatacggtgatcggcgtgctggcggcgacgctggcggcgggaaataccctggaagaggcgtgttatttcgccaatgcggcggcgggcgtagtggtaggtaaactcgggacgtcaacggtttcccctattgagctggaaaacgcagtgcgcggacgcgcggataccggcttcggcgttatgaccgaagaggagttgagacaggccgtcgccagcgcgcgtaagcgtggcgagaaagtggtcatgaccaacggcgttttcgatattctgcacgcgggccacgtctcttatctggcgaacgcgcgcaaactgggcgaccgcctgattgttgcggtcaatagtgacgcctcgactaaacgtctgaaaggcgacagccgtccggttaatccgctcgaacagcgtatgatcgtgctgggcgcgctggagtcggtcgactgggttgtctcttttgaagaggatacgccgcaacgactgattgccggtattctgccggatctgctggtaaaaggcggcgactataagccggaagagatcgcgggcagcgaagaggtctgggccaacggcggcgaagtcatggtgctgaacttcgaagatggttgttccacgaccaatatcatcaaaaagatccagaccgagagcgagaagtaa

SEQ ID NO: 368958 - DNA, 2844 bp, Salmonella enterica
atgacgccgctctcttcacccttatcgcagtactggcagaccattgttgagcgcctaccagaaggatttactgagacatcgcttagcgtgcaggcgaagtcagtacttacatttagcgattttgcgctggatagcgtgatagcgcatccggagtggcttgccgaactggaatccgcatcgccgcaggctgatgaatggcgacattatgctggctggttacaggaggcgttggcaggtgtctgtgacgacgcctcgctgatgcgtgaactgaggttttttcgtcgtcgcatcatggtacgcatcgcctgggcgcagacgctgtcgctggtggacgatgagactattttacaacagttgagccatctggcggagacgctcattgtgggggcgcgcgactggctgtatgccgcctgttgccgcgaatggggaaccccctgtaacccgcagggcgttccgcagccgctgttgattttaggcatgggcaagctgggcggcggcgaactgaatttttcgtctgatatcgatctgattttcgcctggccggaacatggcgagactcggggcgggcgtcgtgaactcgataacgcccagttttttacgcgtctcgggcagcggctgatcaaagcgctggatcagcccacaatggatggttttgtctatcgggtggacatgcgcctgcgaccgtttggcgacagcggcccgctggtactgagttttgccgcgctggaggattactatcaggagcaaggacgcgactgggaacgctacgctatggtgaaagcgcggctaatgggcgataacgacgacgcctggtctcgtgaattacgcgccatgctgcggcctttcgttttccgccgctatatcgatttcagtgtcatccagtcgctacgtaatatgaaagggatgatcgcccgcgaagtgcgacgccgcggtttgaaagacaacattaaacttggcgcgggcggtattcgggaaattgagtttatcgtgcaggtattccagctcatccgcggcgggcgcgagccgtcgctacagtcgcgttcgttactgccaacgctggatgctatcgctgcgctgcatttgctgcctgagaatgacgtggcgcaactgcgcgtggcctatctttttctacgtcgtctggagaatctgctgcaaagcatcaatgacgaacagacgcaaacgttgcctgccgacgatctgaatcgggcgcggctggcctggggaatgaaggcggagaactggccgcagcttgttggcgaactgacggatcatatggctaatgtacgccgcgtattcaacgaattaattggcgatgatgaagccgataccccgcaggaggaagaacgttcagagccgtggcgtgaagtatggcaggatgcgctacaggaggatgattcgacgccagtgctggcgcatttagccgatgaggatcggcgacaagttctgaccctcatcgctgacttccgtaaggaactggataaacgccctatcggcccgcgcgggcggcaagtgctggaccaactgatgccgcacctgcttgctgatgtctgttctcgcgaagacgccgctgttacgctatcgcggataacgccgttgctggcggggattgtcactcgcaccacctatctggagctgctgagcgaatttcccggcgcgctgaaacacctgattatgctctgcgccgcttcgccaatgatagcgagccaactggcgcgttatccgttgttgcttgatgaactgctcgaccccggcacgctttatcagccgacggctaccgacgcttaccgcgacgaattacgccaatatttgctgcgcgtgccggaagaggacgaagaacaacaactggaggcattacgccagtttaaacaggcacagcttttgcggattgcggcggcggatattgccggtacgctgccggtgatgaaagtaagcgatcacctcacatggctggcggaggcgatgattgatgctgtggtgcagcaggcgtggacgcaaatggttgcgcgttatggtcagccagcgcatctggacgagcgccaggggcgggggtttgcggttgtcggttatggcaagttgggcggatgggagctgggctacagttccgatttggatctcatcttcctgcatgactgtccgatggacgtcatgaccaacggcgaacgcgaaatcgacgggcggcagttttatctgcgcctggcgcagcgcatcatgcatctgttcagtacgcgcacttcctccggcattttgtatgaggtggatgcgcgtctacgcccctctggcgcggcgggaatgctggtgacttcagcggacgcgtttgccgattatcagcagcatgaagcctggacctgggaacatcaggcattggtacgcgctcgcgtggtatatggcgacccgcagcttacctcacagtttgatacggtgcgccgcactatcatgacgacggcgcgcgacggcaagacattgcagactgaagtgcgtgaaatgcgcgagaaaatgcgggcgcatctcggcaataagcatcgtgatcgttttgatattaaagctgatgaaggcggtattacggatattgagtttatcgcgcaatatctggtactgcgctacgctcatgaaaaacctaaattaacgcgctggtctgataacgtgcgcatcctggagcttctggcgcaaaacggcattatggatgaacacgaggcgcaggcgctgacggtagcctacaccacactgcgtgatgaactgcaccacctggcgttgcaggagcttcccggtcatgtggcgcagacgtgttttagcaaagagcgcgcgctggtgcaggcaagctggcggaagtggctggtagccgtttga

SEQ ID NO: 368959 - DNA, 1302 bp, Salmonella enterica
atggctcaggaaatcgaattaaagtttatcgtcaatcacgacgccgtagatgcgctgcgaaatcatcttcatacgctcggcggcgagcatcatgcgcccagccagttgctgaatatctacttcgaaacgcctgataactggctacgccgccatgatatggggctgcgtattcgtggtgaaaatgggcgctatgaaatgaccatgaaaattgccggccgggtaacgggcgggctgcaccagcgacccgaatacaatgtcgcgctaagcgaacccgtgctggatctgacgcaacttccggcggaggtctggccggatggtaacctgcccgccggcctggcatcaagcgtacagccgctgttcagtaccgatttttaccgggaaaaatggtgtctggacgttgatggcagcaggattgaaattgcgctcgatctcggcgacgtaaaagcgggcgagtttgccgaaccgatttgtgagctggagcttgagttgcttcgcggcgatacgcgcgccgtgttaaaactggcgaagcaactgctgtcgcaaaccggtttgcgtcagggcagtctgagtaaggcggcgcgaggttatcacctggcgcaggggaatgcgccgcgagagaatacaccaacggcaattctgcggactgccgcgaaagccacggtagagcaagggctggaggtctcgctggatctggcgttgtcacagtggcagtaccatgaagagctctggctgcgcggcgacgagtcggcggaagaacatgtgctggatgctatgggattagtgcgccatgccttaatgctttttggtggcattgttccacgtaaagcgagcgctcacttacgtgatctacttacccaggcggaagcgacgatgacatccgcggtgtccgccgtcacagccgtttatagtacgcaaacggcgatggcgaaactggcattgacggaatggctggtgacgaaagcctggcagccatttctggacgcgaaggcgcaggccaaaatggccgattcttttaagcgtttcgccgacattcatctttctcgtcatgctgctgaattaaaaaaagtttttggacaaccgctgggtgataagtatcgcgaccagttgccgcgtttgactcgcgatatcgacagcgttttactgctggccgggtattatgatgcgatggtcgcgcaggcatggctggaaaactggcagggattgcgtcacgccattcttaccggacaacgtattgaaattgaacatttccgtaatgaggccattaaccagcagccgttctggttgcacagcggaaaacgataa

SEQ ID NO: 368960 - DNA, 615 bp, Salmonella enterica
atgccaaaattacgcctgattggactaactttacttgcgcttagcgccaccgccgtctctcatgctgaagagacgcgttacgtttctgatgaactgaatacctgggtccgcagcggtccgggagataattatcgccttgtgggtaccgtcaacgccggcgaggaagtcacgctcttacagagcgatgccaactatggtcaaattaaagacagttctggtcgtactgcctggataccgttaaaagaactgaataccacaccaagcctgcgtacccgcgtgccggatctggaaaatcaggtcaaaacgttgaccgataaactcaacaatattgataccacgtggaatcagcgcaccgccgatatgcagcagaaagtggcgcaaagcgacagcatcatcaacgggctaaaagaagagaaccagaagctgaaaaacgagctgattgtcgcgcagaaaaaagttagcgccgcgaatctgcaactggatgacaaacagcgcaccattattatgcagtggtttatgtatggcggcggcgtattgggtattggcttgctgttagggctggtgctgccgcatatgatcccaagccgtaaacgcaaagaccgctggatgaactaa

SEQ ID NO: 368961 - DNA, 1242 bp, Salmonella enterica
gtgaagatttatctggtcggtggtgcggttcgggatgcgttgttagggctaccggttaaagataaagattgggtcgttgtcggcgccacgccgcaggagatgcttgatgcgggctaccagcaggtaggccgtgattttcctgtgtttctccacccgcaaactcacgaagaatatgcgctggcgcgtaccgagcgtaaatccggttccggctacacgggcttcacctgttatgccgcgccggacgttaccctggaagccgacctccagcgtcgcgatctgaccattaatgctctggcgcgcgacgatgacggccagattatcgacccttaccacgggcgccgggatctggaggcgcgtctactgcgacatgtctctcccgcgtttggcgaagatcccttgcgcgtattgcgcgtggcgcgttttgccgcccgttacgctcatcttagtttccgtatcgccgatgaaacactggcgctaatgcgcgaaatgaccgcggcaggcgagctggaacatctgacgccggaacgggtatggaaagagacggaaaatgcgcttaccacccgtaatccgcaggtttacttccaggtattgcgcgactgcggcgccctgcgcgtcctgtttccggaaatcgacgccctgtttggcgtacccgcgccggcaaagtggcatccggaaattgataccggagttcatacgttgatgacgctgtcgatggccgccatgctcagtccgcagcttgatgttcgtttcgccacgctttgtcatgacctgggcaaaggcttaacgccgaaaaacctctggccgcgccatcatggccacggcccggcgggcgtgaaactggtcgaacagctatgccagcgtttgcgcgtccccaatgacctacgtgatttagctaaactggtcgccgagtaccatgatctgatccacacctttccgatactccagccgaaaacgatcgttaagctgtttgacgccattgatgcatggcgtaaaccgcagcgcgtcgagcagattgcgctgaccagcgaagccgatgtccgtggacgtaccggctttgaagcgtcggattacccgcaggggcgctggctgcgcgaagcctggcaggtggcccaagcggtaccgacgaaagaggtggtggaggccggatttaagggcattgagattcgcgaggagctgacgaagcgacgaattgcagcggtcgccaactggaaagagaagcgctgcccgaaccccgccagctaa

SEQ ID NO: 368962 - DNA, 822 bp, Salmonella enterica
atgagcgatatgcactcgctgctgatagcggcaattttgggtgtggtcgaaggattgacggagtttttgccggtatccagcacgggccatatgattattgtgggtcatctgctggggtttgaaggcgatacggccaagacattcgaagtggtgattcaacttggatctattctggcggtcgtggtgatgttctggcggcggttgtttggcctcatcggtattcactttggccgcccgctacagcgtgaaggtgaaagtaaaggtcgattaacgttgattcacatcctgctgggcatgattccggcggtggtgctggggttagtctttcatgacacgatcaagtcgctatttaacccaattaacgtgatgtacgcgctggtggtaggcggtctgttgctgattgccgccgagtgcctgaagccgaaagaaccgcgcgcgccggggctggatgatatgacgtatcgtcaggcgtttatgattggctgtttccagtgtctggcgctgtggccgggcttctcgcgttccggagcgaccatttccggtgggatgctgatgggcgtcagccgttacgccgcctctgagttctcgttcttactggctgtgccgatgatgatgggcgcaacggttctggatctctacaaaagttggtcattcctgaccgcagcggatattccgatgttcgcagtgggctttgtgacggcgtttgtggtggcgctgatcgctatcaagaccttcctgcaactgattaagcgtatctcgtttattccgtttgcgatttaccgctttgtggtggcggctgccgtttacgttgttttcttctga

SEQ ID NO: 368963 - DNA, 360 bp, Salmonella enterica
atggatattgtatttatagagcaactttcggtaatcaccactatcggtgtttacgactgggaacagactatcgagcaaaaactggtgttcgatatcgaaatggcgtgggataaccgtaagtcggcgaaaagcgatgatgtcgcagattgtctaagttatgcggatatcgccgacacggtgataaatcatgtcgaaggcgggcgttttgctctggtcgagcgcgtggcggaagaggtggcggatctgctgcttagccgattcaattctccgtgggttcgcatcaaactgagcaagcctggcgccgtcgcgcgcgcggcgaacgtaggggtaattattgagcgtggcaataatctgaaataa

SEQ ID NO: 368964 - DNA, 612 bp, Salmonella enterica
atgagtgcaatcgcgcctggaatgatcctcttcgcgtacctctgcggctcaatttccagtgccattctggtttgccgcatcgccgggctgcccgatccgcgagaaagcggctccggcaacccgggcgcgacgaacgtattacgaatcggtggcaagggagcggctgtcgcggtacttatttttgacatccttaaaggcatgttgcccgtctggggcgcgtatgcgttaggcgttacccctttctggctggggcttatcgctatcgccgcctgtctggggcatatctggccggtcttttttggctttaaaggcgggaaaggcgtagcaaccgcgtttggcgccattgcgcccatcggctgggatttaaccggcgtcatggctggcacctggctgctgacggtcctgttaagcggttattcatcgttaggggcgattgtcagcgccttgattgcgccgttttacgtctggtggtttaaaccgcagttcaccttcccggtatcgatgctgtcatgtctcattttgctgcgccatcatgacaacatccagcgtctgtggcgtcgccaggagacgaaaatctggacgaagctgaaaaagaaacgccagaaagattga

SEQ ID NO: 368965 - DNA, 1014 bp, Salmonella enterica
atgcgtgtactgggtattgaaacatcctgcgatgaaaccggcatcgctatttacgacgacaaaaaaggtctgttagccaaccaattgtatagtcaggtgaaattacatgctgactacggcggcgtagtgcctgaactggcttcccgcgatcatgtgcgtaaaaccgtgccgctgattcaggcggcattaaaagaagccggtctgacggcgagcgatatcgacgcggtggcctataccgcaggcccgggcctggtcggcgcgctgctggtcggcgcaaccgtcgggcgttcgctggcatttgcctggaatgtgccggccattcctgtacaccatatggaaggtcatctgctggcgccaatgctggaagataatcccccggaattcccgtttgtggcgctactggtctccggcggacatacgcagctcattagcgtgaccggaatcggtcagtacgaactgctgggagagtcgattgacgatgccgccggtgaagcgtttgataaaaccgccaaattgttggggctggattatcctggcggcccgatgctgtcgaaaatggcgtcgcaggggacggcgggacgttttgtctttccgcgcccgatgaccgatcgcccggggctggattttagtttttccggtctgaaaacctttgccgctaacaccattcgtagtaatggcggcgacgaacaaactcgcgctgatatcgcgcgcgcttttgaagatgcggtcgtggatacgctgatgatcaagtgcaagcgcgcgctggaaagcaccggttttaagcgtctggtcatggcgggcggcgtcagcgctaaccgcacgctgcgcgcgaagcttgccgaaatgatgcaaaaacgccgcggcgaagtgttctatgcgcgtccggagttttgtactgacaacggggcgatgatcgcctatgccggaatggtgcggtttaaggcgggcgttacggcggatcttggcgtaacggtacgtccgcgctggccgctggccgagctgccggcggcgtaa

SEQ ID NO: 368966 - DNA, 216 bp, Salmonella enterica
atgccggtaattaaagtacgtgaaaacgagccgttcgacgtagctctgcgtcgcttcaagcgttcctgcgaaaaagcaggtgttctggcggaagttcgtcgtcgtgagttctatgaaaaaccgacgaccgaacgtaagcgcgctaaagcttctgcagtgaaacgtcacgcgaagaaactggctcgcgaaaacgcacgccgtactcgtctgtactaa

SEQ ID NO: 368967 - DNA, 1746 bp, Salmonella enterica
atggctggacgaatcccacgcgtattcattaatgacctgctggcgagaaccgatatcgtcgatctgatcgacgtgcgcgtaaaactcaagaaacagggcaagaactatcacgcgtgttgtccattccataatgagaaaaccccttctttcaccgtaaacggtgaaaaacagttttatcactgctttggatgcggcgcgcatggcaatgcgatcgactttttaatgaattacgacaaactcgaatttgtcgaaaccgtcgaagaattagcggccatgcataacctggaaattccctatgaagcaggcaccgggcttagccagatagagcgccatcaacggcaaaacctctatcagttgatgaatggtctgaatgacttttatcagcagtcgcttacccatcctgcggcaaaacctgcgcgtgactatctgcaaaagcgcggtctgagcgctgaaattattcagcgtttcgccattggcttcgcgccgccagggtgggataacgcgttaaagcgcttcggtaataacagcgataacaaggcattgttgctggatgccgggatgctggtcaataacgagcagggcagcacttacgatcgtttccgtaatcgggtcatgttccctattcgggacaaacgcggcagggtgattggttttggcggtcgagtactggggaacgacacgccgaaataccttaactctccggaaacggacattttccataaaggccgccagctatatggtctttatgaggctcagcaatatagtgctgaaccgcaacgcttgcttgtggtcgaaggttatatggatgtcgtcgcactagcgcaatacgacattaactatgcggtcgcttcgctgggtacctcaaccacggcagaccatatgcatatgttattccgggcgacgaacaacgtaatttgctgttacgacggcgaccgggctggccgtgatgccgcctggagagcgctggaaacagcaatgccttatatgaccgacggtcggcaggtacgctttatgtttttacctgacggcgaagacccggatacgctggtgcgtaaagaaggcaaggcggcttttgaagcgcggatggagcaggcgcagccgctctctacgtttctgtttaatagcctcctgccgcaggtggatttaagctcgccggatggcagcacgcagttagccgcactggcgctgccgctcattaatcaggtgcctggcgacgcacaccgtattcagttgcgccagacgttggggctgaagttaggcattttcgatgatagtcagcttgatcgtttagtgccaaaacaggcggaaagcggcgtttcccgcccggctccgcagctaaaacgcacgaccatgcgtatactgataggattactggtgcaaaatccggatctcgcgccgttagtgccgcccttagacgcgctggatcagaataagctgcctggacttggcttatttaaagaattggtcaaaacttgtttggctcagccaggtcttactaccggacaacttctggaactctaccgtggcacaaatgatgctgcgacccttgaaaaattatcgatgtgggacgatatagcagataaggcgattgccgaaaagacctttaccgactcactcaaccatatgtttgattcgctgctgcaactgcgacaagaagagctgatcgctcgcgatcgcactcacggtttaagcagcgaagaacgccgagagctctggacgttaaaccaggagctggccagaaaatga

SEQ ID NO: 368968 - DNA, 1983 bp, Salmonella enterica
atgccgcatatcgatcgggaagcccccgacagccgcagtgagaggcagcggccaaaatataagtatgccctcgctttaaatgtcgacagctataccgtcgacaccaatcaaacgaataagtgtggataccgtcttatggagcaaaacccgcagtcacagctgaaacttcttgtcacccgtggtaaggagcaaggctatctgacctatgctgaggtcaatgaccatctgccggaagatatcgtcgattcagatcaaattgaagatatcatccaaatgatcaacgacatgggtattcaggtaatggaagaagcgcctgatgccgatgatctgctgctggctgaaaataccaccagcaccgatgaagatgcggaagaagctgctgcacaagttctgtccagtgttgagtctgaaatcggtcgtacgactgacccggtacgcatgtatatgcgtgaaatgggcactgttgaactgttgacccgggaaggcgaaatcgacatcgctaaacgtatcgaagacgggatcaaccaggttcaatgctccgttgccgaatacccggaagccattacctatctgctggaacagtacgatcgcgttgaggctgaagaggctcgtttgtccgatcttatcaccggctttgtcgatccgaacgcggaagaagagatggcgccgaccgcaactcacgtcggttctgaactctcccaggaagacctggatgatgacgaagacgaagatgaagaagacggcgacgatgacgccgccgatgacgacaacagcattgaccctgaactggcacgcgaaaaattcgctgagctgcgcgcgcaatacgtcgttacgcgcgacaccatcaaagcgaaaggccgcagccatgctgccgcgcaggaagagattctgaagctgtctgaagtgttcaaacagttccgtctggtaccgaagcaattcgactatctggtcaacagtatgcgcgtgatgatggatcgcgtgcgtacccaggaacgtctgatcatgaagctctgcgtcgagcagtgcaaaatgccgaagaagaactttatcacgctgtttaccggtaacgaaaccagcgaaacctggttcaacgccgctatcgcgatgaacaaaccgtggtcggaaaaactgcacgatgtcgcggaagaagtgcaacgctgtctgcaaaaactgcggcagattgaagaagagaccggtctgaccatcgaacaggtgaaagacatcaaccgtcgaatgtccatcggggaagcgaaagcccgccgtgcgaagaaagagatggttgaagcgaacttacgtctggttatttctatcgctaagaaatacaccaaccgtggcttgcagttccttgatctgattcaggaaggcaacatcggtctgatgaaagcggtagataagtttgaataccgtcgcggctacaagttctccacctatgcaacctggtggatccgtcaggcgatcacccgttctatcgccgatcaggcgcgcaccatccgtattccggtgcatatgattgagaccatcaacaagctcaaccgtatttctcgccagatgctgcaagagatgggccgcgagccaacgccggaagagctggctgaacggatgctgatgccggaagataaaattcgtaaggtgctgaagattgccaaagagccaatctccatggaaacgccgatcggcgacgatgaagattcgcatctgggtgatttcatcgaggataccaccctcgagctgccgctggactctgccactaccgagagcctgcgtgccgccactcacgacgttttggctggcctgaccgctcgtgaagcgaaagtgctgcgtatgcgtttcggtatcgatatgaacaccgaccacacgctggaagaagtgggtaaacagttcgatgttacccgcgaacgtatccgtcagatcgaagcgaaggcgctgcgtaaactgcgccacccgagccgttctgaagtgctgcgcagcttcctcgacgattaa

SEQ ID NO: 368969 - DNA, 507 bp, Salmonella enterica
atggttaaggacatactggcgccagggctacgggtggttttttgcggcatcaatccgggactctcctcggcgaataccggctttccgtttgcgcatcccgcgaatcgtttttggaaagttattcatttggccggtttcaccgatcgacagttgaaaccggaagaggcggaaaaattactggattttcgctgcggggtaacgaaactcgtcgatcgaccgacggtacaagcgactgaggtgaagttgcatgaattacgtagcggcggacgcaacctgattgaaaaaatagaggactaccagcccgcagcgctggcggtgcttggtaaacaggcttttgaacagggattcagccagcgtggtatcgcctggggtaaacaaaagatcgccattggcgcgacgatggtgtgggtgttgccgaatcccagtggcttaaaccgaattaaaacggaaaaactggtcgaggcctatcgcgaactggatcaagcgctcattatgcgtgggctatag

SEQ ID NO: 368970 - DNA, 768 bp, Salmonella enterica
atgacgacatcatccgtacgctacccacagcgtgttcgtaatgagctgcgttttcgcgagctgatcgttctgcgggtagaacgtattagcgcaggatttcagcggatcgtacttggcggcgaggcgctggacggtttcatctccctgggctttgacgatcacacgaaagtttttttccctgagccaggctgtcgctttacgcctccgacagtcactgaggaaggcattatctggggggagggcgttcgcccggtctccagggattacacgccgctgtatgacgaggcgcgtcgcgagctggcgctggatttctttatccacgatggcggcgtagccagccgttgggcaatggaagcccgtgaaggcgatacactgacgatcggcgggccgcgcggttcgctggtggtgccggaagagtatgcctgtcaggtttatgtctgcgatgagtccggtatgcctgcgctacgtcgtcgtctggaatcgcttagccgtctgcctgtgcgccctgcggtaaccgcgctggtgagcattcaggatgcggcataccgcgattatctcgcccatttgacggatattactgtggaatatgttgttggcggcgatgaacaggcaatgcaaacgcgcctgtcgcagctgacaataccagaatcagactatttcatctggattactggcgaaggcaaaacggtaaaacgtttaagtcagtgctttgaaaaggggtttgatccacacctggtacgtgcggcagcctattggcatcgtaaatag

SEQ ID NO: 368971 - DNA, 645 bp, Salmonella enterica
atgcaaaatcaacatgaagggtgttgcaaaaaccgggatcatatgcacgatggttgctgcaaagatcgagaacatcagcatgaaggctgccatagcgcgcatcagcatgagaacgccagttgcggcggcgagcaccgtcacggacacggctgtggtcgtcatggacagggcggtggtcgacgtcagcgattttttggccacggggaacttcggctggtcattcttgatatcctgacccgggacgccagccacggctatgaactgattaaagcgatagaaaacctgacggggggcggctatacgccaagcgctggcgtgatctaccctacgctggattttttacaggatcagcaatttatcacgattagcgacgaagaaggcgggcggaaaaaaatcgcgattaccgcgaacggcgcgcaatggcttgatgaaaatcgcgaacacctgacgcatattcaggcgcggctaaaagcccgttgtgtgggcatggagttacgtaaaaatccgcagatgaagcgggcgctggataacttcaaggccgtgctggatctgcggataaaccacagcgatatcaacgacgcgcaaatcaaacgcattatcggcgtgattgatcgcgcggcgctggaaatcgccgaactggattaa

SEQ ID NO: 368972 - DNA, 1569 bp, Salmonella enterica
atgtttttgcataacattaaaatacgttcaaaattatttatggcctttggcttattcattgttctcatggtggtgagttccgctctgtctttgtttagccttgatcgggctaatacgggtatgcaggacattattaccaatgattatcccaccacggtaaaagccaatctgttaatcgataattttaatgatttcatcatcgcgcagcagctcatgttactggatgaagaggggcgctggagccagagctcgcagaaagaactcagtgagataagccagcgcatttcggcgctactggatgagctttccagggaaaatagtcacgatgcggattcacagaaaatcattaatgagatccgtgaagcgcgccagcaatacctggagtccagattccgtattttgaaagatattcaaagcaataatcgtcaggcggccattcaggagatgatgaccagaacggtgcaggtgcaaaaagtctataaggacaaagtccaggaacttatcgctgttcaggacgcgcagatgcatgaagcgagcgtgcaggtcaaagaggattttaaaaataatcggacgctgttaatcactttggcgctgataagcatcgccgccggaggcgtaatgggatggtatattgtgcgttctattacccggccgcttgatgacgcagtacgctttgccgaggcgattgccgatggcgatctgactcgccatatcaccaccgactataaagatgaaacaggcgtactactgcaagcgttaatggcgatgaaaacgcgtctactggatatcgtacaggaagtgcaaaacggttcggaaagtatctccacagcggcggcgcaaattgtcgccggtaaccaggatttggcggcgcgtacggaagagcaggccagctcggttgaagaaacggcggcgtcgatggaacagattaccgccacggttaaaaatacggctgaccataccagtgaagcgaccaaactctctgccggcgccgccagcgtagtgaaaaacaatggggagatgatgaatcaagtgacgcagaaaatgcgcgtcattaacgatacggcaaatcgtatgtcggatatcatcaatatcattgattccattgcctttcagaccaatattctggcgctgaacgcggcggttgaagcggcgcgcgcgggcgaacatggacgtggttttgccgttgtcgccggagaggttcgccagttggcgcaaaagagcgcctcgtcagccagtgaaatccgtaatttgattgaagattcaaccagtcagactcaggaagggatgcacctggtggagaaagccagcgccctgattaatggcatggtggataacgtcgaagagatggatgtgatattacgtgagattgggcaggccagccgcgagcaaactgacggtatttcgcagattaacagcgcgattggcctgattgacgccgccacgcaacaaaactcctgccttgtggaagagtctgttgccgccgcggcgtcgctgaacgaacaggcgttacatttaaaagagctggttaacgtgttccgcgtccgcgaagaggacacgcagcccgcttaa

SEQ ID NO: 368973 - DNA, 1521 bp, Salmonella enterica
atgtcttctcatccctacgtcagccagctaaataccccgctggatgatgataccactctgatgtctacgaccgacctggaaagctatatcactcacgccaatgacacttttgtccaggtgagcggctatcagttaaacgagttactggcgcagccacataatctggtgcgtcatccggatatgccgaaagctgccttcgcagatatgtggtacaccctaaaacagggcgaaccgtggagcggcattgtgaaaaaccggcgtaaaaacggcgaccattattgggtgagggccaacgcggtaccgatgatacgtgaagggcgtgtgacgggatatatgtcgatccgtacccgcgccacggatgatgagattgccgccgtcgagcctttatatcaggcgctaaatgaagggcggtgtagtaaacgtattcataaaggcctggtggttcgtcagggcttgctgggcaaactgcccgctatgcctgttcgctggcgagtgcgtagtattatggggctaatggccgtaatgctggcgttggcgctgttcggtacggatgcctcatggcaggcgttgttgttgggcgcgttggcgatgctggcaggtacggcgctatttgaatggcaaattgtgcgtcccattgaaaatgtggcgacgcaggcgctgaaagtggcgaccggcgaacgcaacagcgtacaacaccttaatcgtagcgatgagttggggctgatgctgagggccgtggggcagcttggcttgatgtgccgctggctgatcaatgacgtatcaagtcaggtttccagcgtcagaaacggcagtgaaaggctggcgaagggtaacaatgatctgaacgaacacacccgtcagaccgtggagaatgttcaggaaacggtaacgaccatgaaccagatggcggagtccgtgaagctcaattccgagacggcttccgctgcggataagctttccatggcggccagtagcgcggcgactcagggaggtgaggcgatggatacggtgattaaaacgatggatgatatcgctcacagtacgcaacgtatcgggacgatcaccacgctaattaacgatatcgcttttcagacgaatatcctggcgctgaatgcggcggtagaagcggcgagagcgggcgagcaggggaaagggtttgccgtggttgctggcgaggtacgtcatcttgccagccgtagcgctaatgcggcgaacgatattcgtaaattaattgacgccagcgcaacaaaggtgcagtcaggctccgagcaggttcacgccgcaggccgtaccatggatgacattgtagcccaggtgcaaaatgtcaccctgcttatcgcacggatcagccagtcgacgcaggaacagacagatgggctttccagcctgactcgcgccgtggacgagttgaaccgcataacccagaagaatgcggcgctggtggaagagagcgcacaagtctccgcaatggtaaaacaccgtgccagccggctggaggatgcggtcacggtactgcattaa

SEQ ID NO: 368974 - DNA, 1380 bp, Salmonella enterica
ttgaacaggttaccttccagcgcatcggctttggcctgtagcgcgcacgcactgaatctcatcgagaagcgaacgctaaaccatgaggaaatgaaagcactaaaccgagaggtcattgactactttaaagagcatgtaaatccaggatttctggaataccggaaatctgttaccgccggcggggattacggagccgtagagtggcaagcgggcagtttgaatacgcttgtcgacacccaggggcaggagtttatcgactgtcttggggggtttggcatctttaacgtggggcaccgtaatcctgttgtggtatccgccgtccagaatcaactcgcaaaacaacctctccacagccaggagttacttgaccccttgcgggcgatgctggcaaaaacgctggcggcgctgacaccggggaaactcaagtacagctttttctgtaacagcggcaccgaatccgtcgaagcggcgctaaaactggcaaaagcgtatcagtcgccacgcggcaagtttacctttatcgccaccagcggcgcatttcacggcaaatcattgggcgcgctctccgccacggccaaatccaccttccgcagaccctttatgcctttactgccgggcttccgccatgtgccgtttggcaatatcgacgcgatgagcatggcatttagcgaaggcaaaaaaacgggcgacgagatagcagccgtgattctggagcctattcagggtgaaggcggcgtgatcctgccgccgcagggatacctgacagaggtacgtaagctctgtgacgaattcggcgcgctgatgattctggatgaagtacaaaccggcatggggcgtaccggcaagatgtttgcctgtgagcacgaaaatgtgcagcctgatattctgtgtctggcgaaagccctgggcggcggcgtgatgccgattggcgccaccatcgcgactgaagaggtgttttcggttctgttcgacaatcccttcctgcataccaccacttttggcggtaatccgctggcttgtgctgccgcgctggcgaccattaacgtcctgctggagcaaaatctcccggcccaggcggaacaaaaaggcgatacgctcctggatggttttcgacaacttgcgcgtgaatatcccaatctggtacacgatgcgcgcggcaaaggtatgttgatagccattgaatttgtcgataacgaaacgggctaccgttttgccagtgagatgttccgtcaacgcgtgctggtcgctggtacgctgaataatgcgaaaacaattcgtatcgagccaccgctcacgctaaccattgaactgtgcgaacaggtattgaaatcagcgcgtaatgcgctggcggcaatgcaggtgagcgttgaagaggtttaa

SEQ ID NO: 368975 - DNA, 2019 bp, Salmonella enterica
atgagctacccatcgctgttcgccccgctcgatctgggctttactactctcagaaaccgcgtgctgatgggatcgatgcacacgggtctggaagaacatcctgatggcgccgagcgcctggcggcattttatgccgagcgcgcgcgacacggcgtagcgttaatcgtcaccggcggtattgcgcccgttccctccggggtcgtgatgaccggcggcgcgatgctgaacgacgccagccaattaacgcctcaccgcgtggtgaccgatgccgtacatgcgcaaggcggtaaaatcgcgctgcaaattctgcacaccggacgttacagctatcagccgcacctggtcgcgccgtcggcaattcaggcgccaatcaaccgctttatgccgcatgaactgacgcatgatgaaatcttgcagttaatcgacgacttcgcgcattgcgcgcaactggcgcgggaagcaggctacgacggcgtagaggtgatgggatcagagggctatctgattaatgaatttctcacccggcgaactaaccatcgcgatgacgagtggggcggcgactataccagccgtatgcgcttcgcggttgaggtagtacgcgcggtacgccagcgggtagggaacgactttattattatctatcgcctgtcgatgctcgatctggtggaaaatggcggcacgttcgacgaaacggtacaactggcgcaagccattgaagccgcaggcgcaagcctaattaataccggcattggctggcatgaggcgcgaatcccgaccatcgccacgccagtaccgcgtggcgcctttagctgggtgacgcggaaactcaaaggtcatgtgtcggttccgctgatcgcgaccaatcgcattaacgatccgcaggtcgccgagacgatcctgacgcgcggcgatgccgatatggtgtcgatggcgcgtcccttccttgccgatgccgaattcctgactaaagcgcaatccggacgcgcagatgagatcaacacctgtatcggctgtaatcaggcctgtctggatcggatcttcatcggcaaagtgacctcctgtctggtgaacccacgcgcctgtcacgaaacccacatgccgatagcgccggccatacgcaaaaagaatctggccgttgtcggcgcaggcccggcggggctggctttcgcgattaacgccgcgtcgcgcggccatcatgtcacgctgtttgacgcccagagtgaaattggcggccagtttactatcgccaggcagatcccgggtaaagaggagttttacgaaacgctgcgctactaccgtcgaatgatcgatgttactggcgttacgctgaaactgagccaacgggtgaacgcagaggatcttcagccgtttgacgaagcgatcctcgcctgcggaatagtaccgcgccgcccgccgatagacggtatcgatcatccaaaagtattgacctacctggaggtattgcgcgataaagcgccggttggtaagcgagtggcgatcattggctgcggcgggatcggttttgacacggccatgtatctgagccagcatggcgaatccaccagccaaaatattgctgaattttgtacggaatggggaattgataccagcctgcaacaggcaggcggtctgcgcccggaaggcccgcgcctggcacgtagtccacggcaaatcgtcatgctgcaacgcaaagccagcaagccgggcgaagggttaggtaaaaccaccggctggatccatcgcgcgacgttactggcgcgcggcgtgaagatgatcccggcggtcagttaccagaagatcgacgacgacggattacatctcttgatcggcggcgaaccgcagttgctggaagtggatcatgtggtgatctgcgccggacaggaacctcgccgcgagctggcggacccgttacgcgccgcaggtaaaacggtacatcttatcggcggatgcgatgtcgcgatggagctggatgcccgacgggcgattgcccagggcatccgactggcgctggagatttaa

SEQ ID NO: 368976 - DNA, 1137 bp, Salmonella enterica
atgagccacgtagacgacggtttccgttcactgacgctgaaacgttttccgcaaacggatgatgttaacccgcttctggcgtgggaggcggccgatgagtatctgctgcaacagttggatgagacggaaattcgcggcccggtgctgatcctgaatgatacgtttggcgcgctaagctgtgcgctggcggagcattcgccatacagtattggcgattcgtatttaagcgaactgggtacgcgagagaatttacgccataacggcatcgcggagtccagcgtaacgtttctcgacagtaccgctgactacccgcaggcaccgggcgtggtattgattaaagtaccgaaaacactggcgttgctggaacagcagttacgcgctttgcgtaaggtcgttacggcgcaaacgcgtattatcgccggcgcgaaagcgcgtgatattcatacctctacgctggaactgtttgaaaaagtgctgggcccaaccacgacgacgctggcgtggaagaaagcgcgcctgattaactgtaccttcagtcatccgcaactggccgacgcgccgcaaacgctaagctggaaactggaagatacaggctggacgattcacaaccacgcgaatgtgttttctcgtaccggattggatatcggcgcgcgcttctttatgcagcatttgccggaaaacctcgacggggagattgtcgatctcggctgcggcaatggggtgattggcctgagcttactggcgaaaaatccgcaggcgaacgtagtatttgtcgatgaatcgccgatggcggtagattccagccgtttgaatgtagaaacgaacctgccggaagcattcgaacgctgcgaatttatgatcaacaacgcgctctccggcgtggagccgttccgttttaacgctgtgttctgcaacccgccgttccaccagaaacatgcgctgacggataatatcgcctgggagatgttccatcatgcccgccgctgcctgaaaatcaacggcgaactgtatattgtggcgaaccgccatctggactatttccacaagctgaagaagattttcggtaattgcgcgacgatagcaaccaacaataagtttgttattttgaaagcggtgaagcagggacaccgtcgataa

SEQ ID NO: 368977 - DNA, 498 bp, Salmonella enterica
atgacctcactaacttaccttcaggggtatccggaacatctccttgcccaggtgcgcgccttaatcgccgagcagcgcctgggagcagtgctggaaaaacgttatcccggcgcgcatgattacgctactgacaaagcgctatatcactatactcaggaactgaaaagtcagtttctgcgcaatgcgccgcccatcaataaagtgatgtatgacagcaagatccatgtgctgaaaaatgcgctgggactgcataccgctgtctcgcgcgttcagggcggcaagctcaaggcaaaggcggagatccgcgtcgccaccgtgtttcgcaacgccccggagccattcttacggatgattgtggttcacgaactggcacacctgaaagagaaagatcataacaaagcgttttatcagctctgctgccatatggaaccgcagtaccatcaactggagtttgatacgcgactgtggctgacgcatcaggcgctgtcggcacaataa

SEQ ID NO: 368978 - DNA, 693 bp, Salmonella enterica
atgctctcacaatgtgcccgttttatccgccgcctctgttttacacgccgggcgttaacagtggcgtgttttctgcttgtcgcagcaggcgtcgcgcttttctattccaactggcttatcgtcaacgcctcacagcatctgacatggaatggcattcagaccgttcccgcccgcaacgtcgggctggtgttaggcgctaaacccggcaatcggtattttacccggcggattaatactgccgccgcgttgtatcacgccggtaaagtgaagtggctgttagtcagcggcgacaatggcaaaaaagagtacgatgaaccttcggcgatgcagcaggcgctgatagcgaaaggtgtgccggaagcggccattttttgtgattatgccggattctccacgctggactccgtagttcgcgcccggaaagtgtttggcgaaagccgcattacgattatctcgcaagcattccataatcaacgggcgatctggctggcgcaacaatatggcatagacgctatcggcgttaacgcgccggatctgaataaaaggcacggaacctacacacgacttcgggaaaagctggcgcgggttagcgcggtgctggatgccaaaattttgcaccgtcagcctaaatatctgggcgctggcgtcactattggggctgatagcgcacacgggtgcccttctcgccagtaa

SEQ ID NO: 368979 - DNA, 999 bp, Salmonella enterica
atgatacgtttcgctgtaattgggactaactggatcacgcgccagtttgtcgacgccgcccatgaaaccggcaaattcaggctcgccgccgtttactcccgtagtcttgaacaggcgcagtctttcgcaaatgattatcccgtcgagcatctgtttacctcgctggaagcgatggcgcaaagcgacgcgattgaggcggtttatatcgccagcccgaattccctgcatttctcccagacgcagcgctttttgcagcataaaaaacatgtcatgtgcgaaaagccgctggcttctaacctggcggaggttgatgccgctatcgcctgcgcgcgcgataatcagcgggtactgtttgaagcctttaaaaccgcctgcctgcccaacttcctgctgctgcgggaatcgttgccgaaaatcggcagaatgcacaaagcattcctaaattactgccagtactcttcacgttatcagcgctatctgaacggtgaaaatccgaatacgtttaatccggccttctccaatggttcgattatggatatcgggtattactgtctggcgtcggcgatcgcgctatggggcgagccgcgcagcgttcaggcgtcggcgaatttattggaaagcggagtagatgcacacggcgtcgtggttatggattacggcgattttagcgtcacgctacagcattccaaagtcagcgactcggtactggccagtgaaattcagggcgagaggggatcgctggtcattgaaaagctgtcggaatgccagaaagtgtgttttgcgccgcgcggcgcgctgatgcaggatctgacccagcctcagcatattaataccatgctgtatgaagccggggcgtttgcccagcttattgaaaaccatgccgtggaacatccggggttgtcgctaagtcgcgccacggcaaaatggctgacagaaatacgccgtcaaaccggggtcatcttcccggcggacgatctgactcatccccttactgcgtaa

SEQ ID NO: 368980 - DNA, 969 bp, Salmonella enterica
atgaatactgttggtacgccattattatggggtggattcgcggttgttgtggtgataatgctatccatcgacctgttgttgcagggacgccgtggcgcacatgcgatgtcgatgaaacaagcggcaggatggtcaatcctgtgggtaacgctctcgctactgtttaacgccgctttctggtggtatctggctgaaacgcaagggcgcgaagttgctgacccgcaggcattggcgttccttaccggctatctgattgagaagtcgctggccgtagataacgtctttgtctggctgatgctgtttagctatttctccgtccctccggctctgcaacgccgggtgctggtgtatggggttcttggcgcgatcgtgttgcgtactatcatgattttcgccggtacctggcttatcactcagttcgaatggctgctgtatgtgttcggcgccttcctgctgtttaccggcgtaaaaatggcgctggcgaaggaagatgaatccggcattggcgaaaaaccgatggtgcgttggctgcgcgggcatctgcgcatgaccgatacgatcgagaacgagcactttttcgtacgtaaaaacggcctgctgtatgccacgccgctgctgctggtgctgattatggttgagttcagcgatgtgatcttcgccgttgacagtattccggcgatctttgcggtcaccaccgacccgttcatcgtactgacctctaacctgtttgccatcttaggactgcgcgcgatgtacttcctgctgtccggcgtggcggaacgcttctcgatgctgaaatatggtctggcggtcattctggtctttatcggcattaagatgctgatcgtcgacttctaccatattcctatcgcgatttcgctgggcgtagtgtttggcattctgaccattacgctggtgattaacgcctgggttaaccatcagcgcgataagaaactacgagcgcaataa

SEQ ID NO: 368981 - DNA, 1245 bp, Salmonella enterica
atggctacgcaacgagcatcagggctactgcagcgtttagcgcaaggcagtctggttaaacaaattttagtgggtctggtactggggattttactggcatggatttctaagcctgcggcagaagcggttggcttgcttggcaccctgttcgtcggcgccttaaaagcggtcgcccccgttctggtgctgatgctggtaatggcctcgatcgccaaccaccagcacggccaaaaaaccaatattcgccctattctctttctttacctgctaggcaccttttcagccgcgctggcggccgttgtgttcagcttcgccttcccttcaacgctgcatctgtccagtagcgcccaggatatcgtgccgccgtccggcattgtagaagtcttgcgcggtctgctgatgagcatggtgtcgaaccccatcgacgcgctgctgaacgctaactatatcgggattctggtgtgggccgtcggtctgggatttgccctgcgtcatggcaatgaaaccaccaaaaacctcgtgaacgatatgtctaacgccgtgacctttatggtgaaactggtgatccgtttcgcgccagtcggtatttttggtctggtttcatcaacgcttgcaaccaccggcttctctaccctgtggggttatgcgcacctgctggtcgtcttgattggctgtatgctgctggtcgcgctggtggtcaacccgctgttggtattctggaaaattcgtcgcaacccttatccgctggtgttcgcctgcctgcgtgaaagcggcgtttatgccttctttacccgcagctctgccgccaatattccagtgaatatggcgctgtgcgaaaagctgaatctggacagggatacttactccgtttccattccgctgggcgccactatcaatatggccggcgcggcaattaccattacggttctgacgttggcggcagtccatacgttaggcgtcccggtggatctgcctacagcgctgctgctgagcgtggtggcctcgctgtgtgcttgcggcgcctccggcgtggcaggcggttcattgctgctgatcccgctggcgtgcaacatgtttggcatcccgaacgatatcgcgatgcaggtagtagcggtcggctttattatcggcgtattgcaggattcgtgtgaaacggcgctgaactcgtctaccgatgttctgttcactgcggcagcctgccaggcagaggacgaacgtctggcgaataacgccttgcgtagctaa

SEQ ID NO: 368982 - DNA, 663 bp, Salmonella enterica
atggaactactgactcaattgctgaatgccctgtgggctcaggactttgaaacactggccaatccttccatgattggcatgttatattttgtgttatttatgattttgtttctggaaaatgggctgctccctgccgcctttttgcctggcgacagcctgttgatcctggtcggcgtgctgatcgccaaaggcgcgatgggttttccacaaaccattttgctgcttaccgtcgcggccagcctgggttgctgggtgagctatattcagggccgctggctggggaatacccgcaccgtgcaaaactggctctctcatctccccgcacattatcatcaacgcgcccatcaccttttccataaacacggcctgtcggcattattgataggccgttttatcgcgtttgtcagaacactgctgcccaccattgccggcatatccggcctgaataacgcgcgctttcagttcttcaactggatgagcggcttgttgtgggtgcttatcctgacgtcgctgggctatctgctgggcaaaacgcccgtctttatgaaatatgaagatcagttaatgtcatgcctgatgctgctgcccgtggtgctgctcttttttggcctggcgggttcactggtcatgctgtggaaaaagaagtatgggagccggggataa

SEQ ID NO: 368983 - DNA, 384 bp, Salmonella enterica
atgcttaaaccacgcataactgcccgacaactcatttggatcagcgcttttctactgatgctgaccatactcatgatgacgtggtcaacgctgcgtcagcaagagtcgacgctggccattcgcgcggttaaccagggcgccagtatgccagacggcttctcagttctgcatcatctggatgcgaacggcattcattttaaaagcattacgcctaaaaatgacatgttgctcattaccttcgattcccctgcgcaaagcgccgcagcaaaaacagtgcttgatcaaacgttaccacacggttatgtcgtcgctcagcaggacgatgacaacgaaacggtacagtggctgtcccgcttacgggaaagctcacaccgctttggctaa

SEQ ID NO: 368984 - DNA, 369 bp, Salmonella enterica
atgaaataccgcatcgctttggctatcacgctttttacacttagcgccggtagctacgctaattcgctttgtcaggaaaaagagcaggatatacaaaaggaaattagctacgctgaaaagcacaacaatcagcgccgtattgagggtctgaacaaggcgctcagcgaagtacgcgccaattgtactgacagcaagctgcgcgccgagcatcagaaaaagatcgctgagcaaaaagaagaggtagccgaacgccaacgtgatttagccgaggcaaaagcaaaaggcgatgcggataaaatagacaaacgtgaacgtaagctggccgaggctcaggatgagctaaaaaaacttgaggccagagactactaa

SEQ ID NO: 368985 - DNA, 306 bp, Salmonella enterica
atgtcgaaagataacactacggaacatctgcgcgctgagttgaaatccctgaccgatacgcttgaagaagtgctgagctcttcgggcgaaaagtcgaaagaagagttgagtaagattcgtagcaaagccgagcgcgcgctgaaagagagccgttaccgcctgggcgaaacgggtgatgtgattgccaaacagactcgcgtcgccgccgcccgcgccgatgattatgtgcgcgaaaatccctggacaggcgtaggcattggcgccgctgtcggtctggtgttgggcgtactgctgacgcgtcgttaa

SEQ ID NO: 368986 - DNA, 399 bp, Salmonella enterica
atggcggactctcgacaggcacaaggaccaggcaaaagcgtactgggtatcgggcagcggattgtcaccattatcgttgagatggtggaaacccggctgcgactggcggtagtagaactggaagaagagaaggcgaacctctttcagcttttgctgatggtaggtcttaccatgctcttcgcggcgtttggcttaatgagcctgatggttctggtcatctgggctatcgatcctcagtaccgtttgaacgcgatgatcgctaccactgttgtgctgttagtgcttgcgctaatcggcggcatctggactttgcgcaaagcgcgtcagtccacgctattgcgccatacgcggcacgaactggctaacgatcggcaaattctggaggacgatcagtcgtga

SEQ ID NO: 368987 - DNA, 300 bp, Salmonella enterica
gtgagcagcaaaggcgaacgcgaaaaacgtaaagcgctgcttctcagtcagatccagcagcaacggctggatctgtccgccagccgtcgcgactggctggagaccaccggcgcgtacgatcgcggctggaatacggtgttaagcctgcgctcctgggcgctggtcggtagcagcgtaatggccatctggaccatccgtcatcctaatatgttggtacgctgggcgaaacgcggcctgggtatctggagcgcctggcgcctggtaaaaactaccctccgtcaacaacagctccgcggttaa

SEQ ID NO: 368988 - DNA, 486 bp, Salmonella enterica
atgattctctccagcgataacaatgacgcgccaaaccgcgtcattgctcatgaaaatagcagcagccgccgagtcggccccctggagaataaaatgaaaaaattagaagatgttggtgtactgatagcgcgtattttaatgccagttctgtttattaccgcaggatggggaaaaattagcggctatgcgggcacacagcagtatatggaagcgatgggcgtaccaggattcctgctgccgctcaccatactgcttgagttcggcggcggtctggcgattctgctgggattcctcacccgcaccactgcgctttttaccgctggttttacgttgctgacggcattgatcttccatagcaattttgcagaaggtgtaaactcgctgatgtttatgaaaaacctgaccattgccggcggattcttattactggcgttaaccgggcctggcgcgttcagccttgaccgtctgctgaataaaaagtggtaa

SEQ ID NO: 368989 - DNA, 987 bp, Salmonella enterica
atgggacaactgatcgatggcgtctggcacgacacctggtatgacaccaaatcttccggggggaaatttcagcgttcagcgtcggctttccgcaactggcttaccgctgacggcgcgcccggaccttccggcgaaggcggattcgccgcagaaaaagatcgttaccatctgtacgtttcccttgcctgcccctgggcgcatcgcacgctcattttccgtaaactgaaaggtctggagccgtttattccggtttccgtcgtgaatccattgatgctggaaaacggctggacgtttgatgatacttttccggcggccaccggcgataccctctatcagcatgaatttctctaccagttgtatctgcacgccgatccacactacagcggccgcgtcaccgtaccggtcttatgggataaaaaaaatcatactatcgtcagcaacgagtccgccgaaatcattcgtatgtttaactccgccttcgatgggctgggcgctaaagccggggattactatccccccgcgctgcaaagcaaaattgacgagttaaacggctggatttatgacaacgttaataacggcgtttataaagcaggcttcgccaccagccagcaagcgtatgatgaagcggtagaaaaggtgtttactgcgctggcgcgcctggagcagattctcggacagcaccgctatctgacgggcgaccagttgaccgaggcggatatccgcttatggacgaccctggtacgctttgatccggtttacgtgactcatttcaaatgcgacaaataccgaatcagcgactacctgaatctgtacggtttcctgcgcgatatctatcaaataccgggcattgctgaaaccgttaatcttgaccatattcgtcaccactatttccgtagccataaaacgattaaccccacgggtatcatttccatcggaccgtggcaggatctgctcgaacctcacgggcgcgacgtacgctttggctaa

SEQ ID NO: 368990 - DNA, 366 bp, Salmonella enterica
atggattggtatttaaaggttttaaaaaattatctgggatttggcggccgcgcgcgacgcaaagagtactggatgtttattctggtcaatatcatctttacctttgtgttgggcctgctggacgccatgcttggctggcaacgcgccgggggtgaaggcgttctgaccaccatttacggcgttctgatctttttaccgtggtgggccgtgcagttccgtcgtctgcatgacactgaccgctccgcatggtggctactgttgctacttatccccattatcggctggcttatcatcatcgcgttcaactgccagaatggtacgccgggcgacaaccgcttcggccccgatccgaaacgtttttcctga

SEQ ID NO: 368991 - DNA, 897 bp, Salmonella enterica
atggctaaagagagagcgctgacgcttgaagcattgcgtgtgatggacgccattgaccgccggggcagttttgccgcagcggctgatgagttggggcgggtgccctccgcgctgagttacaccatgcagaagctggaagaagagttggacgttgtactgttcgatcgctccggccatcgtacaaaattcaccaacgtcggacgtatgctgctggaacgcgggcgggtattgctggaagcggcagacaagttaacgacggatgctgaagcgttggcccgcggttgggaaacgcatctgacgctggtcactgaagctctggtaccgacgcctgctttttttccgctgatcgaccggctggccgctaaagccaatacgcagctttcattgattaccgaagtactggctggcgcatgggagcggcttgagcagggacgggcggatatcgttatcgccccggatatgcattttcgatcgtcgtcggaaattaactcccgtaagttgtattcgttaatgaatgtgtatgtcgccgcgcctgaccaccctattcatcaggagccggagccgctttcggaagtgacgcgggttaaataccgcggcgtagcggtagcggataccgcgcgcgagcggccggtattaacggtgcaactgctggataagcagccacgtctgacggtaagcacgattgaagataaacgtcaggcgctgctggccgggcttggcgtcgcgactatgccatattcgatggtggaacaggatattgccgaagggcggctacgcgtggtcagcccggaatcgaccagcgaaatcgatattattatggcctggcggcgcgacagtatgggggaggcaaaagcctggtgcctgcgggaaatacctaagctattcgccggaaaataa

SEQ ID NO: 368992 - DNA, 702 bp, Salmonella enterica
atgattacgacccgaaccgccaaacaatgtggacaggcagactacggatggctacaggcccgctataccttctcctttggacactatttcgaccctacactgctgggctacgcgtcgttgcgcgtactgaaccaggaagtgctggcgccgggcgcctcttttcagcctcgaacttatccaaaggtggatattttaaacctgattctggacggcgaagcggaataccgcgacagcgacggcaaccatgtacaggctaaagcgggcgaagcgttgctgctcgccgcgcagccgggcattagctacagcgaacataatctcagcaaagttaagccgttaacccgaatgcaactgtggcttgacgcctgtcctgaacgggaaaacgcgctggtacaaaaaatcccactctcgacggcgcaacaacagcttcttgcctcgcccgacggtgagcaaaacagcttacaactgcgccaacaggtctgggtacatcatattacgctggagaaaggcgaatcgcttaacttccagcttcacgggccgcgcgcctatttgcagtcgattcacggtacgttccacgcgatgacgcacaacgaagaacgcgaggcgttaacctgcggagatggcgcatttattcgtgatgaacctaacattacgctggttgccgatacgccgctgcgcgcattactggtagatttaccggtgtag

SEQ ID NO: 368993 - DNA, 165 bp, Salmonella enterica
atgagcaaaaaatcggcgaagaaacgtcagcccgtggtaaaacctgccgtacaggagacgatgagcgccactgtgccgctgggctatgaagagatgctaaccgaactggaagccatcgtggcggacgccgaagcccggctggcagaagaagaggccgcagcctga

SEQ ID NO: 368994 - DNA, 1311 bp, Salmonella enterica
atgtttgaatctaaaataaatccattgtggcaaagttttatcctggccgtacaggaagaagtaaaaccggcgctggggtgtactgagccaatttcactggcgctggcggcagcggcggcggcggctgaacttgacggcacagttgaacgcattgacgcgtgggtttcgcctaatctgatgaaaaatggtatgggtgttaccgttccaggaacgggaatggtagggctaccgatcgccgcggcgttgggcgcgttgggcggtgatgcgaaagccgggttggaggtgttaaaagacgcttccgctaaagccgttgccgatgcaaaagcgatgctggccgctggacatgtcgcggtgatgttgcaggagccatgtaacgatatcctgttttcacgggcgaaagtgtatagcggcgatagctgggcatgtgtcacgatcgtcggcgatcatacaaatattgtgcggatagaaaccaacaagggtgtggtatttacccaggccgataatgcgcaggaagaagaaaaaaactcgccactgggagtgctgtctcatacctcgctggaagagatcctggcgtttgtgaatgcggtgccctttgacgctattcgctttattctcgatgcggccaggctaaacggcgcgttgtcgcaggagggactgcgtggttcctgggggctgcatatcggttcgacgctggccaaacagtgcgatcgcggtctgctggcgaaagatctctccacggcgattttgatccgtaccagcgcggcgtcagacgccagaatgggcggcgccacgttgcccgcgatgagcaactccggttctggcaaccaggggattaccgccacggtgccagtcatggtggttgctgaacatgtcggcgccgatgacgagcgcctggcgcgcgcgctaatgttatcgcatttgagcgctatctatattcaccatcagcttccgcgtttgtcggctctgtgcgcggcaaccacggcggcgatgggcgcggcggcgggtatggcgtggctgatagatggtcgttacgacactatcgcaatggctatcagcagtatgattggtgatgtcagcgggatgatttgcgatggcgcgtcgaatagctgcgcgatgaaagtctctaccagcgcgtcggcggcgtggaaagccgtactgatggcgttggacgatacggcggtgaccggaaacgaagggattgtggcgcacaatgtcgaacaatctattgcgaatttgtgttcgctggcgtgtcgctcaatgcagcagacagacaagcagatcatcgagattatggccagtaaagcgcattaa

SEQ ID NO: 368995 - DNA, 1332 bp, Salmonella enterica
atggaatcggctagtaataccagcgtaatcctcgacgcatcagccccggcgcgtcgggcagggatgacagaaagcgaatggcgtgaagccatcaaatttgatagtaccgacaccggttgggtcattatgagtatcgggatggcgatcggcgcagggatcgtttttcttcctgtccaggttggcctgatgggactttgggtctttttactctcttctattattggctatccggccatgtacctgttccagcggctgtttattaatacgctggcggaatccccggaatgtaaagactaccccagcgtgatcagcggctatctgggcaaaaactggggtattttattaggcgcgctgtactttgtaatgctcgtcatctggatgttcgtctattctacggcaattactaacgacagcgcctcttatctgcatactttcggcgtaacggaaggattactttccgatagtccgttttatggtctggtgctgatctgcatcctggtggcgatttcctcacgcggtgaaaaattactgttcaaaatctccaccggcatggtgctgaccaagctactggtagtggcggcgctgggcgtctctatggtgggtatgtggcatctgtataacattggcgcgctgccgccgatggccatgctgattaaaaacgccattattaccctgccatttacgctgacctcgattttatttatccagacgttaagcccaatggtgatctcttaccgttcacgcgaaaaatctattgaggtcgcacgccataaagcgctgcgtgccatgaatattgcgtttggcatcctgttcgttaccgtatttttctatgcggtttccttcaccctggcgatggggcatgacgaagcggtgaaagcctacgagcagaatatttccgccctggcgatcgccgcgcaatttattagcggcgatggcgcaggctgggtcaaagtggttagcgtaattctgaacatctttgccgtcatgaccgccttctttggcgtttatttaggattccgcgaagcgacgcaaggcattgtgatgaatatcctgcgccgtaaaatgcccgccgagaagattaaggaaaatctggtacagcgcggcattatgattttcgctattttgctggcctggagcgccattgtgctcaatgcgccggtactgagcttcacctctatttgtagccctatcttcggtatggtgggctgtttaattccggcatggttggtctacaaggttcccgcattgcacaaatataaaggcgcttcgttgtacctgattattattaccggtctgctgctatgcgtttctccgttcctggcattctcttga

SEQ ID NO: 368996 - DNA, 1365 bp, Salmonella enterica
atgattagcgcatttgatatttttaagattggcattggaccttcaagctcccataccgtagggccaatgaatgcaggaaaatgttttatcgatcggctgatcgacagcggcgacctgccgcgaacgacgcgcatcacggttgatctttacggatcgctatcgctgacgggcaaaggccacgcgaccgataccgccatcattatgggcctggcgggcaatacgccgcaggatgtcaatattgatagcattccggcgtttatccaggaggttgcccgcagcagccgtttatcggtggcgggtggcgcgcatgtggtggattttcccgtcgccgacagtattctctttcacgctgaaaccctggcgcgccatgaaaacggtatgcgtattaccgcctggaacggacaagcgccgcttttacacaaaacgtattactctattggcggcggctttattgtcgaagaggagcgttttggtcagtcgcacgacgtagaaaaatcggtgccgtatgattttcattccgccagcgaactgttgacgctgtgtgaaagacaggggctctcggtttccggcctgatgatgcaaaatgaactggcgttgcggagcaaagagcagattgacgctggctttgcccgcatctggcaggtgatggcgaccggaattgaacgtggcatgaatactgagggcgtgctgccggggccgctgaacgttccacgccgcgcggtagcgttacggcgtctgctggtctccagcgataatctctcccgcgatccgatgaacgtcattgactggattaacatgttcgccctggccgtgagcgaagagaacgcggcgggcgggcgagtggtcaccgcgccgaccaacggcgcgtgcggcattattcccgcggtgctggcctattacgacaaattccgtcgcccggtcaatgccaactctatcgcccgctatctgctgtcgtcgggggcgattggcatgctgtacaagatgaacgcctcgatatccggcgcggaagtggggtgtcagggtgaggttggcgtcgcgtgttcgatggcggcggcggggctgacagaactgctgggcggcagccctgcgcaggtctgtattgcggcggaaattgcgatggagcataaccttggcctcacctgtgacccggtggcgggtcaggtacaaatcccttgtattgaacgtaatgcgattaacgccgttaaagcggtgaatgcggcgcgaatggcgctacgccgtacctctgagccgcgggtttcgctcgataaagtgatcgaaaccatgtacgaaacgggtaaagacatgaacgacaaatatcgcgagacgtcgcgcggcggtctggcgattaaagtcgtttgtggatag

SEQ ID NO: 368997 - DNA, 2295 bp, Salmonella enterica
atgaaggtaaatatcgataccagcgatatgctgtatgccgaagcatggcgtgattttaaaggtacggactggaaagaagaaattaatgtccgtgattttattcagcataactatacgccctatgagggggatgaatcttttctcgccgacgcgacgccagcgaccacggcgctgtgggaaaaggtgatggcgggaatacgtatcgagaacgcgacccatgcgccggtggatttcgataccaacatcgcgacgacgattaccgcgcacgatgcggggtatattgaaaaagagctggaaaaaatcgtcggtttacaaacggataagccgcttaaacgcgctttgcatccgtttggcggcgttaacatgatcaaaagttcattccacgcctatggccgcgaaatggacgccgattttgaatatacctttaccgacctgcggaaaacccataatcagggcgtattcgatgtttactcgccggatatgctgcgctgccgtaaatccggcgtattaaccggtttgccggatggttatggtcgcgggcgcattattggcgattatcgtcgcgtcgcgctgtatggcatccgttatctggtacgcgaacgcgagctgcaattcgccgacctgcagtcgaatctggagcagggacagaatcttgaggcgacgattcgcctgcgtgaggagttggcggagcaccgtcgcgcgctgctgcaaatgcaggagatggcggcgaaatacggctatgatatctcccgcccggcgcggaacgcgcaggaagcggtacagtggctctacttcgcctacctggcagcggtaaaatcgcaaaatggcggtgcaatgtcgctgggaagaaccgcgtcgttccttgatatctacattgagcgcgatttcaacgcgggccttctgacagagcagcaggcgcaggagctgatcgaccatttcatcatgaagatccgcatggtgcgcttcctgcgcacgccggaatttgattcgctcttttccggcgatccgatctgggccaccgaagttattggagggatggggctcgatggccgcactctggtgacgaaaaactccttccgttatctgcataccctgcacacgatgggaccagcgccggagccgaacctgaccatactgtggtcagaagcgttgccggtggcattcaagaaatatgctgcgcaggtctccatcgtgacctcatctttgcagtatgaaaacgacgatttaatgcgtaccgactttaacagcgacgattacgccatcgcttgttgcgtcagcccgatggtcatcggtaagcagatgcagttcttcggcgcgcgcgccaaccttgccaaaacgttgctgtacgctatcaatggcggcgttgatgagaaactgaaaatccaggtcgggccgaaaaccgcgccattaatggatgaggtgctggattacgacgcggtaatggagagcctcgaccactttatggactggctggcggtgcagtacattagcgcgctgaacatcattcactacatgcacgataagtacagctatgaagcttcgctgatggcgctgcacgaccgtgatgtgtatcggacgatggcgtgcggcatcgccggactgtcggtggcggcggattccctgtccgccatcaggtacgctcaggtgaagccgattcgcgacgaaaatggccttgccatcgactttgctattgaaggcgagtatccgcagtacggcaacaacgatgagcgcgtggacagcatcgcctgcgacctggtgaaacgctttatgcaaaaaattagcgtgttgccgacgtatcgcaatgcggtgccgacgcagtccattttgaccatcacctcgaacgtcgtgtacgggcagaagaccggcaatacgccggatggacgccgcgccggaacgccgttcgcgccgggggcgaacccgatgcatggtcgtgaccgcaaaggggcagtggcctcgctgacgtcggtggcgaaactgccgtttacctacgccaaagacggtatttcgtacaccttctcgattgtgcctgcggcgctcgggaaagaagatgcggtgcggaaaaccaatcttgtcggcctgctggacggctatttccatcatgaagcacaggtagaaggcgggcagcatctgaacgtcaatgtcatgaaccgtgaaatgttgctggatgcgattgaacatccggaaaactacccgaacctgacgatccgcgtttccggctatgccgtgcgcttcaatgcgctgacgcgtgagcagcaacaggacgttatttcgcgcacctttactcaggcgatgtaa

SEQ ID NO: 368998 - DNA, 1209 bp, Salmonella enterica
atgaatgaatttccggtcgttctggtcattaattgcggatcatcttctatcaaattctctgtactggatttcgctacctgtgatgttttaatggcgggaatagcagatggaatgaatactgaaaacgcctttttatctattaatggcgataagccgataaacctctcgcactctaattatgaggacgcgttaaaagccattgcctttgagctggaaaaacgtgatttaacggatagcgtggcattaattggtcaccgtatcgcgcacggtggagagctatttacgcagtccgtcattattaccgatgagattatcgataatattcgtcgggtatcacctttagcgccgctgcataattacgctaatttaagcggcattgacgcggcgcggcaccttttcccggccgtgcgtcaggtggcggtatttgataccagtttccaccagacgctggcgccggaagcctatttgtacggattgccgtgggaatatttttccagcctgggtgtgcgtcgctacggctttcacggtacgtcgcatcgctatgtttcgcggcgcgcgtatgaactgcttgacctcgatgaaaaaaactcgggtctgattgtcgcgcatctgggcaatggggcgtctatctgcgcggtacgcaatggtcagagcgtggatacctcaatggggatgacgccgcttgaggggctgatgatgggcactcgcagtggcgacgttgatttcggcgcgatggcgtggatagccaaagaaaccgggcagacgttgagcgatctggagcgagtggtgaataaagagtccggtttgctcggcatctccgggttgtcatccgaccttagagtcctggaaaaagcctggcacgaaggacatgagcgcgcccggttagcgataaaaacgtttgtccaccgtatcgcccgtcatattgccggacacgcggcatcgttacatcggctggatggcattatttttaccggcggtattggtgaaaattcagtattaattcgccagttggtcattgaacatttgggcgtactggggcttacgttagacgttgaaatgaataagcagccgaattctcacggcgagcgcattatttccgctaacccttctcaggttatttgcgctgttattcccacgaatgaagagaaaatgattgcccttgatgccattcatttaggcaacgtggaagcaccagtggaatttgcataa

SEQ ID NO: 368999 - DNA, 1332 bp, Salmonella enterica
atgagtactactgatagcattgtatccagccaggcaaaacagtcgtcatggcgtaaatcggacacgacgtggacgctgggtttatttggtaccgccatcggcgccggggtgctgtttttccctatccgcgccgggtttggtgggcttatccccattctgctgatgctggttttagcttaccccattgcgttctattgtcaccgggcgctggcgcgtctgtgtttatccggatctaatccgtccggcaatattacggaaacggtcgaagagcactttggtaaaacgggcggggtagttatcacgttcctttacttctttgcgatttgtccgctgctgtggatttatggcgtcaccatcactaacacgttcatgacgttttgggaaaaccagttgcagatgccagcgttgaatcgcggtttcgtggcgctgttcttgctgctgctgatggcctttgtgatctggtttggtaaagatctgatggttaaggtgatgagttacctggtatggccgtttatcgccagtctggtgctaatctcattatcgctgattccttactggaactcggcggttatcgatcaggttgatctcagtaatatcgcgctgactgggcacgatggcatactggttacggtgtggctgggcatctctatcatggtgttctcctttaacttttcgcccatcgtctcttccttcgtggtgtctaagcgtgaagagtatgagaaagagtttggccgcgaatttaccgagcgtaaatgttcacagatcatctcgcgcgccagtatgctgatggtcgccgtggtgatgttcttcgcctttagctgtctgtttacgctctccccgcagaacatggcggatgcgaaagcgcagaacattccggtactttcctacctggctaaccatttcgcctctttgtcggggacaaaatctacttttgcaacggtgctggagtatggcgcgtctatcatcgcgctggttgctattttcaaatctttcttcggtcactacctggggacgctggaagggctgaacggcctggtgctgaaattcggttataaaggcgataaaaccaaagtctctatgggcaagcttaacaccatcagcatgatcttcattatggggtctacctgggtcgtagcttacgcaaacccgaacattctggacctgattgaagcgatgggcgcgccgattatcgcctcgctgttatgcctgctgccgatgtacgccattcgtaaagcgccgtcgctggcgaagtaccgtggtcgtctggataacgtgttcgtcaccctgattggtctgctgaccatcctgaatattgtctacaaattgttctaa

SEQ ID NO: 369000 - DNA, 990 bp, Salmonella enterica
atgcacattacatacgatctcccggttgcaattgaagatatcctcgaagcgaaaaaaagactggcggggaagatatataaaacgggaatgcctcgctctaactattttagtgaacgttgcaaaggcgaaatatttctcaagtttgaaaatatgcagcgtacgggttcatttaaaattcgtggcgcttttaacaaacttagctcgttaacggaggcggaaaaacgtaaaggcgtcgtggcctgttccgcaggtaatcatgcacagggcgtttctctttcttgcgcaatgctgggtattgacggcaaagtcgtgatgccgaagggcgcgccaaagtcaaaagtggcggccacctgtgattattcggcggaagtggtgctccacggtgacaacttcaatgacaccatcgctaaggtgagtgaaattgtcgaaaccgaaggccgcatttttattccgccttacgacgatccaaaagtcattgccggacagggcactattggtctggaaattatggaagatctgtacgatgtcgataatgtcatcgtgcctattggcggcggcggtttaattgcaggtattgccattgcgattaaatcgattaacccgaccattaaagttatcggcgtacaggccgaaaatgttcacggtatggcggcgtcttattacgctggcgaaataaccacgcaccgaacgaccggcaccctggcggatggttgtgatgtctcccgcccgggtaatttaacctatgaaatcgttcgtgaattagtcgatgacattgtcctggttagcgaagatgaaattcgtaacagcatgatcgctttaattcagcgcaataaggttattactgaaggcgctggcgctctggcttgcgccgcactattaagtgggaaattagatagccatattcagaacagaaaaacggtcagtattatttctggcggcaatatcgatctttctcgggtatcacaaattacgggtttagttgacgcttaa

SEQ ID NO: 369001 - DNA, 939 bp, Salmonella enterica
atgaatactcttgttctccctaaaacacagcatttggtggtctttcaggaagtcattagaagtggttctatcggttctgccgcaaaatcgttagggttaacccaacccgccgtcagtaaaatcattagcgatgttgaggcctattttggcgttgagctaattgtacgcaaaaataccggcgttacgttgaccgaagcgggacaggtactgctttcctggtctgaatctatcacccgcgaaatgaaaaacatgatcaacgagatgaacagtatgacgtgcaataccgttgtcgacgtctcgtttggttttccttcgctgattggctttaccttcatgtccgatatgattcataagttcaaagaggtatttccaaaagcgcaggtatccatgtacgaagcccagctctcttcattcctgccggccctgcgcgacgggcggctggactttgctatcggtacgctcagtaatgaaatgcaactacaggatctgcatgtcgagccgctgtttgaatcagagtttgtcctggtagccagcaagtcccgaacatgcaccggcaccatcacactggaatcgttaaaggacgaacagtgggtgttgccgcaaacgaatatgggctactacagcgaattactcaccactctacaacgaaatggcatcagcatcgaaaacattgttaaaacagattccgttgtcacaatatataatcttgttctcaatgctgatttcttaactgttattccctgcgatatgaccacgccttttggctctaatcaatttatcacgatacccataaaagacacgttacccgtcgcacgttatgcggcggtatggtctaaaaattatcgtatcaaaaaagccgcttcagtattagtagaattggctaaacaatattcatcatataatggatgcagacgcaggcagttaatagaaattgaatga

SEQ ID NO: 369002 - DNA, 1146 bp, Salmonella enterica
atgaaaatcgtaattgcccccgactcctacaaagaaagcctttctgccgccgaggtagcgcaggcgatagaaaaaggatttcgggaaattttccccgatgcgcaatatgtctctgttccggttgccgatggcggcgaaggaacggtcgaagccatgattgccgcgacgcagggcgttgaacgcaccgcatgggtgaccgggccgttgggtgaaaaagtgaaagcctgctggggaatgtccggggatggtaaaaccgcgtttattgaaatggcggcggccagcggactggcgctggttccaccagaaaaacgcaaccctttgattactacctcgcggggaacgggggagctgatattgcaggcgctggaaagcggcgcaagcaatatcattatcggcattggcggcagcgcgacaaatgacggcggcgcagggatgatgcaggcgttaggcgcaaaactgcgcgatgcaaacggcgcggatatcggttacggtggcggaagccttcattgtctaagcgacattgatatttcagagctcgatccccgtttaaaactctgcgcgattcgtgtcgcatgcgatgtatctaatcctctgatcggcgacaacggcgcatcacgaatttttgggccgcagaaaggcgcgaccgaagagaacattgttgagctggacagaaatcttgctcactatgccgacatcataaaaaaatcgctgaatgtcgacgtaaaggcggcgcccggcgcaggcgcggcaggcggtatgggggcggcgttaatggcttttctcggtgcggaattacgcagcgggatcgaaattgtcacggcggcactgaacctggaggagcatatccacgactgtacgctggtggtgacgggagaagggcggattgatagccaaagtattcgcggtaaagtgccgattggcgtcgcgaatgtggcgaaaaaatatcataagccagtgattggcattgccggcagcctgacgcacgatgtagggatagtgcatcattatggcatcgacgctgtctttagcgtactcacgcgcatcgtgacgctggaggaggcttttcggggcgcttttgacaatatttatcgggcatccagaaatgttgctgccgctctggcgataggaatgcgcagcgcagggtga

SEQ ID NO: 369003 - DNA, 891 bp, Salmonella enterica
atgacgatgaaagttggctttattggcttaggcatcatgggtaagcccatgagcaaaaacttactgaaagcagggtattcgctggtggtgtccgatcgtaatcctgaagcgattgccgacgtcattgccgcaggcgcggaaacggcctctacggcgaaggcgatcgctgaacagtgtgacgtcatcatcacgatgctgcctaactctccgcatgtgaaagaggttgcgctgggcgagaacggtatcatcgaaggcgcgaagccgggaaccgtattgattgatatgagttctatcgcgccgctggcaagccgtgaaatcagcgatgcgctgaaggcgaagggcgttgagatgttggatgcgccggtcagcggcggcgagccgaaggcgattgatggcacgttgtcggtgatggtggggggcgataaagccattttcgacaagtactacgacctgatgaaagcgatggcgggttccgtggtgcatactggcgatatcggcgcaggcaacgtcacaaaactggctaaccaggtgatcgtggcgttgaatatcgccgccatgtctgaagcgctgacgctggcgactaaagcgggcgtcaacccggatctggtctatcaggcgattcgcggcggtctggctggcagcacggtactggatgcgaaagcgccgatggtcatggacagaaactttaagccaggtttccgtatcgatctgcacattaaagatctggcgaatgcgctggatacctcccacggcgttggcgcgcagctcccgctgaccgccgccgttatggaaatgatgcaggcgttacgcgcggatggacacggtaatgacgaccatagcgcgctggcgtgctactacgaaaaactggcgaaagtggaagtcactcgctaa

SEQ ID NO: 369004 - DNA, 771 bp, Salmonella enterica
atgaataacgctattttcccgaataagtttaaagcggcgctggcggcgcaacaggtacagattggctgctggtctgcactggcaagcccaatcaccaccgaagttctcggtctggcgggatttgactggctggtgctggatggcgaacatgcgccgaacgatgtgaccaccttaattccgcagttaatggcattgaaaggcagcgccagcgcgcctgtggtacgtgtgccaaccaatgaaccggtcattatcaaacggatgctggatattgggttttataatttcctgatcccctttgttgaaacgcaagaggaagcggctcgcgccgtcgcctcgacgcgttacccgccggaaggcattcgcggcgtctccgtttctcaccgcgcgaatatgttcggtacggtgcctgattactttgcgcagtcgaacaaaaacatcaccattattgttcaaatcgaaagccagttgggtgtcgacaatgttgatgccatcgccgcaacggaaggcgttgatggcatttttgtcggcccaagcgatttggccgccgcgctgggtcatctcggcaatgcttctcaccctgacgtgcagcagacgattcaacatattttcgcccgcgctaaagcgcacggtaaaccgtgcggcattctggcgccggtagaggcggatgcccgccgttatctggaatggggtgcgacctttgtcgccgttggcagcgatttaggcgcattccgcgccagcacgcagaagcttgccgacacctttaaaaaataa

SEQ ID NO: 369005 - DNA, 1572 bp, Salmonella enterica
atggccaatatcgaaattcgccaggaatcgccatcggcgttttatataaaagtacatgaaaccgataatgtcgcaattattgttaatgaccacggtcttaaagccggaacacgttttccggatggcctggaactgactgaacatattccgcaaggccataaagttgctctgacggatatccccgctcacggcgaaatcatccgttatggcgaagtcatcggttatgcggtacgcgacatcccgcgcggaagctggatcgacgagtcgctggttgaactgccaaaagcgccgccgctgaatacgctaccgctggcgaccaaagtaccggaaccgctgccgccgctggaaggctatacgtttgagggctatcgtaacgccgatggcagcgtcggcaccaaaaatctgcttggcattaccaccagcgtgcactgtgtggcgggcgtggtcgattatgtggtgaaagtgattgagcgcgatctcctgcccaaatacccgaatgtcgatggcgttgtagggctaaaccatctgtacggctgcggcgtggcaatcaacgcgccggcggcggtcgtgccgattcgcacgattcataatatcgcgctcaaccccaattttggcggcgaagtgatggtgattggcctcggttgcgaaaaactgcagccggaacggctgctggaaggcaccgaggatgttcccgccatcgccgttgaaagcgccagtattgtgcgtttacaggacgagcagcatgtcggctttaaatcaatggtcgacgatattttgcgggtcgccgaacgccatctgacgaaactgaaccagcgccagcgcgaaacctgcccggcctccgagctggtcgtcgggatgcagtgtggcggcagcgatgcgttttctggcgtcacggcaaacccggcggtgggttatgcttccgatctgctggtacgctgcggcgcgaccgtcatgttctcggaggtcaccgaagtgcgcgatgccattcatcttctgacgccgcgcgccatcaacgaagccgtgggtaaacgcctgctggatgaaatggcctggtacgataactatcttgatatggggaaaaccgatcgcagcgctaacccgtcccctggcaacaaaaaaggcggcctggcgaacgtcgtggaaaaagcgttgggctctatcgctaaatcgggtaagagcgccattgtcgaagtattatcgccgggccagcgccccaccaaacgcggcctgatttacgccgcgacgcccgccagcgatttcgtctgcggcacgcagcaggtcgcttccggcattaccgtacaggtctttaccaccggacgcggcacgccgtacgggctgatggcggtgccggtcattaaaatggcgacgcgtaccgagctggcgaaccgctggtatgacttaatggatatcaatgcaggcaccatcgccacgggtgaagagacaatcgaagatgtgggctggaagctatttcactttattctcgatgtcgccagcggccggaaaaagactttctcagatcaatggggattgcataaccagctggcagtgtttaaccccgcacctgtgacctga

SEQ ID NO: 369006 - DNA, 855 bp, Salmonella enterica
atgtttatcatttcaggcagaacaatgctaaagaaggcgcagcaggaaggctatgctgtgccggcgtttaacatccacaacctggagacattgcaagtggtggtggaaaccgccgcagaattgcgctctccgctgattgtcgccggtacgccaggcacctttagctacgcaggcgtcggtaatatcgtggccatcgccgcagaactggcgaaaagctggaaccatcctctcgcggtacatctcgatcatcatgaaaaactggccgacatcaaaatgaaagtcgccgccggggtacgctcggtcatgatcgacgggtcgcatttcccctttgccgacaatattgcgctggtgaaaagtgtggttgattactgtcatcgctacgatgtcagcgttgaagctgaacttgggcgtctcggcgggcaggaagacgatcttatcgttgacggtaaagatgcgctttatacccatccggaacaggcccgggaatttgtagaaaaaacgggtatcgactcgttagccattgctatcggcaccgctcacggcctctacaccgctgaaccaaaacttgattttgaacgactgacggaaattcgtcagcgggttgatgtccccttagtccttcacggcgcctctggcctgccgacccgcgatattacccgcgctatttcgctgggcatctgcaaagttaacgtcgcgaccgagcttaaaatcgccttttccggagcgcttaaaaactatttaacgcaacacgcagaggccagcgatccccgccattacatgatcccggcgaaagcggccatgaaagaggttgtacgtaaagtgattgccgactgcggttgtgaagggaagctctaa

SEQ ID NO: 369007 - DNA, 1272 bp, Salmonella enterica
gtgaaagaaataatttctcgtcacaaagcaggggaacagatagggatctgttccgtatgttcagcacacccgctggtgattgaatccgcattacgttttgacctgaatagcgggaacaaagttctgatcgaggcgacctctaaccaggttaatcagtttggcggttataccggcatgaaaccggctgactttcgtgattttgtctatggcatcgcccaggaagtgggttttccacgcgaacggcttattttaggcggcgatcacctgggacctaactgctggcaaaacgaacctgcggatacggcgatggaaaaatccgtcgaactcattaaggcttacgtcgctgccgggtttagcaaaatccatcttgatgcctctatgtcctgcgctgacgacccgacgccgctggacccaatggttgtcgctaaacgcgccgccttgctttgccaggcagcggaaacgacggcgaccgacgaacaaaaacgccatttaacctatgttatcggcactgaagttccggttccgggcggggaagccagcgccattaacgccgtgcatgttacccgcgaacaggatgcggcccgcacgctgcaaacgcatcaggctgcttttcgcgccctggggctggatgaggcattgaaccgggttatcgcgattgtcgtacagccgggcgttgaatttgatcatacccagattattcattatcagccgcaggcggcacaggcgctctccgcatggataaaagaaacgccgatggtctatgaagcgcattcgactgattatcagacgcgacaggcctaccgtgcgctggtacgcgatcattacgccattctgaaggtcggcccggcgctcactttcgcgctgcgcgaagccattttcgcacttgcgcaaatggaaaacgagctgatctccccggaacaacgtagtcgggtactggaggtcattgatgaagttatgctaaacgaaccgggctactggaaaaaatactaccgtccaacctggagccaggcgatggtcgacatccactttagtttgtctgaccgtattcgctattactggccgcacccgcgtattcgtcaaagcgtagagaagttaatcgccaatctgaacaacgtcacattgccgctgggattaattagccagtttatgcccgtacagtttgaacgcctgtctgagggcgtgctcacccctacgccgcataacctgattattgacaaaattcaggatgttctgcgcgcttatcgcttcggttgcacgccggatgtcgcctga

SEQ ID NO: 369008 - DNA, 465 bp, Salmonella enterica
atgagccaactatttgtccgaaccggaatcacattcgactcgagccaacaggcgctggtgcacattggcaaagagatgctggcgaaaggcgtggtacatgatagttatccgcaggcgctggtggaacgtgaagcgtcttttcctaccggcattgcgctggagcgtcacgccgtcgctatccctcattgcgaggcggttcatgcgaaatcacccgctatctatctgattcgtccagataagccggtcatgtttcaacaggcggatgatgacgaagagattgccgtttcgttaatcatcgccttaatcgttgaaaacccggcggcacagctaaaacttctgcgccgcctgtttagtgagctacagaacccgagcaccctcgatgccctgttaagcgcgccggatgccgaactggcgatacgctttcaggaaaccatccttgagcctgagcagtgcgtccaggtttga

SEQ ID NO: 369009 - DNA, 285 bp, Salmonella enterica
atgaaacgtaaagtaattgtggcctgtggcggtgcggttgcaacctcaacgatggctgcggaagaaattaaagagctatgtgatgccaaccatattgagctcgacttagtgcaatgccgggtcaccgaaatcgaaacctatatggacggcgccgatcttatctgtaccactgccagggtcgatcgcgcctttggcgatattcccgtcgttcacggtatgccttttgtttccggcgtgggtattgaagcattacagcaaaaaattctgtccattctcatggggtaa

SEQ ID NO: 369010 - DNA, 1374 bp, Salmonella enterica
atgtttagcgaaataatgcgttatatcctcgacttaggcccaacggtgatgttgcctctggtgatcatcgtgttctctaaactgctgggaatgaagcttggggattgttttaaatcgggtttgcatattggtatcggcttcgtgggtattggtctggtcatcggcctgatgctggattctatcggccccgcggcgaaagccatggcggaacatttccaaatcaatctccacgttattgacgtcggctggccaggttcatcgcccatgacctgggcgtcacaaatcgcgctggtcgcgatccctgtcgccatcggggttaacgtcctgatgctggtgacccgcatgacccgcgtggtgaatgttgatatctggaatatctggcacatgaccttcacgggcgccatgctgcatctggcgaccggttcatactggctggggattctgggcgttgtggttcatgccgcctttgtctacaaactgggggactggtttgccaaagatacccgcgactattttggcctcgaggggattgctatcccacacggttcatccgcgtacctgggccccgtggcggtactcgttgataccattatcgagaaaattcctggtctcaatcgtattcactttagcgcagacgatgtccagaaacgcttcggaccgtttggcgagccggtgactgtcggcttcgtgatggggctggtgattggtgtactggcaggctacgacgccaaagccgttctgcaactggcggtcaaaaccgcagcggtgatgctgcttatgccacgcgtcattaaacctattatggatggcctaacgcctatcgcgaaacatgcgcgtaaacgtctacaggctaaatttggcgggcaggagttcctgataggccttgatccagcgctactgctcggtcatacctctgttgtctccgcgagcctgatattcattccgctgaccatcctgattgccgtcttagtaccggggaaccaggtgctgccgttcggcgacctcgccaccatcggtttctttattgcgatggcggtcgcggtacaccagggcaacctgttccgcacgctgatttcaggtgtcattattatgggtatcaccctgtggatagccacccagacgattggcctgcatacccaactggctgccaatgccggagcgctaaaagctggcggacaagtcgcctcgctggatcagggcggttctcccatcacctggctgctgattcaactttttacctggcagaatatcgtcggcttcgccgtcattgccattatctatctggccggcgtactgctgacctggcgtcgcgcccgacagtttgtcgcggctgagaaagccacggcgctacagcaaagtcaaatcgcctcttaa

SEQ ID NO: 369011 - DNA, 1044 bp, Salmonella enterica
atgaaatcagtggttattcacgctgagggagacgtgcgcgttgaagaacgtcccttaccacaactgcaagccgaggacgatgtgttggtcaaagtcgttagctcagggctttgcgggtcggatatcccgcgtattttcgcgcagggcgcccattattatcctattacgttaggccatgaattcagcggctacgttgaatcctacggcacaggcgtaacggatatgcagcctggcgatgccgtcgcttgtgtcccgcttcttccctgctttcgctgtccgcaatgcgaacgcggttacttttctttatgcaaacagtatcagtttgtaggatcgcgcagcgaaggcggtaatgcggaatatgtggtggtcaaacgggccaatcttttccgcttgccgtctgatatgccgattgaagatggcgcgtttatcgaaccaattaccgtgggcttacacgcctttcatctggcgcagggctgcgaggggaaaaacgtaattatcgttggtgccgggacaattggcctgctggccttacagtgcgcgcgggaactgggcgcgcgaagcgtaacggcgattgatatcaatccgcagaaactggaacttgcgaaagcgctcggcgcaacgcatacctgtaatagccgggaaatgaccgccgacgacatccagaccgcgttgtccgacattcagtttgatcaactggttctcgaaacggcaggaactccccagaccgtctcgctggctatcgatatcgccgggccgcgcgcgcaactggcgctggtggggacgttacatcacgatctcaccctgacaacgcgtacattcgggctaattttgcgtaaagagctcacgctcctcggcagttggatgaactactccgcgccatggccaggagaagaatgggaaaccgcagcgcgcctgttggctgaaaaacgtcttcaactgacccctctcattgcccatcgcggcgatgcggaaagctttgcagaagcagtcaaagcgcttaatggcgcgcccatgcagggcaaaatcctacttcaactttcctga

SEQ ID NO: 369012 - DNA, 774 bp, Salmonella enterica
atgaactcatttgagcgaagaaataaaattgtcgacctgattaatacgcaaggcagcgtgctggtgatggacctttcaaatacatttggtatttctgaagtgactatccgtgctgacctgcgtctgctggaagagaaaggccttgtcacccgttttcatggcggcgcggcaaaaccgggaagtcatctggcggaaggcgacaatcaggaagtcattctggaagatcggtatcaactcgccagcgatccgaaaaagcggattgcccaggcggctgcggcaatggttgaagaaggaatgaccatcattctggatagcgggagcacaacattactgattgcggaagcgctcgcgcgaaaaagcaatattacggtgatcactaacagcttgcctgccgcttttacgctatcagaaaataaagatctcacgctggtggtctgcggcggtacggtacggcataaaacccactcaatgcacggcacgattgcggaacgatcgctacacggcatcagcgccgatttaatgtttgtcggggcggatggcattgatgcgacaaacggtattaccacgtttaacgaaggttattccattagcggcgtcatggcggcggcggcacacaaagttatcgcggtactggacgcgaccaaatttaaccgtcgcggctttaaccaggtattgccgatggacaagatcgactgtgtgataaccgatgacaccatcagcaaacaggataaagcggcattagcgaaaacaggcgtggaattaatgatcgtctaa

SEQ ID NO: 369013 - DNA, 864 bp, Salmonella enterica
atgaaacaaaacgaatcggcggataattctcagggccaactctttattgtacctactcctatcggtaatctggcggatattacccagcgtgcgttggaggtgttacaggctgtagatctgattgccgccgaggatactcgtcacaccggtttattgctgcaacattttgggattaatgcccgattgttcgcgctgcacgaccataacgaacaacaaaaagcggaaacgctggtcgcgaagctaaaagaagggcagaacattgcgctggtttccgacgccggtacgccgctgattaacgatccgggctaccatctggtgcgtacttgccgtgaagcggggattcgcgtggtgccgctaccagggccgtgtgctgctatcactgcattaagcgccgcgggtttaccatcagatcgtttttgttatgaaggcttcctgcctgccaaatcaaaaggccgccgtgatgcgctaaaagccattgaaacggaaccgcgaacgctgattttttatgagtcaacccaccgcctgttagatagcctggaagatatcgtcgcggtattgggagaatcccgttatgtggtgctggcgcgtgagctgaccaaaacctgggaaaccattcacggcgcgcccgttggcgagctgctggcgtgggtcaaagaagatgaaaaccgtcgcaaaggcgaaatggtgctgattgtcgaaggccataaagcgcaagaagacgacctgcccgccgacgcgctgcgcacgctggcgctgctacaggcagaactgccgctgaaaaaagcggcggcgctggcagcagaaattcacggcgtgaagaaaaatgcgctgtataagtatgcgctggagcagcaggaagaataa

SEQ ID NO: 369014 - DNA, 2043 bp, Salmonella enterica
atggtaccctcaacattttctcgtttgaacgccgcgcgcgcgctgcctgtcgtcctggctgcgctacttttcgccgggtgcggcacccaggcgccagatcaaagcgcagcctatatgcagggttcagcgcaagctgactccgccttttacctgcatcagatgcagcaaagcgcagatgatagcaagaccaactggcaattactcgccattcatgcactgctgaaagaaggaaaaagccagcaggccgtcgacctgttcaaccaactcccgcaaaatctgaacgatgcccagcgtcgcgaacagtctttattagcggtagaaatcaaactggcgcaaaaagatgtcgcaggcgcgcaggccttgctggataaactaaaacctgccgactttgcgccaaatcagcaagcgcgttactggcaggcgcagatcgttgccagccagggacgcccgtcgcttaccctgttgcgggcgttaatcgcccaggaaccgctactggcggcgaaagataaacaaaaaaatatcgacgccacctggcaggcgctctccgccatgacgccggatcaggccaagacgttagttatcaacgccgatgaaaacgtgcttcagggctggctggatctgcaacgcgtctggtttgacaaccgcaacgatccggacatgctgaaagccgggatcgccgactggcaaaaacgctacccgcaaaatccgggggcgaaaatgctgccgacgcagctcgtcaatgtgcaacgtttcaaaccggcttccaccagcaaaatcgctctgctgctgccgctgaacggtcaggctgccgtgtttggccgtaccatccagcaaggtttcgaagccgcgaaaaacctcggcacccaggcggtggagatgcagcctgccgccgctcctgacgcgccggtcgaacctggcgtggaggagacgcaaccacaaatgaccaacggcgtcgccagtccgtcgcaggcctcggtgagcgatctgactgatgacgctccagcccagtccgctacgccagtcagcgcgccacaaactccccctgctacagcaagcgcgccggcggatccctccgctgaattaaaaatctacgatacctcttcccagccgttggatcaggtgctcgctcaggttcagcaagacggcgccagtatcgtggtcgggccgctgttgaaaaacaatgtggaagcgctgatgaaaagcaacacgccgctcaacgtgctggcgctcaaccagccggaaacggtacgtagcttccctaatatctgctatttcgcgctctctccagaagatgaagcccgtgacgcggcgcatcatatttatgaccagggcaagcagtcgccgctgctgttgattccacgcagcgcgcttggcgatcgcgtggcgaacgccttcacccaggagtggcaaaaactgggcggcggcatcgtgttacagcaaaaattcggctccgtagccgagctgaaaatgggcgtgaacggcggcgcgggtatcgcgttgacgggcagtccggtcgccgccagcgtgcctgcgcagcctggcgtcaccattggcggtctgaccatccctgcgccgccgaccgacgcgcaaatcaccggcggcggacgcgtagacgcggtctatattctggctacgccggaagagattggctttatcaaaccgatgatcgccatgcgtaacggcacccagagcggcgcgacgctgtatgccagctctcgcagcgcgcaaggcacctccggccccgacttccgtctggaaatggagggtttacaatacagtgaaattcctatgctggcaggcggcaatatgccgttgatgcagcaggcgctgagcgctgtacataacgactattctctggcgcggatgtacgccatgggcgtggatgcctggacgctggcgaaccacttttcgcagatgcgtcaggtgcagggatttgagatcaatggtaataccggcgcattaaccgccagcccggattgtgtgattaacaggaagttatcatggctcaaataccagcaaggggagattgttcccgccagctaa

SEQ ID NO: 369015 - DNA, 396 bp, Salmonella enterica
atggctcaaataccagcaaggggagattgttcccgccagctaacgcgtaaacaggctggcgacgcgtgggaagctgccgcgcgtcgctggctggaaagcaaaggactgcggtttatcgccgccaacgtgcgcgagcgcggcggcgaaatcgatctgatcatgcgcgacggaaaaacgacggtttttgttgaggtccgctatcggcgctccgggctttatggcggcgcggcggctagtgtgacccgcagcaagcaacacaaattattacatactgcccgcttgtggctcgcccgccagaatgggagttttgatactgtggattgtcggttcgatgtgttagccttcaccggaaatgagattgagtggtttcgggatgcgtttaacgaccactcataa

SEQ ID NO: 369016 - DNA, 591 bp, Salmonella enterica
gtgctcgaaagaatcaaagtttgctttacagaaagcattcaaactcaaattgctgcggcggaagcgcttccggatgccatttcccgcgccgccatgacgctggttcattccctgcttaacggcaacaaaatcctctgttgtggaaacgggacgtccgcggccaacgcacagcattttgctgccagcatgattaaccgctttgaaacggagcgacccagtttacccgccattgcactaaataccgataatgtggtcttaactgcgatcgctaacgatcgcctgcacgatgaagtttatgcaaaacaagtccgggcgctgggacatgcaggcgatgttttattggcgatctctacgcgtggtaatagtcgcgatatcgtaaaagccgttgaagcagccgtcacacgtgacatgaccattgtggcgctaaccgggtatgacgggggtgagctggccggactattagggccgcaggatgtcgaaattcgtatcccttcacaccacagcgcgcgcattcaggaaatgcatatgctgacggtaaactgcctgtgcgatttgatcgataacacgctttttcctcaccaggatgattaa

SEQ ID NO: 369017 - DNA, 576 bp, Salmonella enterica
atgaaggcattttcgccgctcgcagtccttatttctgcgttgctattgcaaggttgcgtcgccgccgcggtagtgggtacggcagccgtcggcaccaaagccgcaaccgacccgcgtagcgtgggcacccaggtggatgacggaacgctggaactgcgtgtcagcagcgcgctgtcgaaagatgagcaaatcaaaaaagagacgcgcatcaatgtcacggcttatcagggcaaagttttgttagtgggccagtcgccaaacagcgaactctccgcacgcgctaaacagatagcgatgggcgttgaaggcaccaccgaggtctataacgagattcgccagggtcagcctatcggcctggggaccgcctctaacgatacctggatcaccacgaaagttcgctcacagctactgaccagcgatcaggtaaaatcgtcaaacgtgaaagtcaccaccgaaaatggcgaagtgttcctgctgggcctggtgactgaacgtgaaggtaaagcggcagcggacatcgccagccgggtgagcggcgtgaaacgcgtgaccaccgcctttacgtatattaagtaa

SEQ ID NO: 369018 - DNA, 636 bp, Salmonella enterica
atgagtcaggtactgattaccggcgcgaccggactggtcggcggacatctgctgagaatgttaatcaacacgccgcaggtgagcgctatcgccgcgccgacgcgtcgcccgctgacggatattgtcggcgtttataaccctcacgatccgcagcttaccgacgcgttagctcaggtgaccgacccggtggatattgttttttgctgcctgggcacgacccggcgtgaagcgggaagtaaagcggcgtttattcatgcggattatacgctggtggttgataccgcgctgaccgggcgtcgactgggcgcgcagcacatgttggtggtcagcgcaatgggagcaaacgcgcactctccgtttttctacaatcgggtgaaaggagaaatggaggaggcgttaatcgcgcaaaattggcctcgtttgacgattgcccggccttctatgctgctcggcgacagaacaacgcggcgggtgaatgaaacgcttttcgctccgctattccggctgttgccaggaaactggaaatcgattgatgcgcgggatgtggcgcgggccatgctggcggaagcgctggcgccagcacaagaaggcgtgacgattctgacctcatcgcaactgcgggaaaaagcggaatag

SEQ ID NO: 369019 - DNA, 519 bp, Salmonella enterica
atgagtaagaaaattgccgttttgattaccgatgaatttgaagattcagaatttacctcgccggcagcagaattccgtcaggccggccatgaggtcatcaccatcgaaaaagaggcgggtaaaacggtgaaaggaaaaaaaggcgaggccagcgtcaccattgataaggctattgatgacgttcgtcccgacgagttcgacgccttgctattgccgggaggtcattcgccggactacctgcgcggcgacagccgtttcgtggattttacccgcgatttcgttaacagcggtaaaccggtttttgccatttgccacggcccacagttgttgatcagcgccgatgtcattcgtggccgcaaactcacggcggtgaaaccgattattatcgatgtgaagaatgcgggcgcggaattttacgatcaggaagtcgtcgtcgataaagatcagctggtgaccagccgcacgcctgacgacctgccggcatttaaccgcgaggcgctacgcctgctgggcgcgtga

SEQ ID NO: 369020 - DNA, 444 bp, Salmonella enterica
atggacacacttaccgctattggccgttggctggcgaaacaacacgtggtgacctggtgcgtacaccatgagggagagctgtggtgcgccaatgcgttttatttgtttgatgcgcaaaacgtcgcgctgtatctgttaacggatgataaaacccgccatgcgcaaatgtctggcgcgtgcgcgccagttgcgggaacggtcaatggtcagccgaaaacggtggcgcgcattcgcggcgtacagtttaaaggggaaattcgccgtctggaggggcaggagagcgacgccgcgcgtaaagcttaccttcgtcgcttcccggtcgccagggtgctgccagcgccggtatgggaaatccggctggatgaaattaaattcaccgacaacacgctggggtttggtaaaaaactgcactggttacgcgactcacgcgcccagcaggcgtag

SEQ ID NO: 369021 - DNA, 318 bp, Salmonella enterica
atgctgatggcgacaatgacaccctggtatctgtatctgattcgtactgcagacaatgcgctttacaccggaataaccaccgatgtggcgcgtcgttacaggcagcatcaaacgggaaaaggcgcaaaagcattacggggaaaaggcgagttaacgctggcgtttgcggcgcaggtcggcaatcgctcgctggccctgcgcatagagtatcgcatcaaacagctcacaaagcgccagaaggagcgccttgtgacggaacgcgaagcgtttgaggcgctgctgtccagcctgcaaacgccggtgcttaaaaacgattga

SEQ ID NO: 369022 - DNA, 504 bp, Salmonella enterica
atgctaattcgagtagaaattcccattgatgcgcctggtattgatgcgctgttacgccgttcattcgaaagcgatgcggaagcgaagctggttcacgatttgcgtgaagatggttttctgacgctcggactggtggccacggatgatgaaggtcaggtggtgggctatgtcgcctttagcccggttgatgtgcagggcgaagatttacagtgggtcggcatggcgccgctggcggtcgatgaaaagtatcgcgggcaagggctggcgcgccagttagtgtatgaagggctggattcgctcaacgagttcggctacgcggcggtcgtgacgctgggcgatccggcgttatatagccgcttcggttttgaactggccgcacattacgatcttcactgccgttggcccggtacggaaagcgctttccaggtacaccgtttggctgaggatgcgctggagggcgtgacggggctggtggagtatcacgaccacttcaatcgtttttaa

SEQ ID NO: 369023 - DNA, 525 bp, Salmonella enterica
gtgttagataaactgcgttcacgcttagtccatgctggcccgtctctgatgagtgtaccggttaaactgacgccctttgcgctaaagcgccaggttctggaacaggttctgagctggcagtttcgtcaggcgctggccgatggagagctggaattcctcgaaggtcgttggttaagcattcatgttcgtgacatcgacttaaaatggtataccacggttgaaaatgaaaagctgatcgttagccagcaggcggatgctgacgtcagttttagcgccgacgccagcgatctgctaatgatcgccgcccgtaaacaggatccggatacgctctttttccagcgtcgactggtcattgaaggcgatactgagttagggttgtatgtgaagaatctgatggacgccatcgaactggagcagatgccgaaagcgttacgcgttatgctgctgcaactggcggattttgttgaggcgggaatgaaaaactcgccggaaaccaaacagacctcggtaggtgaaccatgctaa

SEQ ID NO: 369024 - DNA, 996 bp, Salmonella enterica
atggagctgctctgccctgccggaaatctcccggcgctgaaggcggccatcgaaaacggcgctgacgccgtttatatcgggttaaaagacgataccaatgcccgtcattttgccggccttaactttaccgaaaaaaaattgcaggaagcggtgagttttgttcaccagcatcgccgcaaattacacatcgccattaatacttttgcgcatccggacggctatgcccgctggcagcgcgccgtggatatggcggcgcagcttggcgccgacgcgttgattctcgccgacctcgctatgctggaatatgccgcagagcgttacccgcatattgagcgccatgtttccgttcaggcctcggcaaccaacgaagaggcgattcgcttttatcaccgcaactttgatgtccaccgtgtagtactgccgcgtgtactgtcgattcaccaggtaaaacaactggcccgcgtcacgccggtgccgctggaggtattcgcgtttggcagcctgtgcattatggcggaaggtcgctgctatctttcttcctacctgacgggggagtcgcccaataccgtcggcgcctgctctcccgcccgctttgtccgttggcagcaaacgccgcaggggctggaatcgcgcctgaatgatgtcctgattgaccgttaccaggatggcgaaaacgcaggctacccaacgctgtgtaaaggccgctatttagtggacggcgagcgctatcacgcgctggaggagccaaccagcctgaacacgctggaactgctgccggagctcatggcggcgaacatcgcttcggtgaagatcgaaggccgccagcgcagcccggcctacgtcagccaggtggcgaaagtgtggcgccaggcgatcgatcgctgcaaagccgccccgcaaaacttcgttccacagcgcgactggatggagacgctcggcgcgatgtccgaaggcacccaaaccacgcttggcgcatatcaccgtaaatggcagtga

SEQ ID NO: 369025 - DNA, 879 bp, Salmonella enterica
atgaaatattccttaggaccggtgctttattactggccgaaagagacgctggaagatttttatcagcaggccgcaaaaagcagcgctgatgtcatttatctgggcgaagcggtgtgcagcaagcgtcgcgcgaccaaagtcggcgactggctggaaatggcgaaatccctcgccgccagcggtaagcaggtggtgctctccaccctggcgctggtacaggcgtcatctgaattaagcgagctgaaacgctatgtggacaacggcgattttctgctggaagccagcgatcttggcgtggtgaatctgtgcgccgagcgcaaactgccgtttgtcgccggccatgcgctgaactgctacaacgcggtcacgctgcgccggttgctgaaagaaggcatggtacgctggtgtatgccggtggagctgtcccgcgactggctggtgaatttgcttaatcagtgcgatgaactgggcatccgcaatcagtttgaagtggaagtgttgagctacgggcatctgccgctggcctactccgctcgctgctttaccgcccgttcggaagaccgcccgaaagatgagtgcgaaacctgctgtatcaagtatccaaacggtcgtgacgtgctctcgcaagagaatcagcaggtgtttgtgcttaacggtattcagaccatgagcggctatgtctataaccttggcaacgaactgacgtcgatgcagggattggtcgatatcgtgcggctgtcgccgttgggtacggagacatttgccatgcttgatgcctttcgcgctaacgaaaacggcggcgcgccattagcgcttgccgcgcatagcgactgcaacggctactggaggcggctggccgggctggagctacaggcctag

SEQ ID NO: 369026 - DNA, 1008 bp, Salmonella enterica
atgactgacaaaactattccgttctcggtgctggatctggcgccgatccctgaaggatcttcggcaaaagaagccttcacgcactcgcttgatctcgcacggctggctgaaaagcgcggttatcaccgctactggctggcggaacatcacaacatgaccggtatcgccagcgcggcgacctcggtattgattggttatctggcggccaataccacaacattacatcttggctccggcggcgtgatgctgcctaaccattcaccgctggtgattgccgagcagttcggcacgctgaatacgctctacccgggacgtatcgacttagggttgggacgcgcgccgggtagcgatcagccgacgatgcgcgcgctgcgtcgccatatgagcggcgatatcgataactttccacgcgatgtcgcagagctggtggactggttcgacgctcgcgcccctaatccgcatgtgcgcccggtgcccggctacggcgagcagatcccggtctggctgttgggctccagcctgtatagcgcacagttggcggcccagcttggcctgccgttcgcctttgcttcgcatttcgcgccggatatgttgttccaggcgctgcatctgtaccgtacccagttcaaaccttcagcgcggctggaaaaaccgtacgcgatggtgtgtatcaatattatcgccgccgacagcaaccgcgacgccgaattcctgtttacctccatgcagcaggctttcgtgaagctacgccgtggggaaaccggccaactgccgccgccgattgagaatatggagaccttctggtcgccatccgagcagtatggcgtgcagcaggcgctgagtatgtcgctggtcggtgataaagcgaaagtccgccacgggctggaatccatcctgcgggagacccaggcggatgaaattatggtaaacgggcagattttcgaccaccaggcacgcctgcattcgtttgatttagcgatggatgttaaggaagagttgttgggctga

SEQ ID NO: 369027 - DNA, 720 bp, Salmonella enterica
atggggcgtaaaggactactcgctattgtattattgagcctgtttatcgcttttattttaaaatttttctggctcactccgtacgatgaagacgtttacctgccagtggaaaaacctgtcgcatcgtctttaaaaatcattcaccccggcgaccagttatttatccgcattctgaaagcggaagataagctggaactgtgggcaagcgccaataacaagccttacaaactctacaaaacctggactatatgcgcatggtctggtggcttagggccaaaacataaacagggagacggtaaaagcccggaaggcttttatgccaccaacaaagggttgcttaacccaaacagccgctatcatctggcatttaatattggctacccgaatgcttacgatcgggcaaatggctacaccggtgatttcattatggttcacgggaactgcgtttcggccggttgctatgccatgaccgatgccggtattgaagagatttatcaactggtggcgcaggcgctaaacagcgggcagaagcgcgtgcctgtccatatcttcccatttacgatgaatgacgaaaatatgcgccaggcgcaagcatggccggaatataatttctggcgtatgttgaagcccggctatgattacttcgaaaaaaatcgccgattgccaaccatcaccgttgaaaatcggcgttataaaatcagcccaacaactcttccttaa

SEQ ID NO: 369028 - DNA, 531 bp, Salmonella enterica
atgagtgaacctgcttccttttttcttcatgcacatattaccgagagtaacctcaagaaatttttccattcaccggcaacaaatattaaagactatgacgactggttgccatggtttactgaggagcaaaggttgtacggcgatcctgcaaaaatgcttaacaatcttgccacatgtaattctggtgaaagtgaaaagaatatttatgctgaacatatcaactttaataaagaaacacagatagtcacgatggatcacatatttctctcagagagctatgaaatcttcatgccactcatggcctgtgtgcggggaatcgagaaatttattacgctaggggaaaataattttgcgctaatttattattactggtggggttcggagatcgccatcgcgctcgaatttggcgccaatggtagcagaataacggcaaatcctaaggcagaaaatttaactatcgccgatgcttttttcgatgaacacggggaagcactcgccgaagaactttataataaacagggttttatttga

SEQ ID NO: 369029 - DNA, 1245 bp, Salmonella enterica
atggcaacacttaccaccacccaaacgtcaccttcgctgcttggcggcgtggtgattatcggcggcaccatcattggcgcggggatgttctccctgccggtggtcatgtccggggcgtggttcttctggtcgatggcggcgctggtctttacctggttttgtatgctgcactccgggctgatgatcctcgaagccaaccttaactaccgcattggttcgagtttcgacaccatcaccaaagatctgttggggaaaggctggaacattgtcaacggtatttccattgcctttgtgctctacatcctgacttacgcctatatctcggcgagcggctcgattctgcatcatacctttgctgagatgtcgttgaacgttccggcgcgagcggcaggttttgcctttgcgctgctggtggcgtttgtagtgtggctgagtacgaaggcggtcagtcggatgacggcgattgtgctgggcgcgaaagtgattactttcttcctgaccttcggcagcctgttggggcacgttcagcctgccacgttgtttaacgtggctgaaagccacgcgtcatatacgccgtacctgctgatgacgctgccattttgtctggcctcttttggttatcacggtaacgtaccgagcttgatgaaatattacggcaaagatccgcgtaccatcgtcaaatgcctgatttatgggacgttactggcgctggcgctctattccgtctggctgctggggacgatgggcaacatcccgcgtccggaatttatcggcattgcgcagaaaggcggcaatattgatgtgctggtacaggcgttgagcggcgtgctgaacagccgcagcctggatctgctgctggtggtgttctctaactttgcggtcgccagttccttccttggcgtgacgctggggctgtttgactatctggcggatctgtttggttttgatgactcggcaatggggcgttttaaaacggcgctgctgactttcctgccgccgatgattggtggcctgctgtacccgaacggttttctgtacgccattggctatgcaggtttagctgcaactatctgggcggccattgtgcctgcgctgttggcacgtaaatctcgcgaacgtttcggcagcccgaaatttcgcgtctggggcggtaaaccgatgattgccctgattttggtcttcggtgttggcaacgcggttatccatattctgtcgagctttaatttgctgccggtgtaccagtaa

SEQ ID NO: 369030 - DNA, 1890 bp, Salmonella enterica
atggctgaattcgaaaccacttttgcagatctggggctgaaggctcctatccttgaagcccttaccgatctgggttacgaaaaaccatctccaatccaggcagagtgcattccgcatctgctgggcggtcgcgacgtgctgggcatggcccagaccggtagcggcaaaaccgcagcgttctctttaccgctgctcaacaatcttgatcctgagctgaaggcacctcagattctggtgctggcgccaacccgcgaactggcggtacaggttgccgaagccatgacggatttctctaaacacatgcgcggcgtaaacgtggttgccctgtacggcggtcagcgttatgacgtgcagttacgcgccctgcgtcaggggccgcagatcgttgtcggtacgccgggacgtctgcttgatcacttaaaacgtggcactctcgacctctctaaactgagtggtctggtgctggatgaagccgacgaaatgctgcgtatgggcttcatcgaagacgttgaaactattatggcgcagatcccggaaggtcatcagaccgctctgttctccgccaccatgccggaagcgattcgtcgcattacccgccgctttatgaaagagccgcaggaagtgcgcattcagtccagcgtgactacccgtcctgacatcagccagagctactggactgtctggggcatgcgtaaaaacgaagcgctggtgcgtttcctggaagcggaagactttgatgcggcgattatcttcgtgcgtaccaaaaacgcgaccctggaagtagcagaagcgctggaacgtagcggctacaacagcgccgcgttgaatggcgatatgaaccaggcgctgcgtgagcagactctggaacgcctgaaagatggtcgtctggacatcctgatcgctaccgacgttgcggcacgtggtctggacgttgaacgtatcagcctggtggtgaactacgatattccgatggactccgagtcctacgttcaccgtatcggtcgtaccggccgtgcgggtcgcgccggtcgcgcgctgctgttcgttgagaaccgcgagcgtcgtctgctgcgcaatatcgaacgcaccatgaagctgaccattccggaagtggaactgccgaacgcagaactgctgggtaaacgccgtctggaaaaattcgccgcgaaagttcaacagcaactggaaagcagcgatctggatcagtaccgtgcgctgctggcgaaaatccagccgtctgctgaaggcgaagagctggatctcgaaacgctggccgccgcactgctgaaaatggcgcaaggcgagcgtccgctgattctgccgccggatgcgccgatgcgtcctaagcgtgaattccgtgaccgtgacgaccgtggtccgcgcgagcgtaatgaccgtggcccgcgtggcgaccgtgaagaacgtccgcgtcgtgaacgtcgtgacgttggcgatatgcagttataccgcattgaagtgggccgtgatgacggcgttgaagttcgtcatatcgtgggcgctatcgctaacgaaggcgacatcagcagccgttacattggtaacattaagctgttcgcgtctcactccaccatcgagctgccgaaaggtatgccgggcgaagtgttgcagcacttcacgcgtacccgcattctgaacaagccgatgaatatgcagctgttgggtgatgcggttccgcacgcgggcggcgaacgtcgcggcggtggtcgtagcttcagtggcgaacgtcgtgaaggcggtcgtaatttcagcggcgaacgtcgtgaaggtggtcgtggtgatggtcgtcgcttcagcggcgagcgtcgtgaaagccgtggtccgcgtcgtgatgactctaccggtcgccgtcgtttcggcggtgatgcgtaa

SEQ ID NO: 369031 - DNA, 885 bp, Salmonella enterica
atgaagccttttttgcgctggtgtttcgttgcgacagcacttacgcttgcaggatgcagtaattccgcctggcgtaaaagtgaagtcctcgcagtaccattgcaaccgactttacagcaggaagtgattctggcgcgtatggaacagattcttgccagtcgggctttaaccgatgacgaacgcgcacagcttttatatgagcgcggagtgttgtatgatagtcttggtttgagggcattagcgcgaaatgatttttcacaagcgctggcaatcagaccggatatgcctgaagtattcaattacttaggcatttatttaacgcaggcaggcaattttgatgctgcctatgaagcgtttgattctgtactagagcttgatccaacttacaactacgcgcacttaaaccgcggtatcgcattgtattacggcggccgtgataagttagcgcaagatgatctgctggcgttttatcaagacgatcccaatgatccttaccgcagcctgtggctgtatcttgttgagcagaagcttaatgagaagcaggcgaaagaagcgttaaaagcacgctttgaaaaatcggataaagagcaatggggatggaacattgtcgagttctacctgggcgacattagcgaagcaacgctgatggaaaggctcaaggcggacgcaacggataacacctcgctcgctgagcatctcagtgaaaccaacttctatttaggtaagtattacctaagtctgggggatttggacagcgccacggctctgttcaaactggcggtggccaacaacgttcataactttgttgagcaccgatacgcattgttggaattatcgctcctgggccaggaccaagatgacctggcagaatcggaccagcaatag

SEQ ID NO: 369032 - DNA, 2166 bp, Salmonella enterica
atgccgtcaaaaattggaaaggatattattttgcttaatccgatcgttcgtaaattccagtacggtcagcataccgttacgctggaaactggcatgatggcgcgtcaggccactgccgctgttatggtaagcatggatgacaccgccgtattcgttaccgttgtcggccagaaaaaagccaagccaggccaggacttcttcccactgaccgttaactatcaggagcgtacctacgctgctggtcgtatcccgggcagcttcttccgtcgtgaaggccgtccaagcgaaggcgaaaccctgattgcgcgtctgattgaccgcccggttcgtccgctgttcccggaaggcttcgttaacgaagtgcaggttattgcgaccgtcgtttccgttaacccgcaggttaacccagacatcgttgccatgatcggcgcatccgctgcgctgtcgctgtccggcattccgttcaacggcccaatcggcgcggcgcgcgtaggttacatcaatgaccagtacgtgctgaacccgacccaggacgagctgaaagaaagcaagctggacctggtggttgccggtaccgaagcggctgtgctgatggtggaatccgaagctgaactgctgagcgaagacactatgctgggcgcggtggtattcggtcacgagcagcagcaggttgttatccaggcgatcaacgatctggtgaaagaagccggtaaaccgcgttgggactggcagccggaagccgtcaacgacgcgttgaacgcgcgtgttgctgcgcttgctgaatctcgtctgagcgacgcgtaccgcatcaccgataaacaagaacgctatgctcaggttgacgtaatcaaatccgaaaccatcgagcagcttattgcagaagatgaaactctggatgctaacgagctgggcgaaatcctgcacgccatcgagaaaaacgtggtgcgtagccgcgtactggcaggcgagccgcgtattgatggccgtgaaaaagacatgatccgtggtctggacgtgcgcactggcgtactgccgcgtactcacggttccgctctgtttacccgtggtgaaacgcaggcgctggttaccgcgactctgggtactgcccgtgacgcgcaggtgcttgatgaactgatgggcgagcgcactgacagcttcctgttccactacaacttccctccgtactccgtaggcgaaaccggcatggtcggttctccgaagcgtcgtgaaattggtcacggtcgtctggcgaagcgcggcgtgctggcagtgatgccggacatggataaattcccgtacaccgttcgcgtggtgtctgaaatcaccgaatccaacggttcttcctctatggcttccgtgtgcggcgcttctctggcgctgatggacgctggcgtgccaattaaagccgccgtagcaggtatcgctatgggtctggtgaaagaaggcgacaactacgttgtactgtctgacattctgggcgacgaagatcacctgggcgatatggacttcaaagtggcgggttcccgcgacggtatctctgcgctgcagatggatatcaaaattgaaggtatcaccaaagagatcatgcaggttgcgttgaaccaggctaaaggtgcgcgtctgcacatcctgggcgtgatggaacaggcgatcaacgcgccgcgcggcgatatctctgaatttgcgccgcgtatccataccatcaagatcagcacggacaagatcaaagacgtgatcggtaaaggcggttctgtgatccgcgcgctgactgaagagaccggcaccaccatcgaaatcgaagatgacggtactgtgaagatcgcggcgaccgacggtgaaaaagcgaaatacgctatccgtcgtatcgaagagattaccgcagagatcgaagtcggccgtatctacaatggtaaagtgacccgtatcgttgactttggcgcgtttgttgccatcggcggcggtaaagaaggtctggttcacatctctcaaatcgcggataagcgtgtagagaaagtgaccgattatctgcagatgggtcaggaagtcccggttaaggttctggaagttgaccgccagggccgtgtacgtctgagcattaaagaagcaaccgagcagtctcaacctgcggctgcgccggaagctccggcgagcgaacaggccgagtaa

SEQ ID NO: 369033 - DNA, 270 bp, Salmonella enterica
atgtctctaagtactgaagctacagctaaaatcgtttctgagttcggtcgtgacgcaaacgacaccggttctaccgatgttcaggttgctctgttgactgcacagattaaccacctgcagggtcactttgcagagcataaaaaagatcaccacagccgtcgtggtctgctgcgtatggtttctcagcgtcgtaaactgctcgactacctgaaacgtaaagatgttgcacgctacaccgcgctgattgagcgtctgggtctgcgtcgctaa

SEQ ID NO: 369034 - DNA, 945 bp, Salmonella enterica
atgagtcgtcctcgtcgtcgtggccgcgacattcacggcgttctgctgctggataagccgcagggtatgtccagcaatgacgtgctgcagaaagttaagcgcatctacaatgccaaccgcgccgggcataccggcgcgctggacccgctggcgaccggcatgttgccgatttgcctcggcgaagcgacaaaattttcgcagtacctgctggattctgacaaacgctatcgtgttattgcccgtctggggcagcgcacggatacctctgacgccgatggtcaaatcgtgcaggagcgtccggtgactttcagcgctgagcagcttgcgagcgcgctggagacctttcgtggggatatcgaacagattccctcgatgtattcggcgctgaagtatcagggcaagaagctgtacgaatatgcccgccagggtatcgaagtgccgcgcgaagcccgcccgattaccgtctatgagctgctgtttattcgccatgaaggtaacgagctggagctggaagttcattgctccaaaggcacctatattcgtaccattattgatgatttaggtgaaaaactgggctgtggcgcgcacgtaacgtacctgcgtcgtctgacggtcagcaagtatccggtggatcgtatggtgacgctggagcatttgcagacgctggtagcacaggcggagcagcagggcgttccggcggcgcagttgctcgatccattattgatgccaatggacagtccagcttcggactaccctgttgttaatctgccgttaacatcttcggtatacttcaaaaatggcaacccggttcgtaccacgggcgcgccgttgaagggactggttcgtgtgacggaaggtgaagacgataaatttatcggtatgggcgaaattgacgacgaaggccgtgtcgcgcctcgtcggctggtagtagagtacccagcgtaa

SEQ ID NO: 369035 - DNA, 402 bp, Salmonella enterica
atggcgaaagaatttggtcgccctcagcgcgtagcgcaagagatgcaaaaagagatcgcaatcatcctgcagcgcgaaattaaagacccgcgcctgggcatgatgactaccgtctccggtgtcgaaatgtcccgtgacctggcctatgccaaagtgtttgtcacctttttgaacgacaaagatgaagacgcagtaaaagcgggcatcaaagcgttgcaggaagcgtctggtttcatccgcagcttgctgggtaaagcgatgcgtctgcgcatcgtgccggaactgaccttcttctacgacaactcgctggtggaagggatgcgtatgtccaacctggtaactaacgtggtgaaacatgacgaagaacgtcgtgtgaacccggacgacagcaaggaggactga

SEQ ID NO: 369036 - DNA, 2679 bp, Salmonella enterica
atgacagatgtaaccctaaaagcgctggccgcagagagacaggtttccgtggatcgcctggtacagcagtttgctgatgcaggtatccggaaatctgctgacgactctgtgtccgcacaagaaaaacagactttactggcgcacctgaaccgcgaagcggtttctggtcccgataaactgacgctgcagcgtaagacgcgcagcaccctgaacattccaggtaccggtggaaaaagtaaatcggtacaaatcgaagtccgcaagaagcgcacctttgtgaaacgcgatccgcaagaggctgaacgcctggccgcggaagagcaggcgcagcgtgaagcggaagagcaagcccgtcgtgaggcagaagaacaggccaaacgcgaggcgcaacaaaaagctgaacgcgaggccgcagaacaagctaagcgtgaagccgctgaaaaagcgaaacgtgaagctgcggaaaaagacaaagtgagcaatcaacagactgacgatatgaccaaaaccgcccaggccgaaaaagcccgccgtgagaatgaagctgcagagctgaagcgtaaagcggaagaagaagcacgtcgcaaactcgaagaagaagcgcgtcgtgtagcagaagaagctcgccgcatggcggaagaaaacaaatggaccgcaacgcctgagccagtagaagacaccagtgactatcatgtcaccacttctcagcacgctcgccaggccgaagacgaaaacgatcgtgaagttgaaggcggtcgtggtcgtggccgtaatgcaaaagcagcgcgtccggcgaaaaaaggcaaacatgccgaatccaaagccgatcgcgaagaagcgcgtgctgcggttcgcggcggtaaaggcggcaagcgtaaagggtcttctttacagcaaggcttccagaagcccgctcaggccgttaaccgtgacgtggtgatcggtgaaaccatcaccgttggcgaactggcgaacaagatggcggttaaaggctctcaggtcatcaaagcgatgatgaagctgggtgctatggccaccatcaaccaggttatcgaccaggaaaccgcacaactggttgccgaagagatgggccacaaagttatcctgcgtcgtgaaaacgaactggaagaagcggtaatgagcgaccgtgataccggcgctgcggctgaaccgcgcgcaccggttgtgaccatcatgggccacgttgaccacggtaaaacctctctgctggactacattcgttccacgaaagtagcctctggcgaagcgggcggcattacccagcacatcggtgcttaccacgttgaaactgacaacgggatgatcaccttcctggataccccgggtcacgccgcgtttacttctatgcgtgctcgcggcgcccaggcaacggatatcgtggttctggtggtagcggcagacgatggcgtgatgccgcagactatcgaagctatccagcacgcgaaagcggcaggtgtgccggtcgtggttgcggtgaacaaaatcgataagccggaagccgatccggatcgcgttaagaacgaactgtcccagtacggcattctgccggaagagtggggcggcgagagccagttcgttcacgtgtctgcgaaagcgggcaccggtatcgacgaactgctggacgctatcctgctgcaggccgaagttctggaactgaaagccgttcgtaaaggtatggcgagcggtgcggtgatcgaatccttcctggataaaggtcgtggtccggtggctaccgttctggtacgcgaaggtacgctgcataagggcgatatcgtgctgtgtggcttcgaatacggccgcgtgcgtgcgatgcgtaacgaactgggtcaggaagtgctggaagcggggccgtccattccggtggaaatcctcggcctgtccggcgttccggctgcgggtgacgaagtgaccgtcgttcgcgacgagaagaaagcgcgtgaagttgctctgtatcgtcagggtaaattccgtgaagttaaactggcgcgtcagcagaaatctaaacttgagaacatgttcgccaacatgaccgaaggcgaagttcacgaagtgaacatcgtgctgaaggccgacgtacagggttctgtggaagcgatctccgactctttgctgaaactgtctaccgacgaagtgaaagtgaagatcatcggttctggcgtaggtggtatcaccgaaaccgacgcgaccctggctgcggcgtccaacgccattctggttggcttcaacgttcgtgccgatgcctctgcgcgtaaagtgatcgaatctgaaagcctggatctgcgttactactccgtcatctataacctgatcgacgaagtgaaagcggcgatgagcggtatgctgtctccggaactgaaacagcagattatcggtctggctgaagtgcgcgatgtgttcaaatcgccgaaattcggcgcgatcgcgggctgtatggttaccgaaggtacgattaaacgccataacccaatccgcgtactgcgcgacaacgtggttatctatgaaggcgagctggaatccctgcgccgcttcaaagatgacgttaacgaagtccgtaacggcatggaatgtggtatcggcgtgaagaactacaacgacgttcgcgttggcgatatgattgaagtattcgaaattatcgagatccaacgtaccatcgcttaa

SEQ ID NO: 369037 - DNA, 1503 bp, Salmonella enterica
atgaacaaagaaattttggctgttgttgaagccgtctccaacgaaaaagcgctgccacgcgaaaaaatttttgaagcgctggaaagtgcgctggcgacagcaacaaagaaaaaatatgagcaggagatcgatgttcgtgtagaaatcgatcgtaaaagcggtgattttgatactttccgccgttggttgatcgttgaagaagtgaccatgccgacgaaggaaattacgctggaagcggcgcgttttgaagacgaaagcctgaatgtcggcgactatgttgaagatcagattgaatctgtcacctttgaccgtatcaccacgcagactgcgaaacaggttatcgtacagaaggtccgtgaagctgaacgcgcgatggttgtcgatcagttccgcgaccaggaaggcgaaattgtcactggcgtggtgaagaaagtgaaccgcgacaatatctctctggaaattaaatccgaagggatggccggtaacgctgaagcggtgattctgcgtgaagatatgctgccgcgtgaaaacttccgtccgggcgaccgcatccgcggtgttctgtacgctgtacgtccagaagcgcgtggcgcgcagctgttcgtcacccgttccaagccggaaatgctgatcgaactgttccgcatcgaagtgccggaaatcggcgaagaagtgattgaaattaaagcggcggctcgcgatccgggttctcgtgcgaaaatcgcagtgaaaaccaacgataaacgtatcgatccggtcggcgcttgcgtggggatgcgcggcgcgcgcgttcaggcggtctctaccgaactgggcggtgagcgtatcgatatcgtgctgtgggatgataacccggcgcagttcgtcattaatgcgatggcgccggcagacgtcgcgtctatcgtggtggacgaagataaacataccatggatatcgccgttgaagccggtaatctggcgcaggcgatcggacgtaatggtcagaacgtccgcctggcttcgcaattgagcggctgggaactcaacgtaatgaccgttgatgacttgcaggctaaacatcaggctgaagcacatgccgctatcgagatctttactaaatatcttgatattgatgaagagttcgcgaccgttctggtagaagaaggtttctccacgctcgaggaactggcctatgtgccaatgaaagaactgctggaaattgacggccttgatgagccgaccgttgaagcactgcgcgagcgtgctaaaaacgcactggccactctggcgcaggaccaggaagcaagcctcggtgataacaaaccggctgacgatctgctgaatctggaaggattagatcgcgatatggctttcaaactggcggctcgtggtgtttgtacgctggaagatctcgccgaccagggcattgatgatctggctgatatcgaagggttgaccgacgaaaaagccggtgagctgattatggctgcccgtaatatttgctggttcggcgacgaagcgtaa

SEQ ID NO: 369038 - DNA, 453 bp, Salmonella enterica
ttgtccacattagagcaaaaattaacagagatgattacagcaccagttgaagccttaggctacgagctggtcggcatcgaatttattcgcggtcgcacatccacactgcgcatctatattgatagtgaagatggcatcaatgttgatgattgtgctgatgtgagccaccaggtaagcgcggtgctggacgttgaagatcctatctccgtggcttacaaccttgaagtctcgtcaccgggtctcgaccgtcctatgttcactgccgatcattatgcgcgtttccagggtgaagaagtcgcgctggttcttcgcatggcggtacagaaccgtcgcaagtggcagggcattatcaaagcggtggacggtgaaatgattaccgtcacagtcgaaggcaaagatgaagtgttcgcgctgagtaatatccagaaggcgaacctggttccccacttttaa

SEQ ID NO: 369039 - DNA, 1344 bp, Salmonella enterica
atgacgacgattcttaagcatcttccagcaggtcaacgtattggtatcgctttttccggcggtctggacaccagcgccgcgctgctgtggatgcgacaaaaaggagctgtcccatatgcttatactgcgaatctgggacaaccggatgaggatgactatgacgccattcctcgtcgcgcaatggagtatggcgcagagaatgctcgcctgattgattgccgcaagcagttggttgcagaagggatcgcagcgattcagtgcggcgctttccataatacgactggcggactgacctatttcaataccacgcctctgggccgtgccgtaaccggcacgatgctggtcgccgcgatgaaagaagacggcgtgaatatctggggcgacggcagtacctataaaggcaacgatattgaacgtttctatcgttacggcctgctgacgaatgctgaattacagatttacaaaccgtggctggataccgactttatcgatgagctgggtggtcgccatgagatgtctgaatttatgattgcctgcggtttcgactataaaatgtccgttgaaaaagcctactccaccgactccaacatgctcggcgccacgcatgaagcgaaagatctggagtttcttaactccagcgtcaagatcgtcaacccgattatgggcgtgaagttctgggacgagagcgtgaagatcccggcagaagaggtgaccgtccgcttcgaacagggccaccctgttgccctgaacggtaaaaccttcagcgatgatgttgagatgatgctggaagcaaaccgcatcggcggccgtcacggcctgggcatgagcgaccaaattgaaaaccgcatcattgaagcaaaaagccgcggtatttatgaagcccccggaatggcgctgctgcacatcgcttacgagcgtctgttgaccggtattcacaacgaagacaccattgaacagtatcattctcatggtcgtcagctgggtaaactgctgtatcagggccgctggttcgactcgcaggcgctgatgctgcgtgacggcctgcaacgttgggtcgccagccagattaccggtgaagtgacgttggagctgcgtcgcggcaacgactactccatcctgaacaccgtgtccgacaacctgacctataaggctgagcgtctgaccatggagaaaggcgagtccgtattctcaccggacgatcgtatcggtcagttgaccatgcgtaatctggacattaccgatacccgcgagaaactgttcggctacgcgaaagcgggtctgttaaccgcctcttccgcgaccggtctgccgcaggttgagaatctggaaaacaaaggcaaataa

SEQ ID NO: 369040 - DNA, 960 bp, Salmonella enterica
atgaacagtgaacactttgtacgcctagccttagatatccttaaatgcagccaaaaagaacttgctggaaagctaggggtttcctccactcaaattagcaagtggaaaaaaggtgaacatatgtctgatgatatggaaaagaaattcagaaaaatcaccaacataggcgagtattctccactgcttgttgagtgggcaggctccgtcagtaatgcagaaaaatgggatcgtctgatgcattttattgctgatagagtacatgacagagcagaaaccggctacgtcacaacacctctactcgacgaagaagggttcttatgtgaagaaacgattgatacattggaaaaaatggggttatccgctccaaaatcgttccctgttgaattagatatcaactatgagaatacagatgatgaagaaactgaagatctatgggactccatcagcaataaccctcacagttcaattattgaaaaaatctataactcgctgaatgatgtctatggcttttatgctgcttatgttgatgaattaatacaagatgaagggttggatatctattcaactgatgccatcaatattatgtattctttgatgtcgcttgcagcttgcaaaattgagattgattcagcaacagcaccgaattttcgacaattccgttatgaagttgagaaggattatgaaaactggttaagccaactcaaacttctggcattccgtgcaggaattccattacgagcagagctcctccagatggtttacgatagtgcagatgatctgagtgttgcagctgaggctgaaagcttagatttaaataaatcacgaatccacccagatatctacatgaatgaaatactgactggtatgcgaatcattcaccaagttctccctgtaattatggaaaaacttgaaattacagatttcgagttggatgaaagcgccttacacataggaagataa

SEQ ID NO: 369041 - DNA, 333 bp, Salmonella enterica
atgtacgaagctcttttagttgttttccttattgtggcaattggccttgtaggtctgatcatgctgcagcaaggtaaaggcgctgatatgggagcctccttcggagcaggcgcttccgctacgctatttggttcaagtggttctggtaacttcatgacccgaatgacggcggtattggcgacgctgttcttcatcatcagtctggtgttgggtaatatcaatagcaacaaaaccaataaaggaagcgagtgggaaaatctgagcgcgccggcgaagaccgagcagactcaacctgctgcaccggcccagccgaccagcgatatcccgcgctaa

SEQ ID NO: 369042 - DNA, 1338 bp, Salmonella enterica
atgagtaatcgtaaatatttcggtaccgatgggattcgcggacgtgtaggcaatgcccccattacacctgatttcgtgcttaaactgggttgggctgccggaaaagtgctggcgcgtcatggctcgcgtaaaatcattatcggtaaagatacgcgtatttccggctatatgctggagtccgcgctggaggcgggccttgccgctgcggggctgtcggcctcgtttaccggacctatgccaacgccagccgtcgcctatttgacgcggactttccgcgcggaggcgggtatcgttatctcggcttcgcataacccgttctatgataacggcattaaattcttctctatcgacggtacgaaactgcctgacgatgtggaagaagccatcgaagccgaaatggaaaaagagatcacctgcgtagactccgccgagctggggaaagcgagccgcatcgtcgatgccgccggacgctatattgagttctgtaaaggcaccttcccgaacgaactgagcctcaatggcctgaaagtggttgtggattgcgccaacggcgctacctaccatatcgcaccgaatgtgctgcgcgagctgggcgcgaccgttatcgccatcggctgtgagccaaacggcgtcaacattaacgaagaagtgggcgcgaccgacgtgcgcgcgttgcaggcgcgcgtgttggcggagaaggcggacctcggcatcgcgcttgacggcgacggcgaccgggtcatcatggttgaccatgaaggcaataaagtcgatggcgatcagattatgtatatcatcgcgcgcgaagggctgcgccaggggcaactgcgcggcggcgcggtggggacgctgatgagcaatatggggctggagctggcgctcaagcagcttggcattccgtttgcccgggcgaaagtgggcgaccgctacgtgctggaaaaattgcaggaaaaaggctggcgcatcggcgcggaaaactctggtcacgttattctgttggataaaacgaccactggcgacggtattgtagcggggctacaagttctggcggcgatggtgcgtaatcatatgagtctgcacgatctgtgcagcggtatgaaaatgttcccgcagattctggttaacgtgcgttacaccgccggtagcggcgatccgctggaaaatgaagcggtgaaagcggtaacggcggacgtagaagccacgctcggcaatcgtgggcgggtactgctacgtaaatccggtaccgaaccgttgattcgcgtgatggtggaaggcgaggatgaagcgcaggttacggcattcgcccatcgtatcgcggatgcggtaaaagccgtttaa

SEQ ID NO: 369043 - DNA, 849 bp, Salmonella enterica
atgaaactcttcgctcagggcgccacgctcgatctcactcatccgcatgttatgggtatcctgaacgtaacgccggattcgttctccgacggcggcgcgcataacacgctgattgaggcggtgaaacatgcgaatttaatggtgaatgccggtgcgacaattattgatgtggggggggaatcaacgcgaccaggcgcggcggaagtgagcgtggaagaagagctggatcgcgttattccggtactggaagcaatcgcgcaacgttttgaagtgtggatttctgtggatacctctaaacccgaggtgatccgtgaagcgacaagggcgggcgcgcatattatcaatgatgtccgttcgctctccgagcccggcgcgttggaagcggcagcggaaaccggcttgccggtcagtcttatgcacatgcagggcaaccccaaaaccatgcaggaggcgccgaaatatgacgatgtctttgccgaggtgaatcgctactttattgagcaaatagcacgttgtgagaaggccggcatcgcaaaagagaaattgttgctcgaccccggattcggtttcggtaaaaatctctctcacaattataccttactggcgcgactgggtgagtttcatcattttaacctgccgctgctggtgggcatgtcacgtaaaacgatggttggtcagttacttaacgtgggaccatcagaccgtctgaacggcagccttgcgtgcgcggtaattgccgcgatgcagggcgcgcagatcattcgcgtccatgacgtcaaagaaaccgtagaggcgatgcgggtggtagaagccactctgtctgcaaagggaaacaaacgctatgagtaa

SEQ ID NO: 369044 - DNA, 1935 bp, Salmonella enterica
atggcgaaaaacctaatactctggctggtcattgccgttgtgctgatgtcagtattccagagctttgggcccagcgagtctaatggccgtaaggtggattactctaccttcctgcaagaggtcaatcaggaccaggttcgcgaagcgcgtatcaacggacgtgagatcaacgttaccaagaaagatagtaaccgttacacgacttacattccgattaatgatccgaagctgcttgataacctgctgactaaaaacgtcaaggttgttggcgaaccacctgaagagccaagcctgctggcttctatcttcatttcctggttcccgatgctgttgctgatcggcgtctggatcttcttcatgcgtcagatgcagggcggcggtggcaaaggcgccatgtcgttcggtaagagcaaggcgcgtatgctgacggaagatcagatcaaaaccacgtttgctgacgtcgcgggttgtgacgaagcgaaagaagaagtggcggaactggttgaatacctgcgtgaaccgagccgtttccagaagctgggcggtaaaattccgaaaggcgtcctgatggtcggcccgccgggtaccggtaaaaccctgctggcaaaagccattgcgggtgaagcgaaggtgccattctttacgatttccggttctgactttgtggaaatgttcgtcggtgtcggcgcgtctcgagtgcgtgacatgttcgaacaggccaagaaagcggcgccgtgcattatcttcatcgatgaaatcgacgccgtaggccgccagcgtggcgcaggtctgggcggtggtcacgatgaacgtgagcagacgttgaaccagatgctggttgagatggacggcttcgaaggtaacgaaggtatcatcgttatcgcggcaaccaaccgtccggacgttctggacccggcgctgctgcgtccaggtcgttttgaccgtcaggtggtggtaggcctgccggatgttcgcggtcgtgagcagattctgaaggtgcatatgcgtcgcgtaccgttagcgacggatattgatgcggcgatcattgcgcgcggtacgccgggcttctccggtgctgacctcgcgaacctggtgaacgaagcggcgctgtttgcggctcgtggtaacaagcgcgttgtgtcgatggttgagttcgagaaagcgaaagacaaaatcatgatgggcgccgaacgtcgctccatggtgatgacggaagcgcagaaagagtcgaccgcgtaccacgaagcgggccacgcgattatcggtcgcctggtgccggaacacgatccggtgcacaaagtgacgattatcccgcgcggtcgtgcgctgggcgtgaccttcttcctgcctgaaggcgacgcgatcagcgccagccgtcagaagctggaaagccaaatcagcacgctgtacggtggccgtctggcggaagagattatctacggcgttgagcatgtttctaccggcgcgtcgaacgacattaaagtcgcgactaacctggcgcgtaacatggtcacccagtggggcttctcggagaaactcggtccgttgctgtatgcggaagaagagggcgaagtattcctcggccgtagcgtcgcaaaagcgaaacatatgtctgatgaaactgcgcgtatcatcgaccaggaagtgaaagcgctgattgaacgtaactacaatcgcgctcgtcagatcctgactgacaatatggatattctgcacgcgatgaaagatgcgctgatgaaatatgaaaccatcgatgcgccgcagattgatgacctgatggcgcgtcgtgaagtgcgtccgcctgcgggctgggaagatccaaacggcaccaataactctgacagcaatggtacgcctcaggcgccgcgtccggttgatgaaccacgcacgccgaacccgggcaacacgatgtcagagcagctgggcgacaaataa

SEQ ID NO: 369045 - DNA, 627 bp, Salmonella enterica
atgacaggtaaaaagcgttctgccagctcaagccgctggcttcaggaacactttagcgataaatatgttcaacaggcgcagaaaaaggggctacgctcccgtgcctggtttaaacttgatgaaatacagcaaagtgacaaactttttaagccgggaatgacggtagtcgatctcggcgctgcgccaggaggctggtcacagtatgtggtcacgcagattggcggcaaaggccgcatcatcgcttgtgatcttttacctatggatcctatcgttggtgtggactttcttcagggcgattttcgtgatgaacttgtcatgaaagcgttactggaacgcgtgggtgacagtaaagtacaagttgtcatgtcggatatggcaccaaacatgagcggaacaccggcggtggatatcccccgcgccatgtatctggtggagctggcgttagagatgtgccgcgatgtgctggcgccaggcggaagttttgtagtgaaggtgttccagggcgaaggtttcgatgagtatctaagggaaattcgctccctgtttacgaaggttaaagttcgtaagccggactcttcgcgtgcgcgttcgcgtgaagtgtacattgtagcgaccgggcgaaagtga

SEQ ID NO: 369046 - DNA, 333 bp, Salmonella enterica
atgacccgttttcaatcccaacgtaagcaaaaatatacgatgaatctgagtactaaacaaaaacagcacctaaaaggtctggcacatccgctcaagcctgttgttatgcttggcaataatggtttgaccgaaggggtactggccgagattgaacaagcgttagagcaccatgaacttatcaaggtgaaaatcgcctcggaagatcgcgaaacaaaaaccttgatcgtggacgctatcgtgcgcgaaaccggcgcctgtaacgtacaggtcatcggtaaaacgctggtgctgtatcgcccaactaaagagcgtaaaatctcgctgccgcgttaa

SEQ ID NO: 369047 - DNA, 477 bp, Salmonella enterica
atgcaagctattccgatgaccttacgcggagccgaaaaactgcgcgaagagctggattttctgaaatctgtgcgccgtcctgaaatcatcgccgctatcgccgaagcgcgcgaacatggcgatttaaaagaaaacgcggagtatcatgctgcacgcgaacagcagggtttctgcgaagggcgcattaaagatatcgaagcaaaactgtcgaatgcgcaggtgattgatgtcactaaaatgccgaacaatggccgcgtgattttcggcgctaccgtcacggtgctgaacctggacaccgacgaagagcagacctaccgcattgttggcgatgatgaggcggattttaagcaaaatctcatttcggtaaactcgccaatcgctcgcggcctgatcggcaaagagcaggatgacgtcgtggtgatcaaaacgcctggcggcgatgtggaatacgaagtgcttaaagtggaatacctttaa

SEQ ID NO: 369048 - DNA, 1434 bp, Salmonella enterica
atgcgattttccagatttatcatcggattgaccaccagtatagcgttcagcgttcaggccgcgaatattgacgaatacatcaaacagcttccggccggcgccaacctcgcgctgatggtgcaaaagattggcgcgcccgcgccggctattgattatcatagtcagcagatggcgcttcccgccagtacccaaaaggtgattaccgcgctggcggcgctgattcaactcggcccggatttccgttttacgaccacgctggagactaaaggcaacgtcgataacggcatcctgaaaggtgacgtaattgcgcgctttggtggcgatccaacgctaaaacgtcaggatattcgcaatatggtcgcgacgctgaaaaagtccggcgtcacgcaaatcgacggcaatgtgcttatcgacacgtcgattttcgccagccacgataaagcgccaggctggccgtggaacgacctgacgcagtgtttcagcgcgcctcccgccgccgccattgttgaccgcaactgtttttctgtgtcgctttatagcgcgcaaaaaccaaacgatttagcctttattcgcgtggcttcttattatccggtaacgatgttcagccaggtacggactctaccgcgcggttcggcagacgcgcagtattgcgagctggatgttgtgcctggcgatttgaaccgttatacgcttaccggctgtttaccacagcgcgccgacccgctgccgctggcctttgctattcaggacggcgccagctacgcgggcgcgatcctcaagcaggaactgaaagaggccgggataacttaccgcggcacgctgctgcgccagacgcaggttaacgagcccggaacgatcgtcgccagtaaacagtcggcgccactgcacgatctgcttaagattatgctgaaaaagtcagacaacatgatcgccgatactgtttttcggatgattggtcatgtcaggtttaacgtgcctggcacctggcgggcgggatcggatgccgttcgccagatcctacgccaacaggcgggaattgatatcggcaataccattattgccgacggttccggtctttctcgccataatctgatcgctcccgccacgatgatgcaggtgctgcaatatatcgcccaacacgataacgagctgaactttatctctatgctgccgctggcgggctatgatggttcattacaataccgcgccgggctgcatcaggcgggcgtagacggtaaggtttcggcgaaaaccggatcactgcagggcgtgtataatctggcgggctttattaccaccgcaagcggacaacggatggcatttgtacagtatttgtccggctacgcggttccacctgccgatcagcgtaatcgccgaatcccgctggtacgcttcgagagtcggttgtataaggatatttatcagactaactga

SEQ ID NO: 369049 - DNA, 1173 bp, Salmonella enterica
atgaagtttgttgatgaagcatcgattctggtcgttgcaggcgatggcggtaatggctgtgtgagctttcgccgcgaaaaatatatcccgaaaggcggcccggacggcggtgatggcggcgacggcggcgacgtctggatggaagccgatgaaaacctgaatacgctgatcgattaccgctttgaaaaatcgttccgcgctgaacgtggtcagaatggcgcgagccgcgactgtaccggtaaacgcggtaaagacgtgaccatcaaagtgccggtcggtacgcgcgttatcgaccagggaaccggtgaaacgatgggcgacatgaccaaacacggtcagcgtctgttggtcgcgaagggcggctggcatgggctaggcaatacccgttttaaatcctcggttaaccgtacgccgcgccagaaaaccaatggtacgccgggcgataagcgcgacctgctgctggaactgatgctgctggcggatgtcgggatgctggggatgccaaacgccggtaaatcaacgttcattcgcgcggtatcggcagcaaaaccgaaagtcgcggactatccgtttaccacgctggtgccgagcctgggcgtggtacgtatggacagcgaaaagagttttgtggtggccgacattccggggttgatcgaaggcgcggcggaaggcgcgggcctggggattcgcttcctgaagcacctcgaacgttgccgcgtactgctgcacctcattgatatcgatccgatcgacggttccgatccggtggaaaacgcccgtatcattattggcgaactggaaaaatacagccaggatctggcggctaaaccgcgctggttagtgttcaacaagatcgatctgatggataaaaccgaagcggaagagaaagcgaaagcgatcgccgaagcgttgggctgggaagggaaatactatctgatttccgccgccagtcagctaggggtgaaagatctctgctgggatgtgatgacctttatcatcgagaatccgatcgcgcaggctgaagaagcaaaacagccggaaaaagtcgagttcatgtgggacgattatcatcgccagcagttggctgaagtggaagaagacgcagacgatgactgggatgacgactgggatgaagacgacgaagaaggcgtcgaattcatctacaaacgttaa

SEQ ID NO: 369050 - DNA, 966 bp, Salmonella enterica
atgaagcagcaggcaggcattggcattcttttagcgctcactaccgcgatgtgctggggagcgttgccaatagcaatgaagcaagtgctggaggtgatggagccttcaaccattgtcttctaccgcttcttaatggccagcattggcctcggggcgatactggcagtaaaaagaaagctgccgccgctgcgtatttttcgtaagccgcgttggttggtgttattggcgatagcgacctgcggactgttcggtaatttcattttgttcagttcttccctgcaatatttaagcccaaccgcgtcgcaggttatcggccagctctcgccggttggcatgatggtcgccagcgtctttattctgaaagaaaagatgcgcggtacgcaggtgattggcgcgctgatgttattgagcgggctggtgatgttttttaacaccagtctgatcgagatttttacccgactgaccgactacacctggggcgttatttttggcgtaggcgcggcgatggtgtgggtgagctatggcgtggcgcaaaaagtattattgcgacgtctggcctcgcagcagatcctgtttttactgtacactttatgtacgatagcgctcttgccgctggcaaaaccgatggtgatagcgcaactgagcgactggcagctcgcctgtttgattttctgcgggctaaatacgctggtaggatatggcgccctggcggaagcgatggcgcgttggcaggcggcgcaggtgagcgcgataatcacgcttacaccgctatttaccctgctgttttcagatcttttatctatggcctggcccgatttcttcgccagaccgatgttaaaccttttaggttatctcggtgcgtttgtcgtggttgcgggcgcgatgtattccgccattggtcatcgtatttggggcggtttacgcaagcatgaaacggtggtttcgcaaccccgctcaggcgaatga

SEQ ID NO: 369051 - DNA, 258 bp, Salmonella enterica
atggcacataaaaaggctggcggctcgactcgtaacggtcgcgattctgaagctaaacgtctgggcgtaaaacgctttggcggtgaagcagttctggcaggcagcatcatcgttcgtcaacgtggtactaaattccacgctggcaccaacgttggttgcggtcgtgaccacactctgtttgctaaagcagacggtaaagtgaaattcgaagttaaaggcccgaaaaaccgtaaatacatcagcatcgttgctgagtaa

SEQ ID NO: 369052 - DNA, 312 bp, Salmonella enterica
atgtacgcggttttccaaagtggtggtaaacaacaccgagtaagcgaaggtcagaccgttcgcctggaaaagctggacatcgcaactggcgaaactatcgagttcgctgaagttctgatgatcgcaaacggtgaagaagtcaaaatcggcgttcctttcgttgatggcggcgtaatcaaagctgaagttgttgcccacggtcgtggcgagaaagttaaaatcgttaagtttcgtcgccgtaaacactaccgtaagcagcagggccatcgtcagtggttcactgatgtgaaaattaccggcatcagcgcttaa

SEQ ID NO: 369053 - DNA, 1113 bp, Salmonella enterica
atgaagaaaaaaaacacaacgcatacggtaacgtttatctgcggcgttttttcagtacaatcagggtatatttctaaccataaaccctacgttacctcattcagacatgggataatcggggcgataagcccggcttttgcgatgaatttagaaaaaatcaacgagttaaccgcgcaagatatggcgggtgtcaatgcgacaatccttgaacagcttaattccgacgttcaactgattaatcagctaggatattacattattagcggcggcggaaaacgcattcgtccgatgattgccgttcttgccgcacgcgcggtgggttatcagggtaacgcgcacgtgactatcgccgctctgatcgagtttatccacacggcgacgctgctacatgatgatgtggtggatgaatctgatatgcgtcgcggcaaagcgacggcaaatgccgctttcggtaatgccgccagcgtgttggtcggcgactttatctatacccgcgccttccagatgatgaccagcctcggctcgttaaaagtgctggaagtgatgtcggaagcggtcaacgtgattgcagaaggtgaagtgctgcaattgatgaacgtgaatgacccggacattaccgaagaaaattacatgcgggtgatttacagtaaaacggcccgtctgttcgaagccgccgcccagtgctccggtattcttgccggttgtacgcctgagcaagagaaagggttgcaggactatggccgctaccttggtacggctttccagctcattgacgatctgctggattacagtgccgacggcgagcatctcggtaaaaatgtgggtgatgacctcaatgagggcaaacctaccttaccgttgcttcacgccatgcgccacggtacgccagaacagtcagcgatgatccgtaccgctattgaacaaggcaatggccgtcatcttctggaaccggttctggaagcgatgaccacctgcggttcgctggaatggacgcgtcagcgagcggaagaagaagccgacaaagcgatatccgcgttgcagatattgccggataccccatggcgtgaggcgctaatcggtctcgcacacatcgcggtgcagcgcgatcgttaa

SEQ ID NO: 369054 - DNA, 288 bp, Salmonella enterica
atggaaagcaagcttattgactggcatccggccgatatcattgccggactacgtaaaaaagggacttcaatggccgctgagtcacgtcggaatggattgagttcatccacgctggccaatgcattaacgcgcccgtggccgaaaggagagttgattatcgcgaaagcattgggaacggaaccctgggttatttggccatcgcgttatcacgatccgcgcacgcatgagtttatcgacagaacgcggcttatgagagcgcgtaataaagacaaacagaatgtagagtaa

SEQ ID NO: 369055 - DNA, 1260 bp, Salmonella enterica
atggataaatttcgtgtacaggggccaacgacgctccagggcgaagtcacaatttccggcgccaaaaacgccgcgctgccgatcctgttcgccgctctgctggcagaagaaccggtagagatccaaaacgttccaaaactgaaagacgtggatacgtcgatgaagctcctgagccaattaggcgcgaaagtggaacgcaatggatcggtacacattgacgccagccaggtgaacgtgttctgcgcgccttatgatctggttaagaccatgcgcgcctcgatatgggcgctggggccgctagttgcccgttttggtcagggacaagtctctctgccggggggctgtactatcggcgcgcgtccggttgatttgcatattaccggtctggaacaactgggtgcgaccatcaagctggaagagggctacgtaaaggcctccgtcgaaggacgtcttaaaggggcgcatatcgtgatggataaggtcagcgtcggcgcgaccgtcaccattatgtgcgccgccacgctggcggaagggacgaccatcattgaaaacgccgcgcgcgagccggaaattgtcgacaccgctaacttcctggttacgctgggggcgaagatcgccgggcagggcaccgatcgtattacgatcgagggcgtagagcgtctgggcggcggcgtttatcgtgtgctgccggatcgtatcgaaacggggactttcctggtggcggcagcgatctctcgcggcaaaatcctctgccgtaacgcgcaaccggacactctggacgcagtactggcgaaactgcgcgatgctggcgcggatatcgaagtgggcgaggactggattagtctggacatgcacggcaaacgaccgaaggcggtcaatgtccgtaccgcgccgcacccggcattcccgaccgatatgcaggcgcagttcacgttgctgaacctggtggcggaagggacgggctttatcactgaaactgtctttgaaaaccgttttatgcacgtgcctgaactcagccgcatgggcgcgcgtgcggaaattgaaagcaataccgtcatatgccatggcatagaaacgctctctggcgcccaggttatggcgacagatctgcgggcatctgcgagcctggtgctggcgggctgtattgcggaaggcacgacgattgtggatcgcatttatcacatcgatcgcggttatgagcgcatcgaagacaaactgcgcgcgctaggcgcgaatattgaacgcgtgaaaggcgaataa

SEQ ID NO: 369056 - DNA, 294 bp, Salmonella enterica
atgttgggctgttttcactatttgacgaataaagaacccatggaaaatcatgaaattcagagtgtgctgatgaatgccctctccctccaggaagtccacgtctccggcgatggcagtcactttcaggttattgccgtgggcgagatgtttgacggcatgagccgggtcaagaaacagcaaacggtctatgggccgctaatggagtacattgcggacaaccgtatccatgccgtatcgatcaaagcatataccccggcggaatgggcgcgcgatcgtaaacttaacggattttaa

SEQ ID NO: 369057 - DNA, 297 bp, Salmonella enterica
atgacgccgcaactcacctggacgcgtgaggcggacactctggtgctggcgggagagctggatcaggacgtgttggcgccgctatgggacgcgcgcgtagaagcgatgactggcgttacccgtatcgacctgagccagatctccagggtggatacggggggactggcgctgctggcgcaccttgtgaaccaggcaaaaaagcagggcaatgccgtgtcgctgtctggcgttaacgacaaggtttacgcgctggcgcaattatataacttgcccgaagacgtacttccccgtatgtaa

SEQ ID NO: 369058 - DNA, 636 bp, Salmonella enterica
atgtttaaacgactgatgatggtggccctgctggtcattgcgccattaagcgcagcaacggcagcggatcagagcaatccttataaactgatgaacgaggcggcgcagaaaacgtttgatcgcctgaaaaacgaacagccgaaaattcgtgccaatccggattacctgcgagacgttgttgatcaggaacttctgccgtacgtgcaggtaaaatatgccggcgcgctggtgttgggccgctactacaaagaggcgaccccggcgcagcgtgaagcctattttgccgcgtttcgcgaatacctgaaacaggcatacggtcaggcgctggcgatgtaccacggtcagacttaccagatagcgcctgagcaaccgctgggcgatgcgaccattgtgcctatccgtgtaacgattatcgatcccaacggtcgtccgccggtacgcctggatttccagtggcgcaaaaacactcagaccggcaactggcaggcgtatgacatgattgcggaaggcgtcagcatgatcaccaccaagcaaaatgagtggagcgatctgctgcgtactaaaggcatcgacggcctgaccgcacaactgaaatctatctctcaacagaaaattactttggacgagaaacagtaa

SEQ ID NO: 369059 - DNA, 552 bp, Salmonella enterica
atgcaaacgaaaaaaaatgaaatttgggtaggcgtttttttgctggtagcgttgctggcggcgctgtttgtttgcctgaaggcggcaaatgtgacctctatgcgcacggagccgacctataaggtttatgcgaccttcgataacatcggcggtctgaaagtgcgttccccggtacgcatcggcggggtggttgtcgggcgggttgaagatatctcgcttgatccgaaaacatacctgccgcgcgtaacgctcgacatcgaagagcgttataaccatattcccgataccagctcgttgagtattcgtacttccgggctgctgggggagcaatatctggcattaaacgtcggttttgaagatcctgagctgggaacgtctatcctcaaagatgggagtacgattcaggacaccaagtctgcaatggtgctggaagatatgattggccagttcctttataacagcaaaggcgacgacaataagaattctggcgatgcgccagccgcaacggaaggccatactgaagccacaacgcccgcgggcgaaacgaaataa

SEQ ID NO: 369060 - DNA, 783 bp, Salmonella enterica
atgctgttaaatgcgctggcagcactcggacacagcgggatcaaaaccgtcaggacgttcgggcgcgccgggttaatgttattcaatgcgattatcggtaagccggagtttcgcaaacatgcgccgctgctggtgcgccagctttataatgtgggcgtcttgtcgatgcttatcattattgtctccggcgtattcatcggtatggtgctggggctgcaaggctatctggttctgaccacttacagcgcggagaccagtcttggcatgttagtggcgctttcgctgctgcgcgagctggggccggtggtcgcggcgttgctgtttgccgggcgggccgggtcggcgttgacggcggaaatcggcctgatgcgggcgacggagcagctctccagtatggagatgatggcggtcgatccattgcgccgggtgatttcgccgcgcttttgggcgggcgtgatttcgttgccgctactgaccattatctttgtggcggtcggtatctggggcggctcgctggtcggcgtaagctggaaaggaatcgacgccgggttcttctggtccgcgatgcagaatgccgtcgactggcgtatggacctggtgaactgtctgataaagagcgtggtgttcgccattacggtaacatggattgcgttattcaacggttatgacgcaataccaacttctgccgggattagccgggcaacgacgcgtaccgtggttcacgcatcgttggccgttctggggctggattttgtgctgaccgcactgatgtttgggaattga

SEQ ID NO: 369061 - DNA, 813 bp, Salmonella enterica
atgggtcagtctgcggccaatttagtcgatatgcgcgacgtcagcttttcccgtggcgaacgctgcattttcgataatatttccctgacggtgccgcgcgggaagatcacggcgatcatggggccgtcgggcatcggtaaaaccacgctgttgcgcctgattggcggacagatcccgccggataagggcgagatcttatttgatggcgagaatgtgccggccatgtcccgttcgcggctctacaccgtccgcaaacgtatgagtatgctgtttcagtcgggagcgctgtttaccgacatgaacgtgtttgacaatgtggcctatccgctacgggagcacaccaatttacccgcgccgctgctaaaaagcgtcgtgatgatgaaactggaagctgtcgggctgcgcggcgcggcaaaactgatgccttccgagctctccggtgggatggcgcgccgcgccgcgttggcgcgcgccatcgctctggaaccggatctcatcatgttcgatgagccgtttgtcggccaggacccgattaccatgggcgttctggtgaagctgatttcagaattgaacagcgcgctgggcgtgacctgcgtggtggtctcgcatgatgtgccagaggtgctcagtattgctgatcacgcctggatcatggcggacaaaaaaatcgtcgctcacggtagcgctcaggcgttgcaggagaatacggacccgcgcgtgcgtcagttccttgacggcattgccgacgggccggttccgttccgctatccggcgggcgactatcaccttgatttactcgaaacagggagttaa

SEQ ID NO: 369062 - DNA, 978 bp, Salmonella enterica
atgcttttagcgatggcgctactcataattggtttgcttctggtggcctacggcgccgatcgtctggtgtttgcggcctctattttatgccgtacattcggtattcccccgctgatcatcgggatgacggtcgtgagtatcggcacctcgctgccggaaattattgtgtcggtcgccgcatcgctacacggtcagctcgatttggccgtcggcgcggcgctcggttctaacatcaccaatattttgctgatcttagggctggcggcgctggttcgtccatttaccgtgcattccgatgttttacgtcgcgaattgccattaatgttatttgttagcgtggtagccggttccgtactgcatgacggacagttaagccgcagtgatggtatctttctcctgcttctggctgtgctatggctgttattcattgttaaaatcgcgcgtctggccgaacgccaggggaatgacagcctcacccgcgaacaactggcggagctgccgcgcgaaggcgggctccccgtcgcgttcttatggctgggcattgcgctggtcatcatgccgatggcgacgcgcatggtaatcgataacgctacggtgctggcgaactatttcgccatgagtgaattaacgctcggtctgacagtcatcgccgtcggcaccagtctgccagaactggcgacggcgattgccggcgtgcgaaaaggcgaaaatgatattgccgttggtaatctcattggcgccaatatttttaatctcgccatcgtgctgggactgcctgcgctgatcgcgccgggggagatcaacccgctggcatttgggcgtgattatagcgttatgttgctggttagcgtggttttcgctttactttgctggcggcatccgcgtcagattggtcggggcgcaggtatactgctgaccggcgggtttatcgtatggctggcgatgctctattggctatcgccacttcttgttggataa

SEQ ID NO: 369063 - DNA, 987 bp, Salmonella enterica
atgtcgcatttagcgttgcaaccggggtttgactttcagcaggcaggcaaagaggtcctggaaattgaacgtgaaggcctggcggagcttgatcaatatatcaaccagcatttcacgctggcctgtgaaaaaatgttcaactgcaccggaaaagtggtggtcatggggatgggaaaatccggtcatatcggacggaaaatggccgccacgttcgccagtaccggcacctcttccttttttgtacatccaggcgaagccgcgcacggcgatttggggatggttacgccgcaggatgtggttatcgctatctccaactccggcgaatccagcgagatcgcggcgctaataccggtacttaaacgtctgcacgtgccgttaatttgcattaccgggcgaccggaaagcagcatggcgcgtgcggcagatgtgcatctgtgtgttaaagtgcccaaagaagcgtgtccgttaggactggcgcctaccagtagtaccaccgcaacgctggtgatgggcgacgcgctcgctgtggcgttgttaaaagcgcgcggctttaccgccgaggatttcgctctgtcgcatcctggcggcgcgctgggacgtaagctactgctgcgagtaagcgatattatgcatactggcgatgagatcccgcatgttaataaacatgccaccctgcgtgatgcgctgttagaaattacgcgtaaaaatctcggtatgaccgtcatttgcgatgaatccatgaagatcgacggtatcttcaccgacggcgatttacgtcgcgtattcgatatgggcggcgatatgcgccagttggggatcgccgaggtgatgacgccagggggcattcgcgtgcgtcccggtattctcgctgtcgatgcgctgaatttaatgcagtcccgccatatcacctccgtactggttgctgatggcgaccagttactcggtgtgttacatatgcatgatctcctgcgtgcaggcgtcgtgtag

SEQ ID NO: 369064 - DNA, 567 bp, Salmonella enterica
atgagtaaagcaggtgcgtcgcttgcgacctgttatggccccgtcagcacccatgtcatgaccaaagcggagaatatccgcctgctcatcctggacgtggatggcgtattgtctgacggcctgatttatatgggcaataacggcgaagagctgaaggctttcaacgttcgtgacggctatggtattcgctgtgctttgacctccaatatcgaggttgccattattaccggacgaaaggctaaacttgtagaagatcgctgcgccacgctggggattgtccatctttatcagggacagtcgaataagctgatcgcctttagcgatctgctggaaaaactggtcattgcgccggaaaatgttgcctatgtcggcgatgatctgattgactggccagtgatggaaaaagtggggttaagcgttgccgttgcggatgcgcatccgctgctgatcccccgcgctgactatgtgacgcacattgccggcgggcgcggcgcggtacgtgaggtgtgcgacttgttgctgctggcgcagggcaagctggatgaggccaaagggcaatcgatatga

SEQ ID NO: 369065 - DNA, 576 bp, Salmonella enterica
atgagtaaaaccagacgttgggttatcattctactgtcgctggccattctggtactgattggtatcaatctggcggataaagacgatcctgctgccgtgatggtcaacagcaacgatcccacgtataaaagcgagcatacggataccgtcgtgtacagtccggaaggcgcgttgagctatcgtctgatcgcgcagcacgttgaatatttttccgatcaggcggtctcatggtttacgcaaccggtattaaccacctttgataaggataaggtgccgacatggtcgatcaaggccgataaagccaaattgactaacgatcggatgctctatctgtatggtcatgttgaagtcaacgccctggtgcctgacgctcaattacgcagaattaccaccgataacgcgcagattaatctggtgacgcaggatgttacctcgaacgatctggtgacgttatacggcacaacatttaactccagcggactgaaaatgcgcggtaacttacgcagcaagaacgccgagctgattgaaaaggttagaacctcttatgaaattcaaaacaaacaaactcagccttaa

SEQ ID NO: 369066 - DNA, 555 bp, Salmonella enterica
atgaaattcaaaacaaacaaactcagccttaatcttatgcttgccggctcgctgctggccgccagcattccggctttcgccgtcacgggcgataccgaacagcctattcatattgactcggatcaacagtcgctggatatgcaaggcaacgtcgtgacctttacgggcaacgtggtgatgacccagggcacgattaagatcaacgccgataaagtcgtggttacccgccctggcggcgaacaggggaaagaggtgatcgacggttacggcaatccggccaccttctaccagatgcaggacaacggtaagccggtgaaaggccacgcttcccatatgcattacgagctggcgaaagattttgtggtgctgaccggcaacgcttatctggagcagcttgacagcaacattaccggcgacaaaatcacctacctggtgaaagagcagaaaatgcaggccttcagcgagaaaggcaaacgcgtcaccaccgttctggtgccgtcgcagttgcaagacaaaaacaaaggccagactccggcgcaaaagaagagtaactaa

SEQ ID NO: 369067 - DNA, 726 bp, Salmonella enterica
atggcaacattaactgcaaagaatctggcgaaggcctataaaggccgtcgcgtagtggaagatgtcagtctgaccgttaactccggggagattgtcgggctgctcggtccaaacggcgcgggtaaaaccaccaccttttatatggtcgtcggtatcgtgccgcgtgacgcaggcaatatcatcatcgatgatgaagatatcagtctgctgccgctgcacgcgcgcgcgcgccgcggtatcggctatttgccgcaggaagcttctattttccgccgtctcagcgtatttgataacctgatggcggtactgcaaattcgtgacgatttgaccgcagaacagcgagaagaccgcgccaacgagctgatggaagagtttcatatcgagcatctgcgcgacagcatgggacaggcgctgtccggtggtgaacgccgtcgtgtagaaatagcccgcgcgttggccgctaatcccaaatttatcctgctggatgaaccctttgccggcgttgacccgatttccgttatcgacatcaaacgcattatcgagcatctgcgcgatagcgggctcggcgtgctgatcaccgaccataacgtccgtgagacgctggcagtctgtgaacgcgcctatatcgtgagccagggccaccttattgcccacggtacgccgacagaaatcctgcaagacgaacacgttaagcgtgtatatcttggggaagacttcagactctga

SEQ ID NO: 369068 - DNA, 1434 bp, Salmonella enterica
atgaagcaaggtttgcaactcaggcttagccaacaactggcaatgacgcctcagctacaacaggccatccgtctgttgcagttgtctacgctggaacttcagcaggaactccagcaagcgctggaaaataacccgctgcttgagcaaaccgatcttcatgacgaaatcgacactcagcaacctcaggataacgatcctctcgataccgccgacgcgctcgaacaaaaagagatgccggaagagctgccgcttgacgccagttgggatgaaatttacaccgccgggacgccgtccggccccagcggcgattatatcgacgatgagctgcccgtctatcagggtgaaacgacgcagtcgttgcaggattatctgatgtggcaggttgagctaacgcccttctcggacaccgatcgcgctattgcgacatccattgtcgatgcggtagatgataccggctatctcaccgtatccctggacgaaattcgcgaaagcatgggcgatgtagaggtggatctcgatgaggtcgaagccgtcctgaagcgtattcagcgttttgatccggtaggcgtcgcggcaaaagatcttcgcgactgtctgctgatccagctttcacaattcgacaaatccacgccgtggctggaagaggcgcggctcattatctgcgatcatcttgatctgctggccaaccacgatttccgcacgttgatgcgcgttacccgactaaaagaagaggtgctgaaagaggcggtaaacctgattcagtcgctcgatcccagacccggtcaatcgatccagaccggcgagccggagtacgttatcccggatgtgctggtacgcaagcataacggtcgctggacggtggagcttaatagcgacagtattccccgtttacagattaaccagcactatgccgccatgtgcaatagcgcgcgcaacgatgccgacagccagttcatccgcagtaatttacaggatgcgaaatggctgataaaaagccttgaaagccgcaacgacacgctgctgcgcgtcagtcgctgcatcgtcgagcaacagcaagccttttttgaacagggcgaagaatatatgaaaccgatggtactggcggatatcgcccaggccgtcgagatgcacgaatccactatatcccgcgtgaccacgcagaagtatttgcacagcccgcgcggtatttttgaactcaaatatttcttttccagccacgtcaataccgaaggcggaggcgaagcctcttccaccgcgattcgcgcgctggtgaagaagttaattgcggcggaaaaccccgcgaaaccgctgagcgacagcaagttaacctctctgctgtcagaacaaggtatcatggtggcgcgccgcactgttgcgaagtaccgagagtctttatccattccgccgtcaaaccaacgcaaacagctggtttga

SEQ ID NO: 369069 - DNA, 288 bp, Salmonella enterica
atgcagctcaatatcaccggacataatgtcgaaattactgaagccctgcgtgaatttgtgacgacaaaattcgccaaacttgaacagtattttgagcggattaatcaggtatacgtggtgttgaaagtggagaaggtcacgcatatctcggatgcgacgctacacgttaacggcggcgaaattcacgccagcgcggaaggccaggatatgtatgccgccattgacggcttgattgataaactggcaaggcagttaaccaggcataaagataaactgaaacaacactaa

SEQ ID NO: 369070 - DNA, 492 bp, Salmonella enterica
atgataaataacgatacgactctacaactgagcagtgtacttaaccaggagtgtacgcgtagcggcgttcattgtcagagtaagaaacgcgcgctggaaatcatcagcgaactggcggcaaaacagctcagtttacctcctcaggtcgtgtttgaagccattctgacacgcgaaaaaatgggcagtaccggtattggtaatggtatcgccatcccgcacgggaaactggaagaagataccttacgcgccgtcggcgtgttcgttcagctcgaaacgccgatcgcgttcgacgccatcgataaccagccggtcgatctcctcttcgccctgctggtgcccgccgatcaaactaaaacgcatctgcacacgctgtcgctggtggcgaaacgtctggcggataaaacgatctgccgccgcctgcgcgcggcgctgaatgatgaagagctgtatcaaatcattactgacaccgaaggtgagcagaatgaggcataa

SEQ ID NO: 369071 - DNA, 855 bp, Salmonella enterica
atggtactgatgatcgtcagcgggcgttccggatcaggtaaatctgtcgctctgcgcgcgctggaagatatgggattttactgcgtggataacctccccgtcgtgctgttgcccgatctggcgcgaacgctggccgatcgccagatttccgccgccgtcagcattgatgtgcgcaatatgcctgaatcacctgagatttttgaacaggcgatgaataatctgcctggcgctttctcgccgcaattgctgtttcttgatgccgaccgcaataccttgattcgccgctacagcgacacgcgccgtttgcatccgctttccagcaaaaatctttctttagagagtgcgatcgataaagagagtgacttgctggagccgttacgctcacgtgcggatctgatcgtcgacacttcagaaatgtccgtccatgagctggcggagatgctgcgtacccggctgttgggcaaacgcgagcgcgaactgacgatggtatttgagtccttcggctttaaacatggtatcccgattgatgcggactatgtgtttgatgtccgctttctgcccaacccgcactgggatccaaaactgcgccccatgaccgggcttgataagccggtagccgcgtttcttgaccgacacacagaagttcacaattttatctatcagactcgcagctatcttgagctatggttaccgatgctggagaccaacaaccgcagctaccttaccgtcgctatcggttgtaccggcgggaaacaccgttcggtgtatattgcagaacagctggcagactacttccgctcgcgcggtaaaaatgtccagtctcgccatcgcacgctggaaaaacgcaaaacatga

SEQ ID NO: 369072 - DNA, 273 bp, Salmonella enterica
atgaccgtaaagcaaactgttgaagtcaccaataagctgggcatgcatgcccggcctgccatgaagcttttcgaactgatgcaggggtttgacgccgaggtgctattacgcaatgacgaaggcaccgaagcggaagcaaacagcgtcatcgctctgttaatgctcgactccgccaaagggcgtcagatcgaaattgaagccaccggcccgcaagaagttgaagcgctggcggcggttatcgcgctgttcaattccggctttgacgaagactaa

SEQ ID NO: 369073 - DNA, 633 bp, Salmonella enterica
atgatccttttatccgaacagactccgctgggcgctggtcgacatcgtaaatgctatacgcatccggataatgcccggcgttgcataaaagttatttacaaccgtgaccacggcggtgataaagagattcggcgtgaactgagctactatgcgcatctgtcccgctacctgacggactggagcgctatcccccgttattacggcacggtagaaaccgattgcggcaccggctatgtctacgacatgattaccgatttcaacggcgcgccctctattaccctgaccgagttcgccgcgcaatgtcgttatgaagaggatgtcgctgtcctgcggcggctactgaaaaaactgaaacgttacctgctggataaccatattgtgacgatgtcgctgaagccgcaaaatatcctgtgccagcgtatcagcgagtcagaagtggttccggtggtttgcgacaatctgggggaaagtacctttatcccgctggcgacctggtcaacatggtgctgtgaacgcaaactggagagagtgtggcagcggtttatcgcccagcctgcgctggccgttgccctggagagggacgagcagccaaaagacaagaaacggctggcgcttacttctcacgaagcttaa

SEQ ID NO: 369074 - DNA, 729 bp, Salmonella enterica
atgagcaaacgacgcatcgcgccgttaacgtttttgcgccgtctacttttacgtatccttgctgcgctcgccgtcttttggggcggcggcattgcgctgtttagcgtggttccggtgcctttttcggcggtgatggcggaacggcagattagcgcctggctcggcggagagttcggttatgtggcgcattctgactgggtcagtatggcggatatctcgccgtggatggggctggcggtaattgcggcggaagaccagaagttccctgagcactggggctttgatgttccggcgattgaaaaagcgctggcgcataatgagcggaatgagagccgtattcgcggcgcctctacgctttcgcagcaaacggcgaaaaatctctttttatgggatggacgcagttggctgcgcaaaggtctggaggccgggctaacgctgggcattgaaactgtctggagcaaaaagcgcattctcacggtttatctgaatatcgcggagtttggcgatggtatttttggcgtggaggctgcggcacaacggtattttcataaacctgccagtcgcttgagtgtgtctgaagccgcgttgctggcggcggtattgccaaatccgttacgctataaggcgaatgcgccgtctggctatgtgcgtagccggcaggcgtggattatgcgccagatgcgacaactgggcggggaatcttttatgacgcgcaaccagcttaattaa

SEQ ID NO: 369075 - DNA, 654 bp, Salmonella enterica
atgaaaaaaattggcgtagtgctcagcggatgcggcgtctatgacggcaccgaaattcatgaggccgttctgacgctgttggccattgcccgcagcggcgcgcaggctgtctgcttcgcgccggataaaccacaagcggatgtgattaatcacctgaccggcgaagcgatggcggaaacgcgtaacgtcctgattgaggcggcgcgtattacgcggggcgatattcgtcccctgtcccaggcgcagccagaggaactggatgcgctcattgtgcccggtggtttcggcgcggcgaagaacctgagtaatttcgccagccaggggagcgaatgccgggtggatagcgatgtcgtcgcgctggcgaaggccatgcaccagtccggcaagccgctgggattcatctgtatcgcgcccgcaatgttgccgaaaatctttgacttcccgctacgtctgacaatagggacggatattgataccgctgaagtacttgaagagatgggcgccgaacacgtaccttgcccggttgatgatatcgttgtggacgaggataacaaggtcgtgaccacccctgcctatatgctggcgcaggatatcgcccaggcggcaagcggcattgataaattagtgtcgcgcgtgctggttctggcggaatga

SEQ ID NO: 369076 - DNA, 2337 bp, Salmonella enterica
atgaagcaaattcgtatgctggcgcaatactatgtcgacctgatgatgaaattgggtctggtgcgcttttccatgctcctggcgttggcattggtggtgctggcgattgtcgtgcagatggcggtgaccatggtgctgcatggtcaggttgaaagtatcgacgttattcgttccatcttttttggcctgttaattacgccctgggcggtctatttcttatccgttgttgttgaacaactggaagagtcaaggcagcgactgtcgcgtctggtgcaaaagctggaggagatgcgcgagcgcgatctcaagcttaacgtacagttgaaggacaatattgcccagcttaatcaggaaattgccgatcgcgaaaaagcggaagcggagctgcaagagacatttgaacagctaaaagtagaaattaaagagcgtgaagaagcgcaaatccagctagaacagcaatcctcttttctgcgctcctttctggacgcctcgccggatttggttttttatcgtaatgaggataaagaattttccggctgtaaccgcgcaatggaattgctaaccggcaagagcgaaaaacagctggtgcatttgaagccggaagatgtgtactctcccgaagcggcggagaaagtcattgaaaccgatgaaaaagtattccgccataacgtctccctgacctacgaacagtggctggattacccggacggacgaaaggcctgctttgaaattcgtaaagtgccttattacgaccgtgtcggtaaacgtcatggcctgatgggatttggtcgtgatattaccgaacgtaagcgttatcaggacgcgctggaacgcgccagccgcgacaagaccacatttatctctaccatcagtcatgagctgcgcaccccgcttaacggcatcgtcggtttaagccgcatcctgctggataccgatcttaccgccgaacaggaaaaataccttaagacaatccatgtctccgccgtgacgttaggcaatattttcaatgatatcattgatatggataagatggagcggcgtaaggttcagcttgataaccaaccggttgatttcaccagctttatggccgatctggaaaacctttccggtttgcaggcgcagcaaaaagggctacgttttgtgcttgagccgacgctgccgctgccgcacaaagtcattaccgacggaacgcgtctgcgccagattttatggaatttgatcagcaatgcggtgaaatttactcagcagggccaggtgacggtgcgggcgcgctatgatgaaggcgacatgctgcactttgaagtggaagattccgggatcggcattccgcaggatgagcaggataaaattttcgccatgtattatcaggtgaaagacagtcatggcggtaaaccggcgacgggtaccggtatcgggctggcggtctcccgtcggctggcgaaaaatatgggcggcgatattaccgtttccagtctgccgggcaaaggatcgacctttacgctaacggttcatgcgccagcggtggcggaagaggtggaggacgcctttgatgaagacgacatgccgctgccggcgctgcatgttctgctggtcgaagatattgaactgaacgtgatcgtagcgcgttcggtactggaaaaactgggtaacagcgtggatgtcgcgatgaccggcaaggcggcgctggagatgttcgcgccaggcgaatatgacctggtcttgctggatattcagctaccggatatgacgggtctggatattgccagagaactgacccgtcgccacacgcgggaagatttaccgccgctggtagcgcttacggctaacgttctgaaagataaaaaagagtatctggacgctggtatggacgatgtgctgagtaagccgctgtcggtgccagccttaaccgcgatgattaaaaaattctgggatgccaccgataaagaggagagtaccgtgacgcctgaagagagcgataaagcgcaagcgctgctggatatcccgatgctggaacagtacatcgagttggttgggcctaaattgatcaccgacggtctcgcggtgtttgaaaaaatgatgcccggctatttaagcgtgctggagtccaatctgacggcgcgtgacaaaaaaggcgtcgttgaggaagggcataagattaaaggcgcagccggttcggtagggctgcgtcatctgcaacagcttggccagcaaatccagtcgccggatcttcctgcctgggaagataatgtcgcggaatggattgaagagatgaagcaggagtggcagcacgatgtcgcggtgctgaaagcctgggtggcaaacgcggaaaaaaaatga

SEQ ID NO: 369077 - DNA, 930 bp, Salmonella enterica
atgcagttacagaaattagtcaatatgtttggtggggatcttttacgtcggtatgggcaaaaggttcataagctgacgcttcatggcggttttagctgccctaaccgcgacggcaccatcgggcgtggcggttgcaccttctgtaatgtcgcctcttttgccgatgaggcgcagcagcatcattcgattgccgagcagcttgcgcatcaggcgcatctggtgaaccgcgctaaacgttatctggcctatttccaggcctacaccagcacctttgcggaagtgcaggtgctgcgttccatgtatcaacaggcggtcagccaggccagtatcgtcgggttatgcgtcggtacgcgtccggattgtgtcccgcaggcagtagtagatttactgtgtgaatataaagatcaaggctacgaggtatggctggaactgggattgcaaaccgcgcacgataaaaccctgcaccgaattaaccgcgggcatgacttcgcctgctatcagcgtaccacccggattgcccgggagcgcgggctgaaagtgtgtgcgcatctgattgtggggctgccgggagaagggcaggcagaatgcctgcaaaccatggagcgtgtggtggagacgggcgttgacggtattaaactgcatccgctgcatattgtgaaaggcagtacgatggccaaagcctgggaagcggggcggctgaacggcatcgaactggacgactacacgctaacggcaggtgagatgattcgtcatacgccgccggaggtgatttatcaccgaatttcagccagcgctcgccgtccgacgctgcttgccccgctgtggtgcgagaatcgctggacggggatggttgagctggacaaatacctgaatgagcatggcgtacagggctctgcgctggcccgtccctggataccacctgtagcgtag

SEQ ID NO: 369078 - DNA, 4461 bp, Salmonella enterica
atgttgtacgataaatcccttgagaaggataactgtggtttcggcctgatcgcccacatagaaggcgaacctagccacaaggtagtgcgtaccgccatacacgcgctggcccggatgcagcaccgtggcgcgatccttgccgacggtaaaaccggcgacggttgcggcttgctgttacaaaaacctgaccgtttctttcgcatcgtggccgaagagcgcggctggcgcttagccaaaaactacgccgtcgggatgatctttttgaataaagatcctgaactggccgccgcgtcacgccatattgtcgaagaagaattacagcaggaaaccctgtcgattgtcggctggcgcgatgtgcccaccaatgaaggcgtgctcggtgaaatcgccctctcctccctgccgcgtattgagcagatttttgtcaacgctccggcgggctggcgtccgcgcgatatggagcgccgtctgtttatcgcccgccgacgcattgaaaaacgcctgcagaacgacaaggatttctacgtatgcagcctgtcgaacctggtcaacatttataaaggtctgtgtatgccggcggatctgccgcgtttctacctggatcttgcggatctgcgtctggaatcggccatctgtctgttccaccagcgcttttccactaacaccgtgccgcgttggccgctggcgcagccgttccgctacctggcgcataacggcgagattaacactatcaccggcaaccgccagtgggcgcgcgcccgtacctataaattccagacgccgctgatcccggatttacagtccgctgcgccgtttgttaacgaaaccggttcggattccagctcgctggacaacatgctggaactgctgctggcaggcgggatggacatcatccgcgccatgcgcctgttggtgccgcccgcctggcagaacaaccccgatatggaccaggatctgcgcgccttctttgactttaactccatgcatatggagccgtgggacggtccggcaggcatcgtgatgtccgacgggcgcttcgccgcctgtaaccttgaccgtaacggcctgcgcccggcacgctacgtcattaccaaagataagctgatcacctgcgcctccgaagtcggtatctgggactatcagccggatgaagtggtcgagaaaggccgcgtcggcccaggcgagctgatggtgatcgacacccgcggcggacgtattctgcattccgcggaaaccgatgacgatctgaaaagccgccatccatataaagagtggatggagaaaaacgtccgccgcctggtgccgtttgaagagctgcctgatgaagaagttggtagccgcgaactggacgatgacctgctcgccagctatcagaaacagtttaactacagcgccgaagagctggactcggttatccgcgtattgggcgaaaacggccaggaagccgtcggttcaatgggcgacgataccccctttgccgtgctctccagccagccgcgtattatttacgactacttccgccagcagttcgcgcaggtcactaacccgcctatcgacccgctgcgtgaagcgcacgtcatgtcgctcgccaccagcatcggtcgcgaaatgaacgtcttctgcgaagcggaaggtcaggcccatcgcctgagttttaaatcgccaattctgctgtactccgatttcaaacagctcaccaccatgaaagaggagcattatcgcgctgaccgtctggatatcaccttcgacgtgaccgaaaccacactgaacgcgacggttaaggcgctgtgcgataaagcggaacagatggtgcgcaacggcaccgtgctgctggtcctctcggatcgcaatatcggtaagaatcgcctgccggtccccgcgccgatggcggtgggcgcggtgcaaacgcgtctggtagaacaaagcctgcgctgcgacgccaacatcatcgtagaaaccggaagcgcccgcgatccgcatcactttgcggtactgctcggctttggcgcaacggctatctatccgtacctggcctacgaaacgctggggcgtctgattgatacccaggccatcgccaaaaactaccgtaccgtgatgcagaactaccgtaacggcatcaacaaggggctgtacaagattatgtccaaaatgggcatttcgaccattgcctcttaccgctgctccaaactgtttgaagcggtcggactgcacgatgatgtggtaaacctgtgcttccagggcgtggtcagccgtatcggcggcgcgagctttgatgacttccagcaggatctgctgaatctctccaaacgcgcctggctggcgcgcaaacccattagcccgggcggcctgctgaagtacgtccacggcggcgaatatcacgcctataacccggatgtcgtgcgtaccctgcaacaggcggtacagagcggcgaatacagcgattatcaggaatacgccaaactggtcaatgagcgtccggcggcaacgctgcgcgatctgctggcgatacatccagacggcgaggcggtgactatcgacgaggttgagcccgccagtgagctgtttaaacgctttgataccgcagccatgtctatcggcgcattaagtccggaagcgcacgaagcgctggcggaagcgatgaacagcctcggcggcaactccaactccggcgaaggcggcgaagacccggcgcgctacggcaccaataaagtgtcgcgtatcaagcaggtggcttccggccgttttggcgtgacgccagcgtacctggtcaatgccgatgtgattcagattaaagtcgcgcagggcgcgaaaccgggcgaaggcggtcagttgccgggggataaagtcactccgtatatcgctaaactacgctattcagtgccgggcgtgacgctgatctccccgccgccgcaccacgatatttactctatcgaggacttagcgcagctcattttcgacctcaaacaggtcaacccgaaggcgatgatctccgtgaagctggtgtccgaaccgggcgtcggcaccatcgcgaccggcgtggcgaaagcctatgcggatctgatcactatcgccggctacgacggcggtaccggcgccagcccgctctcttcggtgaaatatgcgggctgtccgtgggaactcggacttgttgaaacccagcaggcgctggtcgccaacggtctgcgtcacaagattcgtctgcaggtggacggcggtctgaaaaccggcgtcgatatcattaaagcggcaattctcggtgcggaaagtttcggcttcggcaccggcccgatggtggcgctgggctgtaaatacctgcgcatttgccatctgaacaactgcgcaaccggcgtggcgacgcaggatgaaaaactgcgtaagaaccactatcacggcctgccgttcaaggtaaccaactactttgaatttatcgcccgcgaagtgcgcgagctgatggcttcgcttggcgtgacccgcctggtggatttgattggccgcaccgacctgctgaaagagctggagggcttcaccgctaaacagcagaagctggcgctgtctcgtctactggaaaccgctgaacctcatccgggtaaagcgctgtactgcaccgaaaataacccgccgtttgataacggcgtgctgaatgcgcaactgttgcagcaggcgaaaccgtttgtcgatgcgcgccagagcaaaaccttctggttcgacatccgcaacaccgatcgttccgtcggcgcgtcgctttccggctacatcgcacagacccacggcgatcaggggctggcttccgatccgattaaagcgcacttcagcggtaccgcaggccagagctttggcgtgtggaacgcgggcggcgtagagttatatctgactggcgatgccaacgactatgtcggtaaaggtatggcaggcggtttgatcgccatcagaccaccggtaggttccgccttcctcagccataaagccagcattatcggcaacacctgcctgtatggagccaccggtggccgtctgtacgcggcgggccgcgcgggcgaacgtttcggcgtgcgtaactccggggcgattaccgtagtagagggcatcggcgacaacggctgtgaatacatgaccggcggcatcgtctgcgtgctgggtaaaaccggcgttaacttcggcgcggggatgaccggcggcttcgcctatgtgctggacgaagatggcgaattccgtaaacgcgtgaacccggaactggtagaagtactggacgttgattcgctggctatccacgaagagcatctgcgcggcctgatcaccgagcacgtgcagcatactggttcgcaacgcggcgaagagatcctgtccaggtggtcaagcttctcaacccaattcgcgttagttaagcccaagtccagcgatgtcaaagccctgttgggccaccgtagtcgtagtgcggcagaattgcgcgtgcaggcgcagtaa

SEQ ID NO: 369079 - DNA, 1419 bp, Salmonella enterica
atgagccagaatgtttatcaatttatcgacctgcagcgcgttgatccgccgaagaaaccgctgaagctccgtaagatcgagtttgttgaaatctacgaaccgttttctgaaggtcaggcgaaagcccaggcggatcgctgtttgtcctgcgggaacccctactgcgagtggaaatgtccggtacataactacatcccgaactggctgaaactggctaacgaagggcgtatttttgaggcggctgagctatcgcaccagaccaacaccctgccggaagtgtgtggccgcgtctgcccgcaggaccgcctgtgcgaaggctcctgtacgctgcacgatgagttcggcgcagtgaccatcggtaacattgagcgctatatcaacgataaagcgtttgagatgggctggcgcccggatatgaccggcgtacgccagacggacaaacgggtagcgataatcggcgcaggtccggcagggctggcgtgcgccgacgtgctgacccgcaacggcgtgaaggcggtggtctttgatcgccatccggaaatcggtggtctgctgaccttcggtatcccggccttcaagctggagaaagaagtcatgacccgccgccgtgagatcttcaccggcatgggtattgagttcaaacttaataccgaagtgggtcgtgatgtacagcttgaagatctgctgaaagattacgatgcggtattccttggcgtcggcacctatcagtcgatgcgcggcgggctggaaaatgaagatgcggacggggttttcgacgctctgccgttcctgatcgccaatacgaagcagatcatggggtttggcgaaaccagcgacgaaccatatgtcagcatggaaggcaaacgcgtggtggtgctgggcggcggcgataccgcaatggactgcgtacgtacctccattcgtcagggcgcaacgcacgtaacctgtgcttatcgtcgtgatgaagagaacatgccgggctccagacgcgaagtgaagaacgcgcgcgaggaaggtgtcgaatttcagtttaacgttcaaccgctgggcattgaagtcaatgccaacggcaaagtgagcggcgtaaaaatggtgcgcactgaaatgggcgaaccggatgccaaaggccgtcggcgggcagagatcgtcgccggttccgagcatgtggttccggctgatgcggtggtgatggcgtttggttttcgtccacacagcatggaatggctggcgaaacacagcgtggaactggactcgcagggacgaattatcgcgccggaacgcagcgataatgctttccagaccagcaacccgaaaatcttcgccggtggcgacatcgtgcgcggttccgatctggtggtgacggcgattgccgaaggccgtaaagcggctgacgggattatgaactacctcgaagtataa

SEQ ID NO: 369080 - DNA, 1104 bp, Salmonella enterica
atgacgaatccaactttagtgccacagtctgatgaatatcagcaaattcatgacggtattattcgtctggtcgatacggcacgtaccgagaccgtgcgcagcatcaatgccattatgactgccacctactgggaaattggccgacgcattgtcgaatttgaacagggaggagaagcgcgagcggcctatggtactcagcttatcgaacgattatcggtagatttaagtcagcgctataagcgcggtttttccaccagaaacctatggcaaattcgtacattttatctttgttttcaacacattgaaattccgcagacactgtctgcggaattttcaaatctcataccgctcgccaaaacattccctcttccctggtcagcgtatgtccgcctcttgtcggtaaaaaatcccgatgcccgcactttttacgagaaagagacgctacgtaacggctggtcagttaggcagctcgatcggcaaatcgccactcagttttacgaacgaacgctactgtcccacgacaaatccgccatgttgcagcagcctgcacccgccgagccaaacgttttgccggagcaagccatacgcgacccgttcattctggaatttcttaacctgaaggacgagtattccgaatcagatctcgaagacgcgctgctcagccacctgatggactttatgctggagctcggtaacgattttgcttttgttggccgccaacgccgactacgcatagacgatagctggttccgcgtcgatctgctgttcttccatcgtcgcttgcgctgcctgttgctcgttgacctgaaagtaggcaaattcggttatgcggatgccgggcagatgaatatgtacctgaactatgccaaagagcactggacaatgcccggagaaaacccgccagtcggcctggttttgtgcgcagggaaaggcgcgggggaagcgcattacgcgctgactggcctgccaaacaccatcatggcgagcgagtacaaagtgcagttgcccgacgaaaaattactcacagacgaacttattcgttcgcaaaccatgctggaaactcaactcacacgcggtggttcactgacaacggagaaaaactaa

SEQ ID NO: 369081 - DNA, 1254 bp, Salmonella enterica
gtgtcgcaggacaacaattatagccagggccccgtccctctggcggcgcggaagggcgtgattccactgacgtttgtcatgttgggtttaacgtttttttccgccagtatgtggaccggagggacactcggcaccggtcttacctatcacgatttcttcctcgcagttctcttcggtaatctcctcctcggtatctacactgcatttcttggttacatcggcgcaaaaaccggactctccacccacctccttgcacgttactcctttggcgttaaaggatcatggcttccctcgctgctgctaggcggcacacaggtaggctggtttggcgttggcgtagcgatgttcgctattccggtcagtaaagcgacgggcattgatgccaatattctgattgccatttcgggtctactgatgaccctgaccatttttttcggcatctcggcgttgaccattttgtctatcattgccgtacccgcgatcgttatactgggcagctactccgtctggctggcggtcagcggcgtgggtgggctggagcatttaaaaacgatagtgccgcagacgccgctggatttttccagcgcgctggcgctggtggtgggctcgtttgtcagcgccggtacattgaccgccgacttcgtccgcttcgggcgtcatgccaaaagcgccgtactgattgcgatggtcgcttttttcctcggcaactcgctgatgtttatctttggcgcggcaggcgctgccgccgtcggtcaggcggatatctctgacgtgatgatagcgcaggggctgctgctgcccgcgattgtggtgcttggcctgaatatctggaccaccaacgataacgcgctgtacgcatcgggtctgggcttcgccaatattaccggtctttccagccgtacgctgtcggtggtgaacgggattatcggtaccgtgtgcgcgctgtggctttacaataattttgtcggctggctgacgttcctgtcatctgccatcccaccgattggcggagtgattattgccgactatctgttgaaccgccgccgctatgccgacttcaacaccgtgcgctttattcccgttaactggattgctattctttccgtcgcgctgggcatcgccgccggacattatgttccgggtattgtgcccgtcaacgccgtactcggcggcgtcttcagctatatcctgctgaatccacttttcaaccgcagccttgctaaatcaccagaggtcagccatgcagaacaataa

SEQ ID NO: 369082 - DNA, 1281 bp, Salmonella enterica
atgcagaacaataacatcactattcgtcagacgcgtctgcagggacacgaaggattatggcagattacgattgaaaacgggcgctttagccggattgagcctcaggaagccgcatcgttaccgcagggcgaagtgcttgatgccgaaggcggcctggctattccaccgtttgttgagccacatatccacctggataccacgcaaacggcgggtgaaccgagctggaaccagtccggcacactgtttgaagggattgagcgctgggcagaacgtaaagcaatgctcacgcatgaagatgtgaaagcgcgcgcgatgcagaccctgaaatggcagatggctaacggcatccagtacgttcgtactcacgttgacgtttcagatcctacgctcaccgcgctgaaagccatgctggaagtgaagcaagaggttgcgccgtgggtagacctgcaaattgtcgcctttccgcaagaaggtattctgtcttatcccaacggtgaagcgctgttagaggaagccgtgcgtttgggcgttgacgttattggcgccattccgcactttgaatttacgcgtgaatatggcgttgaatcgctgcacaaaaccttcgccctggcgcaaaaatacgatcgcttgatcgatgtgcactgcgacgaaattgatgacgagcagtctcgctttgtcgaaacggtcgcggcgctggcgcatcgcgatggcatgggggcgcgcgtgaccgccagccacaccacggctatgcactcgtacaacggcgcgtatgcgtcacgcctgttccgtctgttgaaaatgtcggggattaacttcgtcgccaacccgctggtgaatattcatctgcaaggacggtttgacacttacccgaaacgtcgtggcgtcacgcgagtgaaagagatgctggaagcggggatcaacgtctgctttggccatgatgacgtcttcgatccgtggtatccattaggcacggcaaatatgctgcaggtgctgcatatggggttacacgtttgccagttgatggggtatgggcaaatcaacgacgggttaaatctgatcactacccacagcgcaaaaaccctgcatttacaggactacggtctgagcgtcggcaatgccgcgaatctggttatcttacccgctgagaatggattcgatgcggtacgtcgccagacgcctgcgcgttactcgattcgccacgggcgagtgattgccgagacggtgccgagccagacgacgctgcacctgacccagccggaagccgtgacgtttaagcgttaa

SEQ ID NO: 369083 - DNA, 468 bp, Salmonella enterica
atgatgatgggggaagtacagtcgttgccttcttgcgggttgcatccgcgattgttggatgccttgactctcgcgctggcggcaaggccgcaggagaaagcgccggggcgctatgaattgcagggcgacaatgtctttatgaatgtaatgcagttaacgacgcaaatgccggccgagaagaaagcggaattgcatgaacaatacattgatattcagctactactaaccggcgtcgagcgtattgcgtttgggatgtccggtgccgctcgccagtgcgaggagatgcacgttgaagaggattaccagctttgtagtcaaattgtcgacgagcagactattacgctgcaagcggggatgtttgctgtgtttatgccaggagaaccgcataaaccgggatgtgcagtgggtgagccggatgacatcaagaaagtggtagtgaaagtacgcgccagtctgctggcggcctga

SEQ ID NO: 369084 - DNA, 876 bp, Salmonella enterica
atgactacgttagcaatcgatattggcggtactaaacttgccgccgcgctcatcgacaaaaacttgcgcattagccagcgtcgcgagctaccgacccccgcgagcaaaacgccggatgcgttacgtgaagcattaaaggcgctggttgaaccactacgggcagaggcgcgtcaggtagcgatagcttctaccgggatcattcaggaagggatgctgctggcgctaaacccccataatctgggcggattgctacactttccgttagtacaaacactggaaacgatcgctggcctgccgacgctggcggtgaacgacgcgcaggcggcggcctgggcggagtatcacgcgctccctgatgatatccgcgatatggtatttatcaccgtttcaaccggcgttggcggcggcgttgtctgcgacggcaagctccttaccggaaaaggcggtctggccgggcacctgggacacaccctggcggacccacacgggcccgtatgcggctgtggacgcgttggctgcgtagaggccatcgcctctggacgagggatggccgcggcggcgcgggacgatctggcgggatgcgacgccaaaaccctatttattcgcgctggcgaaggtcatcagcaggcgcgacatctggtaagccaatccgcgcaggtaatagcgcgaatgatcgccgatgtgaaagcgactaccgactgccagtgtgtggtcattggcggcagcgtagggttagctgagggatacctggagcaggttcgcgcgtttttgatgcaagagcctgcgccttatcacgtggcgctgagcgccgctcgctatcggcatgacgcaggattattaggcgctgcgttgttagctcaaggagacacattatga

SEQ ID NO: 369085 - DNA, 690 bp, Salmonella enterica
atgtcgttacttgaacaactggataaaaatattgccgcttctggcggcctgattgtctcctgccagcccgttccgggcagtccgctggataagccggagattgtagcggcaatggcgttggcagcggaacaggcgggcgcggttgcggtgcgtattgaaggcatagacaacctgcgtatgacccgctcgctcgtttcggtacccattatcggcattatcaaacgcgatctggacgactctccagtgcgcattaccccttttctcgacgatgtagatgcgctggcacaggccggagcagctattatcgccgttgatggaaccgctcggcaacggccggtagccgttgaggcgttgttggcgcgcattcatcaccaccatctactggcgatggccgactgctcatccgtggacgatggtctcgcctgtcaacggttgggcgcggacattatcggcacgacaatgtccggctacaccacccccgatacgccggaggaacccgatctgcccttagtcaaagcgttgcatgacgccggatgccgggtaatagccgaagggcgctataactcgccagcactggcagcggaggcgatccgctatggcgcatgggcggtgacggtggggtccgccattacccgtctggaacatatctgtggatggtataacgacgcattaaaaaaggcggcgtcatga

SEQ ID NO: 369086 - DNA, 1491 bp, Salmonella enterica
atgagtacttctacccagaacatcccgtggtatcgccatctcaaccgggcgcagtggcgggcattttccgctgcctggctgggatatctgcttgatggttttgattttgtgttgattgctcttgtactgactgaggtacaaagcgaatttgggctgacgacggtacaggcggcaagcctgatttctgcggcttttatctctcgctggttcggcgggttattactgggcgcgatgggcgatcgctatgggcgtcgtctggcgatggtcagcagcatcattctgttttcggtgggaaccctggcatgcgggtttgcgcccggttacaccaccatgttcatcgcccgactggtgattggtatgggcatggcgggcgaatatggttccagcgcgacctatgtgattgaaagctggccaaaacatttacgcaataaagccagcggttttctgatttccggcttctccgtcggcgcggtcgttgccgcgcaggtgtacagcctggtggtgcctgtctggggctggcgcgcgctgtttttcattggcattttgccaattatcttcgctctctggctgcggaaaaacattccggaagcggaagactggaaagagaaacacgcgggtaaagcgccggtacgcacgatggtcgacattctttatcggggcgagcatcgcatcatcaacattttaatgactttcgccgccgccgctgcgctgtggttctgttttgccggtaacctacaaaatgctgcgattgtggcggggctgggactactgtgcgcggttatctttatcagctttatggtgcagagcagcggtaaacgctggcccactggcgtcatgctgatgctggtggtactgtttgctttcctctattcctggccgattcaggcgctattacccacttatctgaaaaccgagctggcctacgatccgcatacggtggcgaatgtcctgttctttagcggatttggcgcggcggttggttgctgcgtaggcggttttcttggcgactggctgggaacgcgtaaagcatatgtctgtagcctgctggcctcgcaaatcctcattattccggtctttgcgattggcggcacaaacgtctgggttctgggtctgctactgtttttccaacagatgttggggcaggggattgccgggattctaccgaaactgatcggcggttacttcgataccgatcagcgcgcggcggggctgggctttacttataacgtcggcgcgctcggcggcgcgctggcgccgatcctgggagcgctgatcgctcaacgtctggatttgggcactgcgctggcatcgctctctttcagcctgacgtttgtcgtgatcctgcttattgggcttgatatgccgtctcgcgtacagcgttggctacgtccggaagcgttacgcacccacgatgctattgacgacaaaccgttcagcggagccgtaccgcttggcagtggtaaaggtgcctttgtaaaaacgaaaagttaa

SEQ ID NO: 369087 - DNA, 894 bp, Salmonella enterica
atggcaaaagcattgcaaggcgtaatggcggcgttgttgaccccatttgatcatcagcagcaactggatagcgaaagcctgcgccgtctggtgcgttttaacattgggcagggtatcgacgggctgtacgttggcggttccaccggggaagcattcgtacagagccttgctgaaagagagcaggtactggagattgtcgccgaagaggcgaagggaaaaatcacgttgatcgcccatgtcgggacagtaagcaccgcagaaagccagcagcttgccagcgccgcaaagcgttacggttttgatgcggtctctgcggtgacgcctttttattaccctttcagttttgaagagcactgtgaccattatcgggcaatcattgattccgcagatggattgccgatggtggtatacaacattccggcgttaagcggcgtaaaacttaccctcgatcagatcaatacgctggtgacattaccgggcgtgagcgcgctgaagcaaacctccggcgatctcttccagatggagcagatccgccgcgcgcatccggatctggtgctgtacaacggttatgacgaaatcttcgcttccggtctgctggcgggcgcggacggcggtatcggcagcacatacaacattatgggctggcgttatcaggggattgttcaggcattacgtgagggcgatgtggcgaaagcgcagcgcctgcaaaccgagtgcaataaggttattgatttactgattaaaaccggcgtattccgcggcctgaaaacggtcctgcattatatggacgtgctatcggtgccgctgtgtcgtaaaccgtttgcgcctgttgatgaaaaatacctgccggcgctcaaggcgctggctcaacaactgatggaagaaaaggcgtaa

SEQ ID NO: 369088 - DNA, 783 bp, Salmonella enterica
atgaacgcatttgattcgcaagcagaagattcaccgacatccctcgggcgtagtttgcgccgccgcccgctggcgcgtaaaaaactgtctgaaatggttgaggaagagctggagcagatgatccgccgtcatgagtttggcgagggagaacagctaccgtctgaacgtgaattaatggccttcttcaatgtgggacgtccctccgtgcgtgaagcgttagctgcgctgaagcgtaaaggtctggtgcaaatcaataacggcgaacgcgcccgcgtctcgcgcccctctgctgataccatcatcagcgaactgtcgggtatggcgaaagattttcttactcatcctggcggcatcgctcactttgaacagctacggcttttctttgaatccagcctggtacgctatgcggcggaacatgccaccgacgagcagatcgcgttgttaacgaaagcgctggaaattaatagccagtcgctggatgacaacgcgctgtttattcgttcggatgtcgagtttcaccgggtgttggctgaaattcccggcaatccgatctttatggctattcatgttgctctgctggactggctaatcgccgctcgcccaagcgttcccgatcgtgagctgcatgaacataataacgtgagttatcaacagcatattgtgattgttgatgccattcgccagcgagatcccgataaagcggatcgcgctctgcaaacccacctcaatagcgtttccgctacctggcacgcactcggtaaaaaaagtcaaaaaatgcggtag
